United States Patent Application Publication US 2023/0026259 A1 - sequence listing, part 9

SEQ ID NO: 38840 - protein, 71 aa, Homo sapiens
  Payload ID: 7768
  Gene Symbol: HOXC6
  Gene Name: homeobox C6
  ENSP ID: ENSP00000423898
MLSNCRQNTLGHNTQTSIAQDFSSEQGRTAPQDQKASIQIYPWMQRMNSHSVCFVPGSLGVGYGADRRRGR

SEQ ID NO: 38841 - protein, 51 aa, Homo sapiens
  Payload ID: 7768
  Gene Symbol: HOXC6
  Gene Name: homeobox C6
  ENSP ID: ENSP00000424124
MLSNCRQNTLGHNTQTSIAQDFSSEQGRTAPQDQKASIQIYPWMQRMNSHS

SEQ ID NO: 38842 - protein, 242 aa, Homo sapiens
  Payload ID: 7769
  Gene Symbol: HOXC8
  Gene Name: homeobox C8
  Uniprot ID: P31273
  ENSP ID: ENSP00000040584
MSSYFVNPLFSKYKAGESLEPAYYDCRFPQSVGRSHALVYGPGGSAPGFQHASHHVQDFFHHGTSGISNSGYQQNPCSLSCHGDASKFYGYEALPRQSLYGAQQEASVVQYPDCKSSANTNSSEGQGHLNQNSSPSLMFPWMRPHAPGRRSGRQTYSRYQTLELEKEFLFNPYLTRKRRIEVSHALGLTERQVKIWFQNRRMKWKKENNKDKLPGARDEEKVEEEGNEEEEKEEEEKEENKD

SEQ ID NO: 38843 - protein, 260 aa, Homo sapiens
  Payload ID: 7770
  Gene Symbol: HOXC9
  Gene Name: homeobox C9
  Uniprot ID: P31274
  ENSP ID: ENSP00000302836
MSATGPISNYYVDSLISHDNEDLLASRFPATGAHPAAARPSGLVPDCSDFPSCSFAPKPAVFSTSWAPVPSQSSVVYHPYGPQPHLGADTRYMRTWLEPLSGAVSFPSFPAGGRHYALKPDAYPGRRADCGPGEGRSYPDYMYGSPGELRDRAPQTLPSPEADALAGSKHKEEKADLDPSNPVANWIHARSTRKKRCPYTKYQTLELEKEFLFNMYLTRDRRYEVARVLNLTERQVKIWFQNRRMKMKKMNKEKTDKEQS

SEQ ID NO: 38844 - protein, 260 aa, Homo sapiens; identical to SEQ ID NO: 38843
  Payload ID: 7770
  Gene Symbol: HOXC9
  Gene Name: homeobox C9
  Uniprot ID: P31274
  ENSP ID: ENSP00000423861

SEQ ID NO: 38845 - protein, 420 aa, Homo sapiens
  Payload ID: 7771
  Gene Symbol: HMBOX1
  Gene Name: homeobox containing 1
  Uniprot ID: Q6NT76
  ENSP ID: ENSP00000287701
MLSSFPVVLLETMSHYTDEPRFTIEQIDLLQRLRRTGMTKHEILHALETLDRLDQEHSDKFGRRSSYGGSSYGNSTNNVPASSSTATASTQTQHSGMSPSPSNSYDTSPQPCTTNQNGRENNERLSTSNGKMSPTRYHANSMGQRSYSFEASEEDLDVDDKVEELMRRDSSVIKEEIKAFLANRRISQAVVAQVTGISQSRISHWLLQQGSDLSEQKKRAFYRWYQLEKTNPGATLSMRPAPIPIEDPEWRQTPPPVSATSGTFRLRRGSRFTWRKECLAVMESYFNENQYPDEAKREEIANACNAVIQKPGKKLSDLERVTSLKVYNWFANRRKEIKRRANIEAAILESHGIDVQSPGGHSNSDDVDGNDYSEQDDSTSHSDHQDPISLAVEMAAVNHTILALARQGANEIKTEALDDD

SEQ ID NO: 38846 - protein, 420 aa, Homo sapiens; identical to SEQ ID NO: 38845
  Payload ID: 7771
  Gene Symbol: HMBOX1
  Gene Name: homeobox containing 1
  Uniprot ID: Q6NT76
  ENSP ID: ENSP00000380516

SEQ ID NO: 38847 - protein, 118 aa, Homo sapiens
  Payload ID: 7771
  Gene Symbol: HMBOX1
  Gene Name: homeobox containing 1
  ENSP ID: ENSP00000429767
MLSSFPVVLLETMSHYTDEPRFTIEQIDLLQRLRRTGMTKHEILHALETLDRLDQEHSDKFGRRSSYGGSSYGNSTNNVPASSSTATASTQTQHSGMSPSPSNSYDTSPQPCTTNQNG

SEQ ID NO: 38848 - protein, 45 aa, Homo sapiens
  Payload ID: 7771
  Gene Symbol: HMBOX1
  Gene Name: homeobox containing 1
  ENSP ID: ENSP00000429854
DDSTSHSDHQDPISLAVEMAAVNHTILALARQGANEIKTEALDDD

SEQ ID NO: 38849 - protein, 386 aa, Homo sapiens
  Payload ID: 7771
  Gene Symbol: HMBOX1
  Gene Name: homeobox containing 1
  ENSP ID: ENSP00000430059
MLSSFPVVLLETMSHYTDEPRFTIEQIDLLQRLRRTGMTKHEILHALETLDRLDQEHSDKFGRRSSYGGSSYGNSTNNVPASSSTATASTQTQHSGMSPSPSNSYDTSPQPCTTNQNGRENNERLSTSNGKMSPTRYHANSMGQRSYSFEASEEDLDVDDKVEELMRRDSSVIKEEIKAFLANRRISQAVVAQVTGISQSRISHWLLQQGSDLSEQKKRAFYRWYQLEKTNPGATLSMRPAPIPIEDPEWRQTPPPVSATSGTFRLRRGSRFTWRKECLAVMESYFNENQYPDEAKREEIANACNAVIQKPGKKLSDLERVTSLKVYNWFANRRKEIKRRANIAAILESHGIDVQSPGGHSNSDDVDGNDYSEQTDRMQAEVVAQE

SEQ ID NO: 38850 - protein, 443 aa, Homo sapiens
  Payload ID: 7771
  Gene Symbol: HMBOX1
  Gene Name: homeobox containing 1
  Uniprot ID: Q6NT76
  ENSP ID: ENSP00000430110
MLSSFPVVLLETMSHYTDEPRFTIEQIDLLQRLRRTGMTKHEILHALETLDRLDQEHSDKFGRRSSYGGSSYGNSTNNVPASSSTATASTQTQHSGMSPSPSNSYDTSPQPCTTNQNGRENNERLSTSNGKMSPTRYHANSMGQRSYSFEASEEDLDVDDKVEELMRRDSSVIKEEIKAFLANRRISQAVVAQVTGISQSRISHWLLQQGSDLSEQKKRAFYRWYQLEKTNPGATLSMRPAPIPIEDPEWRQTPPPVSATSGTFRLRRGSRFTWRKECLAVMESYFNENQYPDEAKREEIANACNAVIQKPGKKLSDLERVTSLKVYNWFANRRKEIKRRANIAAILESHGIDVQSPGGHSNSDDVDGNDYSEQDTWQVRNGEEEEGRSSEGGREAEKDDSTSHSDHQDPISLAVEMAAVNHTILALARQGANEIKTEALDDD

SEQ ID NO: 38851 - protein, 304 aa, Homo sapiens
  Payload ID: 7771
  Gene Symbol: HMBOX1
  Gene Name: homeobox containing 1
  Uniprot ID: Q6NT76
  ENSP ID: ENSP00000430238
MLSSFPVVLLETMSHYTDEPRFTIEQIDLLQRLRRTGMTKHEILHALETLDRLDQEHSDKFGRRSSYGGSSYGNSTNNVPASSSTATASTQTQHSGMSPSPSNSYDTSPQPCTTNQNGRENNERLSTSNGKMSPTRYHANSMGQRSYSFEASEEDLDVDDKVEELMRRDSSVIKEEIKAFLANRRISQAVVAQVTGISQSRISHWLLQQGSDLSEQKKRAFYRWYQLEKTNPGATLSMRPAPIPIEDPEWRQTPPPVSATSGTFRLRRGSRFTWRKECLAVMERNTWSPERRMEENKWKLLSAG

SEQ ID NO: 38852 - protein, 396 aa, Homo sapiens
  Payload ID: 7771
  Gene Symbol: HMBOX1
  Gene Name: homeobox containing 1
  ENSP ID: ENSP00000452827
MLSSFPVVLLETMSHYTDEPRFTIEQIDLLQRLRRTGMTKHEILHALETLDRLDQEHSDKFGRRSSYGGSSYGNSTNNVPASSSTATASTQTQHSGMSPSPSNSYDTSPQPCTTNQNGRENNERLSTSNGKMSPTRYHANSMGQRSYSFEASEEDLDVDDKVEELMRRDSSVIKEEIKAFLANRRISQAVVAQVTGISQSRISHWLLQQGSDLSEQKKRAFYRWYQLEKTNPGATLSMRPAPIPIEDPEWRQTPPPVSATSGTFRLRRGSRFTWRKECLAVMESYFNENQYPDEAKREEIANACNAVIQKPGKKLSDLERVTSLKVYNWFANRRKEIKRRANIEAAILESHGIDVQSPGGHSNSDDVDGNDYSEQVSPCAAGRGSWCLSRGYSGTA

SEQ ID NO: 38853 - protein, 364 aa, Homo sapiens
  Payload ID: 7771
  Gene Symbol: HMBOX1
  Gene Name: homeobox containing 1
  ENSP ID: ENSP00000453185
MLSSFPVVLLETMSHYTDEPRFTIEQIDLLQRLRRTGMTKHEILHALETLDRLDQEHSDKFGRRSSYGGSSYGNSTNNVPASSSTATASTQTQHSGMSPSPSNSYDTSPQPCTTNQNGRENNERLSTSNGKMSPTRYHANSMGQRSYSFEASEEDLDVDDKVEELMRRDSSVIKEEIKAFLANRRISQAVVAQVTGISQSRISHWLLQQGSDLSEQKKRAFYRWYQLEKTNPGATLSMRPAPIPIEDPEWRQTPPPVSATSGTFRLRRGSRFTWRKECLAVMESYFNENQYPDEAKREEIANACNAVIQKPEAAILESHGIDVQSPGGHSNSDDVDGNDYSEQDTWQVRNGEEEEGRSSEGGRE

SEQ ID NO: 38854 - protein, 405 aa, Homo sapiens
  Payload ID: 7771
  Gene Symbol: HMBOX1
  Gene Name: homeobox containing 1
  Uniprot ID: Q6NT76
  ENSP ID: ENSP00000453211
MLSSFPVVLLETMSHYTDEPRFTIEQIDLLQRLRRTGMTKHEILHALETLDRLDQEHSDKFGRRSSYGGSSYGNSTNNVPASSSTATASTQTQHSGMSPSPSNSYDTSPQPCTTNQNGRENNERLSTSNGKMSPTRYHANSMGQRSYSFEASEEDLDVDDKVEELMRRDSSVIKEEIKAFLANRRISQAVVAQVTGISQSRISHWLLQQGSDLSEQKKRAFYRWYQLEKTNPGATLSMRPAPIPIEDPEWRQTPPPVSATSGTFRLRRGSRFTWRKECLAVMESYFNENQYPDEAKREEIANACNAVIQKPGKKLSDLERVTSLKVYNWFANRRKEIKRRANIAAILESHGIDVQSPGGHSNSDDVDGNDYSEQDTWQVRNGEEEEGRSSEGGREAEKVEEERRI

SEQ ID NO: 38855 - protein, 386 aa, Homo sapiens; identical to SEQ ID NO: 38849
  Payload ID: 7771
  Gene Symbol: HMBOX1
  Gene Name: homeobox containing 1
  ENSP ID: ENSP00000475196

SEQ ID NO: 38856 - protein, 328 aa, Homo sapiens
  Payload ID: 7772
  Gene Symbol: HOXD1
  Gene Name: homeobox D1
  Uniprot ID: Q9GZZ0
  ENSP ID: ENSP00000328598
MSSYLEYVSCSSSGGVGGDVLSLAPKFCRSDARPVALQPAFPLGNGDGAFVSCLPLAAARPSPSPPAAPARPSVPPPAAPQYAQCTLEGAYEPGAAPAAAAGGADYGFLGSGPAYDFPGVLGRAADDGGSHVHYATSAVFSGGGSFLLSGQVDYAAFGEPGPFPACLKASADGHPGAFQTASPAPGTYPKSVSPASGLPAAFSTFEWMKVKRNASKKGKLAEYGAASPSSAIRTNFSTKQLTELEKEFHFNKYLTRARRIEIANCLHLNDTQVKIWFQNRRMKQKKREREGLLATAIPVAPLQLPLSGTTPTKFIKNPGSPSQSQEPS

SEQ ID NO: 38857 - protein, 340 aa, Homo sapiens
  Payload ID: 7773
  Gene Symbol: HOXD10
  Gene Name: homeobox D10
  Uniprot ID: P28358
  ENSP ID: ENSP00000249501
MSFPNSSPAANTFLVDSLISACRSDSFYSSSASMYMPPPSADMGTYGMQTCGLLPSLAKREVNHQNMGMNVHPYIPQVDSWTDPNRSCRIEQPVTQQVPTCSFTTNIKEESNCCMYSDKRNKLISAEVPSYQRLVPESCPVENPEVPVPGYFRLSQTYATGKTQEYNNSPEGSSTVMLQLNPRGAAKPQLSAAQLQMEKKMNEPVSGQEPTKVSQVESPEAKGGLPEERSCLAEVSVSSPEVQEKESKEEIKSDTPTSNWLTAKSGRKKRCPYTKHQTLELEKEFLFNMYLTRERRLEISKSVNLTDRQVKIWFQNRRMKLKKMSRENRIRELTANLTFS

SEQ ID NO: 38858 - protein, 338 aa, Homo sapiens
  Payload ID: 7774
  Gene Symbol: HOXD11
  Gene Name: homeobox D11
  Uniprot ID: P31277
  ENSP ID: ENSP00000249504
MNDFDECGQSAASMYLPGCAYYVAPSDFASKPSFLSQPSSCQMTFPYSSNLAPHVQPVREVAFRDYGLERAKWPYRGGGGGGSAGGGSSGGGPGGGGGGAGGYAPYYAAAAAAAAAAAAAEEAAMQRELLPPAGRRPDVLFKAPEPVCAAPGPPHGPAGAASNFYSAVGRNGILPQGFDQFYEAAPGPPFAGPQPPPPPAPPQPEGAADKGDPRTGAGGGGGSPCTKATPGSEPKGAAEGSGGDGEGPPGEAGAEKSSSAVAPQRSRKKRCPYTKYQIRELEREFFFNVYINKEKRLQLSRMLNLTDRQVKIWFQNRRMKEKKLNRDRLQYFTGNPLF

SEQ ID NO: 38859 - protein, 161 aa, Homo sapiens
  Payload ID: 7774
  Gene Symbol: HOXD11
  Gene Name: homeobox D11
  ENSP ID: ENSP00000480304
MYLPGCAYYVAPSDFASKPSFLSQPSSCQMTFPYSSNLDRGGGGGSPCTKATPGSEPKGAAEGSGGDGEGPPGEAGAEKSSSAVAPQRSRKKRCPYTKYQIRELEREFFFNVYINKEKRLQLSRMLNLTDRQVKIWFQNRRMKEKKLNRDRLQYFTGNPLF

SEQ ID NO: 38860 - protein, 246 aa, Homo sapiens
  Payload ID: 7775
  Gene Symbol: HOXD12
  Gene Name: homeobox D12
  ENSP ID: ENSP00000385132
MCERSLYRAGYVGSLLNLQSPDSFYFSNLRPNGGQLAALPPISYPRGALPWAATPASCAPAQPAGATAFGGFSQPYLAGSGPLGLQPPTAKDGPEEQAKFYAPEAAAGPEERGRTRPSFAPESSLAPAVAALKAAKYDYAGVGRATPGSTTLLQGAPCAPGFKDDTKGPLNLNMTVQAAGVASCLRPSLPDGKRCPCSPGRPAVGGGPGEGPQEAETLHEAADCGVGERIPRQRIHQQAETQGIVQ

SEQ ID NO: 38861 - protein, 270 aa, Homo sapiens
  Payload ID: 7775
  Gene Symbol: HOXD12
  Gene Name: homeobox D12
  Uniprot ID: P35452
  ENSP ID: ENSP00000385586
MCERSLYRAGYVGSLLNLQSPDSFYFSNLRPNGGQLAALPPISYPRGALPWAATPASCAPAQPAGATAFGGFSQPYLAGSGPLGLQPPTAKDGPEEQAKFYAPEAAAGPEERGRTRPSFAPESSLAPAVAALKAAKYDYAGVGRATPGSTTLLQGAPCAPGFKDDTKGPLNLNMTVQAAGVASCLRPSLPDGLPWGAAPGRARKKRKPYTKQQIAELENEFLVNEFINRQKRKELSNRLNLSDQQVKIWFQNRRMKKKRVVLREQALALY

SEQ ID NO: 38862 - protein, 343 aa, Homo sapiens
  Payload ID: 7776
  Gene Symbol: HOXD13
  Gene Name: homeobox D13
  Uniprot ID: P35453
  ENSP ID: ENSP00000376322
MSRAGSWDMDGLRADGGGAGGAPASSSSSSVAAAAASGQCRGFLSAPVFAGTHSGRAAAAAAAAAAAAAAASGFAYPGTSERTGSSSSSSSSAVVAARPEAPPAKECPAPTPAAAAAAPPSAPALGYGYHFGNGYYSCRMSHGVGLQQNALKSSPHASLGGFPVEKYMDVSGLASSSVPANEVPARAKEVSFYQGYTSPYQHVPGYIDMVSTFGSGEPRHEAYISMEGYQSWTLANGWNSQVYCTKDQPQGSHFWKSSFPGDVALNQPDMCVYRRGRKKRVPYTKLQLKELENEYAINKFINKDKRRRISAATNLSERQVTIWFQNRRVKDKKIVSKLKDTVS

SEQ ID NO: 38863 - protein, 432 aa, Homo sapiens
  Payload ID: 7777
  Gene Symbol: HOXD3
  Gene Name: homeobox D3
  Uniprot ID: P31249
  ENSP ID: ENSP00000249440
MLFEQGQQALELPECTMQKAAYYENPGLFGGYGYSKTTDTYGYSTPHQPYPPPAAASSLDTDYPGSACSIQSSAPLRAPAHKGAELNGSCMRPGTGNSQGGGGGSQPPGLNSEQQPPQPPPPPPTLPPSSPTNPGGGVPAKKPKGGPNASSSSATISKQIFPWMKESRQNSKQKNSCATAGESCEDKSPPGPASKRVRTAYTSAQLVELEKEFHFNRYLCRPRRVEMANLLNLTERQIKIWFQNRRMKYKKDQKAKGILHSPASQSPERSPPLGGAAGHVAYSGQLPPVPGLAYDAPSPPAFAKSQPNMYGLAAYTAPLSSCLPQQKRYAAPEFEPHPMASNGGGFASANLQGSPVYVGGNFVESMAPASGPVFNLGHLSHPSSASVDYSCAAQIPGNHHHGPCDPHPTYTDLSAHHSSQGRLPEAPKLTHL

SEQ ID NO: 38864 - protein, 432 aa, Homo sapiens; identical to SEQ ID NO: 38863
  Payload ID: 7777
  Gene Symbol: HOXD3
  Gene Name: homeobox D3
  Uniprot ID: P31249
  ENSP ID: ENSP00000386498

SEQ ID NO: 38865 - protein, 100 aa, Homo sapiens
  Payload ID: 7777
  Gene Symbol: HOXD3
  Gene Name: homeobox D3
  ENSP ID: ENSP00000392615
MLFEQGQQALELPECTMQKAAYYENPGLFGGYGYSKTTDTYGYSTPHQPYPPPAAASSLDTDYPGSACSIQSSAPLRAPAHKGAELNGSCMRPGTGNSQG

SEQ ID NO: 38866 - protein, 255 aa, Homo sapiens
  Payload ID: 7778
  Gene Symbol: HOXD4
  Gene Name: homeobox D4
  Uniprot ID: P09016
  ENSP ID: ENSP00000302548
MVMSSYMVNSKYVDPKFPPCEEYLQGGYLGEQGADYYGGGAQGADFQPPGLYPRPDFGEQPFGGSGPGPGSALPARGHGQEPGGPGGHYAAPGEPCPAPPAPPPAPLPGARAYSQSDPKQPPSGTALKQPAVVYPWMKKVHVNSVNPNYTGGEPKRSRTAYTRQQVLELEKEFHFNRYLTRRRRIEIAHTLCLSERQIKIWFQNRRMKWKKDHKLPNTKGRSSSSSSSSSCSSSVAPSQHLQPMAKDHHTDLTTL

SEQ ID NO: 38867 - protein, 290 aa, Homo sapiens
  Payload ID: 7779
  Gene Symbol: HOXD8
  Gene Name: homeobox D8
  Uniprot ID: P13378
  ENSP ID: ENSP00000315949
MSSYFVNPLYSKYKAAAAAAAAAGEAINPTYYDCHFAPEVGGRHAAAAAALQLYGNSAAGFPHAPPQAHAHPHPSPPPSGTGCGGREGRGQEYFHPGGGSPAAAYQAAPPPPPHPPPPPPPPPCGGIACHGEPAKFYGYDNLQRQPIFTTQQEAELVQYPDCKSSSGNIGEDPDHLNQSSSPSQMFPWMRPQAAPGRRRGRQTYSRFQTLELEKEFLFNPYLTRKRRIEVSHALALTERQVKIWFQNRRMKWKKENNKDKFPVSRQEVKDGETKKEAQELEEDRAEGLTN

SEQ ID NO: 38868 - protein, 106 aa, Homo sapiens
  Payload ID: 7779
  Gene Symbol: HOXD8
  Gene Name: homeobox D8
  ENSP ID: ENSP00000406045
MFPWMRPQAAPGRRRGRQTYSRFQTLELEKEFLFNPYLTRKRRIEVSHALALTERQVKIWFQNRRMKWKKENNKDKFPVSRQEVKDGETKKEAQELEEDRAEGLTN

SEQ ID NO: 38869 - protein, 289 aa, Homo sapiens
  Payload ID: 7779
  Gene Symbol: HOXD8
  Gene Name: homeobox D8
  Uniprot ID: P13378
  ENSP ID: ENSP00000409026
MSSYFVNPLYSKYKAAAAAAAAAGEAINPTYYDCHFAPEVGGRHAAAAAALQLYGNSAAGFPHAPPQAHAHPHPSPPPSGTGCGGREGRGQEYFHPGGGSPAAAYQAAPPPPPHPPPPPPPPPCGGIACHGEPAKFYGYDNLQRQPIFTTQQEAELVQYPDCKSSSGNIGEDPDHLNQSSSPSQMFPWMRPQAPGRRRGRQTYSRFQTLELEKEFLFNPYLTRKRRIEVSHALALTERQVKIWFQNRRMKWKKENNKDKFPVSRQEVKDGETKKEAQELEEDRAEGLTN

SEQ ID NO: 38870 - protein, 186 aa, Homo sapiens
  Payload ID: 7779
  Gene Symbol: HOXD8
  Gene Name: homeobox D8
  ENSP ID: ENSP00000437431
MSSYFVNPLYSKYKAAAAAAAAAGEAINPTYYDCHFAPERQPIFTTQQEAELVQYPDCKSSSGNIGEDPDHLNQSSSPSQMFPWMRPQAAPGRRRGRQTYSRFQTLELEKEFLFNPYLTRKRRIEVSHALALTERQVKIWFQNRRMKWKKENNKDKFPVSRQEVKDGETKKEAQELEEDRAEGLTN

SEQ ID NO: 38871 - protein, 352 aa, Homo sapiens
  Payload ID: 7780
  Gene Symbol: HOXD9
  Gene Name: homeobox D9
  Uniprot ID: P28356
  ENSP ID: ENSP00000249499
MLGGSAGRLKMSSSGTLSNYYVDSLIGHEGDEVFAARFGPPGPGAQGRPAGVADGPAATAAEFASCSFAPRSAVFSASWSAVPSQPPAAAAMSGLYHPYVPPPPLAASASEPGRYVRSWMEPLPGFPGGAGGGGGGGGGGPGRGPSPGPSGPANGRHYGIKPETRAAPAPATAASTTSSSSTSLSSSSKRTECSVARESQGSSGPEFSCNSFLQEKAAAATGGTGPGAGIGAATGTGGSSEPSACSDHPIPGCSLKEEEKQHSQPQQQQLDPNNPAANWIHARSTRKKRCPYTKYQTLELEKEFLFNMYLTRDRRYEVARILNLTERQVKIWFQNRRMKMKKMSKEKCPKGD

SEQ ID NO: 38872 - protein, 341 aa, Homo sapiens
  Payload ID: 7780
  Gene Symbol: HOXD9
  Gene Name: homeobox D9
  ENSP ID: ENSP00000484642
MSSSGTLSNYYVDSLIGHEGDEVFAARFGPPGPGAQGRPAGVADGPAATAAEFASCSFAPRSAVFSASWSAVPSQPPAAAAMSGLYHPYVPPPPLAASASEPGRYVRSWMEPLPGFPGGAGGGGGGGGGGPGRGPSPGPSGPANGRHYGIKPETRAAPAPATAASTTSSSSTSLSSSSKRTECSVARESQGSSGPEFSCNSFLQEKAAGDGGNGPGAGIGAATGTGGSSEPSACSDHPIPGCSLKEEEKQHSQPQQQQLDPNNPAANWIHARSTRKKRCPYTKYQTLELEKEFLFNMYLTRDRRYEVARILNLTERQVKIWFQNRRMKMKKMSKEKCPKGD

SEQ ID NO: 38873 - protein, 836 aa, Homo sapiens
  Payload ID: 7781
  Gene Symbol: HIPK1
  Gene Name: homeodomain interacting protein kinase 1
  Uniprot ID: Q86Z02
  ENSP ID: ENSP00000340956
MWSLGCVIAELFLGWPLYPGASEYDQIRYISQTQGLPAEYLLSAGTKTTRFFNRDPNLGYPLWRLKTPEEHELETGIKSKEARKYIFNCLDDMAQVNMSTDLEGTDMLAEKADRREYIDLLKKMLTIDADKRITPLKTLNHQFVTMTHLLDFPHSNHVKSCFQNMEICKRRVHMYDTVSQIKSPFTTHVAPNTSTNLTMSFSNQLNTVHNQASVLASSSTAAAATLSLANSDVSLLNYQSALYPSSAAPVPGVAQQGVSLQPGTTQICTQTDPFQQTFIVCPPAFQTGLQATTKHSGFPVRMDNAVPIVPQAPAAQPLQIQSGVLTQGSCTPLMVATLHPQVATITPQYAVPFTLSCAAGRPALVEQTAAVLQAWPGGTQQILLPSTWQQLPGVALHNSVQPTAMIPEAMGSGQQLADWRNAHSHGNQYSTIMQQPSLLTNHVTLATAQPLNVGVAHVVRQQQSSSLPSKKNKQSAPVSSKSSLDVLPSQVYSLVGSSPLRTTSSYNSLVPVQDQHQPIIIPDTPSPPVSVITIRSDTDEEEDNKYKPSSSGLKPRSNVISYVTVNDSPDSDSSLSSPYSTDTLSALRGNSGSVLEGPGRVVADGTGTRTIIVPPLKTQLGDCTVATQASGLLSNKTKPVASVSGQSSGCCITPTGYRAQRGGTSAAQPLNLSQNQQSSAAPTSQERSSNPAPRRQQAFVAPLSQAPYTFQHGSPLHSTGHPHLAPAPAHLPSQAHLYTYAAPTSAAALGSTSSIAHLFSPQGSSRHAAAYTTHPSTLVHQVPVSVGPSLLTSASVAPAQYQHQFATQSYIGSSRGSTIYTGYPLSPTKISQYSYL

SEQ ID NO: 38874 - protein, 491 aa, Homo sapiens
  Payload ID: 7781
  Gene Symbol: HIPK1
  Gene Name: homeodomain interacting protein kinase 1
  ENSP ID: ENSP00000355191
  MOD_RES (1)..(1): Any amino acid
XTPQYAVPFTLSCAAGRPALVEQTAAVLAWPGGTQQILLPSTWQQLPGVALHNSVQPTAMIPEAMGSGQQLADWRNAHSHGNQYSTIMQQPSLLTNHVTLATAQPLNVGVAHVVRQQQSSSLPSKKNKQSAPVSSKSSLDVLPSQVYSLVGSSPLRTTSSYNSLVPVQDQHQPIIIPDTPSPPVSVITIRSDTDEEEDNKYKPSSSGLKPRSNVISYVTVNDSPDSDSSLSSPYSTDTLSALRGNSGSVLEGPGRVVADGTGTRTIIVPPLKTQLGDCTVATQASGLLSNKTKPVASVSGQSSGCCITPTGYRAQRGGTSAAQPLNLSQNQQSSAAPTSQERSSNPAPRRQQAFVAPLSQAPYTFQHGSPLHSTGHPHLAPAPAHLPSQAHLYTYAAPTSAAALGSTSSIAHLFSPQGSSRHAAAYTTHPSTLVHQVPVSVGPSLLTSASVAPAQYQHQFATQSYIGSSRGSTIYTGYPLSPTKISQYSYL

SEQ ID NO: 38875 - protein, 816 aa, Homo sapiens
  Payload ID: 7781
  Gene Symbol: HIPK1
  Gene Name: homeodomain interacting protein kinase 1
  Uniprot ID: Q86Z02
  ENSP ID: ENSP00000358566
MVLMFQIRYISQTQGLPAEYLLSAGTKTTRFFNRDPNLGYPLWRLKTPEEHELETGIKSKEARKYIFNCLDDMAQVNMSTDLEGTDMLAEKADRREYIDLLKKMLTIDADKRITPLKTLNHQFVTMTHLLDFPHSNHVKSCFQNMEICKRRVHMYDTVSQIKSPFTTHVAPNTSTNLTMSFSNQLNTVHNQASVLASSSTAAAATLSLANSDVSLLNYQSALYPSSAAPVPGVAQQGVSLQPGTTQICTQTDPFQQTFIVCPPAFQTGLQATTKHSGFPVRMDNAVPIVPQAPAAQPLQIQSGVLTQGSCTPLMVATLHPQVATITPQYAVPFTLSCAAGRPALVEQTAAVLQAWPGGTQQILLPSTWQQLPGVALHNSVQPTAMIPEAMGSGQQLADWRNAHSHGNQYSTIMQQPSLLTNHVTLATAQPLNVGVAHVVRQQQSSSLPSKKNKQSAPVSSKSSLDVLPSQVYSLVGSSPLRTTSSYNSLVPVQDQHQPIIIPDTPSPPVSVITIRSDTDEEEDNKYKPSSSGLKPRSNVISYVTVNDSPDSDSSLSSPYSTDTLSALRGNSGSVLEGPGRVVADGTGTRTIIVPPLKTQLGDCTVATQASGLLSNKTKPVASVSGQSSGCCITPTGYRAQRGGTSAAQPLNLSQNQQSSAAPTSQERSSNPAPRRQQAFVAPLSQAPYTFQHGSPLHSTGHPHLAPAPAHLPSQAHLYTYAAPTSAAALGSTSSIAHLFSPQGSSRHAAAYTTHPSTLVHQVPVSVGPSLLTSASVAPAQYQHQFATQSYIGSSRGSTIYTGYPLSPTKISQYSYL

SEQ ID NO: 38876 - protein, 1165 aa, Homo sapiens
  Payload ID: 7781
  Gene Symbol: HIPK1
  Gene Name: homeodomain interacting protein kinase 1
  ENSP ID: ENSP00000358568
MASQLQVFSPPSVSSSAFCSAKKLKIEPSGWDVSGQSSNDKYYTHSKTLPATQGQANSSHQVANFNIPAYDQGLLLPAPAVEHIVVTAADSSGSAATSTFQSSQTLTHRSNVSLLEPYQKCGLKRKSEEVDSNGSVQIIEEHPPLMLQNRTVVGAAATTTTVTTKSSSSSGEGDYQLVQHEILCSMTNSYEVLEFLGRGTFGQVAKCWKRSTKEIVAIKILKNHPSYARQGQIEVSILSRLSSENADEYNFVRSYECFQHKNHTCLVFEMLEQNLYDFLKQNKFSPLPLKYIRPILQQVATALMKLKSLGLIHADLKPENIMLVDPVRQPYRVKVIDFGSASHVSKAVCSTYLQSRYYRAPEIILGLPFCEAIDMWSLGCVIAELFLGWPLYPGASEYDQIRYISQTQGLPAEYLLSAGTKTTRFFNRDPNLGYPLWRLKTPEEHELETGIKSKEARKYIFNCLDDMAQVNMSTDLEGTDMLAEKADRREYIDLLKKMLTIDADKRITPLKTLNHQFVTMTHLLDFPHSNHVKSCFQNMEICKRRVHMYDTVSQIKSPFTTHVAPNTSTNLTMSFSNQLNTVHNQASVLASSSTAAAATLSLANSDVSLLNYQSALYPSSAAPVPGVAQQGVSLQPGTTQICTQTDPFQQTFIVCPPAFQTGLQATTKHSGFPVRMDNAVPIVPQAPAAQPLQIQSGVLTQQAWPGGTQQILLPSTWQQLPGVALHNSVQPTAMIPEAMGSGQQLADWRNAHSHGNQYSTIMQQPSLLTNHVTLATAQPLNVGVAHVVRQQQSSSLPSKKNKQSAPVSSKSSLDVLPSQVYSLVGSSPLRTTSSYNSLVPVQDQHQPIIIPDTPSPPVSVITIRSDTDEEEDNKYKPSSSGLKPRSNVISYVTVNDSPDSDSSLSSPYSTDTLSALRGNSGSVLEGPGRVVADGTGTRTIIVPPLKTQLGDCTVATQASGLLSNKTKPVASVSGQSSGCCITPTGYRAQRGGTSAAQPLNLSQNQQSSAAPTSQERSSNPAPRRQQAFVAPLSQAPYTFQHGSPLHSTGHPHLAPAPAHLPSQAHLYTYAAPTSAAALGSTSSIAHLFSPQGSSRHAAAYTTHPSTLVHQVPVSVGPSLLTSASVAPAQYQHQFATQSYIGSSRGSTIYTGYPLSPTKISQYSYL

SEQ ID NO: 38877 - protein, 1210 aa, Homo sapiens
  Payload ID: 7781
  Gene Symbol: HIPK1
  Gene Name: homeodomain interacting protein kinase 1
  Uniprot ID: Q86Z02
  ENSP ID: ENSP00000358571
MASQLQVFSPPSVSSSAFCSAKKLKIEPSGWDVSGQSSNDKYYTHSKTLPATQGQANSSHQVANFNIPAYDQGLLLPAPAVEHIVVTAADSSGSAATSTFQSSQTLTHRSNVSLLEPYQKCGLKRKSEEVDSNGSVQIIEEHPPLMLQNRTVVGAAATTTTVTTKSSSSSGEGDYQLVQHEILCSMTNSYEVLEFLGRGTFGQVAKCWKRSTKEIVAIKILKNHPSYARQGQIEVSILSRLSSENADEYNFVRSYECFQHKNHTCLVFEMLEQNLYDFLKQNKFSPLPLKYIRPILQQVATALMKLKSLGLIHADLKPENIMLVDPVRQPYRVKVIDFGSASHVSKAVCSTYLQSRYYRAPEIILGLPFCEAIDMWSLGCVIAELFLGWPLYPGASEYDQIRYISQTQGLPAEYLLSAGTKTTRFFNRDPNLGYPLWRLKTPEEHELETGIKSKEARKYIFNCLDDMAQVNMSTDLEGTDMLAEKADRREYIDLLKKMLTIDADKRITPLKTLNHQFVTMTHLLDFPHSNHVKSCFQNMEICKRRVHMYDTVSQIKSPFTTHVAPNTSTNLTMSFSNQLNTVHNQASVLASSSTAAAATLSLANSDVSLLNYQSALYPSSAAPVPGVAQQGVSLQPGTTQICTQTDPFQQTFIVCPPAFQTGLQATTKHSGFPVRMDNAVPIVPQAPAAQPLQIQSGVLTQGSCTPLMVATLHPQVATITPQYAVPFTLSCAAGRPALVEQTAAVLQAWPGGTQQILLPSTWQQLPGVALHNSVQPTAMIPEAMGSGQQLADWRNAHSHGNQYSTIMQQPSLLTNHVTLATAQPLNVGVAHVVRQQQSSSLPSKKNKQSAPVSSKSSLDVLPSQVYSLVGSSPLRTTSSYNSLVPVQDQHQPIIIPDTPSPPVSVITIRSDTDEEEDNKYKPSSSGLKPRSNVISYVTVNDSPDSDSSLSSPYSTDTLSALRGNSGSVLEGPGRVVADGTGTRTIIVPPLKTQLGDCTVATQASGLLSNKTKPVASVSGQSSGCCITPTGYRAQRGGTSAAQPLNLSQNQQSSAAPTSQERSSNPAPRRQQAFVAPLSQAPYTFQHGSPLHSTGHPHLAPAPAHLPSQAHLYTYAAPTSAAALGSTSSIAHLFSPQGSSRHAAAYTTHPSTLVHQVPVSVGPSLLTSASVAPAQYQHQFATQSYIGSSRGSTIYTGYPLSPTKISQYSYL

SEQ ID NO: 38878 - protein, 1075 aa, Homo sapiens
  Payload ID: 7781
  Gene Symbol: HIPK1
  Gene Name: homeodomain interacting protein kinase 1
  Uniprot ID: Q86Z02
  ENSP ID: ENSP00000358572
MASQLQVFSPPSVSSSAFCSAKKLKIEPSGWDVSGQSSNDKYYTHSKTLPATQGQANSSHQVANFNIPAYDQGLLLPAPAVEHIVVTAADSSGSAATSTFQSSQTLTHRSNVSLLEPYQKCGLKRKSEEVDSNGSVQIIEEHPPLMLQNRTVVGAAATTTTVTTKSSSSSGEGDYQLVQHEILCSMTNSYEVLEFLGRGTFGQVAKCWKRSTKEIVAIKILKNHPSYARQGQIEVSILSRLSSENADEYNFVRSYECFQHKNHTCLVFEMLEQNLYDFLKQNKFSPLPLKYIRPILQQVATALMKLKSLGLIHADLKPENIMLVDPVRQPYRVKVIDFGSASHVSKAVCSTYLQSRYYRAPEIILGLPFCEAIDMWSLGCVIAELFLGWPLYPGASEYDQIRYISQTQGLPAEYLLSAGTKTTRFFNRDPNLGYPLWRLKTPEEHELETGIKSKEARKYIFNCLDDMAQVNMSTDLEGTDMLAEKADRREYIDLLKKMLTIDADKRITPLKTLNHQFVTMTHLLDFPHSNHVKSCFQNMEICKRRVHMYDTVSQIKSPFTTHVAPNTSTNLTMSFSNQLNTVHNQASVLASSSTAAAATLSLANSDVSLLNYQSALYPSSAAPVPGVAQQGVSLQPGTTQICTQTDPFQQTFIVCPPAFQTGLQATTKHSGFPVRMDNAVPIVPQAPAAQPLQIQSGVLTQGSCTPLMVATLHPQVATITPQYAVPFTLSCAAGRPALVEQTAAVLQAWPGGTQQILLPSTWQQLPGVALHNSVQPTAMIPEAMGSGQQLADWRNAHSHGNQYSTIMQQPSLLTNHVTLATAQPLNVGVAHVVRQQQSSSLPSKKNKQSAPVSSKSSLDVLPSQVYSLVGSSPLRTTSSYNSLVPVQDQHQPIIIPDTPSPPVSVITIRSDTDEEEDNKYKPSSSGLKPRSNVISYVTVNDSPDSDSSLSSPYSTDTLSALRGNSGSVLEGPGRVVADGTGTRTIIVPPLKTQLGDCTVATQASGLLSNKTKPVASVSGQSSGCCITPTGYRAQRGGTSAAQPLNLSQVSAMGYCLLFGPCTVVTFWRTLLLAGC

SEQ ID NO: 38879 - protein, 1176 aa, Homo sapiens
  Payload ID: 7781
  Gene Symbol: HIPK1
  Gene Name: homeodomain interacting protein kinase 1
  ENSP ID: ENSP00000358574
MASQLQVFSPPSVSSSAFCSAKKLKIEPSGWDVSGQSSNDKYYTHSKTLPATQGQANSSHQVANFNIPAYDQGLLLPAPAVEHIVVTAADSSGSAATSTFQSSQTLTHRSNVSLLEPYQKCGLKRKSEEVDSNGSVQIIEEHPPLMLQNRTVVGAAATTTTVTTKSSSSSGEGDYQLVQHEILCSMTNSYEVLEFLGRGTFGQVAKCWKRSTKEIVAIKILKNHPSYARQGQIEVSILSRLSSENADEYNFVRSYECFQHKNHTCLVFEMLEQNLYDFLKQNKFSPLPLKYIRPILQQVATALMKLKSLGLIHADLKPENIMLVDPVRQPYRVKVIDFGSASHVSKAVCSTYLQSRYYRAPEIILGLPFCEAIDMWSLGCVIAELFLGWPLYPGASEYDQIRYISQTQGLPAEYLLSAGTKTTRFFNRDPNLGYPLWRLKTPEEHELETGIKSKEARKYIFNCLDDMAQVNMSTDLEGTDMLAEKADRREYIDLLKKMLTIDADKRITPLKTLNHQFVTMTHLLDFPHSNHVKSCFQNMEICKRRVHMYDTASVLASSSTAAAATLSLANSDVSLLNYQSALYPSSAAPVPGVAQQGVSLQPGTTQICTQTDPFQQTFIVCPPAFQTGLQATTKHSGFPVRMDNAVPIVPQAPAAQPLQIQSGVLTQGSCTPLMVATLHPQVATITPQYAVPFTLSCAAGRPALVEQTAAVLQAWPGGTQQILLPSTWQQLPGVALHNSVQPTAMIPEAMGSGQQLADWRNAHSHGNQYSTIMQQPSLLTNHVTLATAQPLNVGVAHVVRQQQSSSLPSKKNKQSAPVSSKSSLDVLPSQVYSLVGSSPLRTTSSYNSLVPVQDQHQPIIIPDTPSPPVSVITIRSDTDEEEDNKYKPSSSGLKPRSNVISYVTVNDSPDSDSSLSSPYSTDTLSALRGNSGSVLEGPGRVVADGTGTRTIIVPPLKTQLGDCTVATQASGLLSNKTKPVASVSGQSSGCCITPTGYRAQRGGTSAAQPLNLSQNQQSSAAPTSQERSSNPAPRRQQAFVAPLSQAPYTFQHGSPLHSTGHPHLAPAPAHLPSQAHLYTYAAPTSAAALGSTSSIAHLFSPQGSSRHAAAYTTHPSTLVHQVPVSVGPSLLTSASVAPAQYQHQFATQSYIGSSRGSTIYTGYPLSPTKISQYSYL

SEQ ID NO: 38880 - protein, 1210 aa, Homo sapiens; identical to SEQ ID NO: 38877
  Payload ID: 7781
  Gene Symbol: HIPK1
  Gene Name: homeodomain interacting protein kinase 1
  Uniprot ID: Q86Z02
  ENSP ID: ENSP00000407442

SEQ ID NO: 38881 - protein, 119 aa, Homo sapiens
  Payload ID: 7781
  Gene Symbol: HIPK1
  Gene Name: homeodomain interacting protein kinase 1
  ENSP ID: ENSP00000422322
MASQLQVFSPPSVSSSAFCSAKKLKIEPSGWDVSGQSSNDKYYTHSKTLPATQGQANSSHQVANFNIPAYDQGLLLPAPAVEHIVVTAADSSGSAATSTFQSSQTLTHRSNVSLLEPYQ

SEQ ID NO: 38882 - protein, 106 aa, Homo sapiens
  Payload ID: 7781
  Gene Symbol: HIPK1
  Gene Name: homeodomain interacting protein kinase 1
  ENSP ID: ENSP00000426695
MASQLQVFSPPSVSSSAFCSAKKLKIEPSGWDVSGQSSNDKYYTHSKTLPATQGQANSSHQVANFNIPAYDQGLLLPAPAVEHIVVTAADSSGSAATSTFQSSQTL

SEQ ID NO: 38883 - protein, 1165 aa, Homo sapiens; identical to SEQ ID NO: 38876
  Payload ID: 7781
  Gene Symbol: HIPK1
  Gene Name: homeodomain interacting protein kinase 1
  ENSP ID: ENSP00000486090

SEQ ID NO: 38884 - protein, 911 aa, Homo sapiens
  Payload ID: 7782
  Gene Symbol: HIPK2
  Gene Name: homeodomain interacting protein kinase 2
  ENSP ID: ENSP00000343108
MASHVQVFSPHTLQSSAFCSVKKLKIEPSSNWDMTGYGSHSKVYSQSKNIPLSQPATTTVSTSLPVPNPSLPYEQTIVFPGSTGHIVVTSASSTSVTGQVLGGPHNLMRRSTVSLLDTYQKCGLKRKSEEIENTSSVQIIEEHPPMIQNNASGATVATATTSTATSKNSGSNSEGDYQLVQHEVLCSMTNTYEVLEFLGRGTFGQVVKCWKRGTNEIVAIKILKNHPSYARQGQIEVSILARLSTESADDYNFVRAYECFQHKNHTCLVFEMLEQNLYDFLKQNKFSPLPLKYIRPVLQQVATALMKLKSLGLIHADLKPENIMLVDPSRQPYRVKVIDFGSASHVSKAVCSTYLQSRYYRAPEIILGLPFCEAIDMWSLGCVIAELFLGWPLYPGASEYDQIRYISQTQGLPAEYLLSAGTKTTRFFNRDTDSPYPLWRLKTPDDHEAETGIKSKEARKYIFNCLDDMAQVNMTTDLEGSDMLVEKADRREFIDLLKKMLTIDADKRITPIETLNHPFVTMTHLLDFPHSTHVKSCFQNMEICKRRVNMYDTVNQSKTPFITHVAPSTSTNLTMTFNNQLTTVHNQAPSSTSATISLANPEVSILNYPSTLYQPSAASMAAVAQRSMPLQTGTAQICARPDPFQQALIVCPPGFQGLQASPSKHAGYSVRMENAVPIVTQAPGAQPLQIQPGLLAQQAWPSGTQQILLPPAWQQLTGVATHTSVQHATVIPETMAGTQQLADWRNTHAHGSHYNPIMQQPALLTGHVTLPAAQPLNVGVAHVMRQQPTSTTSSRKSKHTVSKQRKNVISCVTVHDSPYSDSSSNTSPYSVQQRAGHNNANAFDTKGSLENHCTGNPRTIIVPPLKTQASEVLVECDSLVPGNLGPGQGRNLSLESGFPAFLLLEMLLYGS

SEQ ID NO: 38885 - protein, 1198 aa, Homo sapiens
  Payload ID: 7782
  Gene Symbol: HIPK2
  Gene Name: homeodomain interacting protein kinase 2
  Uniprot ID: Q9H2X6
  ENSP ID: ENSP00000385571
MAPVYEGMASHVQVFSPHTLQSSAFCSVKKLKIEPSSNWDMTGYGSHSKVYSQSKNIPLSQPATTTVSTSLPVPNPSLPYEQTIVFPGSTGHIVVTSASSTSVTGQVLGGPHNLMRRSTVSLLDTYQKCGLKRKSEEIENTSSVQIIEEHPPMIQNNASGATVATATTSTATSKNSGSNSEGDYQLVQHEVLCSMTNTYEVLEFLGRGTFGQVVKCWKRGTNEIVAIKILKNHPSYARQGQIEVSILARLSTESADDYNFVRAYECFQHKNHTCLVFEMLEQNLYDFLKQNKFSPLPLKYIRPVLQQVATALMKLKSLGLIHADLKPENIMLVDPSRQPYRVKVIDFGSASHVSKAVCSTYLQSRYYRAPEIILGLPFCEAIDMWSLGCVIAELFLGWPLYPGASEYDQIRYISQTQGLPAEYLLSAGTKTTRFFNRDTDSPYPLWRLKTPDDHEAETGIKSKEARKYIFNCLDDMAQVNMTTDLEGSDMLVEKADRREFIDLLKKMLTIDADKRITPIETLNHPFVTMTHLLDFPHSTHVKSCFQNMEICKRRVNMYDTVNQSKTPFITHVAPSTSTNLTMTFNNQLTTVHNQAPSSTSATISLANPEVSILNYPSTLYQPSAASMAAVAQRSMPLQTGTAQICARPDPFQQALIVCPPGFQGLQASPSKHAGYSVRMENAVPIVTQAPGAQPLQIQPGLLAQQAWPSGTQQILLPPAWQQLTGVATHTSVQHATVIPETMAGTQQLADWRNTHAHGSHYNPIMQQPALLTGHVTLPAAQPLNVGVAHVMRQQPTSTTSSRKSKQHQSSVRNVSTCEVSSSQAISSPQRSKRVKENTPPRCAMVHSSPACSTSVTCGWGDVASSTTRERQRQTIVIPDTPSPTVSVITISSDTDEEEEQKHAPTSTVSKQRKNVISCVTVHDSPYSDSSSNTSPYSVQQRAGHNNANAFDTKGSLENHCTGNPRTIIVPPLKTQASEVLVECDSLVPVNTSHHSSSYKSKSSSNVTSTSGHSSGSSSGAITYRQQRPGPHFQQQQPLNLSQAQQHITTDRTGSHRRQQAYITPTMAQAPYSFPHNSPSHGTVHPHLAAAAAAAHLPTQPHLYTYTAPAALGSTGTVAHLVASQGSARHTVQHTAYPASIVHQVPVSMGPRVLPSPTIHPSQYPAQFAHQTYISASPASTVYTGYPLSPAKVNQYPYI

SEQ ID NO: 38886 - protein, 1171 aa, Homo sapiens
  Payload ID: 7782
  Gene Symbol: HIPK2
  Gene Name: homeodomain interacting protein kinase 2
  Uniprot ID: Q9H2X6
  ENSP ID: ENSP00000413724
MAPVYEGMASHVQVFSPHTLQSSAFCSVKKLKIEPSSNWDMTGYGSHSKVYSQSKNIPLSQPATTTVSTSLPVPNPSLPYEQTIVFPGSTGHIVVTSASSTSVTGQVLGGPHNLMRRSTVSLLDTYQKCGLKRKSEEIENTSSVQIIEEHPPMIQNNASGATVATATTSTATSKNSGSNSEGDYQLVQHEVLCSMTNTYEVLEFLGRGTFGQVVKCWKRGTNEIVAIKILKNHPSYARQGQIEVSILARLSTESADDYNFVRAYECFQHKNHTCLVFEMLEQNLYDFLKQNKFSPLPLKYIRPVLQQVATALMKLKSLGLIHADLKPENIMLVDPSRQPYRVKVIDFGSASHVSKAVCSTYLQSRYYRAPEIILGLPFCEAIDMWSLGCVIAELFLGWPLYPGASEYDQIRYISQTQGLPAEYLLSAGTKTTRFFNRDTDSPYPLWRLKTPDDHEAETGIKSKEARKYIFNCLDDMAQVNMTTDLEGSDMLVEKADRREFIDLLKKMLTIDADKRITPIETLNHPFVTMTHLLDFPHSTHVKSCFQNMEICKRRVNMYDTVNQSKTPFITHVAPSTSTNLTMTFNNQLTTVHNQPSAASMAAVAQRSMPLQTGTAQICARPDPFQQALIVCPPGFQGLQASPSKHAGYSVRMENAVPIVTQAPGAQPLQIQPGLLAQQAWPSGTQQILLPPAWQQLTGVATHTSVQHATVIPETMAGTQQLADWRNTHAHGSHYNPIMQQPALLTGHVTLPAAQPLNVGVAHVMRQQPTSTTSSRKSKQHQSSVRNVSTCEVSSSQAISSPQRSKRVKENTPPRCAMVHSSPACSTSVTCGWGDVASSTTRERQRQTIVIPDTPSPTVSVITISSDTDEEEEQKHAPTSTVSKQRKNVISCVTVHDSPYSDSSSNTSPYSVQQRAGHNNANAFDTKGSLENHCTGNPRTIIVPPLKTQASEVLVECDSLVPVNTSHHSSSYKSKSSSNVTSTSGHSSGSSSGAITYRQQRPGPHFQQQQPLNLSQAQQHITTDRTGSHRRQQAYITPTMAQAPYSFPHNSPSHGTVHPHLAAAAAAAHLPTQPHLYTYTAPAALGSTGTVAHLVASQGSARHTVQHTAYPASIVHQVPVSMGPRVLPSPTIHPSQYPAQFAHQTYISASPASTVYTGYPLSPAKVNQYPYI

SEQ ID NO: 38887 - protein, 1215 aa, Homo sapiens
  Payload ID: 7783
  Gene Symbol: HIPK3
  Gene Name: homeodomain interacting protein kinase 3
  Uniprot ID: Q9H422
  ENSP ID: ENSP00000304226
MASQVLVYPPYVYQTQSSAFCSVKKLKVEPSSCVFQERNYPRTYVNGRNFGNSHPPTKGSAFQTKIPFNRPRGHNFSLQTSAVVLKNTAGATKVIAAQAQQAHVQAPQIGAWRNRLHFLEGPQRCGLKRKSEELDNHSSAMQIVDELSILPAMLQTNMGNPVTVVTATTGSKQNCTTGEGDYQLVQHEVLCSMKNTYEVLDFLGRGTFGQVVKCWKRGTNEIVAIKILKNHPSYARQGQIEVSILARLSTENADEYNFVRAYECFQHRNHTCLVFEMLEQNLYDFLKQNKFSPLPLKVIRPILQQVATALKKLKSLGLIHADLKPENIMLVDPVRQPYRVKVIDFGSASHVSKTVCSTYLQSRYYRAPEIILGLPFCEAIDMWSLGCVIAELFLGWPLYPGALEYDQIRYISQTQGLPGEQLLNVGTKSTRFFCKETDMSHSGWRLKTLEEHEAETGMKSKEARKYIFNSLDDVAHVNTVMDLEGSDLLAEKADRREFVSLLKKMLLIDADLRITPAETLNHPFVNMKHLLDFPHSNHVKSCFHIMDICKSHLNSCDTNNHNKTSLLRPVASSSTATLTANFTKIGTLRSQALTTSAHSVVHHGIPLQAGTAQFGCGDAFQQTLIICPPAIQGIPATHGKPTSYSIRVDNTVPLVTQAPAVQPLQIRPGVLSQTWSGRTQQMLVPAWQQVTPLAPATTTLTSESVAGSHRLGDWGKMISCSNHYNSVMPQPLLTNQITLSAPQPVSVGIAHVVWPQPATTKKNKQCQNRGILVKLMEWEPGREEINAFSWSNSLQNTNIPHSAFISPKIINGKDVEEVSCIETQDNQNSEGEARNCCETSIRQDSDSSVSDKQRQTIIIADSPSPAVSVITISSDTDEEETSQRHSLRECKGSLDCEACQSTLNIDRMCSLSSPDSTLSTSSSGQSSPSPCKRPNSMSDEEQESSCDTVDGSPTSDSSGHDSPFAESTFVEDTHENTELVSSADTETKPAVCSVVVPPVELENGLNADEHMANTDSICQPLIKGRSAPGRLNQPSAVGTRQQKLTSAFQQQHLNFSQVQHFGSGHQEWNGNFGHRRQQAYIPTSVTSNPFTLSHGSPNHTAVHAHLAGNTHLGGQPTLLPYPSSATLSSAAPVAHLLASPCTSRPMLQHPTYNISHPSGIVHQVPVGLNPRLLPSPTIHQTQYKPIFPPHSYIAASPAYTGFPLSPTKLSQYPYM

SEQ ID NO: 38888 - protein, 1194 aa, Homo sapiens
  Payload ID: 7783
  Gene Symbol: HIPK3
  Gene Name: homeodomain interacting protein kinase 3
  Uniprot ID: Q9H422
  ENSP ID: ENSP00000368301
MASQVLVYPPYVYQTQSSAFCSVKKLKVEPSSCVFQERNYPRTYVNGRNFGNSHPPTKGSAFQTKIPFNRPRGHNFSLQTSAVVLKNTAGATKVIAAQAQQAHVQAPQIGAWRNRLHFLEGPQRCGLKRKSEELDNHSSAMQIVDELSILPAMLQTNMGNPVTVVTATTGSKQNCTTGEGDYQLVQHEVLCSMKNTYEVLDFLGRGTFGQVVKCWKRGTNEIVAIKILKNHPSYARQGQIEVSILARLSTENADEYNFVRAYECFQHRNHTCLVFEMLEQNLYDFLKQNKFSPLPLKVIRPILQQVATALKKLKSLGLIHADLKPENIMLVDPVRQPYRVKVIDFGSASHVSKTVCSTYLQSRYYRAPEIILGLPFCEAIDMWSLGCVIAELFLGWPLYPGALEYDQIRYISQTQGLPGEQLLNVGTKSTRFFCKETDMSHSGWRLKTLEEHEAETGMKSKEARKYIFNSLDDVAHVNTVMDLEGSDLLAEKADRREFVSLLKKMLLIDADLRITPAETLNHPFVNMKHLLDFPHSNHVKSCFHIMDICKSHLNSCDTNNHNKTSLLRPVASSSTATLTANFTKIGTLRSQALTTSAHSVVHHGIPLQAGTAQFGCGDAFQQTLIICPPAIQGIPATHGKPTSYSIRVDNTVPLVTQAPAVQPLQIRPGVLSQTWSGRTQQMLVPAWQQVTPLAPATTTLTSESVAGSHRLGDWGKMISCSNHYNSVMPQPLLTNQITLSAPQPVSVGIAHVVWPQPATTKKNKQCQNRSNSLQNTNIPHSAFISPKIINGKDVEEVSCIETQDNQNSEGEARNCCETSIRQDSDSSVSDKQRQTIIIADSPSPAVSVITISSDTDEEETSQRHSLRECKGSLDCEACQSTLNIDRMCSLSSPDSTLSTSSSGQSSPSPCKRPNSMSDEEQESSCDTVDGSPTSDSSGHDSPFAESTFVEDTHENTELVSSADTETKPAVCSVVVPPVELENGLNADEHMANTDSICQPLIKGRSAPGRLNQPSAVGTRQQKLTSAFQQQHLNFSQVQHFGSGHQEWNGNFGHRRQQAYIPTSVTSNPFTLSHGSPNHTAVHAHLAGNTHLGGQPTLLPYPSSATLSSAAPVAHLLASPCTSRPMLQHPTYNISHPSGIVHQVPVGLNPRLLPSPTIHQTQYKPIFPPHSYIAASPAYTGFPLSPTKLSQYPYM

SEQ ID NO: 38889 - protein, 1194 aa, Homo sapiens; identical to SEQ ID NO: 38888
  Payload ID: 7783
  Gene Symbol: HIPK3
  Gene Name: homeodomain interacting protein kinase 3
  Uniprot ID: Q9H422
  ENSP ID: ENSP00000398241

SEQ ID NO: 38890 - protein, 1194 aa, Homo sapiens; identical to SEQ ID NO: 38888
  Payload ID: 7783
  Gene Symbol: HIPK3
  Gene Name: homeodomain interacting protein kinase 3
  Uniprot ID: Q9H422
  ENSP ID: ENSP00000431710

SEQ ID NO: 38891 - protein, 76 aa, Homo sapiens
  Payload ID: 7783
  Gene Symbol: HIPK3
  Gene Name: homeodomain interacting protein kinase 3
  ENSP ID: ENSP00000433594
MASQVLVYPPYVYQTQSSAFCSVKKLKVEPSSCVFQERNYPRTYVNGRNFGNSHPPTKGSAFQTKIPFNRPRGHNF

SEQ ID NO: 38892 - protein, 616 aa, Homo sapiens
  Payload ID: 7784
  Gene Symbol: HIPK4
  Gene Name: homeodomain interacting protein kinase 4
  Uniprot ID: Q8NE63
  ENSP ID: ENSP00000291823
MSTIQSETDCYDIIEVLGKGTFGEVAKGWRRSTGEMVAIKILKNDAYRNRIIKNELKLLHCMRGLDPEEAHVIRFLEFFHDALKFYLVFELLEQNLFEFQKENNFAPLPARHIRTVTLQVLTALARLKELAIIHADLKPENIMLVDQTRCPFRVKVIDFGSASIFSEVRYVKEPYIQSRFYRAPEILLGLPFCEKVDVWSLGCVMAELHLGWPLYPGNNEYDQVRYICETQGLPKPHLLHAACKAHHFFKRNPHPDAANPWQLKSSADYLAETKVRPLERRKYMLKSLDQIETVNGGSVASRLTFPDREALAEHADLKSMVELIKRMLTWESHERISPSAALRHPFVSMQQLRSAHETTHYYQLSLRSYRLSLQVEGKPPTPVVAAEDGTPYYCLAEEKEAAGMGSVAGSSPFFREEKAPGMQRAIDQLDDLSLQEAGHGLWGETCTNAVSDMMVPLKAAITGHHVPDSGPEPILAFYSSRLAGRHKARKPPAGSKSDSNFSNLIRLSQVSPEDDRPCRGSSWEEGEHLGASAEPLAILQRDEDGPNIDNMTMEAERPDPELFDPSSCPGEWLSEPDCTLESVRGPRAQGLPPRRSHQHGPPRGATSFLQHVTGHH

SEQ ID NO: 38893 - protein, 224 aa, Homo sapiens
  Payload ID: 7785
  Gene Symbol: HOMER1
  Gene Name: homer scaffolding protein 1
  Uniprot ID: Q86YM7
  ENSP ID: ENSP00000282260
MGEQPIFSTRAHVFQIDPNTKKNWVPTSKHAVTVSYFYDSTRNVYRIISLDGSKAIINSTITPNMTFTKTSQKFGQWADSRANTVYGLGFSSEHHLSKVTELECVSSQANAVHTHKTELNQTIQELEETLKLKEEEIERLKQEIDNARELQEQRDSLTQKLQEVEIRNKDLEGQLSDLEQRLEKSQNEQEAFRNNLKTLLEILDGKIFELTELRDNLAKLLECS

SEQ ID NO: 38894 - protein, 354 aa, Homo sapiens
  Payload ID: 7785
  Gene Symbol: HOMER1
  Gene Name: homer scaffolding protein 1
  Uniprot ID: Q86YM7
  ENSP ID: ENSP00000334382
MGEQPIFSTRAHVFQIDPNTKKNWVPTSKHAVTVSYFYDSTRNVYRIISLDGSKAIINSTITPNMTFTKTSQKFGQWADSRANTVYGLGFSSEHHLSKFAEKFQEFKEAARLAKEKSQEKMELTSTPSQESAGGDLQSPLTPESINGTDDERTPDVTQNSEPRAEPTQNALPFSHSSAISKHWEAELATLKGNNAKLTAALLESTANVKQWKQQLAAYQEEAERLHKRVTELECVSSQANAVHTHKTELNQTIQELEETLKLKEEEIERLKQEIDNARELQEQRDSLTQKLQEVEIRNKDLEGQLSDLEQRLEKSQNEQEAFRNNLKTLLEILDGKIFELTELRDNLAKLLECS

SEQ ID NO: 38895 - protein, 177 aa, Homo sapiens
  Payload ID: 7785
  Gene Symbol: HOMER1
  Gene Name: homer scaffolding protein 1
  Uniprot ID: Q86YM7
  ENSP ID: ENSP00000426651
MGEQPIFSTRAHVFQIDPNTKKNWVPTSKHAVTVSYFYDSTRNVYRIISLDGSKAIINSTITPNMTFTKTSQKFGQWADSRANTVYGLGFSSEHHLSKFAEKFQEFKEAARLAKEKSQEKMELTSTPSQESAGGDLQSPLTPESINGTDDERTPDVTQNSEPRAEPTQNALPFSHRK

SEQ ID NO: 38896 - protein, 180 aa, Homo sapiens
  Payload ID: 7785
  Gene Symbol: HOMER1
  Gene Name: homer scaffolding protein 1
  ENSP ID: ENSP00000441587
MGSAISKHWEAELATLKGNNAKLTAALLESTANVKQWKQQLAAYQEEAERLHKRVTELECVSSQANAVHTHKTELNQTIQELEETLKLKEEEIERLKQEIDNARELQEQRDSLTQKLQEVEIRNKDLEGQLSDLEQRLEKSQNEQEAFRNNLKTLLEILDGKIFELTELRDNLAKLLECS

SEQ ID NO: 38897 - protein, 354 aa, Homo sapiens
  Payload ID: 7786
  Gene Symbol: HOMER2
  Gene Name: homer scaffolding protein 2
  Uniprot ID: Q9NSB8
  ENSP ID: ENSP00000305632
MGEQPIFTTRAHVFQIDPNTKKNWMPASKQAVTVSYFYDVTRNSYRIISVDGAKVIINSTITPNMTFTKTSQKFGQWADSRANTVFGLGFSSEQQLTKFAEKFQEVKEAAKIAKDKTQEKIETSSNHSQESGRETPSSTQASSVNGTDDEKASHAGPANTHLKSENDKLKIALTQSAANVKKWEIELQTLRESNARLTTALQESAASVEQWKRQFSICRDENDRLRNKIDELEEQCSEINREKEKNTQLKRRIEELEAELREKETELKDLRKQSEIIPQLMSECEYVSEKLEAAERDNQNLEDKVRSLKTDIEESKYRQRHLKVELKSFLEVLDGKIDDLHDFRRGLSKLGTDN

SEQ ID NO: 38898 - protein, 343 aa, Homo sapiens
  Payload ID: 7786
  Gene Symbol: HOMER2
  Gene Name: homer scaffolding protein 2
  Uniprot ID: Q9NSB8
  ENSP ID: ENSP00000407634
MGEQPIFTTRAHVFQIDPNTKKNWMPASKQAVTVSYFYDVTRNSYRIISVDGAKVIINSTITPNMTFTKTSQKFGQWADSRANTVFGLGFSSEQQLTKFAEKFQEVKEAAKIAKDKTQEKIETSSNHSQASSVNGTDDEKASHAGPANTHLKSENDKLKIALTQSAANVKKWEIELQTLRESNARLTTALQESAASVEQWKRQFSICRDENDRLRNKIDELEEQCSEINREKEKNTQLKRRIEELEAELREKETELKDLRKQSEIIPQLMSECEYVSEKLEAAERDNQNLEDKVRSLKTDIEESKYRQRHLKVELKSFLEVLDGKIDDLHDFRRGLSKLGTDN

SEQ ID NO: 38899 - protein, 4 aa, Homo sapiens
  Payload ID: 7786
  Gene Symbol: HOMER2
  Gene Name: homer scaffolding protein 2
  ENSP ID: ENSP00000452870
  MOD_RES (1)..(1): Any amino acid
XTDN

SEQ ID NO: 38900 - protein, 185 aa, Homo sapiens
  Payload ID: 7786
  Gene Symbol: HOMER2
  Gene Name: homer scaffolding protein 2
  ENSP ID: ENSP00000454125
FAEKFQEVKEAAKIAKDKTQEKIETSSNHSQIIHFGQESGRETPSSTQASSVNGTDDEKASHAGPANTHLKSENDKLKIALTQSAANVKKWEIELQTLRESNARLTTALQESAASVEQWKRQFSICRDENDRLRNKIDELEEQCSEINREKEKNTQLKRRIEELEAELREKETELKDLRKQSEII

SEQ ID NO: 38901 - protein, 358 aa, Homo sapiens
  Payload ID: 7787
  Gene Symbol: HOMER3
  Gene Name: homer scaffolding protein 3
  Uniprot ID: Q9NSC5
  ENSP ID: ENSP00000221222
MSTAREQPIFSTRAHVFQIDPATKRNWIPAGKHALTVSYFYDATRNVYRIISIGGAKAIINSTVTPNMTFTKTSQKFGQWADSRANTVYGLGFASEQHLTQFAEKFQEVKEAARLAREKSQDGGELTSPALGLASHQVPPSPLVSANGPGEEKLFRSQSADAPGPTERERLKKMLSEGSVGEVQWEAEFFALQDSNNKLAGALREANAAAAQWRQQLEAQRAEAERLRQRVAELEAQAASEVTPTGEKEGLGQGQSLEQLEALVQTKDQEIQTLKSQTGGPREALEAAEREETQQKVQTRNAELEHQLRAMERSLEEARAERERARAEVGRAAQLLDVSLFELSELREGLARLAEAAP

SEQ ID NO: 38902 - protein, 361 aa, Homo sapiens
  Payload ID: 7787
  Gene Symbol: HOMER3
  Gene Name: homer scaffolding protein 3
  Uniprot ID: Q9NSC5
  ENSP ID: ENSP00000376162
MSTAREQPIFSTRAHVFQIDPATKRNWIPAGKHALTVSYFYDATRNVYRIISIGGAKAIINSTVTPNMTFTKTSQKFGQWADSRANTVYGLGFASEQHLTQFAEKFQEVKEAARLAREKSQDGGELTSPALGLASHQVPPSPLVSANGPGEEKLFRSQSADAPGPTERERLKKMLSEGSVGEVQWEAEFFALQDSNNKLAGALREANAAAAQWRQQLEAQRAEAERLRQRVAELEAQAASEVTPTGEKEGLGQGQSLEQLEALVQTKDQEIQTLKSQTGGPREALEAAEREETQQKVQDLETRNAELEHQLRAMERSLEEARAERERARAEVGRAAQLLDVSLFELSELREGLARLAEAAP

SEQ ID NO: 38903 - protein, 358 aa, Homo sapiens; identical to SEQ ID NO: 38901
  Payload ID: 7787
  Gene Symbol: HOMER3
  Gene Name: homer scaffolding protein 3
  Uniprot ID: Q9NSC5
  ENSP ID: ENSP00000396154

SEQ ID NO: 38904 - protein, 361 aa, Homo sapiens; identical to SEQ ID NO: 38902
  Payload ID: 7787
  Gene Symbol: HOMER3
  Gene Name: homer scaffolding protein 3
  Uniprot ID: Q9NSC5
  ENSP ID: ENSP00000439937

SEQ ID NO: 38905 - protein, 361 aa, Homo sapiens; identical to SEQ ID NO: 38902
  Payload ID: 7787
  Gene Symbol: HOMER3
  Gene Name: homer scaffolding protein 3
  Uniprot ID: Q9NSC5
  ENSP ID: ENSP00000446026

SEQ ID NO: 38906 - protein, 152 aa, Homo sapiens
  Payload ID: 7787
  Gene Symbol: HOMER3
  Gene Name: homer scaffolding protein 3
  ENSP ID: ENSP00000469800
MSTARQQLEAQRAEAERLRQRVAELEAQAASEVTPTGEKEGLGQGQSLEQLEALVQTKDQEIQTLKSQTGGPREALEAAEREETQQKVQDLETRNAELEHQLRAMERSLEEARAERERARAEVGRAAQLLDVSLFELSELREGLARLAEAAP

SEQ ID NO: 38907 - protein, 150 aa, Homo sapiens
  Payload ID: 7787
  Gene Symbol: HOMER3
  Gene Name: homer scaffolding protein 3
  ENSP ID: ENSP00000470659
MSTAREQPIFSTRAHVFQIDPATKRNWIPAGKHALTVSYFYDATRNVYRIISIGGAKAIINSTVTPNMTFTKTSQKFGQWADSRANTVYGLGFASEQHLTQFAEKFQEVKEAARLAREKSQDGGELTSPALGLASHQVPPSPLVSANGPG

SEQ ID NO: 38908 - protein, 325 aa, Homo sapiens
  Payload ID: 7787
  Gene Symbol: HOMER3
  Gene Name: homer scaffolding protein 3
  Uniprot ID: Q9NSC5
  ENSP ID: ENSP00000471835
MSTAREQPIFSTRAHVFQIDPATKRNWIPAGKHALTVSYFYDATRNVYRIISIGGAKAIINSTVTPNMTFTKTSQKFGQWADSRANTVYGLGFASEQHLTQVPPSPLVSANGPGEEKLFRSQSADAPGPTERERLKKMLSEGSVGEVQWEAEFFALQDSNNKLAGALREANAAAAQWRQQLEAQRAEAERLRQRVAELEAQAASEVTPTGEKEGLGQGQSLEQLEALVQTKDQEIQTLKSQTGGPREALEAAEREETQQKVQDLETRNAELEHQLRAMERSLEEARAERERARAEVGRAAQLLDVSLFELSELREGLARLAEAAP

SEQ ID NO: 38909 - protein, 85 aa, Homo sapiens
  Payload ID: 7787
  Gene Symbol: HOMER3
  Gene Name: homer scaffolding protein 3
  ENSP ID: ENSP00000472800
MSTAREQPIFSTRAHVFQIDPATKRNWIPAGKHALTVSYFYDATRNVYRIISIGGAKAIINSTVTPNMTFTKTSQKFGQWADSRA

SEQ ID NO: 38910 - protein, 243 aa, Homo sapiens
  Payload ID: 7787
  Gene Symbol: HOMER3
  Gene Name: homer scaffolding protein 3
  ENSP ID: ENSP00000472815
MSTAREQPIFSTRAHVFQIDPATKRNWIPAGKHALTVSYFYDATRNVYRIISIGGAKAIINSTVTPNMTFTKTSQKFGQWADSRANTVYGLGFASEQHLTQFAEKFQEVKEAARLAREKSQDGGELTSPALGLASHQVPPSPLVSANGPGEEKLFRSQSADAPGPTERERLKKMLSEGSVGEVQWEAEFFALQDSNNKLAGALREANAAAAQWRQQLEAQRAEAERLRQRVAELEAQAASEVT

SEQ ID NO: 38911 - protein, 5405 aa, Homo sapiens
  Payload ID: 7788
  Gene Symbol:
  Gene Name: Homo sapiens Fc fragment of IgG binding protein (FCGBP), mRNA. [Source:RefSeq mRNA
  Acc:NM_003890]
  Uniprot ID: Q9Y6R7
  ENSP ID: ENSP00000487490
MGALWSWWILWAGATLLWGLTQEASVDLKNTGREEFLTAFLQNYQLAYSKAYPRLLISSLSESPASVSILSQADNTSKKVTVRPGESVMVNISAKAEMIGSKIFQHAVVIHSDYAISVQALNAKPDTAELTLLRPIQALGTEYFVLTPPGTSARNVKEFAVVAGAAGASVSVTLKGSVTFNGKFYPAGDVLRVTLQPYNVAQLQSSVDLSGSKVTASSPVAVLSGHSCAQKHTTCNHVVEQLLPTSAWGTHYVVPTLASQSRYDLAFVVASQATKLTYNHGGITGSRGLQAGDVVEFEVRPSWPLYLSANVGIQVLLFGTGAIRNEVTYDPYLVLIPDVAAYCPAYVVKSVPGCEGVALVVAQTKAISGLTIDGHAVGAKLTWEAVPGSEFSYAEVELGTADMIHTAEATTNLGLLTFGLAKAIGYATAADCGRTVLSPVEPSCEGMQCAAGQRCQVVGGKAGCVAESTAVCRAQGDPHYTTFDGRRYDMMGTCSYTMVELCSEDDTLPAFSVEAKNEHRGSRRVSYVGLVTVRAYSHSVSLTRGEVGFVLVDNQRSRLPVSLSEGRLRVYQSGPRAVVELVFGLVVTYDWDCQLALSLPARFQDQVCGLCGNYNGDPADDFLTPDGALAPDAVEFASSWKLDDGDYLCEDGCQNNCPACTPGQAQHYEGDRLCGMLTKLDGPFAVCHDTLDPRPFLEQCVYDLCVVGGERLSLCRGLSAYAQACLELGISVGDWRSPANCPLSCPANSRYELCGPACPTSCNGAAAPSNCSGRPCVEGCVCLPGFVASGGACVPASSCGCTFQGLQLAPGQEVWADELCQRRCTCNGATHQVTCRDKQSCPAGERCSVQNGLLGCYPDRFGTCQGSGDPHYVSFDGRRFDFMGTCTYLLVGSCGQNAALPAFRVLVENEHRGSQTVSYTRAVRVEARGVKVAVRREYPGQVLVDDVLQYLPFQAADGQVQVFRQGRDAVVRTDFGLTVTYDWNARVTAKVPSSYAEALCGLCGNFNGDPADDLALRGGGQAANALAFGNSWQEETRPGCGATEPGDCPKLDSLVAQQLQSKNECGILADPKGPFRECHSKLDPQGAVRDCVYDRCLLPGQSGPLCDALATYAAACQAAGATVHPWRSEELCPLSCPPHSHYEACSYGCPLSCGDLPVPGGCGSECHEGCVCDEGFALSGESCLPLASCGCVHQGTYHPPGQTFYPGPGCDSLCHCQEGGLVSCESSSCGPHEACQPSGGSLGCVAVGSSTCQASGDPHYTTFDGRRFDFMGTCVYVLAQTCGTRPGLHRFAVLQENVAWGNGRVSVTRVITVQVANFTLRLEQRQWKVTVNGVDMKLPVVLANGQIRASQHGSDVVIETDFGLRVAYDLVYYVRVTVPGNYYQQMCGLCGNYNGDPKDDFQKPNGSQAGNANEFGNSWEEVVPDSPCLPPTPCPPGSEDCIPSHKCPPELEKKYQKEEFCGLLSSPTGPLSSCHKLVDPQGPLKDCIFDLCLGGGNLSILCSNIHAYVSACQAAGGHVEPWRTETFCPMECPPNSHYELCADTCSLGCSALSAPPQCQDGCAEGCQCDSGFLYNGQACVPIQQCGCYHNGVYYEPEQTVLIDNCRQQCTCHAGKGMVCQEHSCKPGQVCQPSGGILSCVTKDPCHGVTCRPQETCKEQGGQGVCLPNYEATCWLWGDPHYHSFDGRKFDFQGTCNYVLATTGCPGVSTQGLTPFTVTTKNQNRGNPAVSYVRVVTVAALGTNISIHKDEIGKVRVNGVLTALPVSVADGRISVTQGASKALLVADFGLQVSYDWNWRVDVTLPSSYHGAVCGLCGNMDRNPNNDQVFPNGTLAPSIPIWGGSWRAPGWDPLCWDECRGSCPTCPEDRLEQYEGPGFCGPLAPGTGGPFTTCHAHVPPESFFKGCVLDVCMGGGDRDILCKALASYVAACQAAGVVIEDWRAQVGCEITCPENSHYEVCGSPCPASCPSPAPLTTPAVCEGPCVEGCQCDAGFVLSADRCVPLNNGCGCWANGTYHEAGSEFWADGTCSQWCRCGPGGGSLVCTPASCGLGEVCGLLPSGQHGCQPVSTAECQAWGDPHYVTLDGHRFNFQGTCEYLLSAPCHGPPLGAENFTVTVANEHRGSQAVSYTRSVTLQIYNHSLTLSARWPRKLQVDGVFVTLPFQLDSLLHAHLSGADVVVTTTSGLSLAFDGDSFVRLRVPAAYAGSLCGLCGNYNQDPADDLKAVGGKPAGWQVGGAQGCGECVSKPCPSPCTPEQQESFGGPDACGVISATDGPLAPCHGLVPPAQYFQGCLLDACQVQGHPGGLCPAVATYVAACQAAGAQLREWRRPDFCPFQCPAHSHYELCGDSCPGSCPSLSAPEGCESACREGCVCDAGFVLSGDTCVPVGQCGCLHDDRYYPLGQTFYPGPGCDSLCRCREGGEVSCEPSSCGPHETCRPSGGSLGCVAVGSTTCQASGDPHYTTFDGRRFDFMGTCVYVLAQTCGTRPGLHRFAVLQENVAWGNGRVSVTRVITVQVANFTLRLEQRQWKVTVNGVDMKLPVVLANGQIRASQHGSDVVIETDFGLRVAYDLVYYVRVTVPGNYYQLMCGLCGNYNGDPKDDFQKPNGSQAGNANEFGNSWEEVVPDSPCLPPPTCPPGSEGCIPSEECPPELEKKYQKEEFCGLLSSPTGPLSSCHKLVDPQGPLKDCIFDLCLGGGNLSILCSNIHAYVSACQAAGGQVEPWRNETFCPMECPQNSHYELCADTCSLGCSALSAPLQCPDGCAEGCQCDSGFLYNGQACVPIQQCGCYHNGAYYEPEQTVLIDNCRQQCTCHVGKVVVCQEHSCKPGQVCQPSGGILSCVNKDPCHGVTCRPQETCKEQGGQGVCLPNYEATCWLWGDPHYHSFDGRKFDFQGTCNYVLATTGCPGVSTQGLTPFTVTTKNQNRGNPAVSYVRVVTVAALGTNISIHKDEIGKVRVNGVLTALPVSVADGRISVTQGASKALLVADFGLQVSYDWNWRVDVTLPSSYHGAVCGLCGNMDRNPNNDQVFPNGTLAPSIPIWGGSWRAPGWDPLCWDECRGSCPTCPEDRLEQYEGPGFCGPLAPGTGGPFTTCHAHVPPESFFKGCVLDVCMGGGDRDILCKALASYVAACQAAGVVIEDWRAQVGCEITCPENSHYEVCGPPCPASCPSPAPLTTPAVCEGPCVEGCQCDAGFVLSADRCVPLNNGCGCWANGTYHEAGSEFWADGTCSQWCRCGPGGGSLVCTPASCGLGEVCGLLPSGQHGCQPVSTAECQAWGDPHYVTLDGHRFDFQGTCEYLLSAPCHGPPLGAENFTVTVANEHRGSQAVSYTRSVTLQIYNHSLTLSARWPRKLQVDGVFVTLPFQLDSLLHAHLSGADVVVTTTSGLSLAFDGDSFVRLRVPAAYAGSLCGLCGNYNQDPADDLKAVGGKPAGWQVGGAQGCGECVSKPCPSPCTPEQQESFGGPDACGVISATDGPLAPCHGLVPPAQYFQGCLLDACQVQGHPGGLCPAVATYVAACQAAGAQLREWRRPDFCPFQCPAHSHYELCGDSCPGSCPSLSAPEGCESACREGCVCDAGFVLSGDTCVPVGQCGCLHDDRYYPLGQTFYPGPGCDSLCRCREGGEVSCEPSSCGPHETCRPSGGSLGCVAVGSTTCQASGDPHYTTFDGHRFDFMGTCVYVLAQTCGTRPGLHRFAVLQENVAWGNGRVSVTRVITVQVANFTLRLEQRQWKVTVNGVDMKLPVVLANGQIRASQHGSDVVIETDFGLRVAYDLVYYVRVTVPGNYYQLMCGLCGNYNGDPKDDFQKPNGSQAGNANEFGNSWEEVVPDSPCLPPPTCPPGSAGCIPSDKCPPELEKKYQKEEFCGLLSSPTGPLSSCHKLVDPQGPLKDCIFDLCLGGGNLSILCSNIHAYVSACQAAGGHVEPWRNETFCPMECPQNSHYELCADTCSLGCSALSAPLQCPDGCAEGCQCDSGFLYNGQACVPIQQCGCYHNGVYYEPEQTVLIDNCRQQCTCHVGKVVVCQEHSCKPGQVCQPSGGILSCVTKDPCHGVTCRPQETCKEQGGQGVCLPNYEATCWLWGDPHYHSFDGRKFDFQGTCNYVLATTGCPGVSTQGLTPFTVTTKNQNRGNPAVSYVRVVTVAALGTNISIHKDEIGKVRVNGVLTALPVSVADGRISVAQGASKALLVADFGLQVSYDWNWRVDVTLPSSYHGAVCGLCGNMDRNPNNDQVFPNGTLAPSIPIWGGSWRAPGWDPLCWDECRGSCPTCPEDRLEQYEGPGFCGPLSSGTGGPFTTCHAHVPPESFFKGCVLDVCMGGGDRDILCKALASYVAACQAAGVVIEDWRAQVGCEITCPENSHYEVCGPPCPASCPSPAPLTTPAVCEGPCVEGCQCDAGFVLSADRCVPLNNGCGCWANGTYHEAGSEFWADGTCSQWCRCGPGGGSLVCTPASCGLGEVCGLLPSGQHGCQPVSTAECQAWGDPHYVTLDGHRFDFQGTCEYLLSAPCHGPPLGAENFTVTVANEHRGSQAVSYTRSVTLQIYNHSLTLSARWPRKLQVDGVFVALPFQLDSLLHAHLSGADVVVTTTSGLSLAFDGDSFVRLRVPAAYAASLCGLCGNYNQDPADDLKAVGGKPAGWQVGGAQGCGECVSKPCPSPCTPEQQESFGGPDACGVISATDGPLAPCHGLVPPAQYFQGCLLDACQVQGHPGGLCPAVATYVAACQAAGAQLGEWRRPDFCPLQCPAHSHYELCGDSCPVSCPSLSAPEGCESACREGCVCDAGFVLSGDTCVPVGQCGCLHDGRYYPLGEVFYPGPECERRCECGPGGHVTCQEGAACGPHEECRLEDGVQACHATGCGRCLANGGIHYITLDGRVYDLHGSCSYVLAQVCHPKPGDEDFSIVLEKNAAGDLQRLLVTVAGQVVSLAQGQQVTVDGEAVALPVAVGRVRVTAEGRNMVLQTTKGLRLLFDGDAHLLMSIPSPFRGRLCGLCGNFNGNWSDDFVLPNGSAASSVETFGAAWRAPGSSKGCGEGCGPQGCPVCLAEETAPYESNEACGQLRNPQGPFATCQAVLSPSEYFRQCVYDLCAQKGDKAFLCRSLAAYTAACQAAGVAVKPWRTDSFCPLHCPAHSHYSICTRTCQGSCAALSGLTGCTTRCFEGCECDDRFLLSQGVCIPVQDCGCTHNGRYLPVNSSLLTSDCSERCSCSSSSGLTCQAAGCPPGRVCEVKAEARNCWATRGLCVLSVGANLTTFDGARGATTSPGVYELSSRCPGLQNTIPWYRVVAEVQICHGKTEAVGQVHIFFQDGMVTLTPNKGVWVNGLRVDLPAEKLASVSVSRTPDGSLLVRQKAGVQVWLGANGKVAVIVSNDHAGKLCGACGNFDGDQTNDWHDSQEKPAMEKWRAQDFSPCYG

SEQ ID NO: 38912 - protein, 576 aa, Homo sapiens
  Payload ID: 7789
  Gene Symbol:
  Gene Name: Homo sapiens phosphatase and tensin homolog (PTEN), transcript variant 1, mRNA. [Source:RefSeq mRNA
  Acc:NM_001304717]
  ENSP ID: ENSP00000489359
LERGGEAAAAAAAAAAAPGRGSESPVTISRAGNAGELVSPLLLPPTRRRRRRHIQGPGPVLNLPSAAAAPPVARAPEAAGGGSRSEDYSSSPHSAAAAARPLAAEEKQAQSLQPSSSRRSSHYPAAVQSQAAAERGASATAKSRAISILQKKPRHQQLLPSLSSFFFSHRLPDMTAIIKEIVSRNKRRYQEDGFDLDLTYIYPNIIAMGFPAERLEGVYRNNIDDVVRFLDSKHKNHYKIYNLCAERHYDTAKFNCRVAQYPFEDHNPPQLELIKPFCEDLDQWLSEDDNHVAAIHCKAGKGRTGVMICAYLLHRGKFLKAQEALDFYGEVRTRDKKGVTIPSQRRYVYYYSYLLKNHLDYRPVALLFHKMMFETIPMFSGGTCNPQFVVCQLKVKIYSSNSGPTRREDKFMYFEFPQPLPVCGDIKVEFFHKQNKMLKKDKMFHFWVNTFFIPGPEETSEKVENGSLCDQEIDSICSIERADNDKEYLVLTLTKNDLDKANKDKANRYFSPNFKVKLYFTKTVEEPSNPEASSSTSVTPDVSDNEPDHYRYSDTTDSDPENEPFDEDQHTQITKV

SEQ ID NO: 38913 - protein, 226 aa, Homo sapiens
  Payload ID: 7790
  Gene Symbol:
  Gene Name: Homo sapiens surfeit 4 (SURF4), transcript variant 2, mRNA. [Source:RefSeq mRNA
  Acc:NM_001280788]
  ENSP ID: ENSP00000486033
MWFQWSEQRDYIDTTWNCGYLLASSFVFLNLLGQLTGCVLVLSRNFVQYACFGLFGIIALQTIAYSILWDLKFLMRNLALGGGLLLLLAESRSEGKSMFAGVPTMRESSPKQYMQLGGRVLLVLMFMTLLHFDASFFSIVQNIVGTALMILVAIGFKTKLAALTLVVWLFAINVYFNAFWTIPVYKPMHDFLKYDFFQTMSVIGGLLLVVALGPGGVSMDEKKKEW

SEQ ID NO: 38914 - protein, 269 aa, Homo sapiens
  Payload ID: 7790
  Gene Symbol:
  Gene Name: Homo sapiens surfeit 4 (SURF4), transcript variant 2, mRNA. [Source:RefSeq mRNA
  Acc:NM_001280788]
  ENSP ID: ENSP00000486049
MGQNDLMGTAEDFADQFLRVTKQYLPHVARLCLISTFLEDGIRMWFQWSEQRDYIDTTWNCGYLLASSFVFLNLLGQLTGCVLVLSRNFVQYACFGLFGIIALQTIAYSILWDLKFLMRNLALGGGLLLLLAESRSEGKSMFAGVPTMRESSPKQYMQLGGRVLLVLMFMTLLHFDASFFSIVQNIVGTALMILVAIGFKTKLAALTLVVWLFAINVYFNAFWTIPVYKPMHDFLKYDFFQTMSVIGGLLLVVALGPGGVSMDEKKKEW

SEQ ID NO: 38915 - protein, 226 aa, Homo sapiens; identical to SEQ ID NO: 38913
  Payload ID: 7790
  Gene Symbol:
  Gene Name: Homo sapiens surfeit 4 (SURF4), transcript variant 2, mRNA. [Source:RefSeq mRNA
  Acc:NM_001280788]
  ENSP ID: ENSP00000486393

SEQ ID NO: 38916 - protein, 128 aa, Homo sapiens
  Payload ID: 7790
  Gene Symbol:
  Gene Name: Homo sapiens surfeit 4 (SURF4), transcript variant 2, mRNA. [Source:RefSeq mRNA
  Acc:NM_001280788]
  ENSP ID: ENSP00000486869
MGQNDLMGTAEDFADQFLRVTKQYLPHVARLCLISTFLEDGIRMWFQWSEQRDYIDTTWNCGYLLASSFVFLNLLGQLTGCVLVLSRNFVQYACFGLFGIIALQTIAYSILWDLKFLMRLSRTSWAQL

SEQ ID NO: 38917 - protein, 186 aa, Homo sapiens
  Payload ID: 7790
  Gene Symbol:
  Gene Name: Homo sapiens surfeit 4 (SURF4), transcript variant 2, mRNA. [Source:RefSeq mRNA
  Acc:NM_001280788]
  ENSP ID: ENSP00000487188
MGQNDLMGTAEDFADQFLRVTKQYLPHVARLCLISTFLEDGIRMWFQWSEQRDYIDTTWNCGYLLASSFVFLNLLGQLTGCVLVLSRNFVQYACFGLFGIIALQTIAYSILWDLKFLMRNLALGGGLLLLLAESRSEGKSMFAGVPTMRESSPKQYMQLGGRVLLVLMFMTLLHFDASFFSQPSQQ

SEQ ID NO: 38918 - protein, 159 aa, Homo sapiens
  Payload ID: 7790
  Gene Symbol:
  Gene Name: Homo sapiens surfeit 4 (SURF4), transcript variant 2, mRNA. [Source:RefSeq mRNA
  Acc:NM_001280788]
  ENSP ID: ENSP00000487537
MGQNDLMGTAEDFADQFLRVTKQYLPHVARLCLISTFLEDGIRMWFQWSEQRDYIDTTWNCGYLLASSFVFLNLLGQLTGCVLVLSRNFVQYACFGLFGIIALQTIAYSILWDLKFLMRNLALGGGLLLLLAESRSEGKSMFAGVPTMRESSPKQYLPG

SEQ ID NO: 38919 - protein, 390 aa, Homo sapiens
  Payload ID: 7791
  Gene Symbol: HERPUD1
  Gene Name: homocysteine-inducible, endoplasmic reticulum stress-inducible, ubiquitin-like domain member 1
  Uniprot ID: Q15011
  ENSP ID: ENSP00000300302
MESETEPEPVTLLVKSPNQRHRDLELSGDRGWSVGHLKAHLSRVYPERPRPEDQRLIYSGKLLLDHQCLRDLLPKEKRHVLHLVCNVKSPSKMPEINAKVAESTEEPAGSNRGQYPEDSSSDGLRQREVLRNLSSPGWENISRPEAAQQAFQGLGPGFSGYTPYGWLQLSWFQQIYARQYYMQYLAATAASGAFVPPPSAQEIPVVSAPAPAPIHNQFPAENQPANQNAAPQVVVNPGANQNLRMNAQGGPIVEEDDEINRDWLDWTYSAATFSVFLSILYFYSSLSRFLMVMGATVVMYLHHVGWFPFRPRPVQNFPNDGPPPDVVNQDPNNNLQEGTDPETEDPNHLPPDRDVLDGEQTSPSFMSTAWLVFKTFFASLLPEGPPAIAN

SEQ ID NO: 38920 - protein, 232 aa, Homo sapiens
  Payload ID: 7791
  Gene Symbol: HERPUD1
  Gene Name: homocysteine-inducible, endoplasmic reticulum stress-inducible, ubiquitin-like domain member 1
  Uniprot ID: Q15011
  ENSP ID: ENSP00000340931
MESETEPEPVTLLVKSPNQRHRDLELSGDRGWSVGHLKAHLSRVYPERPRPEDQRLIYSGKLLLDHQCLRDLLPKEKRHVLHLVCNVKSPSKMPEINAKVAESTEEPAGSNRGQYPEDSSSDGLRQREVLRNLSSPGWENISRHHVGWFPFRPRPVQNFPNDGPPPDVVNQDPNNNLQEGTDPETEDPNHLPPDRDVLDGEQTSPSFMSTAWLVFKTFFASLLPEGPPAIAN

SEQ ID NO: 38921 - protein, 366 aa, Homo sapiens
  Payload ID: 7791
  Gene Symbol: HERPUD1
  Gene Name: homocysteine-inducible, endoplasmic reticulum stress-inducible, ubiquitin-like domain member 1
  Uniprot ID: Q15011
  ENSP ID: ENSP00000369118
MESETEPEPVTLLVKSPNQRHRDLELSGDRGWSVGHLKAHLSRVYPERPRPEDQRLIYSGKLLLDHQCLRDLLPKVAESTEEPAGSNRGQYPEDSSSDGLRQREVLRNLSSPGWENISRPEAAQQAFQGLGPGFSGYTPYGWLQLSWFQQIYARQYYMQYLAATAASGAFVPPPSAQEIPVVSAPAPAPIHNQFPAENQPANQNAAPQVVVNPGANQNLRMNAQGGPIVEEDDEINRDWLDWTYSAATFSVFLSILYFYSSLSRFLMVMGATVVMYLHHVGWFPFRPRPVQNFPNDGPPPDVVNQDPNNNLQEGTDPETEDPNHLPPDRDVLDGEQTSPSFMSTAWLVFKTFFASLLPEGPPAIAN

SEQ ID NO: 38922 - protein, 391 aa, Homo sapiens
  Payload ID: 7791
  Gene Symbol: HERPUD1
  Gene Name: homocysteine-inducible, endoplasmic reticulum stress-inducible, ubiquitin-like domain member 1
  Uniprot ID: Q15011
  ENSP ID: ENSP00000409555
MESETEPEPVTLLVKSPNQRHRDLELSGDRGWSVGHLKAHLSRVYPERPRPEDQRLIYSGKLLLDHQCLRDLLPKQEKRHVLHLVCNVKSPSKMPEINAKVAESTEEPAGSNRGQYPEDSSSDGLRQREVLRNLSSPGWENISRPEAAQQAFQGLGPGFSGYTPYGWLQLSWFQQIYARQYYMQYLAATAASGAFVPPPSAQEIPVVSAPAPAPIHNQFPAENQPANQNAAPQVVVNPGANQNLRMNAQGGPIVEEDDEINRDWLDWTYSAATFSVFLSILYFYSSLSRFLMVMGATVVMYLHHVGWFPFRPRPVQNFPNDGPPPDVVNQDPNNNLQEGTDPETEDPNHLPPDRDVLDGEQTSPSFMSTAWLVFKTFFASLLPEGPPAIAN

SEQ ID NO: 38923 - protein, 160 aa, Homo sapiens
  Payload ID: 7791
  Gene Symbol: HERPUD1
  Gene Name: homocysteine-inducible, endoplasmic reticulum stress-inducible, ubiquitin-like domain member 1
  ENSP ID: ENSP00000455094
MVKNVLERPEDQRLIYSGKLLLDHQCLRDLLPKQEKRHVLHLVCNVKSPSKMPEINAKVAESTEEPAGSNRGQYPEDSSSDGLRQREVLRNLSSPGWENISRPEAAQQAFQGLGPGFSGYTPYGWLQLSWFQQIYARQYYMQYLAATAASGAFVPPPSAQ

SEQ ID NO: 38924 - protein, 226 aa, Homo sapiens
  Payload ID: 7791
  Gene Symbol: HERPUD1
  Gene Name: homocysteine-inducible, endoplasmic reticulum stress-inducible, ubiquitin-like domain member 1
  ENSP ID: ENSP00000455841
  MOD_RES (1)..(1): Any amino acid
XGQYPEDSSSDGLRQREVLRNLSSPGWENISSLAATAASGAFVPPPSAQEIPVVSAPAPAPIHNQFPAENQPANQNAAPQVVVNPGANQNLRMNAQGGPIVEEDDEINRDWLDWTYSAATFSVFLSILYFYSSLSRFLMVMGATVVMYLHHVGWFPFRPRPVQNFPNDGPPPDVVNQDPNNNLQKAPQPSQTDGVCAVAVGGFDRNGLDHLTPARLPLLDMAMMSF

SEQ ID NO: 38925 - protein, 53 aa, Homo sapiens
  Payload ID: 7791
  Gene Symbol: HERPUD1
  Gene Name: homocysteine-inducible, endoplasmic reticulum stress-inducible, ubiquitin-like domain member 1
  ENSP ID: ENSP00000456384
MESETEPEPVTLLVKSPNQRHRDLELSGDRGWSVGHLKAHLSRVYPERPRTRG

SEQ ID NO: 38926 - protein, 109 aa, Homo sapiens
  Payload ID: 7791
  Gene Symbol: HERPUD1
  Gene Name: homocysteine-inducible, endoplasmic reticulum stress-inducible, ubiquitin-like domain member 1
  ENSP ID: ENSP00000457095
  MOD_RES (1)..(1): Any amino acid
XEKRHVLHLVCNVKSPSKMPEINAKVAESTEEPAGSNRGQYPEDSSSDGLRQREVLRNLSSPGWENISRPEAAQQAFQGLGPGFSGYTPYGWLQLSWFQQIYARQYYMQ

SEQ ID NO: 38927 - protein, 150 aa, Homo sapiens
  Payload ID: 7791
  Gene Symbol: HERPUD1
  Gene Name: homocysteine-inducible, endoplasmic reticulum stress-inducible, ubiquitin-like domain member 1
  ENSP ID: ENSP00000457321
MVKNVLERPEDQRLIYSGKLLLDHQCLRDLLPKVAESTEEPAGSNRGQYPEDSSSDGLRQREVLRNLSSPGWENISRPEAAQQAFQGLGPGFSGYTPYGWLQLSWFQQIYARQYYMQYLAATAASGAFVPPPSAQEIPVVSAPAPAPIHN

SEQ ID NO: 38928 - protein, 150 aa, Homo sapiens
  Payload ID: 7791
  Gene Symbol: HERPUD1
  Gene Name: homocysteine-inducible, endoplasmic reticulum stress-inducible, ubiquitin-like domain member 1
  ENSP ID: ENSP00000457955
  MOD_RES (1)..(1): Any amino acid
XQQAFQGLGPGFSGYTPYGWLQLSWFQQIYARQYYMQYILYFYSSLSRFLMVMGATVVMYLHHVGWFPFRPRPVQNFPNDGPPPDVVNQDPNNNLQEGTDPETEDPNHLPPDRDVLDGEQTSPSFMSTAWLVFKTFFASLLPEGPPAIAN

SEQ ID NO: 38929 - protein, 445 aa, Homo sapiens
  Payload ID: 7792
  Gene Symbol: HGD
  Gene Name: homogentisate 1,2-dioxygenase
  Uniprot ID: Q93099
  ENSP ID: ENSP00000283871
MAELKYISGFGNECSSEDPRCPGSLPEGQNNPQVCPYNLYAEQLSGSAFTCPRSTNKRSWLYRILPSVSHKPFESIDEGQVTHNWDEVDPDPNQLRWKPFEIPKASQKKVDFVSGLHTLCGAGDIKSNNGLAIHIFLCNTSMENRCFYNSDGDFLIVPQKGNLLIYTEFGKMLVQPNEICVIQRGMRFSIDVFEETRGYILEVYGVHFELPDLGPIGANGLANPRDFLIPIAWYEDRQVPGGYTVINKYQGKLFAAKQDVSPFNVVAWHGNYTPYKYNLKNFMVINSVAFDHADPSIFTVLTAKSVRPGVAIADFVIFPPRWGVADKTFRPPYYHRNCMSEFMGLIRGHYEAKQGGFLPGGGSLHSTMTPHGPDADCFEKASKVKLAPERIADGTMAFMFESSLSLAVTKWGLKASRCLDENYHKCWEPLKSHFTPNSRNPAEPN

SEQ ID NO: 38930 - protein, 88 aa, Homo sapiens
  Payload ID: 7792
  Gene Symbol: HGD
  Gene Name: homogentisate 1,2-dioxygenase
  ENSP ID: ENSP00000417977
  MOD_RES (1)..(1): Any amino acid
XPQKGNLLIYTEFGKMLVQPNEICVIQRGMRFSIDVFEETRGYILEVYGVHFELPDLGPIDSLGLPKRMSPRSMLWPGTGIIHPTSTT

SEQ ID NO: 38931 - protein, 145 aa, Homo sapiens
  Payload ID: 7792
  Gene Symbol: HGD
  Gene Name: homogentisate 1,2-dioxygenase
  ENSP ID: ENSP00000419163
  MOD_RES (1)..(1): Any amino acid
XETRGYILEVYGVHFELPDLGPIGANGLANPRDFLIPIAWYEDRQVPGGYTVINKYQGKLFAAKQDVSPFNVVAWHGNYTPYKYNLKNFMVINSVAFDHADPSIFTVLTAKSVRPGVAIADFVIFPPRWGVADKTFRPPYYHNLA

SEQ ID NO: 38932 - protein, 142 aa, Homo sapiens
  Payload ID: 7792
  Gene Symbol: HGD
  Gene Name: homogentisate 1,2-dioxygenase
  ENSP ID: ENSP00000419560
MSVLQRILAAQVPCQKDSWLYRILPSVSHKPFESIDEGQVTHNWDEVDPDPNQLRWKPFEIPKASQKKVDFVSGLHTLCGAGDIKSNNGLAIHIFLCNTSMENRCFYNSDGDFLIVPQKGNLLIYTEFGKMLVQPNEICVIQ

SEQ ID NO: 38933 - protein, 98 aa, Homo sapiens
  Payload ID: 7792
  Gene Symbol: HGD
  Gene Name: homogentisate 1,2-dioxygenase
  ENSP ID: ENSP00000419838
DIKSNNGLAIHIFLCNTSMENRCFYNSDGDFLIVPQKGNLLIYTEFGKMLVQPNEICVIQDVSPFNVVAWHGNYTPYKYNLKNFMVINSVAFDHAGTA

SEQ ID NO: 38934 - protein, 728 aa, Homo sapiens
  Payload ID: 7793
  Gene Symbol: HOOK1
  Gene Name: hook microtubule-tethering protein 1
  Uniprot ID: Q9UJC3
  ENSP ID: ENSP00000360252
MEETQPPPQPKLPLCDSLMIWLQTFNTASPCQDVKQLTSGVAMAQVLHQIDAAWFNESWLSRIKEDVGDNWRIKASNVKKVLQGIMSYYHEFLGQQISEALIPDLNQITECSDPVELGRLLQLILGCAINCEKKQEHIQNIMTLEESVQHVVMTAIQELMSKEILSSPPNDAVGELEQQLKRALEELQEALAEKEELRQRCEELDMQVTTLQDEKNSLVSENEMMNEKLDQLDGSFDDPNTVVAKKYFHAQLQLEQLQEENFRLEAAKDDYRVHCEELEKQLIEFQHRNDELTSLAEETRALKDEIDVLRATSDKANKLESTVEIYRQKLQDLNDLRKQVKTLQETNMMYMHNTVSLEEELKKANAARTQLETYKRQVQDLHVKLSSESKRADTLAFEMKRLEEKHEALLKEKERLIEQRDTLKETNEELRCSQVQQDHLNQTDASATKSYENLAAEIMPVEYREVFIRLQHENKMLRLQQEGSENERIEELQEQLEQKHRKMNELETEQRLSKERIRELQQQIEDLQKSLQEQGSKSEGESSSKLKQKLEAHMEKLTEVHEELQKKQELIEDLQPDINQNVQKINELEAALQKKDEDMKAMEERYKMYLEKARNVIKTLDPKLNPASAEIMLLRKQLAEKERRIEILESECKVAKFRDYEEKLIVSAWYNKSLAFQKLGMESRLVSGGGACSDTGACTPARSFLAQQRHITNTRRNLSVKVPATTSD

SEQ ID NO: 38935 - protein, 137 aa, Homo sapiens
  Payload ID: 7793
  Gene Symbol: HOOK1
  Gene Name: hook microtubule-tethering protein 1
  ENSP ID: ENSP00000398860
MEETQPPPQPKLPLCDSLMIWLQTFNTASPCQDVKQLTSGVAMAQVLHQIDAAWFNESWLSRIKEDVGDNWRIKASNVKKVLQGIMSYYHEFLGQQISEALIPDLNQITECSDPVELGRLLQLILGCAINCEKKQEH

SEQ ID NO: 38936 - protein, 717 aa, Homo sapiens
  Payload ID: 7794
  Gene Symbol: HOOK2
  Gene Name: hook microtubule-tethering protein 2
  Uniprot ID: Q96ED9
  ENSP ID: ENSP00000264827
MSVDKAELCGSLLTWLQTFHVPSPCASPQDLSSGLAVAYVLNQIDPSWFNEAWLQGISEDPGPNWKLKVSNLKMVLRSLVEYSQDVLAHPVSEEHLPDVSLIGEFSDPAELGKLLQLVLGCAISCEKKQDHIQRIMTLEESVQHVVMEAIQELMTKDTPDSLSPETYGNFDSQSRRYYFLSEEAEEGDELQQRCLDLERQLMLLSEEKQSLAQENAGLRERMGRPEGEGTPGLTAKKLLLLQSQLEQLQEENFRLESGREDERLRCAELEREVAELQHRNQALTSLAQEAQALKDEMDELRQSSERAGQLEATLTSCRRRLGELRELRRQVRQLEERNAGHAERTRQLEDELRRAGSLRAQLEAQRRQVQELQGQRQEEAMKAEKWLFECRNLEEKYESVTKEKERLLAERDSLREANEELRCAQLQPRGLTQADPSLDPTSTPVDNLAAEILPAELRETLLRLQLENKRLCRQEAADRERQEELQRHLEDANRARHGLETQHRLNQQQLSELRAQVEDLQKALQEQGGKTEDSILLKRKLEEHLQKLHEADLELQRKREYIEELEPPTDSSTARRIEELQHNLQKKDADLRAMEERYRRYVDKARMVMQTMEPKQRPAAGAPPELHSLRTQLRERDVRIRHLEMDFEKSRSQREQEEKLLISAWYNMGMALQQRAGEERAPAHAQSFLAQQRLATNSRRGPLGRLASLNLRPTDKH

SEQ ID NO: 38937 - protein, 719 aa, Homo sapiens
  Payload ID: 7794
  Gene Symbol: HOOK2
  Gene Name: hook microtubule-tethering protein 2
  Uniprot ID: Q96ED9
  ENSP ID: ENSP00000380785
MSVDKAELCGSLLTWLQTFHVPSPCASPQDLSSGLAVAYVLNQIDPSWFNEAWLQGISEDPGPNWKLKVSNLKMVLRSLVEYSQDVLAHPVSEEHLPDVSLIGEFSDPAELGKLLQLVLGCAISCEKKQDHIQRIMTLEESVQHVVMEAIQELMTKDTPDSLSPETYGNFDSQSRRYYFLSEEAEEGDELQQRCLDLERQLMLLSEEKQSLAQENAGLRERMGRPEGEGTPGLTAKKLLLLQSQLEQLQEENFRLESGREDERLRCAELEREVAELQHRNQALTSLAQEAQALKDEMDELRQSSERAGQLEATLTSCRRRLGELRELRRQVRQLEERNAGHAERTRQLEDELRRAGSLRAQLEAQRRQVQELQGQRQEEAMKAEKWLFECRNLEEKYESVTKEKERLLAERDSLREANEELRCAQLQPRGLTQADPSLDPTSTPVDNLAAEILPAELRETLLRLQLENKRLCRQEAADRERQEELQRHLEDANRARHGLETQHRLNQQQLSELRAQVEDLQKALQEQGGKTEDAISILLKRKLEEHLQKLHEADLELQRKREYIEELEPPTDSSTARRIEELQHNLQKKDADLRAMEERYRRYVDKARMVMQTMEPKQRPAAGAPPELHSLRTQLRERDVRIRHLEMDFEKSRSQREQEEKLLISAWYNMGMALQQRAGEERAPAHAQSFLAQQRLATNSRRGPLGRLASLNLRPTDKH

SEQ ID NO: 38938 - protein, 226 aa, Homo sapiens
  Payload ID: 7794
  Gene Symbol: HOOK2
  Gene Name: hook microtubule-tethering protein 2
  ENSP ID: ENSP00000465023
MVLRSLVEYSQDVLAHPVSEEHLPDVSLIGEFSDPAELGKLLQLVLGCAISCEKKQDHIQRIMTLEESVQHVVMEAIQELMTKDTPDSLSPETYGNFDSQSRRYYFLSEEAEEGDELQQRCLDLERQLMLLSEEKQSLAQENAGLRERMGRPEGEGTPGLTAKKLLLLQSQLEQLQEENFRLESGREDERLRCAELEREVAELQHRNQALTSLAQEAQALKDEMDE

SEQ ID NO: 38939 - protein, 209 aa, Homo sapiens
  Payload ID: 7794
  Gene Symbol: HOOK2
  Gene Name: hook microtubule-tethering protein 2
  ENSP ID: ENSP00000465042
MSVDKAELCGSLLTWLQTFHVPSPCASPQDLSSGLAVAYVLNQIDPSWFNEAWLQGISEDPGPNWKLKVTSGLLIRGQTGEEMTRDGPARHMSWVMGRKRDRCLVSNLKMVLRSLVEYSQDVLAHPVSEEHLPDVSLIGEFSDPAELGKLLQLVLGCAISCEKKQDHIQRIMTLEESVQHVVMEAIQELMTKDTPDSLSPETYGNFDSQ

SEQ ID NO: 38940 - protein, 71 aa, Homo sapiens
  Payload ID: 7794
  Gene Symbol: HOOK2
  Gene Name: hook microtubule-tethering protein 2
  ENSP ID: ENSP00000465091
  MOD_RES (1)..(1): Any amino acid
XVLGCAISCEKKQDHIQRIMTLEESVQHVVMEAIQELMTKDTPDSLSPETYGNFDSQPCRSRGARLKIPFC

SEQ ID NO: 38941 - protein, 93 aa, Homo sapiens
  Payload ID: 7794
  Gene Symbol: HOOK2
  Gene Name: hook microtubule-tethering protein 2
  ENSP ID: ENSP00000465427
MVLRSLVEYSQDVLAHPVSEEHLPDVSLIGEFSDPAELGKLLQLVLGCAISCEKKQASPTLIPRPHPENHDAGRIGSACGDGSHPRAHDQRHS

SEQ ID NO: 38942 - protein, 127 aa, Homo sapiens
  Payload ID: 7794
  Gene Symbol: HOOK2
  Gene Name: hook microtubule-tethering protein 2
  ENSP ID: ENSP00000466497
MVLRSLVEYSQDVLAHPVSEEHLPDVSLIGEFSDPAELGKLLQLVLGCAISCEKKQDHIQRIMTLEESVQHVVMEAIQELMTKDTPDSLSPETYGNFDSQSRRYYFLSEEAEEGDELQQRCLDLERQ

SEQ ID NO: 38943 - protein, 157 aa, Homo sapiens
  Payload ID: 7794
  Gene Symbol: HOOK2
  Gene Name: hook microtubule-tethering protein 2
  ENSP ID: ENSP00000466616
MVLRSLVEYSQDVLAHPVSEEHLPDVSLIGEFSDPAELGKLLQLVLGCAISCEKKQDHIQRIMTLEESVQHVVMEAIQELMTKDTPDSLSPETYGNFDSQSRRYYFLSEEAEEGDELQQRCLDLERQLMLLSEEKQSLAQENAGLRERMGRPEGEGT

SEQ ID NO: 38944 - protein, 270 aa, Homo sapiens
  Payload ID: 7794
  Gene Symbol: HOOK2
  Gene Name: hook microtubule-tethering protein 2
  ENSP ID: ENSP00000467097
MVLRSLVEYSQDVLAHPVSEEHLPDVSLIGEFSDPAELGKLLQLVLGCAISCEKKQDHIQRIMTLEESVQHVVMEAIQELMTKDTPDSLSPETYGNFDSQSRRYYFLSEEAEEGDELQQRCLDLERQLMLLSEEKQSLAQENAGLRERMGRPEGEGTPGLTAKKLLLLQSQLEQLQEENFRLESGREDERLRCAELEREVAELQHRNQALTSLAQEAQALKDEMDELRQSSERAGQLEATLTSCRRRLGELRELRRQVRQLEERNAGHAE

SEQ ID NO: 38945 - protein, 718 aa, Homo sapiens
  Payload ID: 7795
  Gene Symbol: HOOK3
  Gene Name: hook microtubule-tethering protein 3
  Uniprot ID: Q86VS8
  ENSP ID: ENSP00000305699
MFSVESLERAELCESLLTWIQTFNVDAPCQTVEDLTNGVVMAQVLQKIDPAYFDENWLNRIKTEVGDNWRLKISNLKKILKGILDYNHEILGQQINDFTLPDVNLIGEHSDAAELGRMLQLILGCAVNCEQKQEYIQAIMMMEESVQHVVMTAIQELMSKESPVSAGNDAYVDLDRQLKKTTEELNEALSAKEEIAQRCHELDMQVAALQEEKSSLLAENQVLMERLNQSDSIEDPNSPAGRRHLQLQTQLEQLQEETFRLEAAKDDYRIRCEELEKEISELRQQNDELTTLADEAQSLKDEIDVLRHSSDKVSKLEGQVESYKKKLEDLGDLRRQVKLLEEKNTMYMQNTVSLEEELRKANAARSQLETYKRQVVELQNRLSEESKKADKLDFEYKRLKEKVDSLQKEKDRLRTERDSLKETIEELRCVQAQEGQLTTQGLMPLGSQESSDSLAAEIVTPEIREKLIRLQHENKMLKLNQEGSDNEKIALLQSLLDDANLRKNELETENRLVNQRLLEVQSQVEELQKSLQDQGSKAEDSVLLKKKLEEHLEKLHEANNELQKKRAIIEDLEPRFNNSSLKIEELQEALRKKEEEMKQMEERYKKYLEKAKSVIRTLDPKQNQGAAPEIQALKNQLQERDRLFHSLEKEYEKTKSQREMEEKYIVSAWYNMGMTLHKKAAEDRLASTGSGQSFLARQRQATSSRRSYPGHVQPATAR

SEQ ID NO: 38946 - protein, 31 aa, Homo sapiens
  Payload ID: 7795
  Gene Symbol: HOOK3
  Gene Name: hook microtubule-tethering protein 3
  ENSP ID: ENSP00000433813
  MOD_RES (1)..(1): Any amino acid
XGSGQSFLARQRQATSSRRSYPGHVQPATAR

SEQ ID NO: 38947 - protein, 161 aa, Homo sapiens
  Payload ID: 7795
  Gene Symbol: HOOK3
  Gene Name: hook microtubule-tethering protein 3
  ENSP ID: ENSP00000433953
EELQKSLQDQGSKAEDAISVLLKKKLEEHLEKLHEANNELQKKRAIIEDLEPRFNNSSLKIEELQEALRKKEEEMKQMEERYKKYLEKAKSVIRTLDPKQNQGAAPEIQALKNQLQERDRLFHSLEKEYEKTKSQREMEEKYIVSAWYNMGMTLHKKAAED

SEQ ID NO: 38948 - protein, 101 aa, Homo sapiens
  Payload ID: 7795
  Gene Symbol: HOOK3
  Gene Name: hook microtubule-tethering protein 3
  ENSP ID: ENSP00000435077
  MOD_RES (1)..(1): Any amino acid
XERDSLKETIEELRCVQAQEGQLTTQGLMPLGSQESSDSLAAEIVTPEIREKLIRLQHENKMLKLNQEGSDNEKIALLQSLLDDANLRKNELETENRYLCP

SEQ ID NO: 38949 - protein, 73 aa, Homo sapiens
  Payload ID: 7796
  Gene Symbol: HOPX
  Gene Name: HOP homeobox
  Uniprot ID: Q9BPY8
  ENSP ID: ENSP00000315198
MSAETASGPTEDQVEILEYNFNKVDKHPDSTTLCLIAAEAGLSEEETQKWFKQRLAKWRRSEGLPSECRSVTD

SEQ ID NO: 38950 - protein, 73 aa, Homo sapiens; identical to SEQ ID NO: 38949
  Payload ID: 7796
  Gene Symbol: HOPX
  Gene Name: HOP homeobox
  Uniprot ID: Q9BPY8
  ENSP ID: ENSP00000337330

SEQ ID NO: 38951 - protein, 73 aa, Homo sapiens; identical to SEQ ID NO: 38949
  Payload ID: 7796
  Gene Symbol: HOPX
  Gene Name: HOP homeobox
  Uniprot ID: Q9BPY8
  ENSP ID: ENSP00000370654

SEQ ID NO: 38952 - protein, 94 aa, Homo sapiens
  Payload ID: 7796
  Gene Symbol: HOPX
  Gene Name: HOP homeobox
  Uniprot ID: Q9BPY8
  ENSP ID: ENSP00000370659
MSAETASGPTEDQVEILEYNFNKVDKHPDSTTLCLIAAEAGLSEEETQGSDLISRSKIWHPESSPQREGYPHDSLPCLAFDYFSLLPPQCKEMV

SEQ ID NO: 38953 - protein, 91 aa, Homo sapiens
  Payload ID: 7796
  Gene Symbol: HOPX
  Gene Name: HOP homeobox
  Uniprot ID: Q9BPY8
  ENSP ID: ENSP00000396275
MLIFLGCYRRRLEERAGTMSAETASGPTEDQVEILEYNFNKVDKHPDSTTLCLIAAEAGLSEEETQKWFKQRLAKWRRSEGLPSECRSVTD

SEQ ID NO: 38954 - protein, 73 aa, Homo sapiens; identical to SEQ ID NO: 38949
  Payload ID: 7796
  Gene Symbol: HOPX
  Gene Name: HOP homeobox
  Uniprot ID: Q9BPY8
  ENSP ID: ENSP00000422175

SEQ ID NO: 38955 - protein, 73 aa, Homo sapiens; identical to SEQ ID NO: 38949
  Payload ID: 7796
  Gene Symbol: HOPX
  Gene Name: HOP homeobox
  Uniprot ID: Q9BPY8
  ENSP ID: ENSP00000424101

SEQ ID NO: 38956 - protein, 112 aa, Homo sapiens
  Payload ID: 7796
  Gene Symbol: HOPX
  Gene Name: HOP homeobox
  Uniprot ID: Q9BPY8
  ENSP ID: ENSP00000450527
MLIFLGCYRRRLEERAGTMSAETASGPTEDQVEILEYNFNKVDKHPDSTTLCLIAAEAGLSEEETQGSDLISRSKIWHPESSPQREGYPHDSLPCLAFDYFSLLPPQCKEMV

SEQ ID NO: 38957 - protein, 73 aa, Homo sapiens; identical to SEQ ID NO: 38949
  Payload ID: 7796
  Gene Symbol: HOPX
  Gene Name: HOP homeobox
  Uniprot ID: Q9BPY8
  ENSP ID: ENSP00000451794

SEQ ID NO: 38958 - protein, 73 aa, Homo sapiens; identical to SEQ ID NO: 38949
  Payload ID: 7796
  Gene Symbol: HOPX
  Gene Name: HOP homeobox
  Uniprot ID: Q9BPY8
  ENSP ID: ENSP00000452003

SEQ ID NO: 38959 - protein, 73 aa, Homo sapiens; identical to SEQ ID NO: 38949
  Payload ID: 7796
  Gene Symbol: HOPX
  Gene Name: HOP homeobox
  Uniprot ID: Q9BPY8
  ENSP ID: ENSP00000452098

SEQ ID NO: 38960 - protein, 73 aa, Homo sapiens; identical to SEQ ID NO: 38949
  Payload ID: 7796
  Gene Symbol: HOPX
  Gene Name: HOP homeobox
  Uniprot ID: Q9BPY8
  ENSP ID: ENSP00000452340

SEQ ID NO: 38961 - protein, 387 aa, Homo sapiens
  Payload ID: 7797
  Gene Symbol: HORMAD1
  Gene Name: HORMA domain containing 1
  Uniprot ID: Q86X24
  ENSP ID: ENSP00000326489
MATAQLQRTPMSALVFPNKISTEHQSLVLVKRLLAVSVSCITYLRGIFPECAYGTRYLDDLCVKILREDKNCPGSTQLVKWMLGCYDALQKKYVYTNPEDPQTISECYQFKFKYTNNGPLMDFISKNQSNESSMLSTDTKKASILLIRKIYILMQNLGPLPNDVCLTMKLFYYDEVTPPDYQPPGFKDGDCEGVIFEGEPMYLNVGEVSTPFHIFKVKVTTERERMENIDSTILSPKQIKTPFQKILRDKDVEDEQEHYTSDDLDIETKMEEQEKNPASSELEEPSLVCEEDEIMRSKESPDLSISHSQVEQLVNKTSELDMSESKTRSGKVFQNKMANGNQPVKSSKENRKRSQHESGRIVLHHFDSSSQESVPKRRKFSEPKEHI

SEQ ID NO: 38962 - protein, 394 aa, Homo sapiens
  Payload ID: 7797
  Gene Symbol: HORMAD1
  Gene Name: HORMA domain containing 1
  Uniprot ID: Q86X24
  ENSP ID: ENSP00000355167
MATAQLQRTPMSALVFPNKISTEHQSLVLVKRLLAVSVSCITYLRGIFPECAYGTRYLDDLCVKILREDKNCPGSTQLVKWMLGCYDALQKKYLRMVVLAVYTNPEDPQTISECYQFKFKYTNNGPLMDFISKNQSNESSMLSTDTKKASILLIRKIYILMQNLGPLPNDVCLTMKLFYYDEVTPPDYQPPGFKDGDCEGVIFEGEPMYLNVGEVSTPFHIFKVKVTTERERMENIDSTILSPKQIKTPFQKILRDKDVEDEQEHYTSDDLDIETKMEEQEKNPASSELEEPSLVCEEDEIMRSKESPDLSISHSQVEQLVNKTSELDMSESKTRSGKVFQNKMANGNQPVKSSKENRKRSQHESGRIVLHHFDSSSQESVPKRRKFSEPKEHI

SEQ ID NO: 38963 - protein, 190 aa, Homo sapiens
  Payload ID: 7797
  Gene Symbol: HORMAD1
  Gene Name: HORMA domain containing 1
  ENSP ID: ENSP00000357983
MRLWNKISRWMLGCYDALQKKYLRMVVLAVYTNPEDPQTISECYQFKFKYTNNGPLMDFISKNQSNESSMLSTDTKKASILLIRKIYILMQNLGPLPNDVCLTMKLFYYDEVTPPDYQPPGFKDGDCEGVIFEGEPMYLNVGEVSTPFHIFKVKVTTERERMENIDSTILSPKQIKTPFQKILRDKDVED

SEQ ID NO: 38964 - protein, 314 aa, Homo sapiens
  Payload ID: 7797
  Gene Symbol: HORMAD1
  Gene Name: HORMA domain containing 1
  Uniprot ID: Q86X24
  ENSP ID: ENSP00000357991
MRLWNKISRWMLGCYDALQKKYLRMVVLATISECYQFKFKYTNNGPLMDFISKNQSNESSMLSTDTKKASILLIRKIYILMQNLGPLPNDVCLTMKLFYYDEVTPPDYQPPGFKDGDCEGVIFEGEPMYLNVGEVSTPFHIFKVKVTTERERMENIDSTILSPKQIKTPFQKILRDKDVEDEQEHYTSDDLDIETKMEEQEKNPASSELEEPSLVCEEDEIMRSKESPDLSISHSQVEQLVNKTSELDMSESKTRSGKVFQNKMANGNQPVKSSKENRKRSQHESGRIVLHHFDSSSQESVPKRRKFSEPKEHI

SEQ ID NO: 38965 - protein, 164 aa, Homo sapiens
  Payload ID: 7797
  Gene Symbol: HORMAD1
  Gene Name: HORMA domain containing 1
  ENSP ID: ENSP00000401940
MRLWNKISRWMLGCYDALQKKYVYTNPEDPQTISECYQFKFKYTNNGPLMDFISKNQSNESSMLSTDTKKASILLIRKIYILMQNLGPLPNDVCLTMKLFYYDEVTPPDYQPPGFKDGDCEGVIFEGEPMYLNVGEVSTPFHIFKVKVTTERERMENIDSTILS

SEQ ID NO: 38966 - protein, 307 aa, Homo sapiens
  Payload ID: 7798
  Gene Symbol: HORMAD2
  Gene Name: HORMA domain containing 2
  Uniprot ID: Q8N7B1
  ENSP ID: ENSP00000336984
MATAQLSHCITIHKASKETVFPSQITNEHESLKMVKKLFATSISCITYLRGLFPESSYGERHLDDLSLKILREDKKCPGSLHIIRWIQGCFDALEKRYLRMAVLTLYTDPMGSEKVTEMYQFKFKYTKEGATMDFDSHSSSTSFESGTNNEDIKKASVLLIRKLYILMQDLEPLPNNVVLTMKLHYYNAVTPHDYQPLGFKEGVNSHFLLFDKEPINVQVGFVSTGFHSMKVKVMTEATKVIDLENNLFRENSTTEIAHQGLDCDEEEECNDHIQRMNFVCSQQSSECSRKKRKVSEPVKVFIPNRK

SEQ ID NO: 38967 - protein, 307 aa, Homo sapiens; identical to SEQ ID NO: 38966
  Payload ID: 7798
  Gene Symbol: HORMAD2
  Gene Name: HORMA domain containing 2
  Uniprot ID: Q8N7B1
  ENSP ID: ENSP00000385055

SEQ ID NO: 38968 - protein, 91 aa, Homo sapiens
  Payload ID: 7798
  Gene Symbol: HORMAD2
  Gene Name: HORMA domain containing 2
  ENSP ID: ENSP00000393415
MATAQLSHCITIHKASKETVFPSQITNEHESLKMVKKLFATSISCITYLRGLFPESSYGERHLDDLSLKILREDKKCPGSLHIIRCYVWQY

SEQ ID NO: 38969 - protein, 714 aa, Homo sapiens
  Payload ID: 7799
  Gene Symbol: HUNK
  Gene Name: hormonally up-regulated Neu-associated kinase
  Uniprot ID: P57058
  ENSP ID: ENSP00000270112
MPAAAGDGLLGEPAAPGGGGGAEDAARPAAACEGSFLPAWVSGVPRERLRDFQHHKRVGNYLIGSRKLGEGSFAKVREGLHVLTGEKVAIKVIDKKRAKKDTYVTKNLRREGQIQQMIRHPNITQLLDILETENSYYLVMELCPGGNLMHKIYEKKRLEESEARRYIRQLISAVEHLHRAGVVHRDLKIENLLLDEDNNIKLIDFGLSNCAGILGYSDPFSTQCGSPAYAAPELLARKKYGPKIDVWSIGVNMYAMLTGTLPFTVEPFSLRALYQKMVDKEMNPLPTQLSTGAISFLRSLLEPDPVKRPNIQQALANRWLNENYTGKVPCNVTYPNRISLEDLSPSVVLHMTEKLGYKNSDVINTVLSNRACHILAIYFLLNKKLERYLSGKSDIQDSLCYKTRLYQIEKYRAPKESYEASLDTWTRDLEFHAVQDKKPKEQEKRGDFLHRPFSKKLDKNLPSHKQPSGSLMTQIQNTKALLKDRKASKSSFPDKDSFGCRNIFRKTSDSNCVASSSMEFIPVPPPRTPRIVKKPEPHQPGPGSTGIPHKEDPLMLDMVRSFESVDRDDHVEVLSPSHHYRILNSPVSLARRNSSERTLSPGLPSGSMSPLHTPLHPTLVSFAHEDKNSPPKEEGLCCPPPVPSNGPMQPLGSPNCVKSRGRFPMMGIGQMLRKRHQSLQPSADRPLEASLPPLQPLAPVNLAFDMADGVKTQC

SEQ ID NO: 38970 - protein, 112 aa, Homo sapiens
  Payload ID: 7799
  Gene Symbol: HUNK
  Gene Name: hormonally up-regulated Neu-associated kinase
  ENSP ID: ENSP00000408219
RYLSGKSDIQDSLCYKTRLYQIEKYRAPKESYEASLDTWTRDLEFHAVQDKKPKEQEKRGDFLHRPFSKKLDKNLPSHKQPSGSLMTQIQNTKALLKDRKASKSSFPDKGLS

SEQ ID NO: 38971 - protein, 162 aa, Homo sapiens
  Payload ID: 7799
  Gene Symbol: HUNK
  Gene Name: hormonally up-regulated Neu-associated kinase
  ENSP ID: ENSP00000411860
QMIRHPNITQLLDILETENSYYLVMELCPGGNLMHKIYEKKRLEESEARRYIRQLISAVEHLHRAGVVHRDLKIENLLLDEDNNIKLIDFGLSNCAGILGYSDPFSTQCGSPAYAAPELLARKKYGPKIDVWSMCHQFPALSPGTGSCEEAKYSAGTGESLA

SEQ ID NO: 38972 - protein, 2850 aa, Homo sapiens
  Payload ID: 7800
  Gene Symbol: HRNR
  Gene Name: hornerin
  Uniprot ID: Q86YZ3
  ENSP ID: ENSP00000357791
MPKLLQGVITVIDVFYQYATQHGEYDTLNKAELKELLENEFHQILKNPNDPDTVDIILQSLDRDHNKKVDFTEYLLMIFKLVQARNKIIGKDYCQVSGSKLRDDTHQHQEEQEETEKEENKRQESSFSHSSWSAGENDSYSRNVRGSLKPGTESISRRLSFQRDFSGQHNSYSGQSSSYGEQNSDSHQSSGRGQCGSGSGQSPNYGQHGSGSGQSSSNDTHGSGSGQSSGFSQHKSSSGQSSGYSQHGSGSGHSSGYGQHGSRSGQSSRGERHRSSSGSSSSYGQHGSGSRQSLGHGRQGSGSRQSPSHVRHGSGSGHSSSHGQHGSGSSYSYSRGHYESGSGQTSGFGQHESGSGQSSGYSKHGSGSGHSSSQGQHGSTSGQASSSGQHGSSSRQSSSYGQHESASRHSSGRGQHSSGSGQSPGHGQRGSGSGQSPSSGQHGTGFGRSSSSGPYVSGSGYSSGFGHHESSSEHSSGYTQHGSGSGHSSGHGQHGSRSGQSSRGERQGSSAGSSSSYGQHGSGSRQSLGHSRHGSGSGQSPSPSRGRHESGSRQSSSYGPHGYGSGRSSSRGPYESGSGHSSGLGHQESRSGQSSGYGQHGSSSGHSSTHGQHGSTSGQSSSCGQHGATSGQSSSHGQHGSGSSQSSRYGQQGSGSGQSPSRGRHGSDFGHSSSYGQHGSGSGWSSSNGPHGSVSGQSSGFGHKSGSGQSSGYSQHGSGSSHSSGYRKHGSRSGQSSRSEQHGSSSGLSSSYGQHGSGSHQSSGHGRQGSGSGHSPSRVRHGSSSGHSSSHGQHGSGTSCSSSCGHYESGSGQASGFGQHESGSGQGYSQHGSASGHFSSQGRHGSTSGQSSSSGQHDSSSGQSSSYGQHESASHHASGRGRHGSGSGQSPGHGQRGSGSGQSPSYGRHGSGSGRSSSSGRHGSGSGQSSGFGHKSSSGQSSGYTQHGSGSGHSSSYEQHGSRSGQSSRSEQHGSSSGSSSSYGQHGSGSRQSLGHGQHGSGSGQSPSPSRGRHGSGSGQSSSYGPYRSGSGWSSSRGPYESGSGHSSGLGHRESRSGQSSGYGQHGSSSGHSSTHGQHGSTSGQSSSCGQHGASSGQSSSHGQHGSGSSQSSGYGRQGSGSGQSPGHGQRGSGSRQSPSYGRHGSGSGRSSSSGQHGSGLGESSGFGHHESSSGQSSSYSQHGSGSGHSSGYGQHGSRSGQSSRGERHGSSSGSSSHYGQHGSGSRQSSGHGRQGSGSGHSPSRGRHGSGLGHSSSHGQHGSGSGRSSSRGPYESRSGHSSVFGQHESGSGHSSAYSQHGSGSGHFCSQGQHGSTSGQSSTFDQEGSSTGQSSSYGHRGSGSSQSSGYGRHGAGSGQSPSRGRHGSGSGHSSSYGQHGSGSGWSSSSGRHGSGSGQSSGFGHHESSSWQSSGCTQHGSGSGHSSSYEQHGSRSGQSSRGERHGSSSGSSSSYGQHGSGSRQSLGHGQHGSGSGQSPSPSRGRHGSGSGQSSSYSPYGSGSGWSSSRGPYESGSSHSSGLGHRESRSGQSSGYGQHGSSSGHSSTHGQHGSTSGQSSSCGQHGASSGQSSSHGQHGSGSSQSSGYGRQGSGSGQSPGHGQRGSGSRQSPSYGRHGSGSGRSSSSGQHGSGLGESSGFGHHESSSGQSSSYSQHGSGSGHSSGYGQHGSRSGQSSRGERHGSSSRSSSRYGQHGSGSRQSSGHGRQGSGSGQSPSRGRHGSGLGHSSSHGQHGSGSGRSSSRGPYESRSGHSSVFGQHESGSGHSSAYSQHGSGSGHFCSQGQHGSTSGQSSTFDQEGSSTGQSSSHGQHGSGSSQSSSYGQQGSGSGQSPSRGRHGSGSGHSSSYGQHGSGSGWSSSSGRHGSGSGQSSGFGHHESSSWQSSGYTQHGSGSGHSSSYEQHGSRSGQSSRGEQHGSSSGSSSSYGQHGSGSRQSLGHGQHGSGSGQSPSPSRGRHGSGSGQSSSYGPYGSGSGWSSSRGPYESGSGHSSGLGHRESRSGQSSGYGQHGSSSGHSSTHGQHGSASGQSSSCGQHGASSGQSSSHGQHGSGSSQSSGYGRQGSGSGQSPGHGQRGSGSRQSPSYGRHGSGSGRSSSSGQHGPGLGESSGFGHHESSSGQSSSYSQHGSGSGHSSGYGQHGSRSGQSSRGERHGSSSGSSSRYGQHGSGSRQSSGHGRQGSGSGHSPSRGRHGSGSGHSSSHGQHGSGSGRSSSRGPYESRSGHSSVFGQHESGSGHSSAYSQHGSGSGHFCSQGQHGSTSGQSSTFDQEGSSTGQSSSHGQHGSGSSQSSSYGQQGSGSGQSPSRGRHGSGSGHSSSYGQHGSGSGWSSSSGRHGSGSGQSSGFGHHESSSWQSSGYTQHGSGSGHSSSYEQHGSRSGQSSRGERHGSSSGSSSSYGQHGSGSRQSLGHGQHGSGSGQSPSPSRGRHGSGSGQSSSYSPYGSGSGWSSSRGPYESGSGHSSGLGHRESRSGQSSGYGQHGSSSGHSSTHGQHGSTSGQSSSCGQHGASSGQSSSHGQHGSGSSQSSGYGRQGSGSGQSPGHGQRGSGSRQSPSYGRHGSGSGRSSSSGQHGSGLGESSGFGHHESSSGQSSSYSQHGSGSGHSSGYGQHGSRSGQSSRGERHGSSSGSSSHYGQHGSGSRQSSGHGRQGSGSGQSPSRGRHGSGLGHSSSHGQHGSGSGRSSSRGPYESRLGHSSVFGQHESGSGHSSAYSQHGSGSGHFCSQGQHGSTSGQSSTFDQEGSSTGQSSSYGHRGSGSSQSSGYGRHGAGSGQSLSHGRHGSGSGQSSSYGQHGSGSGQSSGYSQHGSGSGQDGYSYCKGGSNHDGGSSGSYFLSFPSSTSPYEYVQEQRCYFYQ

SEQ ID NO: 38973 - protein, 2035 aa, Homo sapiens
  Payload ID: 7801
  Gene Symbol: HCFC1
  Gene Name: host cell factor C1
  Uniprot ID: P51610
  ENSP ID: ENSP00000309555
MASAVSPANLPAVLLQPRWKRVVGWSGPVPRPRHGHRAVAIKELIVVFGGGNEGIVDELHVYNTATNQWFIPAVRGDIPPGCAAYGFVCDGTRLLVFGGMVEYGKYSNDLYELQASRWEWKRLKAKTPKNGPPPCPRLGHSFSLVGNKCYLFGGLANDSEDPKNNIPRYLNDLYILELRPGSGVVAWDIPITYGVLPPPRESHTAVVYTEKDNKKSKLVIYGGMSGCRLGDLWTLDIDTLTWNKPSLSGVAPLPRSLHSATTIGNKMYVFGGWVPLVMDDVKVATHEKEWKCTNTLACLNLDTMAWETILMDTLEDNIPRARAGHCAVAINTRLYIWSGRDGYRKAWNNQVCCKDLWYLETEKPPPPARVQLVRANTNSLEVSWGAVATADSYLLQLQKYDIPATAATATSPTPNPVPSVPANPPKSPAPAAAAPAVQPLTQVGITLLPQAAPAPPTTTTIQVLPTVPGSSISVPTAARTQGVPAVLKVTGPQATTGTPLVTMRPASQAGKAPVTVTSLPAGVRMVVPTQSAQGTVIGSSPQMSGMAALAAAAAATQKIPPSSAPTVLSVPAGTTIVKTMAVTPGTTTLPATVKVASSPVMVSNPATRMLKTAAAQVGTSVSSATNTSTRPIITVHKSGTVTVAQQAQVVTTVVGGVTKTITLVKSPISVPGGSALISNLGKVMSVVQTKPVQTSAVTGQASTGPVTQIIQTKGPLPAGTILKLVTSADGKPTTIITTTQASGAGTKPTILGISSVSPSTTKPGTTTIIKTIPMSAIITQAGATGVTSSPGIKSPITIITTKVMTSGTGAPAKIITAVPKIATGHGQQGVTQVVLKGAPGQPGTILRTVPMGGVRLVTPVTVSAVKPAVTTLVVKGTTGVTTLGTVTGTVSTSLAGAGGHSTSASLATPITTLGTIATLSSQVINPTAITVSAAQTTLTAAGGLTTPTITMQPVSQPTQVTLITAPSGVEAQPVHDLPVSILASPTTEQPTATVTIADSGQGDVQPGTVTLVCSNPPCETHETGTTNTATTTVVANLGGHPQPTQVQFVCDRQEAAASLVTSTVGQQNGSVVRVCSNPPCETHETGTTNTATTATSNMAGQHGCSNPPCETHETGTTNTATTAMSSVGANHQRDARRACAAGTPAVIRISVATGALEAAQGSKSQCQTRQTSATSTTMTVMATGAPCSAGPLLGPSMAREPGGRSPAFVQLAPLSSKVRLSSPSIKDLPAGRHSHAVSTAAMTRSSVGAGEPRMAPVCESLQGGSPSTTVTVTALEALLCPSATVTQVCSNPPCETHETGTTNTATTSNAGSAQRVCSNPPCETHETGTTHTATTATSNGGTGQPEGGQQPPAGRPCETHQTTSTGTTMSVSVGALLPDATSSHRTVESGLEVAAAPSVTPQAGTALLAPFPTQRVCSNPPCETHETGTTHTATTVTSNMSSNQDPPPAASDQGEVESTQGDSVNITSSSAITTTVSSTLTRAVTTVTQSTPVPGPSVPPPEELQVSPGPRQQLPPRQLLQSASTALMGESAEVLSASQTPELPAAVDLSSTGEPSSGQESAGSAVVATVVVQPPPPTQSEVDQLSLPQELMAEAQAGTTTLMVTGLTPEELAVTAAAEAAAQAAATEEAQALAIQAVLQAAQQAVMGTGEPMDTSEAAATVTQAELGHLSAEGQEGQATTIPIVLTQQELAALVQQQQLQEAQAQQQHHHLPTEALAPADSLNDPAIESNCLNELAGTVPSTVALLPSTATESLAPSNTFVAPQPVVVASPAKLQAAATLTEVANGIESLGVKPDLPPPPSKAPMKKENQWFDVGVIKGTNVMVTHYFLPPDDAVPSDDDLGTVPDYNQLKKQELQPGTAYKFRVAGINACGRGPFSEISAFKTCLPGFPGAPCAIKISKSPDGAHLTWEPPSVTSGKIIEYSVYLAIQSSQAGGELKSSTPAQLAFMRVYCGPSPSCLVQSSSLSNAHIDYTTKPAIIFRIAARNEKGYGPATQVRWLQETSKDSSGTKPANKRPMSSPEMKSAPKKSKADGQ

SEQ ID NO: 38974 - protein, 2080 aa, Homo sapiens
  Payload ID: 7801
  Gene Symbol: HCFC1
  Gene Name: host cell factor C1
  ENSP ID: ENSP00000359001
MASAVSPANLPAVLLQPRWKRVVGWSGPVPRPRHGHRAVAIKELIVVFGGGNEGIVDELHVYNTATNQWFIPAVRGDIPPGCAAYGFVCDGTRLLVFGGMVEYGKYSNDLYELQASRWEWKRLKAKTPKNGPPPCPRLGHSFSLVGNKCYLFGGLANDSEDPKNNIPRYLNDLYILELRPGSGVVAWDIPITYGVLPPPRESHTAVVYTEKDNKKSKLVIYGGMSGCRLGDLWTLDIDTLTWNKPSLSGVAPLPRSLHSATTIGNKMYVFGGWVPLVMDDVKVATHEKEWKCTNTLACLNLDTMAWETILMDTLEDNIPRARAGHCAVAINTRLYIWSGRDGYRKAWNNQVCCKDLWYLETEKPPPPARVQLVRANTNSLEVSWGAVATADSYLLQLQKYDIPATAATATSPTPNPVPSVPANPPKSPAPAAAAPAVQPLTQVGITLLPQAAPAPPTTTTIQVLPTVPGSSISVPTAARTQGVPAVLKVTGPQATTGTPLVTMRPASQAGKAPVTVTSLPAGVRMVVPTQSAQGTVIGSSPQMSGMAALAAAAAATQKIPPSSAPTVLSVPAGTTIVKTMAVTPGTTTLPATVKVASSPVMVSNPATRMLKTAAAQVGTSVSSATNTSTRPIITVHKSGTVTVAQQAQVVTTVVGGVTKTITLVKSPISVPGGSALISNLGKVMSVVQTKPVQTSAVTGQASTGPVTQIIQTKGPLPAGTILKLVTSADGKPTTIITTTQASGAGTKPTILGISSVSPSTTKPGTTTIIKTIPMSAIITQAGATGVTSSPGIKSPITIITTKVMTSGTGAPAKIITAVPKIATGHGQQGVTQVVLKGAPGQPGTILRTVPMGGVRLVTPVTVSAVKPAVTTLVVKGTTGVTTLGTVTGTVSTSLAGAGGHSTSASLATPITTLGTIATLSSQVINPTAITVSAAQTTLTAAGGLTTPTITMQPVSQPTQVTLITAPSGVEAQPVHDLPVSILASPTTEQPTATVTIADSGQGDVQPGTVTLVCSNPPCETHETGTTNTATTTVVANLGGHPQPTQVQFVCDRQEAAASLVTSTVGQQNGSVVRVCSNPPCETHETGTTNTATTATSNMAGQHGCSNPPCETHETGTTNTATTAMSSVGANHQRDARRACAAGTPAVIRISVATGALEAAQGSKSQCQTRQTSATSTTMTVMATGAPCSAGPLLGPSMAREPGGRSPAFVQLAPLSSKVRLSSPSIKDLPAGRHSHAVSTAAMTRSSVGAGEPRMAPVCESLQGGSPSTTVTVTALEALLCPSATVTQVCSNPPCETHETGTTNTATTSNAGSAQRVCSNPPCETHETGTTHTATTATSNGGTGQPEGGQQPPAGRPCETHQTTSTGTTMSVSVGALLPDATSSHRTVESGLEVAAAPSVTPQAGTALLAPFPTQRVCSNPPCETHETGTTHTATTVTSNMSSNQDPPPAASDQGEVESTQGDSVNITSSSAITTTVSSTLTRAVTTVTQSTPVPGPSVPKISSMTETAPRALTTEVPIPAKITVTIANTETSDMPFSAVDILQPPEELQVSPGPRQQLPPRQLLQSASTALMGESAEVLSASQTPELPAAVDLSSTGEPSSGQESAGSAVVATVVVQPPPPTQSEVDQLSLPQELMAEAQAGTTTLMVTGLTPEELAVTAAAEAAAQAAATEEAQALAIQAVLQAAQQAVMAGTGEPMDTSEAAATVTQAELGHLSAEGQEGQATTIPIVLTQQELAALVQQQQLQEAQAQQQHHHLPTEALAPADSLNDPAIESNCLNELAGTVPSTVALLPSTATESLAPSNTFVAPQPVVVASPAKLQAAATLTEVANGIESLGVKPDLPPPPSKAPMKKENQWFDVGVIKGTNVMVTHYFLPPDDAVPSDDDLGTVPDYNQLKKQELQPGTAYKFRVAGINACGRGPFSEISAFKTCLPGFPGAPCAIKISKSPDGAHLTWEPPSVTSGKIIEYSVYLAIQSSQAGGELKSSTPAQLAFMRVYCGPSPSCLVQSSSLSNAHIDYTTKPAIIFRIAARNEKGYGPATQVRWLQETSKDSSGTKPANKRPMSSPEMKSAPKKSKADGQ

SEQ ID NO: 38975 - protein, 611 aa, Homo sapiens
  Payload ID: 7801
  Gene Symbol: HCFC1
  Gene Name: host cell factor C1
  ENSP ID: ENSP00000399589
  MOD_RES (1)..(1): Any amino acid
XTGTTHTATTVTSNMSSNQDPPPAASDQGEVESTQGDSVNITSSSAITTTVSSTLTRAVTTVTQSTPVPGPSVPPPEELQVSPGPRQQLPPRQLLQSASTALMGESAEVLSASQTPELPAAVDLSSTGEPSSGQESAGSAVVATVVVQPPPPTQSEVDQLSLPQELMAEAQAGTTTLMVTGLTPEELAVTAAAEAAAQAAATEEAQALAIQAVLQAAQQAVMAGTGEPMDTSEAAATVTQAELGHLSAEGQEGQATTIPIVLTQQELAALVQQQQLQEAQAQQQHHHLPTEALAPADSLNDPAIESNCLNELAGTVPSTVALLPSTATESLAPSNTFVAPQPVVVASPAKLQAAATLTEVANGIESLGVKPDLPPPPSKAPMKKENQWFDVGVIKGTNVMVTHYFLPPDDAVPSDDDLGTVPDYNQLKKQELQPGTAYKFRVAGINACGRGPFSEISAFKTCLPGFPGAPCAIKISKSPDGAHLTWEPPSVTSGKIIEYSVYLAIQSSQAGGELKSSTPAQLAFMRVYCGPSPSCLVQSSSLSNAHIDYTTKPAIIFRIAARNEKGYGPATQVRWLQETSKDSSGTKPANKRPMSSPEMKSAPKKSKADGQ

SEQ ID NO: 38976 - protein, 138 aa, Homo sapiens
  Payload ID: 7802
  Gene Symbol: HCFC1R1
  Gene Name: host cell factor C1 regulator 1 (XPO1 dependent)
  Uniprot ID: Q9NWW0
  ENSP ID: ENSP00000248089
MILQQPLQRGPQGGAQRLPRAALGVTWGLDASSPLRGAVPMSTKRRLEEEQEPLRKQFLSEENMATHFSQLSLHNDHPYCSPPMTFSPALPPLRSPCSELLLWRYPGSLIPEALRLLRLGDTPSPPYPATPAGDIMEL

SEQ ID NO: 38977 - protein, 136 aa, Homo sapiens
  Payload ID: 7802
  Gene Symbol: HCFC1R1
  Gene Name: host cell factor C1 regulator 1 (XPO1 dependent)
  ENSP ID: ENSP00000346708
MILQQPLQRGPQGGAQRLPRAALGVTWGLDARLPPVSVSQPASLPSLPREPLRKQFLSEENMATHFSQLSLHNDHPYCSPPMTFSPALPPLRSPCSELLLWRYPGSLIPEALRLLRLGDTPSPPYPATPAGDIMEL

SEQ ID NO: 38978 - protein, 120 aa, Homo sapiens
  Payload ID: 7802
  Gene Symbol: HCFC1R1
  Gene Name: host cell factor C1 regulator 1 (XPO1 dependent)
  ENSP ID: ENSP00000458628
MILQQPLQRGPQGGAQRLPRAALGVTWGLDASSPLRGAVPMSTKRRLEEEQEPLRKQFLSEENMATHFSQLSLHNDHPYCSPPMTFSPALPPLRSPCSELLLWRYPGSLIPEALRLLRLG

SEQ ID NO: 38979 - protein, 98 aa, Homo sapiens
  Payload ID: 7802
  Gene Symbol: HCFC1R1
  Gene Name: host cell factor C1 regulator 1 (XPO1 dependent)
  ENSP ID: ENSP00000458971
MSTKRRLEEEQEPLRKQFLSEENMATHFSQLSLHNDHPYCSPPMTFSPALPPLRSPCSELLLWRYPGSLIPEALRLLRLGDTPSPPYPATPAGDIMEL

SEQ ID NO: 38980 - protein, 119 aa, Homo sapiens
  Payload ID: 7802
  Gene Symbol: HCFC1R1
  Gene Name: host cell factor C1 regulator 1 (XPO1 dependent)
  Uniprot ID: Q9NWW0
  ENSP ID: ENSP00000459178
MILQQPLQRGPQGGAQRLPRAALGVTWGLDAREPLRKQFLSEENMATHFSQLSLHNDHPYCSPPMTFSPALPPLRSPCSELLLWRYPGSLIPEALRLLRLGDTPSPPYPATPAGDIMEL

SEQ ID NO: 38981 - protein, 138 aa, Homo sapiens; identical to SEQ ID NO: 38976
  Payload ID: 7802
  Gene Symbol: HCFC1R1
  Gene Name: host cell factor C1 regulator 1 (XPO1 dependent)
  Uniprot ID: Q9NWW0
  ENSP ID: ENSP00000460639

SEQ ID NO: 38982 - protein, 792 aa, Homo sapiens
  Payload ID: 7803
  Gene Symbol: HCFC2
  Gene Name: host cell factor C2
  Uniprot ID: Q9Y5Z7
  ENSP ID: ENSP00000229330
MAAPSLLNWRRVSSFTGPVPRARHGHRAVAIRELMIIFGGGNEGIADELHVYNTATNQWFLPAVRGDIPPGCAAHGFVCDGTRILVFGGMVEYGRYSNELYELQASRWLWKKVKPHPPPSGLPPCPRLGHSFSLYGNKCYLFGGLANESEDSNNNVPRYLNDFYELELQHGSGVVGWSIPVTKGVVPSPRESHTAVIYCKKDSGSPKMYVFGGMCGARLDDLWQLDLETMSWSKPETKGTVPLPRSLHTASVIGNKMYIFGGWVPHKGENTETSPHDCEWRCTSSFSYLNLDTTEWTTLVSDSQEDKKNSRPRPRAGHCAVAIGTRLYFWSGRDGYKKALNSQVCCKDLWYLDTEKPPAPSQVQLIKATTNSFHVKWDEVSTVEGYLLQLSTDLPYQAASSDSSAAPNMQGVRMDPHRQGSNNIVPNSINDTINSTKTEQPATKETSMKNKPDFKALTDSNAILYPSLASNASNHNSHVVDMLRKNEGPHTSANVGVLSSCLDVRTVIPETSVSSTVSSTQTMVTQQTIKTESSSTNGAVVKDETSLTTFSTKSEVDETYALPATKISRVETHATATPFSKETPSNPVATVKAGERQWCDVGIFKNNTALVSQFYLLPKGKQSISKVGNADVPDYSLLKKQDLVPGTGYRFRVAAINGCGIGPFSKISEFKTCIPGFPGAPSAVRISKNVEGIHLSWEPPTSPSGNILEYSAYLAIRTAQIQDNPSQLVFMRIYCGLKTSCIVTAGQLANAHIDYTSRPAIVFRISAKNEKGYGPATQVRWLQGNNKKAPLN

SEQ ID NO: 38983 - protein, 412 aa, Homo sapiens
  Payload ID: 7803
  Gene Symbol: HCFC2
  Gene Name: host cell factor C2
  Uniprot ID: Q9Y5Z7
  ENSP ID: ENSP00000442942
MAAPSLLNWRRVSSFTGPVPRARHGHRAVAIRELMIIFGGGNEGIADELHVYNTATNQWFLPAVRGDIPPGCAAHGFVCDGTRILVFGGMVEYGRYSNELYELQASRWLWKKVKPHPPPSGLPPCPRLGHSFSLYGNKCYLFGGLANESEDSNNNVPRYLNDFYELELQHGSGVVGWSIPVTKGVVPSPRESHTAVIYCKKDSGSPKMYVFGGMCGARLDDLWQLDLETMSWSKPETKGTVPLPRSLHTASVIGNKMYIFGGWVPHKGENTETSPHDCEWRCTSSFSYLNLDTTEWTTLVSDSQEDKKNSRPRPRAGHCAVAIGTRLYFWSGRDGYKKALNSQVCCKDLWYLDTEKPPAPSQVQLIKATTNSFHVKWDEVSTVEGYLLQLSTDLPYQAASSDSSAAPNMQDQ

SEQ ID NO: 38984 - protein, 78 aa, Homo sapiens
  Payload ID: 7803
  Gene Symbol: HCFC2
  Gene Name: host cell factor C2
  ENSP ID: ENSP00000447952
MVEYGRYSNELYELQASRWLWKKVKPHPPPSGLPPCPRLGHSFSLYGNKCYLFGGLANESEDSNNNVPRYLNDFYELE

SEQ ID NO: 38985 - protein, 112 aa, Homo sapiens
  Payload ID: 7804
  Gene Symbol:
  Gene Name: HOXA10-HOXA9
  ENSP ID: ENSP00000421799
MCQVDREKQPSEGAFSENNAENESGGDKPPIDPNNPAANWLHARSTRKKRCPYTKHQTLELEKEFLFNMYLTRDRRYEVARLLNLTERQVKIWFQNRRMKMKKINKDRAKDE

SEQ ID NO: 38986 - protein, 273 aa, Homo sapiens
  Payload ID: 7805
  Gene Symbol: HRASLS
  Gene Name: HRAS-like suppressor
  ENSP ID: ENSP00000264735
MVRASCRLGSARTPSPARRPPGVRASQSRGGAAGTVSAWRRWCWRWPWRTAPSDGWRLPPGCLPGTDGVVPRPPAARSAAARPRETPGHTQLPPGARRRPRLESEMAFNDCFSLNYPGNPCPGDLIEVFRPGYQHWALYLGDGYVINIAPVDGIPASFTSAKSVFSSKALVKMQLLKDVVGNDTYRINNKYDETYPPLPVEEIIKRSEFVIGQEVAYNLLVNNCEHFVTLLRYGEGVSEQANRAISTVEFVTAAVGVFSFLGLFPKGQRAKYY

SEQ ID NO: 38987 - protein, 111 aa, Homo sapiens
  Payload ID: 7805
  Gene Symbol: HRASLS
  Gene Name: HRAS-like suppressor
  ENSP ID: ENSP00000414431
SVFSSKALVKMQLLKDVVGNDTYRINNKYDETYPPLPVEEIIKRSEFVIGQEVAYNLLVNNCEHFVTLLRYGEGVSEQANRAISTVEFVTAAVGVFSFLGLFPKGQRAKYY

SEQ ID NO: 38988 - protein, 162 aa, Homo sapiens
  Payload ID: 7806
  Gene Symbol: HRASLS2
  Gene Name: HRAS-like suppressor 2
  Uniprot ID: Q9NWW9
  ENSP ID: ENSP00000255695
MALARPRPRLGDLIEISRFGYAHWAIYVGDGYVVHLAPASEIAGAGAASVLSALTNKAIVKKELLSVVAGGDNYRVNNKHDDRYTPLPSNKIVKRAEELVGQELPYSLTSDNCEHFVNHLRYGVSRSDQVTGAVTTVGVAAGLLAAASLVGILLARSKRERQ

SEQ ID NO: 38989 - protein, 279 aa, Homo sapiens
  Payload ID: 7807
  Gene Symbol: HRASLS5
  Gene Name: HRAS-like suppressor family, member 5
  Uniprot ID: Q96KN8
  ENSP ID: ENSP00000301790
MGLSPGAEGEYALRLPRIPPPLPKPASRTASTGPKDQPPALRRSAVPHSGLNSISPLELEESVGFAALVQLPAKQPPPGTLEQGRSIQQGEKAVVSLETTPSQKADWSSIPKPENEGKLIKQAAEGKPRPRPGDLIEIFRIGYEHWAIYVEDDCVVHLAPPSEEFEVGSITSIFSNRAVVKYSRLEDVLHGCSWKVNNKLDGTYLPLPVDKIIQRTKKMVNKIVQYSLIEGNCEHFVNGLRYGVPRSQQVEHALMEGAKAAGAVISAVVDSIKPKPITA

SEQ ID NO: 38990 - protein, 37 aa, Homo sapiens
  Payload ID: 7807
  Gene Symbol: HRASLS5
  Gene Name: HRAS-like suppressor family, member 5
  ENSP ID: ENSP00000378113
KPASRTASTGPKDQPPALRRSAVPHSGKTKTQTWRPD

SEQ ID NO: 38991 - protein, 253 aa, Homo sapiens
  Payload ID: 7807
  Gene Symbol: HRASLS5
  Gene Name: HRAS-like suppressor family, member 5
  Uniprot ID: Q96KN8
  ENSP ID: ENSP00000443873
MGLSPGAEGEYALRLPRIPPPLPKPASRTASTGPKDQPPALRRSAVPHSGLNSISPLELEESVGFAALVQLPAKQPPPGTLEQGRSIQQGEKAVVSLETTPSQKADWSSIPKPENEGKLIKQAAEGKPRPRPGDLIEIFRIGYEHWAIYVEDDCVVHLAPPSEEFEVGSITSIFSNRAVVKYSRLEDVLHGCSWKVNNKLDGTYLPLPVDKIIQRTKKMVNKIVQYSLIEGNCRARPDGRSEGCWSSYFSCSG

SEQ ID NO: 38992 - protein, 49 aa, Homo sapiens
  Payload ID: 7807
  Gene Symbol: HRASLS5
  Gene Name: HRAS-like suppressor family, member 5
  ENSP ID: ENSP00000444776
  MOD_RES (1)..(1): Any amino acid
XGPKDQPPALRRSAVPHSEESVGFAALVQLPAKQPPPGTLEQGRSIQQG

SEQ ID NO: 38993 - protein, 269 aa, Homo sapiens
  Payload ID: 7807
  Gene Symbol: HRASLS5
  Gene Name: HRAS-like suppressor family, member 5
  Uniprot ID: Q96KN8
  ENSP ID: ENSP00000444809
MGLSPGAEGEYALRLPRIPPPLPKPASRTASTGPKDQPPALRRSAVPHSEESVGFAALVQLPAKQPPPGTLEQGRSIQQGEKAVVSLETTPSQKADWSSIPKPENEGKLIKQAAEGKPRPRPGDLIEIFRIGYEHWAIYVEDDCVVHLAPPSEEFEVGSITSIFSNRAVVKYSRLEDVLHGCSWKVNNKLDGTYLPLPVDKIIQRTKKMVNKIVQYSLIEGNCEHFVNGLRYGVPRSQQVEHALMEGAKAAGAVISAVVDSIKPKPITA

SEQ ID NO: 38994 - protein, 19 aa, Homo sapiens
  Payload ID: 7807
  Gene Symbol: HRASLS5
  Gene Name: HRAS-like suppressor family, member 5
  ENSP ID: ENSP00000446016
MVNKIVQYSLIEGNCEHFV

SEQ ID NO: 38995 - protein, 235 aa, Homo sapiens
  Payload ID: 7808
  Gene Symbol: HSCB
  Gene Name: HscB mitochondrial iron-sulfur cluster co-chaperone
  Uniprot ID: Q8IWL3
  ENSP ID: ENSP00000216027
MWRGRAGALLRVWGFWPTGVPRRRPLSCDAASQAGSNYPRCWNCGGPWGPGREDRFFCPQCRALQAPDPTRDYFSLMDCNRSFRVDTAKLQHRYQQLQRLVHPDFFSQRSQTEKDFSEKHSTLVNDAYKTLLAPLSRGLYLLKLHGIEIPERTDYEMDRQFLIEIMEINEKLAEAESEAAMKEIESIVKAKQKEFTDNVSSAFEQDDFEEAKEILTKMRYFSNIEEKIKLKKIPL

SEQ ID NO: 38996 - protein, 143 aa, Homo sapiens
  Payload ID: 7808
  Gene Symbol: HSCB
  Gene Name: HscB mitochondrial iron-sulfur cluster co-chaperone
  ENSP ID: ENSP00000381914
MWRGRAGALLRVWGFWPTGVPRRRPLSCDAASQAGSNYPRCWNCGGPWGPGREDRFFCPQCRALQAPDPTRDYFSLMDCNRSFRVDTAKLQHRYQQLQRLVHPDFFSQRSQTEKDFSEKHSTLVNDAYKTLLAPLSRGLYLVS

SEQ ID NO: 38997 - protein, 105 aa, Homo sapiens
  Payload ID: 7808
  Gene Symbol: HSCB
  Gene Name: HscB mitochondrial iron-sulfur cluster co-chaperone
  ENSP ID: ENSP00000406284
MWRGRAGALLRVWGFWPTGVPRRRPLSCDAASQAGSNYPRCWNCGGPWGPGREDRFFCPQCRALQAPDPTRDYFSLMDCNRSFRVDTAKLQHRLKRTSQRSIRPW

SEQ ID NO: 38998 - protein, 143 aa, Homo sapiens; identical to SEQ ID NO: 38996
  Payload ID: 7808
  Gene Symbol: HSCB
  Gene Name: HscB mitochondrial iron-sulfur cluster co-chaperone
  ENSP ID: ENSP00000416679

SEQ ID NO: 38999 - protein, 359 aa, Homo sapiens
  Payload ID: 7809
  Gene Symbol: HSPBP1
  Gene Name: HSPA (heat shock 70kDa) binding protein, cytoplasmic cochaperone 1
  Uniprot ID: Q9NZL4
  ENSP ID: ENSP00000255631
MSDEGSRGSRLPLALPPASQGCSSGGGGGGSSAGGSGNSRPPRNLQGLLQMAITAGSEEPDPPPEPMSEERRQWLQEAMSAAFRGQREEVEQMKSCLRVLSQPMPPTAGEAEQAADQQEREGALELLADLCENMDNAADFCQLSGMHLLVGRYLEAGAAGLRWRAAQLIGTCSQNVAAIQEQVLGLGALRKLLRLLDRDACDTVRVKALFAISCLVREQEAGLLQFLRLDGFSVLMRAMQQQVQKLKVKSAFLLQNLLVGHPEHKGTLCSMGMVQQLVALVRTEHSPFHEHVLGALCSLVTDFPQGVRECREPELGLEELLRHRCQLLQQHEEYQEELEFCEKLLQTCFSSPADDSMDR

SEQ ID NO: 39000 - protein, 359 aa, Homo sapiens; identical to SEQ ID NO: 38999
  Payload ID: 7809
  Gene Symbol: HSPBP1
  Gene Name: HSPA (heat shock 70kDa) binding protein, cytoplasmic cochaperone 1
  Uniprot ID: Q9NZL4
  ENSP ID: ENSP00000398244

SEQ ID NO: 39001 - protein, 137 aa, Homo sapiens
  Payload ID: 7809
  Gene Symbol: HSPBP1
  Gene Name: HSPA (heat shock 70kDa) binding protein, cytoplasmic cochaperone 1
  ENSP ID: ENSP00000465690
MSDEGSRGSRLPLALPPASQGCSSGGGGGGSSAGGSGNSRPPRNLQGLLQMAITAGSEEPDPPPEPMSEERRQWLQEAMSAAFRGQREEVEQMKSCLRVLSQPMPPTAGEAEQAADQQEREGALELLADLCENMDNA

SEQ ID NO: 39002 - protein, 214 aa, Homo sapiens
  Payload ID: 7809
  Gene Symbol: HSPBP1
  Gene Name: HSPA (heat shock 70kDa) binding protein, cytoplasmic cochaperone 1
  ENSP ID: ENSP00000465876
MSDEGSRGSRLPLALPPASQGCSSGGGGGGSSAGGSGNSRPPRNLQGLLQMAITAGSEEPDPPPEPMSEERRQWLQEAMSAAFRGQREEVEQMKSCLRVLSQPMPPTAGEAEQAADQQEREGALELLADLCENMDNAADFCQLSGMHLLVGRYLEAGAAGLRWRAAQLIGTCSQNVAAIQEQVLGLGALRKLLRLLDRDACDTVRVKALFAISC

SEQ ID NO: 39003 - protein, 190 aa, Homo sapiens
  Payload ID: 7809
  Gene Symbol: HSPBP1
  Gene Name: HSPA (heat shock 70kDa) binding protein, cytoplasmic cochaperone 1
  ENSP ID: ENSP00000466569
MSDEGSRGSRLPLALPPASQGCSSGGGGGGSSAGGSGNSRPPRNLQGLLQMAITAGSEEPDPPPEPMSEEMKSCLRVLSQPMPPTAGEAEQAADQQEREGALELLADLCENMDNAADFCQLSGMHLLVGRYLEAGAAGLRWRAAQLIGTCSQNVAAIQEQVLGLGALCCSSMRSTRRSWSSVKSCYRPVS

SEQ ID NO: 39004 - protein, 97 aa, Homo sapiens
  Payload ID: 7809
  Gene Symbol: HSPBP1
  Gene Name: HSPA (heat shock 70kDa) binding protein, cytoplasmic cochaperone 1
  ENSP ID: ENSP00000466749
MDNAADFCQLSGMHLLVGRYLEAGAAGLRWRAAQLIGTCSQNVAAIQEQVLGLGALRKLLRLLDRDACDTVRVKALFAISCLVREQEAGLLQFLRLD

SEQ ID NO: 39005 - protein, 359 aa, Homo sapiens; identical to SEQ ID NO: 38999
  Payload ID: 7809
  Gene Symbol: HSPBP1
  Gene Name: HSPA (heat shock 70kDa) binding protein, cytoplasmic cochaperone 1
  Uniprot ID: Q9NZL4
  ENSP ID: ENSP00000467574

SEQ ID NO: 39006 - protein, 31 aa, Homo sapiens
  Payload ID: 7809
  Gene Symbol: HSPBP1
  Gene Name: HSPA (heat shock 70kDa) binding protein, cytoplasmic cochaperone 1
  ENSP ID: ENSP00000467926
MSDEGSRGSRLPLALPPASQGCSSGGGGGGS

SEQ ID NO: 39007 - protein, 136 aa, Homo sapiens
  Payload ID: 7809
  Gene Symbol: HSPBP1
  Gene Name: HSPA (heat shock 70kDa) binding protein, cytoplasmic cochaperone 1
  ENSP ID: ENSP00000468403
MSDEGSRGSRLPLALPPASQGCSSGGGGGGSSAGGSGNSRPPRNLQGLLQMAITAGSEEPDPPPEPMSEERRQWLQEAMSAAFRGQREEVEQMKSCLRVLSQPMPPTAGEAEQAADQQEREGALELLADLCENMDN

SEQ ID NO: 39008 - protein, 488 aa, Homo sapiens
  Payload ID: 7810
  Gene Symbol: HSPBAP1
  Gene Name: HSPB (heat shock 27kDa) associated protein 1
  Uniprot ID: Q96EW2
  ENSP ID: ENSP00000302562
MAAGSEATTPVIVAAGAGGEEGEHVKPFKPEKAKEIIMSLQQPAIFCNMVFDWPARHWNAKYLSQVLHGKQIRFRMGMKSMSTVPQFETTCNYVEATLEEFLTWNCDQSSISGPFRDYDHSKFWAYADYKYFVSLFEDKTDLFQDVKWSDFGFPGRNGQESTLWIGSLGAHTPCHLDSYGCNLVFQVQGRKRWHLFPPEDTPFLYPTRIPYEESSVFSKINVVNPDLKRFPQFRKAQRHAVTLSPGQVLFVPRHWWHYVESIDPVTVSINSWIELEEDHLARVEEAITRMLVCALKTAENPQNTRAWLNPTEVEETSHAVNCCYLNAAVSAFFDRCRTSEVVEIQALRTDGEHMKKEELNVCNHMEVGQTGSQNLTTGTDKPEAASPFGPDLVPVAQRSEEPPSERGGIFGSDGKDFVDKDGEHFGKLHCAKRQQIMSNSENAIEEQIASNTTTTPQTFISTDDLLDCLVNPQVTRIVAQLLIQGRSL

SEQ ID NO: 39009 - protein, 52 aa, Homo sapiens
  Payload ID: 7811
  Gene Symbol: HSPB2-C11orf52
  Gene Name: HSPB2-C11orf52 readthrough (NMD candidate)
  ENSP ID: ENSP00000455839
MSGRSVPHAHPATAEYEFANPSRLGEQRFGEGFFLLKLEAQVHGFIKRRFKS

SEQ ID NO: 39010 - protein, 182 aa, Homo sapiens; identical to SEQ ID NO: 37307
  Payload ID: 7811
  Gene Symbol: HSPB2-C11orf52
  Gene Name: HSPB2-C11orf52 readthrough (NMD candidate)
  ENSP ID: ENSP00000457706

SEQ ID NO: 39011 - protein, 261 aa, Homo sapiens
  Payload ID: 7812
  Gene Symbol: HSPE1-MOB4
  Gene Name: HSPE1-MOB4 readthrough
  ENSP ID: ENSP00000474534
MAGQAFRKFLPLFDRVLVERSAAETVTKGGIMLPEKSQGKVLQATVVAVGSGSKGKDFYNWPDESFDEMDSTLAVQQYIQQNIRADCSNIDKILEPPEGQDEGVWKYEHLRQFCLELNGLAVKLQSECHPDTCTQMTATEQWIFLCAAHKTPKECPAIDYTRHTLDGAACLLNSNKYFPSRVSIKESSVAKLGSVCRRIYRIFSHAYFHHRQIFDEYENETFLCHRFTKFVMKYNLMSKDNLIVPILEEEVQNSVSGESEA

SEQ ID NO: 39012 - protein, 480 aa, Homo sapiens
  Payload ID: 7813
  Gene Symbol: HTRA1
  Gene Name: HtrA serine peptidase 1
  Uniprot ID: Q92743
  ENSP ID: ENSP00000357980
MQIPRAALLPLLLLLLAAPASAQLSRAGRSAPLAAGCPDRCEPARCPPQPEHCEGGRARDACGCCEVCGAPEGAACGLQEGPCGEGLQCVVPFGVPASATVRRRAQAGLCVCASSEPVCGSDANTYANLCQLRAASRRSERLHRPPVIVLQRGACGQGQEDPNSLRHKYNFIADVVEKIAPAVVHIELFRKLPFSKREVPVASGSGFIVSEDGLIVTNAHVVTNKHRVKVELKNGATYEAKIKDVDEKADIALIKIDHQGKLPVLLLGRSSELRPGEFVVAIGSPFSLQNTVTTGIVSTTQRGGKELGLRNSDMDYIQTDAIINYGNSGGPLVNLDGEVIGINTLKVTAGISFAIPSDKIKKFLTESHDRQAKGKAITKKKYIGIRMMSLTSSKAKELKDRHRDFPDVISGAYIIEVIPDTPAEAGGLKENDVIISINGQSVVSANDVSDVIKRESTLNMVVRRGNEDIMITVIPEEIDP

SEQ ID NO: 39013 - protein, 221 aa, Homo sapiens
  Payload ID: 7813
  Gene Symbol: HTRA1
  Gene Name: HtrA serine peptidase 1
  ENSP ID: ENSP00000412676
GKLPVLLLGRSSELRPGEFVVAIGSPFSLQNTVTTGIVSTTQRGGKELGLRNSDMDYIQTDAIINYGNSGGPLVNLDGEVIGINTLKVTAGISFAIPSDKIKKFLTESHDRQAKGKAITKKKYIGIRMMSLTSSKAKELKDRHRDFPDVISGAYIIEVIPDTPAEAGGLKENDVIISINGQSVVSANDVSDVIKRESTLNMVVRRGNEDIMITVIPEEIDP

SEQ ID NO: 39014 - protein, 458 aa, Homo sapiens
  Payload ID: 7814
  Gene Symbol: HTRA2
  Gene Name: HtrA serine peptidase 2
  Uniprot ID: O43464
  ENSP ID: ENSP00000258080
MAAPRAGRGAGWSLRAWRALGGIRWGRRPRLTPDLRALLTSGTSDPRARVTYGTPSLWARLSVGVTEPRACLTSGTPGPRAQLTAVTPDTRTREASENSGTRSRAWLAVALGAGGAVLLLLWGGGRGPPAVLAAVPSPPPASPRSQYNFIADVVEKTAPAVVYIEILDRHPFLGREVPISNGSGFVVAADGLIVTNAHVVADRRRVRVRLLSGDTYEAVVTAVDPVADIATLRIQTKEPLPTLPLGRSADVRQGEFVVAMGSPFALQNTITSGIVSSAQRPARDLGLPQTNVEYIQTDAAIDFGNSGGPLVNLDGEVIGVNTMKVTAGISFAIPSDRLREFLHRGEKKNSSSGISGSQRRYIGVMMLTLSPSILAELQLREPSFPDVQHGVLIHKVILGSPAHRAGLRPGDVILAIGEQMVQNAEDVYEAVRTQSQLAVQIRRGRETLTLYVTPEVTE

SEQ ID NO: 39015 - protein, 361 aa, Homo sapiens
  Payload ID: 7814
  Gene Symbol: HTRA2
  Gene Name: HtrA serine peptidase 2
  Uniprot ID: O43464
  ENSP ID: ENSP00000312893
MAAPRAGRGAGWSLRAWRALGGIRWGRRPRLTPDLRALLTSGTSDPRARVTYGTPSLWARLSVGVTEPRACLTSGTPGPRAQLTAVTPDTRTREASENSGTRSRAWLAVALGAGGAVLLLLWGGGRGPPAVLAAVPSPPPASPRSQYNFIADVVEKTAPAVVYIEILDRHPFLGREVPISNGSGFVVAADGLIVTNAHVVADRRRVRVRLLSGDTYEAVVTAVDPVADIATLRIQTKFGNSGGPLVNLDGEVIGVNTMKVTAGISFAIPSDRLREFLHRGEKKNSSSGISGSQRRYIGVMMLTLSPRAGLRPGDVILAIGEQMVQNAEDVYEAVRTQSQLAVQIRRGRETLTLYVTPEVTE

SEQ ID NO: 39016 - protein, 423 aa, Homo sapiens
  Payload ID: 7814
  Gene Symbol: HTRA2
  Gene Name: HtrA serine peptidase 2
  ENSP ID: ENSP00000399166
LRAWRALGGIRWGRRPRLTPDLRALLTSGTSDPRARVTYGTPSLWARLSVGVTEPRACLTSGTPGPRAQLTAVTPDTRTREASENSGTRSRAWLAVALGAGGAVLLLLWGGGRGPPAVLAAVPSPPPASPRSQYNFIADVVEKTAPAVVYIEILDRHPFLGREVPISNGSGFVVAADGLIVTNAHVVADRRRVRVRLLSGDTYEAVVTAVDPVADIATLRIQTKEPLPTLPLGRSADVRQGEFVVAMGSPFALQNTITSGIVSSAQRPARDLGLPQTNVEYIQTDAAIDFGNSGGPLVNLARELGAVSLQDGEVIGVNTMKVTAGISFAIPSDRLREFLHRGEKKNSSSGISGSQRRYIGVMMLTLSPRAGLRPGDVILAIGEQMVQNAEDVYEAVRTQSQLAVQIRRGRETLTLYVTPEVTE

SEQ ID NO: 39017 - protein, 453 aa, Homo sapiens
  Payload ID: 7815
  Gene Symbol: HTRA3
  Gene Name: HtrA serine peptidase 3
  Uniprot ID: P83110
  ENSP ID: ENSP00000303766
MQARALLLAALAALALAREPPAAPCPARCDVSRCPSPRCPGGYVPDLCNCCLVCAASEGEPCGGPLDSPCGESLECVRGLCRCRWSHAVCGTDGHTYANVCALQAASRRALQLSGTPVRQLQKGACPLGLHQLSSPRYKFNFIADVVEKIAPAVVHIELFLRHPLFGRNVPLSSGSGFIMSEAGLIITNAHVVSSNSAAPGRQQLKVQLQNGDSYEATIKDIDKKSDIATIKIHPKKKLPVLLLGHSADLRPGEFVVAIGSPFALQNTVTTGIVSTAQREGRELGLRDSDMDYIQTDAIINYGNSGGPLVNLDGEVIGINTLKVTAGISFAIPSDRITRFLTEFQDKQIKDWKKRFIGIRMRTITPSLVDELKASNPDFPEVSSGIYVQEVAPNSPSQRGGIQDGDIIVKVNGRPLVDSSELQEAVLTESPLLLEVRRGNDDLLFSIAPEVVM

SEQ ID NO: 39018 - protein, 357 aa, Homo sapiens
  Payload ID: 7815
  Gene Symbol: HTRA3
  Gene Name: HtrA serine peptidase 3
  Uniprot ID: P83110
  ENSP ID: ENSP00000371952
MQARALLLAALAALALAREPPAAPCPARCDVSRCPSPRCPGGYVPDLCNCCLVCAASEGEPCGGPLDSPCGESLECVRGLCRCRWSHAVCGTDGHTYANVCALQAASRRALQLSGTPVRQLQKGACPLGLHQLSSPRYKFNFIADVVEKIAPAVVHIELFLRHPLFGRNVPLSSGSGFIMSEAGLIITNAHVVSSNSAAPGRQQLKVQLQNGDSYEATIKDIDKKSDIATIKIHPKKKLPVLLLGHSADLRPGEFVVAIGSPFALQNTVTTGIVSTAQREGRELGLRDSDMDYIQTDAIINYGNSGGPLVNLDGEVIGINTLKVTAGISFAIPSDRITRFLTEFQDKQIKAPSLAVH

SEQ ID NO: 39019 - protein, 476 aa, Homo sapiens
  Payload ID: 7816
  Gene Symbol: HTRA4
  Gene Name: HtrA serine peptidase 4
  Uniprot ID: P83105
  ENSP ID: ENSP00000305919
MIRPQLRTAGLGRCLLPGLLLLLVPVLWAGAEKLHTQPSCPAVCQPTRCPALPTCALGTTPVFDLCRCCRVCPAAEREVCGGAQGQPCAPGLQCLQPLRPGFPSTCGCPTLGGAVCGSDRRTYPSMCALRAENRAARRLGKVPAVPVQWGNCGDTGTRSAGPLRRNYNFIAAVVEKVAPSVVHVQLWGRLLHGSRLVPVYSGSGFIVSEDGLIITNAHVVRNQQWIEVVLQNGARYEAVVKDIDLKLDLAVIKIESNAELPVLMLGRSSDLRAGEFVVALGSPFSLQNTATAGIVSTKQRGGKELGMKDSDMDYVQIDATINYGNSGGPLVNLDGDVIGVNSLRVTDGISFAIPSDRVRQFLAEYHEHQMKGKAFSNKKYLGLQMLSLTVPLSEELKMHYPDFPDVSSGVYVCKVVEGTAAQSSGLRDHDVIVNINGKPITTTTDVVKALDSDSLSMAVLRGKDNLLLTVIPETIN

SEQ ID NO: 39020 - protein, 2718 aa, Homo sapiens
  Payload ID: 7817
  Gene Symbol: HIVEP1
  Gene Name: human immunodeficiency virus type I enhancer binding protein 1
  Uniprot ID: P15822
  ENSP ID: ENSP00000368698
MPRTKQIHPRNLRDKIEEAQKELNGAEVSKKEILQAGVKGTSESLKGVKRKKIVAENHLKKIPKSPLRNPLQAKHKQNTEESSFAVLHSASESHKKQNYIPVKNGKQFTKQNGETPGIIAEASKSEESVSPKKPLFLQQPSELRRWRSEGADPAKFSDLDEQCDSSSLSSKTRTDNSECISSHCGTTSPSYTNTAFDVLLKAMEPELSTLSQKGSPCAIKTEKLRPNKTARSPPKLKNSSMDAPNQTSQELVAESQSSCTSYTVHMSAAQKNEQGAMQSASHLYHQHEHFVPKSNQHNQQLPGCSGFTGSLTNLQNQENAKLEQVYNIAVTSSVGLTSPSSRSQVTPQNQQMDSASPLSISPANSTQSPPMPIYNSTHVASVVNQSVEQMCNLLLKDQKPKKQGKYICEYCNRACAKPSVLLKHIRSHTGERPYPCVTCGFSFKTKSNLYKHKKSHAHTIKLGLVLQPDAGGLFLSHESPKALSIHSDVEDSGESEEEGATDERQHDLGAMELQPVHIIKRMSNAETLLKSSFTPSSPENVIGDFLLQDRSAESQAVTELPKVVVHHVTVSPLRTDSPKAMDPKPELSSAQKQKDLQVTNVQPLSANMSQGGVSRLETNENSHQKGDMNPLEGKQDSHVGTVHAQLQRQQATDYSQEQQGKLLSPRSLGSTDSGYFSRSESADQTVSPPTPFARRLPSTEQDSGRSNGPSAALVTTSTPSALPTGEKALLLPGQMRPPLATKTLEERISKLISDNEALVDDKQLDSVKPRRTSLSRRGSIDSPKSYIFKDSFQFDLKPVGRRTSSSSDIPKSPFTPTEKSKQVFLLSVPSLDCLPITRSNSMPTTGYSAVPANIIPPPHPLRGSQSFDDKIGAFYDDVFVSGPNAPVPQSGHPRTLVRQAAIEDSSANESHVLGTGQSLDESHQGCHAAGEAMSVRSKALAQGPHIEKKKSHQGRGTMFECETCRNRYRKLENFENHKKFYCSELHGPKTKVAMREPEHSPVPGGLQPQILHYRVAGSSGIWEQTPQIRKRRKMKSVGDDEELQQNESGTSPKSSEGLQFQNALGCNPSLPKHNVTIRSDQQHKNIQLQNSHIHLVARGPEQTMDPKLSTIMEQQISSAAQDKIELQRHGTGISVIQHTNSLSRPNSFDKPEPFERASPVSFQELNRTGKSGSLKVIGISQEESHPSRDGSHPHQLALSDALRGELQESSRKSPSERHVLGQPSRLVRQHNIQVPEILVTEEPDRDLEAQCHDQEKSEKFSWPQRSETLSKLPTEKLPPKKKRLRLAEIEHSSTESSFDSTLSRSLSRESSLSHTSSFSASLDIEDVSKTEASPKIDFLNKAEFLMIPAGLNTLNVPGCHREMRRTASEQINCTQTSMEVSDLRSKSFDCGSITPPQTTPLTELQPPSSPSRVGVTGHVPLLERRRGPLVRQISLNIAPDSHLSPVHPTSFQNTALPSVNAVPYQGPQLTSTSLAEFSANTLHSQTQVKDLQAETSNSSSTNVFPVQQLCDINLLNQIHAPPSHQSTQLSLQVSTQGSKPDKNSVLSGSSKSEDCFAPKYQLHCQVFTSGPSCSSNPVHSLPNQVISDPVGTDHCVTSATLPTKLIDSMSNSHPLLPPELRPLGSQVQKVPSSFMLPIRLQSSVPAYCFATLTSLPQILVTQDLPNQPICQTNHSVVPISEEQNSVPTLQKGHQNALPNPEKEFLCENVFSEMSQNSSLSESLPITQKISVGRLSPQQESSASSKRMLSPANSLDIAMEKHQKRAKDENGAVCATDVRPLEALSSRVNEASKQKKPILVRQVCTTEPLDGVMLEKDVFSQPEISNEAVNLTNVLPADNSSTGCSKFVVIEPISELQEFENIKSSTSLTLTVRSSPAPSENTHISPLKCTDNNQERKSPGVKNQGDKVNIQEQSQQPVTSLSLFNIKDTQQLAFPSLKTTTNFTWCYLLRQKSLHLPQKDQKTSAYTDWTVSASNPNPLGLPTKVALALLNSKQNTGKSLYCQAITTHSKSDLLVYSSKWKSSLSKRALGNQKSTVVEFSNKDASEINSEQDKENSLIKSEPRRIKIFDGGYKSNEEYVYVRGRGRGKYICEECGIRCKKPSMLKKHIRTHTDVRPYHCTYCNFSFKTKGNLTKHMKSKAHSKKCVDLGVSVGLIDEQDTEESDEKQRFSYERSGYDLEESDGPDEDDNENEDDDEDSQAESVLSATPSVTASPQHLPSRSSLQDPVSTDEDVRITDCFSGVHTDPMDVLPRALLTRMTVLSTAQSDYNRKTLSPGKARQRAARDENDTIPSVDTSRSPCHQMSVDYPESEEILRSSMAGKAVAITQSPSSVRLPPAAAEHSPQTAAGMPSVASPHPDPQEQKQQITLQPTPGLPSPHTHLFSHLPLHSQQQSRTPYNMVPVGGIHVVPAGLTYSTFVPLQAGPVQLTIPAVSVVHRTLGTHRNTVTEVSGTTNPAGVAELSSVVPCIPIGQIRVPGLQNLSTPGLQSLPSLSMETVNIVGLANTNMAPQVHPPGLALNAVGLQVLTANPSSQSSPAPQAHIPGLQILNIALPTLIPSVSQVAVDAQGAPEMPASQSKACETQPKQTSVASANQVSRTESPQGLPTVQRENAKKVLNPPAPAGDHARLDGLSKMDTEKAASANHVKPKPELTSIQGQPASTSQPLLKAHSEVFTKPSGQQTLSPDRQVPRPTALPRRQPTVHFSDVSSDDDEDRLVIAT

SEQ ID NO: 39021 - protein, 43 aa, Homo sapiens
  Payload ID: 7817
  Gene Symbol: HIVEP1
  Gene Name: human immunodeficiency virus type I enhancer binding protein 1
  ENSP ID: ENSP00000382395
  MOD_RES (1)..(1): Any amino acid
XALALLNSKQNTGKSLYCQAITTHSKSDLLVYSSKWKSSLSKI

SEQ ID NO: 39022 - protein, 240 aa, Homo sapiens
  Payload ID: 7817
  Gene Symbol: HIVEP1
  Gene Name: human immunodeficiency virus type I enhancer binding protein 1
  ENSP ID: ENSP00000409078
MLSWVPWRRVTGLHGVALPHGLDKIEEAQKELNGAEVSKKEILQAGVKGTSESLKGNLTKHMKSKAHSKKCVDLGVSVGLIDEQDTEESDEKQRFSYERSGYDLEESDGPDEDDNENEDDDEDSQAESVLSATPSVTASPQHLPSRSSLQDPVSTDEDVRITDCFSGVHTDPMDVLPRALLTRMTVLSTAQSDYNRKTLSPGKARQRAARDENDTIPSVDTSRSPCHQMSVDYPESEEIL

SEQ ID NO: 39023 - protein, 142 aa, Homo sapiens
  Payload ID: 7817
  Gene Symbol: HIVEP1
  Gene Name: human immunodeficiency virus type I enhancer binding protein 1
  ENSP ID: ENSP00000417348
MPRTKQIHPRNLRDKIEEAQKELNGAEVSKKEILQAGVKGTSESLKGVKRKKIVAENHLKKIPKSPLRNPLQAKHKQNTEESSFAVLHSASESHKKQNYIPVKNGKQFTKQNGETPGIIAEASKSEESVSPKKPLFLQQPSE

SEQ ID NO: 39024 - protein, 128 aa, Homo sapiens
  Payload ID: 7817
  Gene Symbol: HIVEP1
  Gene Name: human immunodeficiency virus type I enhancer binding protein 1
  ENSP ID: ENSP00000418021
MPRTKQIHPRNLRDKIEEAQKELNGAEVSKKEILQAGVKGTSESLKGVKRKKIVAENHLKKIPKSPLRNPLQAKHKQNTEESSFAVLHSASESHKKQNYIPVKNGKQFTKQNGETPGIIAEASKSEES

SEQ ID NO: 39025 - protein, 47 aa, Homo sapiens
  Payload ID: 7817
  Gene Symbol: HIVEP1
  Gene Name: human immunodeficiency virus type I enhancer binding protein 1
  ENSP ID: ENSP00000419721
MPRTKQIHPRNLRGSCSFAQAGVQWCSCSSLQPQTSGDKLRLVPFLL

SEQ ID NO: 39026 - protein, 120 aa, Homo sapiens
  Payload ID: 7817
  Gene Symbol: HIVEP1
  Gene Name: human immunodeficiency virus type I enhancer binding protein 1
  ENSP ID: ENSP00000419762
MPRTKQIHPRNLRDKIEEAQKELNGAEVSKKEILQAGVKGTSESLKGVKRKKIVAENHLKKIPKSPLRNPLQAKHKQNTEESSFAVLHSASESHKKQNYIPVKNGKQFTKQNGETPGIIA

SEQ ID NO: 39027 - protein, 2717 aa, Homo sapiens
  Payload ID: 7817
  Gene Symbol: HIVEP1
  Gene Name: human immunodeficiency virus type I enhancer binding protein 1
  ENSP ID: ENSP00000445617
MPRTKQIHPRNLRDKIEEAQKELNGAEVSKKEILQAGVKGTSESLKGVKRKKIVAENHLKKIPKSPLRNPLQAKHKQNTEESSFAVLHSASESHKKQNYIPVKNGKQFTKQNGETPGIIAEASKSEESVSPKKPLFLQQPSELRRWRSEGADPAKFSDLDEQCDSSSLSSKTRTDNSECISSHCGTTSPSYTNTAFDVLLKAMEPELSTLSQKGSPCAIKTEKLRPNKTARSPPKLKNSSMDAPNQTSQELVAESQSSCTSYTVHMSAAQKNEQGAMQSASHLYHQHEHFVPKSNQHNQQLPGCSGFTGSLTNLQNQENAKLEQVYNIAVTSSVGLTSPSSRSQVTPQNQQMDSASPLSISPANSTQSPPMPIYNSTHVASVVNQSVEQMCNLLLKDQKPKKQGKYICEYCNRACAKPSVLLKHIRSHTGERPYPCVTCGFSFKTKSNLYKHKKSHAHTIKLGLVLQPDAGGLFLSHESPKALSIHSDVEDSGESEEEGATDERQHDLGAMELQPVHIIKRMSNAETLLKSSFTPSSPENVIGDFLLQDRSAESQAVTELPKVVVHHVTVSPLRTDSPKAMDPKPELSSAQKQKDLQVTNVQPLSANMSQGGVSRLETNENSHQKGDMNPLEGKQDSHVGTVHAQLQRQQATDYSQEQQGKLLSPRSLGSTDSGYFSRSESADQTVSPPTPFARRLPSTEQDSGRSNGPSAALVTTSTPSALPTGEKALLLPGQMRPPLATKTLEERISKLISDNEALVDDKQLDSVKPRRTSLSRRGSIDSPKSYIFKDSFQFDLKPVGRRTSSSSDIPKSPFTPTEKSKQVFLLSVPSLDCLPITRSNSMPTTGYSAVPANIIPPPHPLRGSQSFDDKIGAFYDDVFVSGPNAPVPQSGHPRTLVRQAAIEDSSANESHVLGTGQSLDESHQGCHAAGEAMSVRSKALAQGPHIEKKKSHQGRGTMFECETCRNRYRKLENFENHKKFYCSELHGPKTKVAMREPEHSPVPGGLQPQILHYRVAGSSGIWEQTPQIRKRRKMKSVGDDEELQQNESGTSPKSSEGLQFQNALGCNPSLPKHNVTIRSDQQHKNIQLQNSHIHLVARGPEQTMDPKLSTIMEQQISSAAQDKIELQRHGTGISVIQHTNSLSRPNSFDKPEPFERASPVSFQELNRTGKSGSLKVIGISQEESHPSRDGSHPHQLALSDALRGELQESSRKSPSERHVLGQPSRLVRQHNIQVPEILVTEEPDRDLEAQCHDQEKSEKFSWPQRSETLSKLPTEKLPPKKKRLRLAEIEHSSTESSFDSTLSRSLSRESSLSHTSSFSASLDIEDVSKTEASPKIDFLNKAEFLMIPAGLNTLNVPGCHREMRRTASEQINCTQTSMEVSDLRSKSFDCGSITPPQTTPLTELQPPSSPSRVGVTGHVPLLERRRGPLVRQISLNIAPDSHLSPVHPTSFQNTALPSVNAVPYQGPQLTSTSLAEFSANTLHSQTQVKDLQAETSNSSSTNVFPVQQLCDINLLNQIHAPPSHQSTQLSLQVSTQGSKPDKNSVLSGSSKSEDCFAPKYQLHCQVFTSGPSCSSNPVHSLPNQVISDPVGTDHCVTSATLPTKLIDSMSNSHPLLPPELRPLGSQVQKVPSSFMLPIRLQSSVPAYCFATLTSLPQILVTQDLPNQPICQTNHSVVPISEEQNSVPTLQKGHQNALPNPEKEFLCENVFSEMSQNSSLSESLPITQKISVGRLSPQQESSASSKRMLSPANSLDIAMEKHQKRAKDENGAVCATDVRPLEALSSRVNEASKQKKPILVRQVCTTEPLDGVMLEKDVFSQPEISNEAVNLTNVLPADNSSTGCSKFVVIEPISELQEFENIKSSTSLTLTVRSSPAPSENTHISPLKCTDNNQERKSPGVKNQGDKVNIQEQSQQPVTSLSLFNIKDTQQLAFPSLKTTTNFTWCYLLRQKSLHLPQKDQKTSAYTDWTVSASNPNPLGLPTKVALALLNSKQNTGKSLYCQAITTHSKSDLLVYSSKWKSSLSKRALGNQKSTVVEFSNKDASEINSEQDKENSLIKSEPRRIKIFDGGQSNEEYVYVRGRGRGKYICEECGIRCKKPSMLKKHIRTHTDVRPYHCTYCNFSFKTKGNLTKHMKSKAHSKKCVDLGVSVGLIDEQDTEESDEKQRFSYERSGYDLEESDGPDEDDNENEDDDEDSQAESVLSATPSVTASPQHLPSRSSLQDPVSTDEDVRITDCFSGVHTDPMDVLPRALLTRMTVLSTAQSDYNRKTLSPGKARQRAARDENDTIPSVDTSRSPCHQMSVDYPESEEILRSSMAGKAVAITQSPSSVRLPPAAAEHSPQTAAGMPSVASPHPDPQEQKQQITLQPTPGLPSPHTHLFSHLPLHSQQQSRTPYNMVPVGGIHVVPAGLTYSTFVPLQAGPVQLTIPAVSVVHRTLGTHRNTVTEVSGTTNPAGVAELSSVVPCIPIGQIRVPGLQNLSTPGLQSLPSLSMETVNIVGLANTNMAPQVHPPGLALNAVGLQVLTANPSSQSSPAPQAHIPGLQILNIALPTLIPSVSQVAVDAQGAPEMPASQSKACETQPKQTSVASANQVSRTESPQGLPTVQRENAKKVLNPPAPAGDHARLDGLSKMDTEKAASANHVKPKPELTSIQGQPASTSQPLLKAHSEVFTKPSGQQTLSPDRQVPRPTALPRRQPTVHFSDVSSDDDEDRLVIAT

SEQ ID NO: 39028 - protein, 583 aa, Homo sapiens
  Payload ID: 7817
  Gene Symbol: HIVEP1
  Gene Name: human immunodeficiency virus type I enhancer binding protein 1
  ENSP ID: ENSP00000486543
MLKKHIRTHTDVRPYHCTYCNFSFKTKDEKQRFSYERSGYDLEESDGPDEDDNENEDDDEDSQAESVLSATPSVTASPQHLPSRSSLQDPVSTDEDVRITDCFSGVHTDPMDVLPRALLTRMTVLSTAQSDYNRKTLSPGKARQRAARDENDTIPSVDTSRSPCHQMSVDYPESEEILRSSMAGKAVAITQSPSSVRLPPAAAEHSPQTAAGMPSVASPHPDPQEQKQQITLQPTPGLPSPHTHLFSHLPLHSQQQSRTPYNMVPVGGIHVVPAGLTYSTFVPLQAGPVQLTIPAVSVVHRTLGTHRNTVTEVSGTTNPAGVAELSSVVPCIPIGQIRVPGLQNLSTPGLQSLPSLSMETVNIVGLANTNMAPQVHPPGLALNAVGLQVLTANPSSQSSPAPQAHIPGLQILNIALPTLIPSVSQVAVDAQGAPEMPASQSKACETQPKQTSVASANQVSRTESPQGLPTVQRENAKKVLNPPAPAGDHARLDGLSKMDTEKAASANHVKPKPELTSIQGQPASTSQPLLKAHSEVFTKPSGQQTLSPDRQVPRPTALPRRQPTVHFSDVSSDDDEDRLVIAT

SEQ ID NO: 39029 - protein, 2446 aa, Homo sapiens
  Payload ID: 7818
  Gene Symbol: HIVEP2
  Gene Name: human immunodeficiency virus type I enhancer binding protein 2
  Uniprot ID: P31629
  ENSP ID: ENSP00000012134
MDTGDTALGQKATSRSGETDKASGRWRQEQSAVIKMSTFGSHEGQRQPQIEPEQIGNTASAQLFGSGKLASPSEVVQQVAEKQYPPHRPSPYSCQHSLSFPQHSLPQGVMHSTKPHQSLEGPPWLFPGPLPSVASEDLFPFPIHGHSGGYPRKKISSLNPAYSQYSQKSIEQAEEAHKKEHKPKKPGKYICPYCSRACAKPSVLKKHIRSHTGERPYPCIPCGFSFKTKSNLYKHRKSHAHAIKAGLVPFTESAVSKLDLEAGFIDVEAEIHSDGEQSTDTDEESSLFAEASDKMSPGPPIPLDIASRGGYHGSLEESLGGPMKVPILIIPKSGIPLPNESSQYIGPDMLPNPSLNTKADDSHTVKQKLALRLSEKKGQDSEPSLNLLSPHSKGSTDSGYFSRSESAEQQISPPNTNAKSYEEIIFGKYCRLSPRNALSVTTTSQERAAMGRKGIMEPLPHVNTRLDVKMFEDPVSQLIPSKGDVDPSQTSMLKSTKFNSESRQPQIIPSSIRNEGKLYPANFQGSNPVLLEAPVDSSPLIRSNSVPTSSATNLTIPPSLRGSHSFDERMTGSDDVFYPGTVGIPPQRMLRRQAAFELPSVQEGHVEVEHHGRMLKGISSSSLKEKKLSPGDRVGYDYDVCRKPYKKWEDSETPKQNYRDISCLSSLKHGGEYFMDPVVPLQGVPSMFGTTCENRKRRKEKSVGDEEDTPMICSSIVSTPVGIMASDYDPKLQMQEGVRSGFAMAGHENLSHGHTERFDPCRPQLQPGSPSLVSEESPSAIDSDKMSDLGGRKPPGNVISVIQHTNSLSRPNSFERSESAELVACTQDKAPSPSETCDSEISEAPVSPEWAPPGDGAESGGKPSPSQQVQQQSYHTQPRLVRQHNIQVPEIRVTEEPDKPEKEKEAQSKEPEKPVEEFQWPQRSETLSQLPAEKLPPKKKRLRLADMEHSSGESSFESTGTGLSRSPSQESNLSHSSSFSMSFEREETSKLSALPKQDEFGKHSEFLTVPAGSYSLSVPGHHHQKEMRRCSSEQMPCPHPAEVPEVRSKSFDYGNLSHAPVSGAAASTVSPSRERKKCFLVRQASFSGSPEISQGEVGMDQSVKQEQLEHLHAGLRSGWHHGPPAVLPPLQQEDPGKQVAGPCPPLSSGPLHLAQPQIMHMDSQESLRNPLIQPTSYMTSKHLPEQPHLFPHQETIPFSPIQNALFQFQYPTVCMVHLPAQQPPWWQAHFPHPFAQHPQKSYGKPSFQTEIHSSYPLEHVAEHTGKKPAEYAHTKEQTYPCYSGASGLHPKNLLPKFPSDQSSKSTETPSEQVLQEDFASANAGSLQSLPGTVVPVRIQTHVPSYGSVMYTSISQILGQNSPAIVICKVDENMTQRTLVTNAAMQGIGFNIAQVLGQHAGLEKYPIWKAPQTLPLGLESSIPLCLPSTSDSVATLGGSKRMLSPASSLELFMETKQQKRVKEEKMYGQIVEELSAVELTNSDIKKDLSRPQKPQLVRQGCASEPKDGLQSGSSSFSSLSPSSSQDYPSVSPSSREPFLPSKEMLSGSRAPLPGQKSSGPSESKESSDELDIDETASDMSMSPQSSSLPAGDGQLEEEGKGHKRPVGMLVRMASAPSGNVADSTLLLTDMADFQQILQFPSLRTTTTVSWCFLNYTKPNYVQQATFKSSVYASWCISSCNPNPSGLNTKTTLALLRSKQKITAEIYTLAAMHRPGTGKLTSSSAWKQFTQMKPDASFLFGSKLERKLVGNILKERGKGDIHGDKDIGSKQTEPIRIKIFEGGYKSNEDYVYVRGRGRGKYICEECGIRCKKPSMLKKHIRTHTDVRPYVCKLCNFAFKTKGNLTKHMKSKAHMKKCLELGVSMTSVDDTETEEAENLEDLHKAAEKHSMSSISTDHQFSDAEESDGEDGDDNDDDDEDEDDFDDQGDLTPKTRSRSTSPQPPRFSSLPVNVGAVPHGVPSDSSLGHSSLISYLVTLPSIRVTQLMTPSDSCEDTQMTEYQRLFQSKSTDSEPDKDRLDIPSCMDEECMLPSEPSSSPRDFSPSSHHSSPGYDSSPCRDNSPKRYLIPKGDLSPRRHLSPRRDLSPMRHLSPRKEAALRREMSQRDVSPRRHLSPRRPVSPGKDITARRDLSPRRERRYMTTIRAPSPRRALYHNPPLSMGQYLQAEPIVLGPPNLRRGLPQVPYFSLYGDQEGAYEHPGSSLFPEGPNDYVFSHLPLHSQQQVRAPIPMVPVGGIQMVHSMPPALSSLHPSPTLPLPMEGFEEKKGASGESFSKDPYVLSKQHEKRGPHALQSSGPPSTPSSPRLLMKQSTSEDSLNATEREQEENIQTCTKAIASLRIATEEAALLGPDQPARVQEPHQNPLGSAHVSIRHFSRPEPGQPCTSATHPDLHDGEKDNFGTSQTPLAHSTFYSKSCVDDKQLDFHSSKELSSSTEESKDPSSEKSQLH

SEQ ID NO: 39030 - protein, 2446 aa, Homo sapiens; identical to SEQ ID NO: 39029
  Payload ID: 7818
  Gene Symbol: HIVEP2
  Gene Name: human immunodeficiency virus type I enhancer binding protein 2
  Uniprot ID: P31629
  ENSP ID: ENSP00000356575

SEQ ID NO: 39031 - protein, 2446 aa, Homo sapiens; identical to SEQ ID NO: 39029
  Payload ID: 7818
  Gene Symbol: HIVEP2
  Gene Name: human immunodeficiency virus type I enhancer binding protein 2
  Uniprot ID: P31629
  ENSP ID: ENSP00000356576

SEQ ID NO: 39032 - protein, 2406 aa, Homo sapiens
  Payload ID: 7819
  Gene Symbol: HIVEP3
  Gene Name: human immunodeficiency virus type I enhancer binding protein 3
  Uniprot ID: Q5T1R4
  ENSP ID: ENSP00000247584
MDPEQSVKGTKKAEGSPRKRLTKGEAIQTSVSSSVPYPGSGTAATQESPAQELLAPQPFPGPSSVLREGSQEKTGQQQKPPKRPPIEASVHISQLPQHPLTPAFMSPGKPEHLLEGSTWQLVDPMRPGPSGSFVAPGLHPQSQLLPSHASIIPPEDLPGVPKVFVPRPSQVSLKPTEEAHKKERKPQKPGKYICQYCSRPCAKPSVLQKHIRSHTGERPYPCGPCGFSFKTKSNLYKHRKSHAHRIKAGLASGMGGEMYPHGLEMERIPGEEFEEPTEGESTDSEEETSATSGHPAELSPRPKQPLLSSGLYSSGSHSSSHERCSLSQSSTAQSLEDPPPFVEPSSEHPLSHKPEDTHTIKQKLALRLSERKKVIDEQAFLSPGSKGSTESGYFSRSESAEQQVSPPNTNAKSYAEIIFGKCGRIGQRTAMLTATSTQPLLPLSTEDKPSLVPLSVPRTQVIEHITKLITINEAVVDTSEIDSVKPRRSSLSRRSSMESPKSSLYREPLSSHSEKTKPEQSLLSLQHPPSTAPPVPLLRSHSMPSAACTISTPHHPFRGSYSFDDHITDSEALSHSSHVFTSHPRMLKRQPAIELPLGGEYSSEEPGPSSKDTASKPSDEVEPKESELTKKTKKGLKTKGVIYECNICGARYKKRDNYEAHKKYYCSELQIAKPISAGTHTSPEAEKSQIEHEPWSQMMHYKLGTTLELTPLRKRRKEKSLGDEEEPPAFESTKSQFGSPGPSDAARNLPLESTKSPAEPSKSVPSLEGPTGFQPRTPKPGSGSESGKERRTTSKEISVIQHTSSFEKSDSLEQPSGLEGEDKPLAQFPSPPPAPHGRSAHSLQPKLVRQPNIQVPEILVTEEPDRPDTEPEPPPKEPEKTEEFQWPQRSQTLAQLPAEKLPPKKKRLRLAEMAQSSGESSFESSVPLSRSPSQESNVSLSGSSRSASFERDDHGKAEAPSPSSDMRPKPLGTHMLTVPSHHPHAREMRRSASEQSPNVSHSAHMTETRSKSFDYGSLSLTGPSAPAPVAPPARVAPPERRKCFLVRQASLSRPPESELEVAPKGRQESEEPQPSSSKPSAKSSLSQISSAATSHGGPPGGKGPGQDRPPLGPTVPYTEALQVFHHPVAQTPLHEKPYLPPPVSLFSFQHLVQHEPGQSPEFFSTQAMSSLLSSPYSMPPLPPSLFQAPPLPLQPTVLHPGQLHLPQLMPHPANIPFRQPPSFLPMPYPTSSALSSGFFLPLQSQFALQLPGDVESHLPQIKTSLAPLATGSAGLSPSTEYSSDIRLPPVAPPASSSAPTSAPPLALPACPDTMVSLVVPVRVQTNMPSYGSAMYTTLSQILVTQSQGSSATVALPKFEEPPSKGTTVCGADVHEVGPGPSGLSEEQSRAFPTPYLRVPVTLPERKGTSLSSESILSLEGSSSTAGGSKRVLSPAGSLELTMETQQQKRVKEEEASKADEKLELVKPCSVVLTSTEDGKRPEKSHLGNQGQGRRELEMLSSLSSDPSDTKEIPPLPHPALSHGTAPGSEALKEYPQPSGKPHRRGLTPLSVKKEDSKEQPDLPSLAPPSSLPLSETSSRPAKSQEGTDSKKVLQFPSLHTTTNVSWCYLNYIKPNHIQHADRRSSVYAGWCISLYNPNLPGVSTKAALSLLRSKQKVSKETYTMATAPHPEAGRLVPSSSRKPRMTEVHLPSLVSPEGQKDLARVEKEEERRGEPEEDAPASQRGEPARIKIFEGGYKSNEEYVYVRGRGRGKYVCEECGIRCKKPSMLKKHIRTHTDVRPYVCKHCHFAFKTKGNLTKHMKSKAHSKKCQETGVLEELEAEEGTSDDLFQDSEGREGSEAVEEHQFSDLEDSDSDSDLDEDEDEDEEESQDELSRPSSEAPPPGPPHALRADSSPILGPQPPDAPASGTEATRGSSVSEAERLTASSCSMSSQSMPGLPWLGPAPLGSVEKDTGSALSYKPVSPRRPWSPSKEAGSRPPLARKHSLTKNDSSPQRCSPAREPQASAPSPPGLHVDPGRGMGALPCGSPRLQLSPLTLCPLGRELAPRAHVLSKLEGTTDPGLPRYSPTRRWSPGQAESPPRSAPPGKWALAGPGSPSAGEHGPGLGLDPRVLFPPAPLPHKLLSRSPETCASPWQKAESRSPSCSPGPAHPLSSRPFSALHDFHGHILARTEENIFSHLPLHSQHLTRAPCPLIPIGGIQMVQARPGAHPTLLPGPTAAWVSGFSGGGSDLTGAREAQERGRWSPTESSSASVSPVAKVSKFTLSSELEGGDYPKERERTGGGPGRPPDWTPHGTGAPAEPTPTHSPCTPPDTLPRPPQGRRAAQSWSPRLESPRAPTNPEPSATPPLDRSSSVGCLAEASARFPARTRNLSGEPRTRQDSPKPSGSGEPRAHPHQPEDRVPPNA

SEQ ID NO: 39033 - protein, 2406 aa, Homo sapiens; identical to SEQ ID NO: 39032
  Payload ID: 7819
  Gene Symbol: HIVEP3
  Gene Name: human immunodeficiency virus type I enhancer binding protein 3
  Uniprot ID: Q5T1R4
  ENSP ID: ENSP00000361664

SEQ ID NO: 39034 - protein, 2405 aa, Homo sapiens
  Payload ID: 7819
  Gene Symbol: HIVEP3
  Gene Name: human immunodeficiency virus type I enhancer binding protein 3
  Uniprot ID: Q5T1R4
  ENSP ID: ENSP00000361665
MDPEQSVKGTKKAEGSPRKRLTKGEAIQTSVSSSVPYPGSGTAATQESPAQELLAPQPFPGPSSVLREGSQEKTGQQQKPPKRPPIEASVHISQLPQHPLTPAFMSPGKPEHLLEGSTWQLVDPMRPGPSGSFVAPGLHPQSQLLPSHASIIPPEDLPGVPKVFVPRPSQVSLKPTEEAHKKERKPQKPGKYICQYCSRPCAKPSVLQKHIRSHTGERPYPCGPCGFSFKTKSNLYKHRKSHAHRIKAGLASGMGGEMYPHGLEMERIPGEEFEEPTEGESTDSEEETSATSGHPAELSPRPKQPLLSSGLYSSGSHSSSHERCSLSQSSTAQSLEDPPPFVEPSSEHPLSHKPEDTHTIKQKLALRLSERKKVIDEQAFLSPGSKGSTESGYFSRSESAEQQVSPPNTNAKSYAEIIFGKCGRIGQRTAMLTATSTQPLLPLSTEDKPSLVPLSVPRTQVIEHITKLITINEAVVDTSEIDSVKPRRSSLSRRSSMESPKSSLYREPLSSHSEKTKPEQSLLSLQHPPSTAPPVPLLRSHSMPSAACTISTPHHPFRGSYSFDDHITDSEALSHSSHVFTSHPRMLKRQPAIELPLGGEYSSEEPGPSSKDTASKPSDEVEPKESELTKKTKKGLKTKGVIYECNICGARYKKRDNYEAHKKYYCSELQIAKPISAGTHTSPEAEKSQIEHEPWSQMMHYKLGTTLELTPLRKRRKEKSLGDEEEPPAFESTKSQFGSPGPSDAARNLPLESTKSPAEPSKSVPSLEGPTGFQPRTPKPGSGSESGKERRTTSKEISVIQHTSSFEKSDSLEQPSGLEGEDKPLAQFPSPPPAPHGRSAHSLQPKLVRQPNIQVPEILVTEEPDRPDTEPEPPPKEPEKTEEFQWPQRSQTLAQLPAEKLPPKKKRLRLAEMAQSSGESSFESSVPLSRSPSQESNVSLSGSSRSASFERDDHGKAEAPSPSSDMRPKPLGTHMLTVPSHHPHAREMRRSASEQSPNVSHSAHMTETRSKSFDYGSLSLTGPSAPAPVAPPARVAPPERRKCFLVRQASLSRPPESELEVAPKGRQESEEPQPSSSKPSAKSSLSQISSAATSHGGPPGGKGPGQDRPPLGPTVPYTEALQVFHHPVAQTPLHEKPYLPPPVSLFSFQHLVQHEPGQSPEFFSTQAMSSLLSSPYSMPPLPPSLFQAPPLPLQPTVLHPGQLHLPQLMPHPANIPFRQPPSFLPMPYPTSSALSSGFFLPLQSQFALQLPGDVESHLPQIKTSLAPLATGSAGLSPSTEYSSDIRLPPVAPPASSSAPTSAPPLALPACPDTMVSLVVPVRVQTNMPSYGSAMYTTLSQILVTQSQGSSATVALPKFEEPPSKGTTVCGADVHEVGPGPSGLSEEQSRAFPTPYLRVPVTLPERKGTSLSSESILSLEGSSSTAGGSKRVLSPAGSLELTMETQQQKRVKEEEASKADEKLELVKPCSVVLTSTEDGKRPEKSHLGNQGQGRRELEMLSSLSSDPSDTKEIPPLPHPALSHGTAPGSEALKEYPQPSGKPHRRGLTPLSVKKEDSKEQPDLPSLAPPSSLPLSETSSRPAKSQEGTDSKKVLQFPSLHTTTNVSWCYLNYIKPNHIQHADRRSSVYAGWCISLYNPNLPGVSTKAALSLLRSKQKVSKETYTMATAPHPEAGRLVPSSSRKPRMTEVHLPSLVSPEGQKDLARVEKEEERRGEPEEDAPASQRGEPARIKIFEGGYKSNEEYVYVRGRGRGKYVCEECGIRCKKPSMLKKHIRTHTDVRPYVCKHCHFAFKTKGNLTKHMKSKAHSKKCQETGVLEELEAEEGTSDDLFQDSEGREGSEAVEEHQFSDLEDSDSDSDLDEDEDEDEEESQDELSRPSSEAPPPGPPHALRADSSPILGPQPPDAPASGTEATRGSSVSEAERLTASSCSMSSQSMPGLPWLGPAPLGSVEKDTGSALSYKPVSPRRPWSPSKEAGSRPPLARKHSLTKNDSSPQRCSPAREPQASAPSPPGLHVDPGRGMGALPCGSPRLQLSPLTLCPLGRELAPRAHVLSKLEGTTDPGLPRYSPTRRWSPGQAESPPRSAPPGKWALAGPGSPSAGEHGPGLGLDPRVLFPPAPLPHKLLSRSPETCASPWKAESRSPSCSPGPAHPLSSRPFSALHDFHGHILARTEENIFSHLPLHSQHLTRAPCPLIPIGGIQMVQARPGAHPTLLPGPTAAWVSGFSGGGSDLTGAREAQERGRWSPTESSSASVSPVAKVSKFTLSSELEGGDYPKERERTGGGPGRPPDWTPHGTGAPAEPTPTHSPCTPPDTLPRPPQGRRAAQSWSPRLESPRAPTNPEPSATPPLDRSSSVGCLAEASARFPARTRNLSGEPRTRQDSPKPSGSGEPRAHPHQPEDRVPPNA

SEQ ID NO: 39035 - protein, 3142 aa, Homo sapiens
  Payload ID: 7820
  Gene Symbol: HTT
  Gene Name: huntingtin
  Uniprot ID: P42858
  ENSP ID: ENSP00000347184
MATLEKLMKAFESLKSFQQQQQQQQQQQQQQQQQQQQQPPPPPPPPPPPQLPQPPPQAQPLLPQPQPPPPPPPPPPGPAVAEEPLHRPKKELSATKKDRVNHCLTICENIVAQSVRNSPEFQKLLGIAMELFLLCSDDAESDVRMVADECLNKVIKALMDSNLPRLQLELYKEIKKNGAPRSLRAALWRFAELAHLVRPQKCRPYLVNLLPCLTRTSKRPEESVQETLAAAVPKIMASFGNFANDNEIKVLLKAFIANLKSSSPTIRRTAAGSAVSICQHSRRTQYFYSWLLNVLLGLLVPVEDEHSTLLILGVLLTLRYLVPLLQQQVKDTSLKGSFGVTRKEMEVSPSAEQLVQVYELTLHHTQHQDHNVVTGALELLQQLFRTPPPELLQTLTAVGGIGQLTAAKEESGGRSRSGSIVELIAGGGSSCSPVLSRKQKGKVLLGEEEALEDDSESRSDVSSSALTASVKDEISGELAASSGVSTPGSAGHDIITEQPRSQHTLQADSVDLASCDLTSSATDGDEEDILSHSSSQVSAVPSDPAMDLNDGTQASSPISDSSQTTTEGPDSAVTPSDSSEIVLDGTDNQYLGLQIGQPQDEDEEATGILPDEASEAFRNSSMALQQAHLLKNMSHCRQPSDSSVDKFVLRDEATEPGDQENKPCRIKGDIGQSTDDDSAPLVHCVRLLSASFLLTGGKNVLVPDRDVRVSVKALALSCVGAAVALHPESFFSKLYKVPLDTTEYPEEQYVSDILNYIDHGDPQVRGATAILCGTLICSILSRSRFHVGDWMGTIRTLTGNTFSLADCIPLLRKTLKDESSVTCKLACTAVRNCVMSLCSSSYSELGLQLIIDVLTLRNSSYWLVRTELLETLAEIDFRLVSFLEAKAENLHRGAHHYTGLLKLQERVLNNVVIHLLGDEDPRVRHVAAASLIRLVPKLFYKCDQGQADPVVAVARDQSSVYLKLLMHETQPPSHFSVSTITRIYRGYNLLPSITDVTMENNLSRVIAAVSHELITSTTRALTFGCCEALCLLSTAFPVCIWSLGWHCGVPPLSASDESRKSCTVGMATMILTLLSSAWFPLDLSAHQDALILAGNLLAASAPKSLRSSWASEEEANPAATKQEEVWPALGDRALVPMVEQLFSHLLKVINICAHVLDDVAPGPAIKAALPSLTNPPSLSPIRRKGKEKEPGEQASVPLSPKKGSEASAASRQSDTSGPVTTSKSSSLGSFYHLPSYLKLHDVLKATHANYKVTLDLQNSTEKFGGFLRSALDVLSQILELATLQDIGKCVEEILGYLKSCFSREPMMATVCVQQLLKTLFGTNLASQFDGLSSNPSKSQGRAQRLGSSSVRPGLYHYCFMAPYTHFTQALADASLRNMVQAEQENDTSGWFDVLQKVSTQLKTNLTSVTKNRADKNAIHNHIRLFEPLVIKALKQYTTTTCVQLQKQVLDLLAQLVQLRVNYCLLDSDQVFIGFVLKQFEYIEVGQFRESEAIIPNIFFFLVLLSYERYHSKQIIGIPKIIQLCDGIMASGRKAVTHAIPALQPIVHDLFVLRGTNKADAGKELETQKEVVVSMLLRLIQYHQVLEMFILVLQQCHKENEDKWKRLSRQIADIILPMLAKQQMHIDSHEALGVLNTLFEILAPSSLRPVDMLLRSMFVTPNTMASVSTVQLWISGILAILRVLISQSTEDIVLSRIQELSFSPYLISCTVINRLRDGDSTSTLEEHSEGKQIKNLPEETFSRFLLQLVGILLEDIVTKQLKVEMSEQQHTFYCQELGTLLMCLIHIFKSGMFRRITAAATRLFRSDGCGGSFYTLDSLNLRARSMITTHPALVLLWCQILLLVNHTDYRWWAEVQQTPKRHSLSSTKLLSPQMSGEEEDSDLAAKLGMCNREIVRRGALILFCDYVCQNLHDSEHLTWLIVNHIQDLISLSHEPPVQDFISAVHRNSAASGLFIQAIQSRCENLSTPTMLKKTLQCLEGIHLSQSGAVLTLYVDRLLCTPFRVLARMVDILACRRVEMLLAANLQSSMAQLPMEELNRIQEYLQSSGLAQRHQRLYSLLDRFRLSTMQDSLSPSPPVSSHPLDGDGHVSLETVSPDKDWYVHLVKSQCWTRSDSALLEGAELVNRIPAEDMNAFMMNSEFNLSLLAPCLSLGMSEISGGQKSALFEAAREVTLARVSGTVQQLPAVHHVFQPELPAEPAAYWSKLNDLFGDAALYQSLPTLARALAQYLVVVSKLPSHLHLPPEKEKDIVKFVVATLEALSWHLIHEQIPLSLDLQAGLDCCCLALQLPGLWSVVSSTEFVTHACSLIYCVHFILEAVAVQPGEQLLSPERRTNTPKAISEEEEEVDPNTQNPKYITAACEMVAEMVESLQSVLALGHKRNSGVPAFLTPLLRNIIISLARLPLVNSYTRVPPLVWKLGWSPKPGGDFGTAFPEIPVEFLQEKEVFKEFIYRINTLGWTSRTQFEETWATLLGVLVTQPLVMEQEESPPEEDTERTQINVLAVQAITSLVLSAMTVPVAGNPAVSCLEQQPRNKPLKALDTRFGRKLSIIRGIVEQEIQAMVSKRENIATHHLYQAWDPVPSLSPATTGALISHEKLLLQINPERELGSMSYKLGQVSIHSVWLGNSITPLREEEWDEEEEEEADAPAPSSPPTSPVNSRKHRAGVDIHSCSQFLLELYSRWILPSSSARRTPAILISEVVRSLLVVSDLFTERNQFELMYVTLTELRRVHPSEDEILAQYLVPATCKAAAVLGMDKAVAEPVSRLLESTLRSSHLPSRVGALHGVLYVLECDLLDDTAKQLIPVISDYLLSNLKGIAHCVNIHSQQHVLVMCATAFYLIENYPLDVGPEFSASIIQMCGVMLSGSEESTPSIIYHCALRGLERLLLSEQLSRLDAESLVKLSVDRVNVHSPHRAMAALGLMLTCMYTGKEKVSPGRTSDPNPAAPDSESVIVAMERVSVLFDRIRKGFPCEARVVARILPQFLDDFFPPQDIMNKVIGEFLSNQQPYPQFMATVVYKVFQTLHSTGQSSMVRDWVMLSLSNFTQRAPVAMATWSLSCFFVSASTSPWVAAILPHVISRMGKLEQVDVNLFCLVATDFYRHQIEEELDRRAFQSVLEVVAAPGSPYHRLLTCLRNVHKVTTC

SEQ ID NO: 39036 - protein, 112 aa, Homo sapiens
  Payload ID: 7820
  Gene Symbol: HTT
  Gene Name: huntingtin
  ENSP ID: ENSP00000425743
  MOD_RES (1)..(1): Any amino acid
XELATLQDIGKCVEEILGYLKSCFSREPMMATVCVQQLLKTLFGTNLASQFDGLSSNPSKSQGRAQRLGSSSVRPGLYHYCFMAPYTHFTQALADASLRNMVQAEQENDTSG

SEQ ID NO: 39037 - protein, 1037 aa, Homo sapiens
  Payload ID: 7821
  Gene Symbol: HIP1
  Gene Name: huntingtin interacting protein 1
  Uniprot ID: O00291
  ENSP ID: ENSP00000336747
MDRMASSMKQVPNPLPKVLSRRGVGAGLEAAERESFERTQTVSINKAINTQEVAVKEKHARTCILGTHHEKGAQTFWSVVNRLPLSSNAVLCWKFCHVFHKLLRDGHPNVLKDSLRYRNELSDMSRMWGHLSEGYGQLCSIYLKLLRTKMEYHTKNPRFPGNLQMSDRQLDEAGESDVNNFFQLTVEMFDYLECELNLFQTVFNSLDMSRSVSVTAAGQCRLAPLIQVILDCSHLYDYTVKLLFKLHSCLPADTLQGHRDRFMEQFTKLKDLFYRSSNLQYFKRLIQIPQLPENPPNFLRASALSEHISPVVVIPAEASSPDSEPVLEKDDLMDMDASQQNLFDNKFDDIFGSSFSSDPFNFNSQNGVNKDEKDHLIERLYREISGLKAQLENMKTESQRVVLQLKGHVSELEADLAEQQHLRQQAADDCEFLRAELDELRRQREDTEKAQRSLSEIERKAQANEQRYSKLKEKYSELVQNHADLLRKNAEVTKQVSMARQAQVDLEREKKELEDSLERISDQGQRKTQEQLEVLESLKQELATSQRELQVLQGSLETSAQSEANWAAEFAELEKERDSLVSGAAHREEELSALRKELQDTQLKLASTEESMCQLAKDQRKMLLVGSRKAAEQVIQDALNQLEEPPLISCAGSADHLLSTVTSISSCIEQLEKSWSQYLACPEDISGLLHSITLLAHLTSDAIAHGATTCLRAPPEPADSLTEACKQYGRETLAYLASLEEEGSLENADSTAMRNCLSKIKAIGEELLPRGLDIKQEELGDLVDKEMAATSAAIETATARIEEMLSKSRAGDTGVKLEVNERILGCCTSLMQAIQVLIVASKDLQREIVESGRGTASPKEFYAKNSRWTEGLISASKAVGWGATVMVDAADLVVQGRGKFEELMVCSHEIAASTAQLVAASKVKADKDSPNLAQLQQASRGVNQATAGVVASTISGKSQIEETDNMDFSSMTLTQIKRQEMDSQVRVLELENELQKERQKLGELRKKHYELAGVAEGWEEGTEASPPTLQEVVTEKE

SEQ ID NO: 39038 - protein, 986 aa, Homo sapiens
  Payload ID: 7821
  Gene Symbol: HIP1
  Gene Name: huntingtin interacting protein 1
  Uniprot ID: O00291
  ENSP ID: ENSP00000410300
MDRMASSMKQVPNPLPKVLSRRGVGAGLEAAERESFERTQTVSINKAINTQEVAVKEKHARTCILGTHHEKGAQTFWSVVNRLPLSSNAVLCWKFCHVFHKLLRDGHPNVLKDSLRYRNELSDMSRMWGHLSEGYGQLCSIYLKLLRTKMEYHTKNPRFPGNLQMSDRQLDEAGESDVNNFFQLTVEMFDYLECELNLFQTVFNSLDMSRSVSVTAAGQCRLAPLIQVILDCSHLYDYTVKLLFKLHSCLPADTLQGHRDRFMEQFTKLKDLFYRSSNLQYFKRLIQIPQLPENPPNFLRASALSEHISPVVVIPAEASSPDSEPVLEKDDLMDMDASQQNLFDNKFDDIFGSSFSSDPFNFNSQNGVNKDEKDHLIERLYREISGLKAQLENMKTESQRVVLQLKGHVSELEADLAEQQHLRQQAADDCEFLRAELDELRRQREDTEKAQRSLSEIERKAQANEQRYSKLKEKYSELVQNHADLLRKNAEVTKQVSMARQAQVDLEREKKELEDSLERISDQGQRKTQEQLEVLESLKQELATSQRELQVLQGSLETSAQSEANWAAEFAELEKERDSLVSGAAHREEELSALRKELQDTQLKLASTEESMCQLAKDQRKMLLVGSRKAAEQVIQDALNQLEEPPLISCAGSADHLLSTVTSISSCIEQLEKSWSQYLACPEDISGLLHSITLLAHLTSDAIAHGATTCLRAPPEPADSLTEACKQYGRETLAYLASLEEEGSLENADSTAMRNCLSKIKAIGEELLPRGLDIKQEELGDLVDKEMAATSAAIETATARIEGTASPKEFYAKNSRWTEGLISASKAVGWGATVMVDAADLVVQGRGKFEELMVCSHEIAASTAQLVAASKVKADKDSPNLAQLQQASRGVNQATAGVVASTISGKSQIEETDNMDFSSMTLTQIKRQEMDSQVRVLELENELQKERQKLGELRKKHYELAGVAEGWEEGTEASPPTLQEVVTEKE

SEQ ID NO: 39039 - protein, 146 aa, Homo sapiens
  Payload ID: 7821
  Gene Symbol: HIP1
  Gene Name: huntingtin interacting protein 1
  ENSP ID: ENSP00000414280
MMFPNPEPPPETVSINKAINTQEVAVKEKHARTCILGTHHEKGAQTFWSVVNRLPLSSNAVLCWKFCHVFHKLLRDGHPNVLKDSLRYRNELSDMSRMWGHLSEGYGQLCSIYLKLLRTKMEYHTKNPRFPGNLQMSDRQLDEAGE

SEQ ID NO: 39040 - protein, 1008 aa, Homo sapiens
  Payload ID: 7821
  Gene Symbol: HIP1
  Gene Name: huntingtin interacting protein 1
  Uniprot ID: O00291
  ENSP ID: ENSP00000484528
MMFPNPEPPPETVSINKAINTQEVAVKEKHARTCILGTHHEKGAQTFWSVVNRLPLSSNAVLCWKFCHVFHKLLRDGHPNVLKDSLRYRNELSDMSRMWGHLSEGYGQLCSIYLKLLRTKMEYHTKNPRFPGNLQMSDRQLDEAGESDVNNFFQLTVEMFDYLECELNLFQTVFNSLDMSRSVSVTAAGQCRLAPLIQVILDCSHLYDYTVKLLFKLHSCLPADTLQGHRDRFMEQFTKLKDLFYRSSNLQYFKRLIQIPQLPENPPNFLRASALSEHISPVVVIPAEASSPDSEPVLEKDDLMDMDASQQNLFDNKFDDIFGSSFSSDPFNFNSQNGVNKDEKDHLIERLYREISGLKAQLENMKTESQRVVLQLKGHVSELEADLAEQQHLRQQAADDCEFLRAELDELRRQREDTEKAQRSLSEIERKAQANEQRYSKLKEKYSELVQNHADLLRKNAEVTKQVSMARQAQVDLEREKKELEDSLERISDQGQRKTQEQLEVLESLKQELATSQRELQVLQGSLETSAQSEANWAAEFAELEKERDSLVSGAAHREEELSALRKELQDTQLKLASTEESMCQLAKDQRKMLLVGSRKAAEQVIQDALNQLEEPPLISCAGSADHLLSTVTSISSCIEQLEKSWSQYLACPEDISGLLHSITLLAHLTSDAIAHGATTCLRAPPEPADSLTEACKQYGRETLAYLASLEEEGSLENADSTAMRNCLSKIKAIGEELLPRGLDIKQEELGDLVDKEMAATSAAIETATARIEEMLSKSRAGDTGVKLEVNERILGCCTSLMQAIQVLIVASKDLQREIVESGRGTASPKEFYAKNSRWTEGLISASKAVGWGATVMVDAADLVVQGRGKFEELMVCSHEIAASTAQLVAASKVKADKDSPNLAQLQQASRGVNQATAGVVASTISGKSQIEETDNMDFSSMTLTQIKRQEMDSQVRVLELENELQKERQKLGELRKKHYELAGVAEGWEEGTEASPPTLQEVVTEKE

SEQ ID NO: 39041 - protein, 1068 aa, Homo sapiens
  Payload ID: 7822
  Gene Symbol: HIP1R
  Gene Name: huntingtin interacting protein 1 related
  Uniprot ID: O75146
  ENSP ID: ENSP00000253083
MNSIKNVPARVLSRRPGHSLEAEREQFDKTQAISISKAINTQEAPVKEKHARRIILGTHHEKGAFTFWSYAIGLPLPSSSILSWKFCHVLHKVLRDGHPNVLHDCQRYRSNIREIGDLWGHLHDRYGQLVNVYTKLLLTKISFHLKHPQFPAGLEVTDEVLEKAAGTDVNNIFQLTVEMFDYMDCELKLSESVFRQLNTAIAVSQMSSGQCRLAPLIQVIQDCSHLYHYTVKLLFKLHSCLPADTLQGHRDRFHEQFHSLRNFFRRASDMLYFKRLIQIPRLPEGPPNFLRASALAEHIKPVVVIPEEAPEDEEPENLIEISTGPPAGEPVVVADLFDQTFGPPNGSVKDDRDLQIESLKREVEMLRSELEKIKLEAQRYIAQLKSQVNALEGELEEQRKQKQKALVDNEQLRHELAQLRAAQLEGERSQGLREEAERKASATEARYNKLKEKHSELVHVHAELLRKNADTAKQLTVTQQSQEEVARVKEQLAFQVEQVKRESELKLEEKSDQLEKLKRELEAKAGELARAQEALSHTEQSKSELSSRLDTLSAEKDALSGAVRQREADLLAAQSLVRETEAALSREQQRSSQEQGELQGRLAERESQEQGLRQRLLDEQFAVLRGAAAEAAGILQDAVSKLDDPLHLRCTSSPDYLVSRAQEALDAVSTLEEGHAQYLTSLADASALVAALTRFSHLAADTIINGGATSHLAPTDPADRLIDTCRECGARALELMGQLQDQQALRHMQASLVRTPLQGILQLGQELKPKSLDVRQEELGAVVDKEMAATSAAIEDAVRRIEDMMNQARHASSGVKLEVNERILNSCTDLMKAIRLLVTTSTSLQKEIVESGRGAATQQEFYAKNSRWTEGLISASKAVGWGATQLVEAADKVVLHTGKYEELIVCSHEIAASTAQLVAASKVKANKHSPHLSRLQECSRTVNERAANVVASTKSGQEQIEDRDTMDFSGLSLIKLKKQEMETQVRVLELEKTLEAERMRLGELRKQHYVLAGASGSPGEEVAIRPSTAPRSVTTKKPPLAQKPSVAPRQDHQLDKKDGIYPAQLVNY

SEQ ID NO: 39042 - protein, 197 aa, Homo sapiens
  Payload ID: 7822
  Gene Symbol: HIP1R
  Gene Name: huntingtin interacting protein 1 related
  ENSP ID: ENSP00000446236
  MOD_RES (1)..(1): Any amino acid
XRHPLACRRRSWRAAGEAADKVVLHTGKYEELIVCSHEIAASTAQLVAASKVKANKHSPHLSRLQECSRTVNERAANVVASTKSGQEQIEDRDTMDFSGLSLIKLKKQEMETQVRVLELEKTLEAERMRLGELRKQHYVLAGASGSPGEEVAIRPSTAPRSVTTKKPPLAQKPSVAPRQDHQLDKKDGIYPAQLVNY

SEQ ID NO: 39043 - protein, 129 aa, Homo sapiens
  Payload ID: 7823
  Gene Symbol: HYPK
  Gene Name: huntingtin interacting protein K
  Uniprot ID: Q9NX55
  ENSP ID: ENSP00000384474
MRRRGEIDMATEGDVELELETETSGPERPPEKPRKHDSGAADLERVTDYAEEKEIQSSNLETAMSVIGDRRSREQKAKQEREKELAKVTIKKEDLELIMTEMEISRAAAERSLREHMGNVVEALIALTN

SEQ ID NO: 39044 - protein, 82 aa, Homo sapiens
  Payload ID: 7823
  Gene Symbol: HYPK
  Gene Name: huntingtin interacting protein K
  ENSP ID: ENSP00000394060
MRRRGEIDMATEGDVELELETETSGPERPPEKPRKHDSGAADLERVTDYAEEKEIQSSNLETGERTGKSHYQEGRSGANSEW

SEQ ID NO: 39045 - protein, 129 aa, Homo sapiens; identical to SEQ ID NO: 39043
  Payload ID: 7823
  Gene Symbol: HYPK
  Gene Name: huntingtin interacting protein K
  Uniprot ID: Q9NX55
  ENSP ID: ENSP00000401155

SEQ ID NO: 39046 - protein, 201 aa, Homo sapiens
  Payload ID: 7823
  Gene Symbol: HYPK
  Gene Name: huntingtin interacting protein K
  ENSP ID: ENSP00000481433
MGKGKRETKNIGKRTDETTKEEPIPNERGLGQAYCTLFQILTQRYLIASGQCFTVYKGLCYQDNPTVTSILDARSTKSGSRLHSKYTRSRDLNLFSVFLQCYYFIPEFPLPSLCLLSLLCPLPTQKVHTNLLCSCARGLVGEWRWTSNTACSRWKVAVPAHTRYTAPEPLSTGQSERPNRWAHNPEGIWIWECVEKWQDKS

SEQ ID NO: 39047 - protein, 117 aa, Homo sapiens
  Payload ID: 7824
  Gene Symbol: HYPM
  Gene Name: huntingtin interacting protein M
  Uniprot ID: O75409
  ENSP ID: ENSP00000339511
MSEKKNCKNSSTNNNQTQDPSRNELQVPRSFVDRVVQDERDVQSQSSSTINTLLTLLDCLADYIMERVGLEASNNGSMRNTSQDREREVDNNREPHSAESDVTRFLFDEMPKSRKND

SEQ ID NO: 39048 - protein, 671 aa, Homo sapiens
  Payload ID: 7825
  Gene Symbol: HAP1
  Gene Name: huntingtin-associated protein 1
  Uniprot ID: P54257
  ENSP ID: ENSP00000309392
MRPKRLGRCCAGSRLGPGDPAALTCAPSPSASPAPEPSAQPQARGTGQRVGSRATSGSQFLSEARTGARPASEAGAKAGARRPSAFSAIQGDVRSMPDNSDAPWTRFVFQGPFGSRATGRGTGKAAGIWKTPAAYVGRRPGVSGPERAAFIRELEEALCPNLPPPVKKITQEDVKVMLYLLEELLPPVWESVTYGMVLQRERDLNTAARIGQSLVKQNSVLMEENSKLEALLGSAKEEILYLRHQVNLRDELLQLYSDSDEEDEDEEEEEEEKEAEEEQEEEEAEEDLQCAHPCDAPKLISQEALLHQHHCPQLEALQEKLRLLEEENHQLREEASQLDTLEDEEQMLILECVEQFSEASQQMAELSEVLVLRLENYERQQQEVARLQAQVLKLQQRCRMYGAETEKLQKQLASEKEIQMQLQEESVWVGSQLQDLREKYMDCGGMLIEMQEEVKTLRQQPPVSTGSATHYPYSVPLETLPGFQETLAEELRTSLRRMISDPVYFMERNYEMPRGDTSSLRYDFRYSEDREQVRGFEAEEGLMLAADIMRGEDFTPAEEFVPQEELGAAKKVPAEEGVMEEAELVSEETEGWEEVELELDEATRMNVVTSALEASGLGPSHLDMNYVLQQLANWQDAHYRRQLRWKMLQKGECPHGALPAASRTSCRSSCR

SEQ ID NO: 39049 - protein, 619 aa, Homo sapiens
  Payload ID: 7825
  Gene Symbol: HAP1
  Gene Name: huntingtin-associated protein 1
  Uniprot ID: P54257
  ENSP ID: ENSP00000334002
MRPKRLGRCCAGSRLGPGDPAALTCAPSPSASPAPEPSAQPQARGTGQRVGSRATSGSQFLSEARTGARPASEAGAKAGARRPSAFSAIQGDVRSMPDNSDAPWTRFVFQGPFGSRATGRGTGKAAGIWKTPAAYVGRRPGVSGPERAAFIRELEEALCPNLPPPVKKITQEDVKVMLYLLEELLPPVWESVTYGMVLQRERDLNTAARIGQSLVKQNSVLMEENSKLEALLGSAKEEILYLRHQVNLRDELLQLYSDSDEEDEDEEEEEEEKEAEEEQEEEEAEEDLQCAHPCDAPKLISQEALLHQHHCPQLEALQEKLRLLEEENHQLREEASQLDTLEDEEQMLILECVEQFSEASQQMAELSEVLVLRLENYERQQQEVARLQAQVLKLQQRCRMYGAETEKLQKQLASEKEIQMQLQEEETLPGFQETLAEELRTSLRRMISDPVYFMERNYEMPRGDTSSLRYDFRYSEDREQVRGFEAEEGLMLAADIMRGEDFTPAEEFVPQEELGAAKKVPAEEGVMEEAELVSEETEGWEEVELELDEATRMNVVTSALEASGLGPSHLDMNYVLQQLANWQDAHYRRQLRWKMLQKGECPHGALPAASRTSCRSSCR

SEQ ID NO: 39050 - protein, 602 aa, Homo sapiens
  Payload ID: 7825
  Gene Symbol: HAP1
  Gene Name: huntingtin-associated protein 1
  Uniprot ID: P54257
  ENSP ID: ENSP00000343170
MRPKRLGRCCAGSRLGPGDPAALTCAPSPSASPAPEPSAQPQARGTGQRVGSRATSGSQFLSEARTGARPASEAGAKAGARRPSAFSAIQGDVRSMPDNSDAPWTRFVFQGPFGSRATGRGTGKAAGIWKTPAAYVGRRPGVSGPERAAFIRELEEALCPNLPPPVKKITQEDVKVMLYLLEEVCTAFLIQLLPPVWESVTYGMVLQRERDLNTAARIGQSLVKQNSVLMEENSKLEALLGSAKEEILYLRHQVNLRDELLQLYSDSDEEDEDEEEEEEEKEAEEEQEEEEAEEDLQCAHPCDAPKLISQEALLHQHHCPQLEALQEKLRLLEEENHQLREEASQLDTLEDEEQMLILECVEQFSEASQQMAELSEVLVLRLENYERQQQEVARLQAQVLKLQQRCRMETLPGFQETLAEELRTSLRRMISDPVYFMERNYEMPRGDTSSLRYDFRYSEDREQVRGFEAEEGLMLAADIMRGEDFTPAEEFVPQEELGAAKKVPAEEGVMEEAELVSEETEGWEEVELELDEATRMNVVTSALEASGLGPSHLDMNYVLQQLANWQDAHYRRQLRWKMLQKGECPHGALPAASRTSCRSSCR

SEQ ID NO: 39051 - protein, 594 aa, Homo sapiens
  Payload ID: 7825
  Gene Symbol: HAP1
  Gene Name: huntingtin-associated protein 1
  Uniprot ID: P54257
  ENSP ID: ENSP00000377513
MRPKRLGRCCAGSRLGPGDPAALTCAPSPSASPAPEPSAQPQARGTGQRVGSRATSGSQFLSEARTGARPASEAGAKAGARRPSAFSAIQGDVRSMPDNSDAPWTRFVFQGPFGSRATGRGTGKAAGIWKTPAAYVGRRPGVSGPERAAFIRELEEALCPNLPPPVKKITQEDVKVMLYLLEELLPPVWESVTYGMVLQRERDLNTAARIGQSLVKQNSVLMEENSKLEALLGSAKEEILYLRHQVNLRDELLQLYSDSDEEDEDEEEEEEEKEAEEEQEEEEAEEDLQCAHPCDAPKLISQEALLHQHHCPQLEALQEKLRLLEEENHQLREEASQLDTLEDEEQMLILECVEQFSEASQQMAELSEVLVLRLENYERQQQEVARLQAQVLKLQQRCRMETLPGFQETLAEELRTSLRRMISDPVYFMERNYEMPRGDTSSLRYDFRYSEDREQVRGFEAEEGLMLAADIMRGEDFTPAEEFVPQEELGAAKKVPAEEGVMEEAELVSEETEGWEEVELELDEATRMNVVTSALEASGLGPSHLDMNYVLQQLANWQDAHYRRQLRWKMLQKGECPHGALPAASRTSCRSSCR

SEQ ID NO: 39052 - protein, 73 aa, Homo sapiens
  Payload ID: 7825
  Gene Symbol: HAP1
  Gene Name: huntingtin-associated protein 1
  ENSP ID: ENSP00000388981
YSEDREQVRGFEAEEGLMLAADIMRGEDFTPAEEFVPQEELGAAKKQLANWQDAHYRRQLRWKMLQKEPQPRT

SEQ ID NO: 39053 - protein, 40 aa, Homo sapiens
  Payload ID: 7825
  Gene Symbol: HAP1
  Gene Name: huntingtin-associated protein 1
  ENSP ID: ENSP00000397242
  MOD_RES (1)..(1): Any amino acid
XNYEMPRGDTSSLRAPAEDLRWVEKTLSLLYSPQVAGSSR

SEQ ID NO: 39054 - protein, 111 aa, Homo sapiens
  Payload ID: 7825
  Gene Symbol: HAP1
  Gene Name: huntingtin-associated protein 1
  ENSP ID: ENSP00000404640
ADIMRGEDFTPAEEFVPQEELGAAKKVPAEEGVMEEAELVSEETEGWEEVELELDEATRMNVVTSALEASGLGPSHLDMNYVLQQLANWQDAHYRRQLRWKMLQKEPQPRT

SEQ ID NO: 39055 - protein, 280 aa, Homo sapiens
  Payload ID: 7826
  Gene Symbol: HUS1
  Gene Name: HUS1 checkpoint clamp component
  Uniprot ID: O60921
  ENSP ID: ENSP00000258774
MKFRAKIVDGACLNHFTRISNMIAKLAKTCTLRISPDKLNFILCDKLANGGVSMWCELEQENFFNEFQMEGVSAENNEIYLELTSENLSRALKTAQNARALKIKLTNKHFPCLTVSVELLSMSSSSRIVTHDIPIKVIPRKLWKDLQEPVVPDPDVSIYLPVLKTMKSVVEKMKNISNHLVIEANLDGELNLKIETELVCVTTHFKDLGNPPLASESTHEDRNVEHMAEVHIDIRKLLQFLAGQQVNPTKALCNIVNNKMVHFDLLHEDVSLQYFIPALS

SEQ ID NO: 39056 - protein, 145 aa, Homo sapiens
  Payload ID: 7826
  Gene Symbol: HUS1
  Gene Name: HUS1 checkpoint clamp component
  ENSP ID: ENSP00000398806
MIAKLAKTCTLRISPDKLNFILCDKLANGGVSMWCELEQENFFNEFQMEGVSAENNEIYLELTSENLSRALKTAQNARALKIKLTNKHFPCLTVSVELLSMSSSSRIVTHDIPIKVIPRKLWKDLQEPVVPDPDVSIYLPVLKTM

SEQ ID NO: 39057 - protein, 259 aa, Homo sapiens
  Payload ID: 7826
  Gene Symbol: HUS1
  Gene Name: HUS1 checkpoint clamp component
  Uniprot ID: O60921
  ENSP ID: ENSP00000400727
MIAKLAKTCTLRISPDKLNFILCDKLANGGVSMWCELEQENFFNEFQMEGVSAENNEIYLELTSENLSRALKTAQNARALKIKLTNKHFPCLTVSVELLSMSSSSRIVTHDIPIKVIPRKLWKDLQEPVVPDPDVSIYLPVLKTMKSVVEKMKNISNHLVIEANLDGELNLKIETELVCVTTHFKDLGNPPLASESTHEDRNVEHMAEVHIDIRKLLQFLAGQQVNPTKALCNIVNNKMVHFDLLHEDVSLQYFIPALS

SEQ ID NO: 39058 - protein, 280 aa, Homo sapiens; identical to SEQ ID NO: 39055
  Payload ID: 7826
  Gene Symbol: HUS1
  Gene Name: HUS1 checkpoint clamp component
  Uniprot ID: O60921
  ENSP ID: ENSP00000403844

SEQ ID NO: 39059 - protein, 105 aa, Homo sapiens
  Payload ID: 7826
  Gene Symbol: HUS1
  Gene Name: HUS1 checkpoint clamp component
  ENSP ID: ENSP00000404348
  MOD_RES (1)..(1): Any amino acid
XLELTSENLSRALKTAQNARALKIKLTNKHFPCLTVSVELLSMSSSSRIVTHDIPIKVIPRKLWKDLQEPVVPDPDVSIYLPVLKTMKSVVEKMKNISNHLVPSN

SEQ ID NO: 39060 - protein, 183 aa, Homo sapiens
  Payload ID: 7826
  Gene Symbol: HUS1
  Gene Name: HUS1 checkpoint clamp component
  ENSP ID: ENSP00000404855
MIAKLAKTCTLRISPDKLNFILCDKLANGGVSMWCELEQENFFNEFQMEGVSAENNEIYLELTSENLSRALKTAQNARALKIKLTNKHFPCLTVSVELLSMSSSSRIVTHDIPIKVIPRKLWKDLQEPVVPDPDVSIYLPVLKTMKSVVEKMKNISNHLVIEANLDGELNLKIETELVCVTTH

SEQ ID NO: 39061 - protein, 160 aa, Homo sapiens
  Payload ID: 7826
  Gene Symbol: HUS1
  Gene Name: HUS1 checkpoint clamp component
  ENSP ID: ENSP00000405175
MIAKLAKTCTLRISPDKLNFILCDKLANGGVSMWCELEQENFFNEFQMEGVSAENNEIYLELTSENLSRALKTAQNARALKIKLTNKHFPCLTVSVELLSMSSSSRIVTHDIPIKVIPRKLWKDLQEPVVPDPDDLIFSSAGQERYLDVHESQEEKNFMA

SEQ ID NO: 39062 - protein, 259 aa, Homo sapiens; identical to SEQ ID NO: 39057
  Payload ID: 7826
  Gene Symbol: HUS1
  Gene Name: HUS1 checkpoint clamp component
  Uniprot ID: O60921
  ENSP ID: ENSP00000416588

SEQ ID NO: 39063 - protein, 278 aa, Homo sapiens
  Payload ID: 7827
  Gene Symbol: HUS1B
  Gene Name: HUS1 checkpoint clamp component B
  Uniprot ID: Q8NHY5
  ENSP ID: ENSP00000370293
MKFRAKITGKGCLELFIHVSGTVARLAKVCVLRVRPDSLCFGPAGSGGLHEARLWCEVRQGAFQQFRMEGVSEDLDEIHLELTAEHLSRAARSAAGASSLKLQLTHKRRPSLTVAVELVSSLGRARSVVHDLPVRVLPRRVWRDCLPPSLRASDASIRLPRWRTLRSIVERMANVGSHVLVEANLSGRMTLSIETEVVSIQSYFKNLGNPPQSAVGVPENRDLESMVQVRVDNRKLLQFLEGQQIHPTTALCNIWDNTLLQLVLVQEDVSLQYFIPAL

SEQ ID NO: 39064 - protein, 354 aa, Homo sapiens
  Payload ID: 7828
  Gene Symbol: HAPLN1
  Gene Name: hyaluronan and proteoglycan link protein 1
  Uniprot ID: P10915
  ENSP ID: ENSP00000274341
MKSLLLLVLISICWADHLSDNYTLDHDRAIHIQAENGPHLLVEAEQAKVFSHRGGNVTLPCKFYRDPTAFGSGIHKIRIKWTKLTSDYLKEVDVFVSMGYHKKTYGGYQGRVFLKGGSDSDASLVITDLTLEDYGRYKCEVIEGLEDDTVVVALDLQGVVFPYFPRLGRYNLNFHEAQQACLDQDAVIASFDQLYDAWRGGLDWCNAGWLSDGSVQYPITKPREPCGGQNTVPGVRNYGFWDKDKSRYDVFCFTSNFNGRFYYLIHPTKLTYDEAVQACLNDGAQIAKVGQIFAAWKILGYDRCDAGWLADGSVRYPISRPRRRCSPTEAAVRFVGFPDKKHKLYGVYCFRAYN

SEQ ID NO: 39065 - protein, 199 aa, Homo sapiens
  Payload ID: 7828
  Gene Symbol: HAPLN1
  Gene Name: hyaluronan and proteoglycan link protein 1
  ENSP ID: ENSP00000421341
MKSLLLLVLISICWADHLSDNYTLDHDRAIHIQAENGPHLLVEAEQAKVFSHRGGNVTLPCKFYRDPTAFGSGIHKIRIKWTKLTSDYLKEVDVFVSMGYHKKTYGGYQGRVFLKGGSDSDASLVITDLTLEDYGRYKCEVIEGLEDDTVVVALDLQGVVFPYFPRLGRYNLNFHEAQQACLDQDAVIASFDQLYDAWR

SEQ ID NO: 39066 - protein, 161 aa, Homo sapiens
  Payload ID: 7828
  Gene Symbol: HAPLN1
  Gene Name: hyaluronan and proteoglycan link protein 1
  ENSP ID: ENSP00000421726
MKSLLLLVLISICWADHLSDNYTLDHDRAIHIQAENGPHLLVEAEQAKVFSHRGGNVTLPCKFYRDPTAFGSGIHKIRIKWTKLTSDYLKEVDVFVSMGYHKKTYGGYQGRVFLKGGSDSDASLVITDLTLEDYGRYKCEVIEGLEDDTVVVALDLQGMYL

SEQ ID NO: 39067 - protein, 169 aa, Homo sapiens
  Payload ID: 7828
  Gene Symbol: HAPLN1
  Gene Name: hyaluronan and proteoglycan link protein 1
  ENSP ID: ENSP00000422522
MKSLLLLVLISICWADHLSDNYTLDHDRAIHIQAENGPHLLVEAEQAKVFSHRGGNVTLPCKFYRDPTAFGSGIHKIRIKWTKLTSDYLKEVDVFVSMGYHKKTYGGYQGRVFLKGGSDSDASLVITDLTLEDYGRYKCEVIEGLEDDTVVVALDLQGVVFPYFPRLGR

SEQ ID NO: 39068 - protein, 258 aa, Homo sapiens
  Payload ID: 7828
  Gene Symbol: HAPLN1
  Gene Name: hyaluronan and proteoglycan link protein 1
  ENSP ID: ENSP00000422592
MKSLLLLVLISICWADHLSDNYTLDHDRAIHIQAENGPHLLVEAEQAKVFSHRGGNVTLPCKFYRDPTAFGSGIHKIRIKWTKLTSDYLKEVDVFVSMGYHKKTYGGYQGRVFLKGGSDSDASLVITDLTLEDYGRYKCEVIEGLEDDTVVVALDLQGVVFPYFPRLGRYNLNFHEAQQACLDQDAVIASFDQLYDAWRGGLDWCNAGWLSDGSVQYPITKPREPCGGQNTVPGVRNYGFWDKDKSRYDVFCFTSNFN

SEQ ID NO: 39069 - protein, 153 aa, Homo sapiens
  Payload ID: 7828
  Gene Symbol: HAPLN1
  Gene Name: hyaluronan and proteoglycan link protein 1
  ENSP ID: ENSP00000423836
MKSLLLLVLISICWADHLSDNYTLDHDRAIHIQAENGPHLLVEAEQAKVFSHRGGNVTLPCKFYRDPTAFGSGIHKIRIKWTKLTSDYLKEVDVFVSMGYHKKTYGGYQGRVFLKGGSDSDASLVITDLTLEDYGRYKCEVIEGLEDDTVVVA

SEQ ID NO: 39070 - protein, 182 aa, Homo sapiens
  Payload ID: 7828
  Gene Symbol: HAPLN1
  Gene Name: hyaluronan and proteoglycan link protein 1
  ENSP ID: ENSP00000426610
MKSLLLLVLISICWADHLSDNYTLDHDRAIHIQENGPHLLVEAEQAKVFSHRGGNVTLPCKFYRDPTAFGSGIHKIRIKWTKLTSDYLKEVDVFVSMGYHKKTYGGYQGRVFLKGGSDSDASLVITDLTLEDYGRYKCEVIEGLEDDTVVVALDLQGVVFPYFPRLGRYNLNFHEAQQACLD

SEQ ID NO: 39071 - protein, 340 aa, Homo sapiens
  Payload ID: 7829
  Gene Symbol: HAPLN2
  Gene Name: hyaluronan and proteoglycan link protein 2
  Uniprot ID: Q9GZV7
  ENSP ID: ENSP00000255039
MPGWLTLPTLCRFLLWAFTIFHKAQGDPASHPGPHYLLPPIHEVIHSHRGATATLPCVLGTTPPSYKVRWSKVEPGELRETLILITNGLHARGYGPLGGRARMRRGHRLDASLVIAGVRLEDEGRYRCELINGIEDESVALTLSLEGVVFPYQPSRGRYQFNYYEAKQACEEQDGRLATYSQLYQAWTEGLDWCNAGWLLEGSVRYPVLTARAPCGGRGRPGIRSYGPRDRMRDRYDAFCFTSALAGQVFFVPGRLTLSEAHAACRRRGAVVAKVGHLYAAWKFSGLDQCDGGWLADGSVRFPITTPRPRCGGLPDPGVRSFGFPRPQQAAYGTYCYAEN

SEQ ID NO: 39072 - protein, 185 aa, Homo sapiens
  Payload ID: 7829
  Gene Symbol: HAPLN2
  Gene Name: hyaluronan and proteoglycan link protein 2
  ENSP ID: ENSP00000388835
MPGWLTLPTLCRFLLWAFTIFHKAQGDPASHPGPHYLLPPIHEVIHSHRGATATLPCVLGTTPPSYKVRWSKVEPGELRETLILITNGLHARGYGPLGGRARMRRGHRLDASLVIAGVRLEDEGRYRCELINGIEDESVALTLSLEGVVFPYQPSRGRYQFNYYEAKQACEEQDGRLATYSQLYQ

SEQ ID NO: 39073 - protein, 360 aa, Homo sapiens
  Payload ID: 7830
  Gene Symbol: HAPLN3
  Gene Name: hyaluronan and proteoglycan link protein 3
  Uniprot ID: Q96S86
  ENSP ID: ENSP00000352606
MGLLLLVPLLLLPGSYGLPFYNGFYYSNSANDQNLGNGHGKDLLNGVKLVVETPEETLFTYQGASVILPCRYRYEPALVSPRRVRVKWWKLSENGAPEKDVLVAIGLRHRSFGDYQGRVHLRQDKEHDVSLEIQDLRLEDYGRYRCEVIDGLEDESGLVELELRGVVFPYQSPNGRYQFNFHEGQQVCAEQAAVVASFEQLFRAWEEGLDWCNAGWLQDATVQYPIMLPRQPCGGPGLAPGVRSYGPRHRRLHRYDVFCFATALKGRVYYLEHPEKLTLTEAREACQEDDATIAKVGQLFAAWKFHGLDRCDAGWLADGSVRYPVVHPHPNCGPPEPGVRSFGFPDPQSRLYGVYCYRQH

SEQ ID NO: 39074 - protein, 186 aa, Homo sapiens
  Payload ID: 7830
  Gene Symbol: HAPLN3
  Gene Name: hyaluronan and proteoglycan link protein 3
  ENSP ID: ENSP00000456458
MGLLLLVPLLLLPGSYGLPFYNGFYYSNSANDQNLGNGHGKDLLNGVKLVVETPEETLFTYQGASVILPCRYRYEPALVSPRRVRVKWWKLSENGAPEKDVLVAIGLRHRSFGDYQGRVHLRQDKEHDVSLEIQDLRLEDYGRYRCEVIDGLEDESGLVELELRGWGCVSSHLSHMLGRQFGDRGR

SEQ ID NO: 39075 - protein, 226 aa, Homo sapiens
  Payload ID: 7830
  Gene Symbol: HAPLN3
  Gene Name: hyaluronan and proteoglycan link protein 3
  ENSP ID: ENSP00000456985
MGLLLLVPLLLLPGSYGLPFYNGFYYSNSANDQNLGNGHGKDLLNGVKLVVETPEETLFTYQGASVILPCRYRYEPALVSPRRVRVKWWKLSENGAPEKDVLVAIGLRHRSFGDYQGRVHLRQDKEHDVSLEIQDLRLEDYGRYRCEVIDGLEDESGLVELELRAESQERGGNGQEVWSFLTSPPTGATSSTSTRASRSVQSRLRWWPPLSSSSGPGRRAWTGATR

SEQ ID NO: 39076 - protein, 422 aa, Homo sapiens
  Payload ID: 7830
  Gene Symbol: HAPLN3
  Gene Name: hyaluronan and proteoglycan link protein 3
  ENSP ID: ENSP00000457180
MRKWRHREVNLPEVTQQDAVCPAPIPSPGLSAQTGLQKIWGTIHCQVCPGAPAWPGSPWHEEMGLLLLVPLLLLPGSYGLPFYNGFYYSNSANDQNLGNGHGKDLLNGVKLVVETPEETLFTYQGASVILPCRYRYEPALVSPRRVRVKWWKLSENGAPEKDVLVAIGLRHRSFGDYQGRVHLRQDKEHDVSLEIQDLRLEDYGRYRCEVIDGLEDESGLVELELRGVVFPYQSPNGRYQFNFHEGQQVCAEQAAVVASFEQLFRAWEEGLDWCNAGWLQDATVQYPIMLPRQPCGGPGLAPGVRSYGPRHRRLHRYDVFCFATALKGRVYYLEHPEKLTLTEAREACQEDDATIAKVGQLFAAWKFHGLDRCDAGWLADGSVRYPVVHPHPNCGPPEPGVRSFGFPDPQSRLYGVYCYRQH

SEQ ID NO: 39077 - protein, 402 aa, Homo sapiens
  Payload ID: 7831
  Gene Symbol: HAPLN4
  Gene Name: hyaluronan and proteoglycan link protein 4
  Uniprot ID: Q86UW8
  ENSP ID: ENSP00000291481
MVCARAALGPGALWAAAWGVLLLTAPAGAQRGRKKVVHVLEGESGSVVVQTAPGQVVSHRGGTIVLPCRYHYEAAAHGHDGVRLKWTKVVDPLAFTDVFVALGPQHRAFGSYRGRAELQGDGPGDASLVLRNVTLQDYGRYECEVTNELEDDAGMVKLDLEGVVFPYHPRGGRYKLTFAEAQRACAEQDGILASAEQLHAAWRDGLDWCNAGWLRDGSVQYPVNRPREPCGGLGGTGSAGGGGDANGGLRNYGYRHNAEERYDAFCFTSNLPGRVFFLKPLRPVPFSGAARACAARGAAVAKVGQLFAAWKLQLLDRCTAGWLADGSARYPIVNPRARCGGRRPGVRSLGFPDATRRLFGVYCYRAPGAPDPAPGGWGWGWAGGGGWAGGARDPAAWTPLHV

SEQ ID NO: 39078 - protein, 560 aa, Homo sapiens
  Payload ID: 7832
  Gene Symbol: HABP2
  Gene Name: hyaluronan binding protein 2
  Uniprot ID: Q14520
  ENSP ID: ENSP00000277903
MFARMSDLHVLLLMALVGKTACGFSLMSLLESLDPDWTPDQYDYSYEDYNQEENTSSTLTHAENPDWYYTEDQADPCQPNPCEHGGDCLVHGSTFTCSCLAPFSGNKCQKVQNTCKDNPCGRGQCLITQSPPYYRCVCKHPYTGPSCSQVVPVCRPNPCQNGATCSRHKRRSKFTCACPDQFKGKFCEIGSDDCYVGDGYSYRGKMNRTVNQHACLYWNSHLLLQENYNMFMEDAETHGIGEHNFCRNPDADEKPWCFIKVTNDKVKWEYCDVSACSAQDVAYPEESPTEPSTKLPGFDSCGKTEIAERKIKRIYGGFKSTAGKHPWQASLQSSLPLTISMPQGHFCGGALIHPCWVLTAAHCTDIKTRHLKVVLGDQDLKKEEFHEQSFRVEKIFKYSHYNERDEIPHNDIALLKLKPVDGHCALESKYVKTVCLPDGSFPSGSECHISGWGVTETGKGSRQLLDAKVKLIANTLCNSRQLYDHMIDDSMICAGNLQKPGQDTCQGDSGGPLTCEKDGTYYVYGIVSWGLECGKRPGVYTQVTKFLNWIKATIKSESGF

SEQ ID NO: 39079 - protein, 534 aa, Homo sapiens
  Payload ID: 7832
  Gene Symbol: HABP2
  Gene Name: hyaluronan binding protein 2
  Uniprot ID: Q14520
  ENSP ID: ENSP00000443283
MSLLESLDPDWTPDQYDYSYEDYNQEENTSSTLTHAENPDWYYTEDQADPCQPNPCEHGGDCLVHGSTFTCSCLAPFSGNKCQKVQNTCKDNPCGRGQCLITQSPPYYRCVCKHPYTGPSCSQVVPVCRPNPCQNGATCSRHKRRSKFTCACPDQFKGKFCEIGSDDCYVGDGYSYRGKMNRTVNQHACLYWNSHLLLQENYNMFMEDAETHGIGEHNFCRNPDADEKPWCFIKVTNDKVKWEYCDVSACSAQDVAYPEESPTEPSTKLPGFDSCGKTEIAERKIKRIYGGFKSTAGKHPWQASLQSSLPLTISMPQGHFCGGALIHPCWVLTAAHCTDIKTRHLKVVLGDQDLKKEEFHEQSFRVEKIFKYSHYNERDEIPHNDIALLKLKPVDGHCALESKYVKTVCLPDGSFPSGSECHISGWGVTETGKGSRQLLDAKVKLIANTLCNSRQLYDHMIDDSMICAGNLQKPGQDTCQGDSGGPLTCEKDGTYYVYGIVSWGLECGKRPGVYTQVTKFLNWIKATIKSESGF

SEQ ID NO: 39080 - protein, 413 aa, Homo sapiens
  Payload ID: 7833
  Gene Symbol: HABP4
  Gene Name: hyaluronan binding protein 4
  Uniprot ID: Q5JVS0
  ENSP ID: ENSP00000364398
MKGALGSPVAAAGAAMQESFGCVVANRFHQLLDDESDPFDILREAERRRQQQLQRKRRDEAAAAAGAGPRGGRSPAGASGHRAGAGGRRESQKERKSLPAPVAQRPDSPGGGLQAPGQKRTPRRGEQQGWNDSRGPEGMLERAERRSYREYRPYETERQADFTAEKFPDEKPGDRFDRDRPLRGRGGPRGGMRGRGRGGPGNRVFDAFDQRGKREFERYGGNDKIAVRTEDNMGGCGVRTWGSGKDTSDVEPTAPMEEPTVVEESQGTPEEESPAKVPELEVEEETQVQEMTLDEWKNLQEQTRPKPEFNIRKPESTVPSKAVVIHKSKYRDDMVKDDYEDDSHVFRKPANDITSQLEINFGNLPRPGRGARGGTRGGRGRIRRAENYGPRAEVVMQDVAPNPDDPEDFPALS

SEQ ID NO: 39081 - protein, 308 aa, Homo sapiens
  Payload ID: 7833
  Gene Symbol: HABP4
  Gene Name: hyaluronan binding protein 4
  Uniprot ID: Q5JVS0
  ENSP ID: ENSP00000364400
MKGALGSPVAAAGAAMQESFGCVVANRFHQLLDDESDPFDILREAERRRQQQLQRKRRDEAAAAAGAGPRGGRSPAGASGHRAGAGGRRESQKERKSLPAPVAQRPDSPGGGLQAPGQKRTPRRGEQQGWNDSRGPEGMLERAERRSYREYRPYETERQADFTAEKFPDEKVPELEVEEETQVQEMTLDEWKNLQEQTRPKPEFNIRKPESTVPSKAVVIHKSKYRDDMVKDDYEDDSHVFRKPANDITSQLEINFGNLPRPGRGARGGTRGGRGRIRRAENYGPRAEVVMQDVAPNPDDPEDFPALS

SEQ ID NO: 39082 - protein, 578 aa, Homo sapiens
  Payload ID: 7834
  Gene Symbol: HAS1
  Gene Name: hyaluronan synthase 1
  Uniprot ID: Q92839
  ENSP ID: ENSP00000222115
MRQQDAPKPTPAACRCSGLARRVLTIAFALLILGLMTWAYAAGVPLASDRYGLLAFGLYGAFLSAHLVAQSLFAYLEHRRVAAAARGPLDAATARSVALTISAYQEDPAYLRQCLASARALLYPRARLRVLMVVDGNRAEDLYMVDMFREVFADEDPATYVWDGNYHQPWEPAAAGAVGAGAYREVEAEDPGRLAVEALVRTRRCVCVAQRWGGKREVMYTAFKALGDSVDYVQVCDSDTRLDPMALLELVRVLDEDPRVGAVGGDVRILNPLDSWVSFLSSLRYWVAFNVERACQSYFHCVSCISGPLGLYRNNLLQQFLEAWYNQKFLGTHCTFGDDRHLTNRMLSMGYATKYTSRSRCYSETPSSFLRWLSQQTRWSKSYFREWLYNALWWHRHHAWMTYEAVVSGLFPFFVAATVLRLFYAGRPWALLWVLLCVQGVALAKAAFAAWLRGCLRMVLLSLYAPLYMCGLLPAKFLALVTMNQSGWGTSGRRKLAANYVPLLPLALWALLLLGGLVRSVAHEARADWSGPSRAAEAYHLAAGAGAYVGYWVAMLTLYWVGVRRLCRRRTGGYRVQV

SEQ ID NO: 39083 - protein, 577 aa, Homo sapiens
  Payload ID: 7834
  Gene Symbol: HAS1
  Gene Name: hyaluronan synthase 1
  ENSP ID: ENSP00000445021
MRQDAPKPTPAACRCSGLARRVLTIAFALLILGLMTWAYAAGVPLASDRYGLLAFGLYGAFLSAHLVAQSLFAYLEHRRVAAAARGPLDAATARSVALTISAYQEDPAYLRQCLASARALLYPRARLRVLMVVDGNRAEDLYMVDMFREVFADEDPATYVWDGNYHQPWEPAAAGAVGAGAYREVEAEDPGRLAVEALVRTRRCVCVAQRWGGKREVMYTAFKALGDSVDYVQVCDSDTRLDPMALLELVRVLDEDPRVGAVGGDVRILNPLDSWVSFLSSLRYWVAFNVERACQSYFHCVSCISGPLGLYRNNLLQQFLEAWYNQKFLGTHCTFGDDRHLTNRMLSMGYATKYTSRSRCYSETPSSFLRWLSQQTRWSKSYFREWLYNALWWHRHHAWMTYEAVVSGLFPFFVAATVLRLFYAGRPWALLWVLLCVQGVALAKAAFAAWLRGCLRMVLLSLYAPLYMCGLLPAKFLALVTMNQSGWGTSGRRKLAANYVPLLPLALWALLLLGGLVRSVAHEARADWSGPSRAAEAYHLAAGAGAYVGYWVAMLTLYWVGVRRLCRRRTGGYRVQV

SEQ ID NO: 39084 - protein, 214 aa, Homo sapiens
  Payload ID: 7834
  Gene Symbol: HAS1
  Gene Name: hyaluronan synthase 1
  ENSP ID: ENSP00000469165
MFREVFADEDPATYVWDGNYHQPWEPAAAGAVGAGAYREVEAEDPGRLAVEALVRTRRCVCVAQRWGGKREVMYTAFKALGDSVDYVQVCDSDTRLDPMALLELVRVLDEDPRVGAVGGDVRILNPLDSWVSFLSSLRYWVAFNVERACQSYFHCVSCISGPLESCPGPREHAMMPSFLAPVQVHLQVPLLLRDALVLPAVAEPADTLVQVVLP

SEQ ID NO: 39085 - protein, 140 aa, Homo sapiens
  Payload ID: 7834
  Gene Symbol: HAS1
  Gene Name: hyaluronan synthase 1
  ENSP ID: ENSP00000471953
  MOD_RES (1)..(1): Any amino acid
XREVMYTAFKALGDSVDYVQVCDSDTRLDPMALLELVRVLDEDPRVGAVGGDVRILNPLDSWVSFLSSLRYWVAFNVERACQSYFHCVSCISGPLGLYRNNLLQQFLEAWYNQKFLGTHCTFGDDRHLTNRMLSMGYATK

SEQ ID NO: 39086 - protein, 585 aa, Homo sapiens
  Payload ID: 7834
  Gene Symbol: HAS1
  Gene Name: hyaluronan synthase 1
  ENSP ID: ENSP00000472821
MPLPFPSRSQQDAPKPTPAACRCSGLARRVLTIAFALLILGLMTWAYAAGVPLASDRYGLLAFGLYGAFLSAHLVAQSLFAYLEHRRVAAAARGPLDAATARSVALTISAYQEDPAYLRQCLASARALLYPRARLRVLMVVDGNRAEDLYMVDMFREVFADEDPATYVWDGNYHQPWEPAAAGAVGAGAYREVEAEDPGRLAVEALVRTRRCVCVAQRWGGKREVMYTAFKALGDSVDYVQVCDSDTRLDPMALLELVRVLDEDPRVGAVGGDVRILNPLDSWVSFLSSLRYWVAFNVERACQSYFHCVSCISGPLGLYRNNLLQQFLEAWYNQKFLGTHCTFGDDRHLTNRMLSMGYATKYTSRSRCYSETPSSFLRWLSQQTRWSKSYFREWLYNALWWHRHHAWMTYEAVVSGLFPFFVAATVLRLFYAGRPWALLWVLLCVQGVALAKAAFAAWLRGCLRMVLLSLYAPLYMCGLLPAKFLALVTMNQSGWGTSGRRKLAANYVPLLPLALWALLLLGGLVRSVAHEARADWSGPSRAAEAYHLAAGAGAYVGYWVAMLTLYWVGVRRLCRRRTGGYRVQV

SEQ ID NO: 39087 - protein, 552 aa, Homo sapiens
  Payload ID: 7835
  Gene Symbol: HAS2
  Gene Name: hyaluronan synthase 2
  Uniprot ID: Q92819
  ENSP ID: ENSP00000306991
MHCERFLCILRIIGTTLFGVSLLLGITAAYIVGYQFIQTDNYYFSFGLYGAFLASHLIIQSLFAFLEHRKMKKSLETPIKLNKTVALCIAAYQEDPDYLRKCLQSVKRLTYPGIKVVMVIDGNSEDDLYMMDIFSEVMGRDKSATYIWKNNFHEKGPGETDESHKESSQHVTQLVLSNKSICIMQKWGGKREVMYTAFRALGRSVDYVQVCDSDTMLDPASSVEMVKVLEEDPMVGGVGGDVQILNKYDSWISFLSSVRYWMAFNIERACQSYFGCVQCISGPLGMYRNSLLHEFVEDWYNQEFMGNQCSFGDDRHLTNRVLSLGYATKYTARSKCLTETPIEYLRWLNQQTRWSKSYFREWLYNAMWFHKHHLWMTYEAIITGFFPFFLIATVIQLFYRGKIWNILLFLLTVQLVGLIKSSFASCLRGNIVMVFMSLYSVLYMSSLLPAKMFAIATINKAGWGTSGRKTIVVNFIGLIPVSVWFTILLGGVIFTIYKESKRPFSESKQTVLIVGTLLYACYWVMLLTLYVVLINKCGRRKKGQQYDMVLDV

SEQ ID NO: 39088 - protein, 281 aa, Homo sapiens
  Payload ID: 7836
  Gene Symbol: HAS3
  Gene Name: hyaluronan synthase 3
  Uniprot ID: O00219
  ENSP ID: ENSP00000219322
MPVQLTTALRVVGTSLFALAVLGGILAAYVTGYQFIHTEKHYLSFGLYGAILGLHLLIQSLFAFLEHRRMRRAGQALKLPSPRRGSVALCIAAYQEDPDYLRKCLRSAQRISFPDLKVVMVVDGNRQEDAYMLDIFHEVLGGTEQAGFFVWRSNFHEAGEGETEASLQEGMDRVRDVVRASTFSCIMQKWGGKREVMYTAFKALGDSVDYIQVCDSDTVLDPACTIEMLRVLEEDPQVGGVGGDVQPPGKGMAVEDDQVQAAQVRATEAWSVHQRHVSREQ

SEQ ID NO: 39089 - protein, 553 aa, Homo sapiens
  Payload ID: 7836
  Gene Symbol: HAS3
  Gene Name: hyaluronan synthase 3
  Uniprot ID: O00219
  ENSP ID: ENSP00000304440
MPVQLTTALRVVGTSLFALAVLGGILAAYVTGYQFIHTEKHYLSFGLYGAILGLHLLIQSLFAFLEHRRMRRAGQALKLPSPRRGSVALCIAAYQEDPDYLRKCLRSAQRISFPDLKVVMVVDGNRQEDAYMLDIFHEVLGGTEQAGFFVWRSNFHEAGEGETEASLQEGMDRVRDVVRASTFSCIMQKWGGKREVMYTAFKALGDSVDYIQVCDSDTVLDPACTIEMLRVLEEDPQVGGVGGDVQILNKYDSWISFLSSVRYWMAFNVERACQSYFGCVQCISGPLGMYRNSLLQQFLEDWYHQKFLGSKCSFGDDRHLTNRVLSLGYRTKYTARSKCLTETPTKYLRWLNQQTRWSKSYFREWLYNSLWFHKHHLWMTYESVVTGFFPFFLIATVIQLFYRGRIWNILLFLLTVQLVGIIKATYACFLRGNAEMIFMSLYSLLYMSSLLPAKIFAIATINKSGWGTSGRKTIVVNFIGLIPVSIWVAVLLGGLAYTAYCQDLFSETELAFLVSGAILYGCYWVALLMLYLAIIARRCGKKPEQYSLAFAEV

SEQ ID NO: 39090 - protein, 553 aa, Homo sapiens; identical to SEQ ID NO: 39089
  Payload ID: 7836
  Gene Symbol: HAS3
  Gene Name: hyaluronan synthase 3
  Uniprot ID: O00219
  ENSP ID: ENSP00000454731

SEQ ID NO: 39091 - protein, 264 aa, Homo sapiens
  Payload ID: 7836
  Gene Symbol: HAS3
  Gene Name: hyaluronan synthase 3
  ENSP ID: ENSP00000456246
MPVQLTTALRVVGTSLFALAVLGGILAAYVTGYQFIHTEKHYLSFGLYGAILGLHLLIQSLFAFLEHRRMRRAGQALKLPSPRRGSVALCIAAYQEDPDYLRKCLRSAQRISFPDLKVVMVVDGNRQEDAYMLDIFHEVLGGTEQAGFFVWRSNFHEAGEGETEASLQEGMDRVRDVVRASTFSCIMQKWGGKREVMYTAFKALGDSVDYIQVCDSDTVLDPACTIEMLRVLEEDPQVGGVGGDVQILNKYDSWISFLSSVRYW

SEQ ID NO: 39092 - protein, 709 aa, Homo sapiens
  Payload ID: 7837
  Gene Symbol: HMMR
  Gene Name: hyaluronan-mediated motility receptor (RHAMM)
  Uniprot ID: O75330
  ENSP ID: ENSP00000185942
MSFPKAPLKRFNDPSGCAPSPGAYDVKTLEVLKGPVSFQKSQRFKQQKESKQNLNVDKDTTLPASARKVKSSESKIRVLLQERGAQDRRIQDLETELEKMEARLNAALREKTSLSANNATLEKQLIELTRTNELLKSKFSENGNQKNLRILSLELMKLRNKRETKMRGMMAKQEGMEMKLQVTQRSLEESQGKIAQLEGKLVSIEKEKIDEKSETEKLLEYIEEISCASDQVEKYKLDIAQLEENLKEKNDEILSLKQSLEENIVILSKQVEDLNVKCQLLEKEKEDHVNRNREHNENLNAEMQNLKQKFILEQQEREKLQQKELQIDSLLQQEKELSSSLHQKLCSFQEEMVKEKNLFEEELKQTLDELDKLQQKEEQAERLVKQLEEEAKSRAEELKLLEEKLKGKEAELEKSSAAHTQATLLLQEKYDSMVQSLEDVTAQFESYKALTASEIEDLKLENSSLQEKAAKAGKNAEDVQHQILATESSNQEYVRMLLDLQTKSALKETEIKEITVSFLQKITDLQNQLKQQEEDFRKQLEDEEGRKAEKENTTAELTEEINKWRLLYEELYNKTKPFQLQLDAFEVEKQALLNEHGAAQEQLNKIRDSYAKLLGHQNLKQKIKHVVKLKDENSQLKSEVSKLRCQLAKKKQSETKLQEELNKVLGIKHFDPSKAFHHESKENFALKTPLKEGNTNCYRAPMECQESWK

SEQ ID NO: 39093 - protein, 724 aa, Homo sapiens
  Payload ID: 7837
  Gene Symbol: HMMR
  Gene Name: hyaluronan-mediated motility receptor (RHAMM)
  Uniprot ID: O75330
  ENSP ID: ENSP00000351554
MSFPKAPLKRFNDPSGCAPSPGAYDVKTLEVLKGPVSFQKSQRFKQQKESKQNLNVDKDTTLPASARKVKSSESKESQKNDKDLKILEKEIRVLLQERGAQDRRIQDLETELEKMEARLNAALREKTSLSANNATLEKQLIELTRTNELLKSKFSENGNQKNLRILSLELMKLRNKRETKMRGMMAKQEGMEMKLQVTQRSLEESQGKIAQLEGKLVSIEKEKIDEKSETEKLLEYIEEISCASDQVEKYKLDIAQLEENLKEKNDEILSLKQSLEENIVILSKQVEDLNVKCQLLEKEKEDHVNRNREHNENLNAEMQNLKQKFILEQQEREKLQQKELQIDSLLQQEKELSSSLHQKLCSFQEEMVKEKNLFEEELKQTLDELDKLQQKEEQAERLVKQLEEEAKSRAEELKLLEEKLKGKEAELEKSSAAHTQATLLLQEKYDSMVQSLEDVTAQFESYKALTASEIEDLKLENSSLQEKAAKAGKNAEDVQHQILATESSNQEYVRMLLDLQTKSALKETEIKEITVSFLQKITDLQNQLKQQEEDFRKQLEDEEGRKAEKENTTAELTEEINKWRLLYEELYNKTKPFQLQLDAFEVEKQALLNEHGAAQEQLNKIRDSYAKLLGHQNLKQKIKHVVKLKDENSQLKSEVSKLRCQLAKKKQSETKLQEELNKVLGIKHFDPSKAFHHESKENFALKTPLKEGNTNCYRAPMECQESWK

SEQ ID NO: 39094 - protein, 725 aa, Homo sapiens
  Payload ID: 7837
  Gene Symbol: HMMR
  Gene Name: hyaluronan-mediated motility receptor (RHAMM)
  Uniprot ID: O75330
  ENSP ID: ENSP00000377492
MSFPKAPLKRFNDPSGCAPSPGAYDVKTLEVLKGPVSFQKSQRFKQQKESKQNLNVDKDTTLPASARKVKSSESKKESQKNDKDLKILEKEIRVLLQERGAQDRRIQDLETELEKMEARLNAALREKTSLSANNATLEKQLIELTRTNELLKSKFSENGNQKNLRILSLELMKLRNKRETKMRGMMAKQEGMEMKLQVTQRSLEESQGKIAQLEGKLVSIEKEKIDEKSETEKLLEYIEEISCASDQVEKYKLDIAQLEENLKEKNDEILSLKQSLEENIVILSKQVEDLNVKCQLLEKEKEDHVNRNREHNENLNAEMQNLKQKFILEQQEREKLQQKELQIDSLLQQEKELSSSLHQKLCSFQEEMVKEKNLFEEELKQTLDELDKLQQKEEQAERLVKQLEEEAKSRAEELKLLEEKLKGKEAELEKSSAAHTQATLLLQEKYDSMVQSLEDVTAQFESYKALTASEIEDLKLENSSLQEKAAKAGKNAEDVQHQILATESSNQEYVRMLLDLQTKSALKETEIKEITVSFLQKITDLQNQLKQQEEDFRKQLEDEEGRKAEKENTTAELTEEINKWRLLYEELYNKTKPFQLQLDAFEVEKQALLNEHGAAQEQLNKIRDSYAKLLGHQNLKQKIKHVVKLKDENSQLKSEVSKLRCQLAKKKQSETKLQEELNKVLGIKHFDPSKAFHHESKENFALKTPLKEGNTNCYRAPMECQESWK

SEQ ID NO: 39095 - protein, 638 aa, Homo sapiens
  Payload ID: 7837
  Gene Symbol: HMMR
  Gene Name: hyaluronan-mediated motility receptor (RHAMM)
  Uniprot ID: O75330
  ENSP ID: ENSP00000402673
MTLLIRVLLQERGAQDRRIQDLETELEKMEARLNAALREKTSLSANNATLEKQLIELTRTNELLKSKFSENGNQKNLRILSLELMKLRNKRETKMRGMMAKQEGMEMKLQVTQRSLEESQGKIAQLEGKLVSIEKEKIDEKSETEKLLEYIEEISCASDQVEKYKLDIAQLEENLKEKNDEILSLKQSLEENIVILSKQVEDLNVKCQLLEKEKEDHVNRNREHNENLNAEMQNLKQKFILEQQEREKLQQKELQIDSLLQQEKELSSSLHQKLCSFQEEMVKEKNLFEEELKQTLDELDKLQQKEEQAERLVKQLEEEAKSRAEELKLLEEKLKGKEAELEKSSAAHTQATLLLQEKYDSMVQSLEDVTAQFESYKALTASEIEDLKLENSSLQEKAAKAGKNAEDVQHQILATESSNQEYVRMLLDLQTKSALKETEIKEITVSFLQKITDLQNQLKQQEEDFRKQLEDEEGRKAEKENTTAELTEEINKWRLLYEELYNKTKPFQLQLDAFEVEKQALLNEHGAAQEQLNKIRDSYAKLLGHQNLKQKIKHVVKLKDENSQLKSEVSKLRCQLAKKKQSETKLQEELNKVLGIKHFDPSKAFHHESKENFALKTPLKEGNTNCYRAPMECQESWK

SEQ ID NO: 39096 - protein, 92 aa, Homo sapiens
  Payload ID: 7837
  Gene Symbol: HMMR
  Gene Name: hyaluronan-mediated motility receptor (RHAMM)
  ENSP ID: ENSP00000428406
MEARLNAALREKTSLSANNATLEKQLIELTRTNELLKSKFSENGNQKNLRILSLELMKLRNKRETKMRGMMAKQEGMEMKLQVTQRSLEESQ

SEQ ID NO: 39097 - protein, 101 aa, Homo sapiens
  Payload ID: 7837
  Gene Symbol: HMMR
  Gene Name: hyaluronan-mediated motility receptor (RHAMM)
  ENSP ID: ENSP00000428481
MEARLNAALREKTSLSANNATLEKQLIELTRTNELLKSKFSENGNQKNLRILSLELMKLRNKRETKMRGMMAKQEGMEMKLQVTQRSLEESQGKIAQLEGK

SEQ ID NO: 39098 - protein, 435 aa, Homo sapiens
  Payload ID: 7838
  Gene Symbol: HYAL1
  Gene Name: hyaluronoglucosaminidase 1
  Uniprot ID: Q12794
  ENSP ID: ENSP00000266031
MAAHLLPICALFLTLLDMAQGFRGPLLPNRPFTTVWNANTQWCLERHGVDVDVSVFDVVANPGQTFRGPDMTIFYSSQLGTYPYYTPTGEPVFGGLPQNASLIAHLARTFQDILAAIPAPDFSGLAVIDWEAWRPRWAFNWDTKDIYRQRSRALVQAQHPDWPAPQVEAVAQDQFQGAARAWMAGTLQLGRALRPRGLWGFYGFPDCYNYDFLSPNYTGQCPSGIRAQNDQLGWLWGQSRALYPSIYMPAVLEGTGKSQMYVQHRVAEAFRVAVAAGDPNLPVLPYVQIFYDTTNHFLPLDELEHSLGESAAQGAAGVVLWVSWENTRTKESCQAIKEYMDTTLGPFILNVTSGALLCSQALCSGHGRCVRRTSHPKALLLLNPASFSIQLTPGGGPLSLRGALSLEDQAQMAVEFKCRCYPGWQAPWCERKSMW

SEQ ID NO: 39099 - protein, 435 aa, Homo sapiens; identical to SEQ ID NO: 39098
  Payload ID: 7838
  Gene Symbol: HYAL1
  Gene Name: hyaluronoglucosaminidase 1
  Uniprot ID: Q12794
  ENSP ID: ENSP00000346068

SEQ ID NO: 39100 - protein, 405 aa, Homo sapiens
  Payload ID: 7838
  Gene Symbol: HYAL1
  Gene Name: hyaluronoglucosaminidase 1
  Uniprot ID: Q12794
  ENSP ID: ENSP00000378575
MAAHLLPICALFLTLLDMAQGFRGPLLPNRPFTTVWNANTQWCLERHGVDVDVSVFDVVANPGQTFRGPDMTIFYSSQLGTYPYYTPTGEPVFGGLPQNASLIAHLARTFQDILAAIPAPDFSGLAVIDWEAWRPRWAFNWDTKDIYRQRSRALVQAQHPDWPAPQVEAVAQDQFQGAARAWMAGTLQLGRALRPRGLWGFYGFPDCYNYDFLSPNYTGQCPSGIRAQNDQLGWLWGQSRALYPSIYMPAVLEGTGKSQMYVQHRVAEAFRVAVAAGDPNLPVLPYVQIFYDTTNHFLPLESCQAIKEYMDTTLGPFILNVTSGALLCSQALCSGHGRCVRRTSHPKALLLLNPASFSIQLTPGGGPLSLRGALSLEDQAQMAVEFKCRCYPGWQAPWCERKSMW

SEQ ID NO: 39101 - protein, 435 aa, Homo sapiens; identical to SEQ ID NO: 39098
  Payload ID: 7838
  Gene Symbol: HYAL1
  Gene Name: hyaluronoglucosaminidase 1
  Uniprot ID: Q12794
  ENSP ID: ENSP00000378576

SEQ ID NO: 39102 - protein, 176 aa, Homo sapiens
  Payload ID: 7838
  Gene Symbol: HYAL1
  Gene Name: hyaluronoglucosaminidase 1
  Uniprot ID: Q12794
  ENSP ID: ENSP00000390149
MYVQHRVAEAFRVAVAAGDPNLPVLPYVQIFYDTTNHFLPLDELEHSLGESAAQGAAGVVLWVSWENTRTKESCQAIKEYMDTTLGPFILNVTSGALLCSQALCSGHGRCVRRTSHPKALLLLNPASFSIQLTPGGGPLSLRGALSLEDQAQMAVEFKCRCYPGWQAPWCERKSMW

SEQ ID NO: 39103 - protein, 69 aa, Homo sapiens
  Payload ID: 7838
  Gene Symbol: HYAL1
  Gene Name: hyaluronoglucosaminidase 1
  ENSP ID: ENSP00000391666
MAAHLLPICALFLTLLDMAQGFRGPLLPNRPFTTVWNANTQWCLERHGVDVDVSVFDVVANPGQTFRGP

SEQ ID NO: 39104 - protein, 253 aa, Homo sapiens
  Payload ID: 7838
  Gene Symbol: HYAL1
  Gene Name: hyaluronoglucosaminidase 1
  Uniprot ID: Q12794
  ENSP ID: ENSP00000393358
MAGTLQLGRALRPRGLWGFYGFPDCYNYDFLSPNYTGQCPSGIRAQNDQLGWLWGQSRALYPSIYMPAVLEGTGKSQMYVQHRVAEAFRVAVAAGDPNLPVLPYVQIFYDTTNHFLPLDELEHSLGESAAQGAAGVVLWVSWENTRTKESCQAIKEYMDTTLGPFILNVTSGALLCSQALCSGHGRCVRRTSHPKALLLLNPASFSIQLTPGGGPLSLRGALSLEDQAQMAVEFKCRCYPGWQAPWCERKSMW

SEQ ID NO: 39105 - protein, 103 aa, Homo sapiens
  Payload ID: 7838
  Gene Symbol: HYAL1
  Gene Name: hyaluronoglucosaminidase 1
  ENSP ID: ENSP00000394526
MAAHLLPICALFLTLLDMAQGFRGPLLPNRPFTTVWNANTQWCLERHGVDVDVSVFDVVANPGQTFRGPDMTIFYSSQLGTYPYYTPTGEPVFGGLPQNASLI

SEQ ID NO: 39106 - protein, 435 aa, Homo sapiens; identical to SEQ ID NO: 39098
  Payload ID: 7838
  Gene Symbol: HYAL1
  Gene Name: hyaluronoglucosaminidase 1
  Uniprot ID: Q12794
  ENSP ID: ENSP00000477903

SEQ ID NO: 39107 - protein, 473 aa, Homo sapiens
  Payload ID: 7839
  Gene Symbol: HYAL2
  Gene Name: hyaluronoglucosaminidase 2
  Uniprot ID: Q12891
  ENSP ID: ENSP00000350387
MRAGPGPTVTLALVLAVSWAMELKPTAPPIFTGRPFVVAWDVPTQDCGPRLKVPLDLNAFDVQASPNEGFVNQNITIFYRDRLGLYPRFDSAGRSVHGGVPQNVSLWAHRKMLQKRVEHYIRTQESAGLAVIDWEDWRPVWVRNWQDKDVYRRLSRQLVASRHPDWPPDRIVKQAQYEFEFAAQQFMLETLRYVKAVRPRHLWGFYLFPDCYNHDYVQNWESYTGRCPDVEVARNDQLAWLWAESTALFPSVYLDETLASSRHGRNFVSFRVQEALRVARTHHANHALPVYVFTRPTYSRRLTGLSEMDLISTIGESAALGAAGVILWGDAGYTTSTETCQYLKDYLTRLLVPYVVNVSWATQYCSRAQCHGHGRCVRRNPSASTFLHLSTNSFRLVPGHAPGEPQLRPVGELSWADIDHLQTHFRCQCYLGWSGEQCQWDHRQAAGGASEAWAGSHLTSLLALAALAFTWTL

SEQ ID NO: 39108 - protein, 473 aa, Homo sapiens; identical to SEQ ID NO: 39107
  Payload ID: 7839
  Gene Symbol: HYAL2
  Gene Name: hyaluronoglucosaminidase 2
  Uniprot ID: Q12891
  ENSP ID: ENSP00000378571

SEQ ID NO: 39109 - protein, 117 aa, Homo sapiens
  Payload ID: 7839
  Gene Symbol: HYAL2
  Gene Name: hyaluronoglucosaminidase 2
  ENSP ID: ENSP00000398714
MRAGPGPTVTLALVLAVSWAMELKPTAPPIFTGRPFVVAWDVPTQDCGPRLKVPLDLNAFDVQASPNEGFVNQNITIFYRDRLGLYPRFDSAGRSVHGGVPQNVSLWAHRKMLQKRV

SEQ ID NO: 39110 - protein, 121 aa, Homo sapiens
  Payload ID: 7839
  Gene Symbol: HYAL2
  Gene Name: hyaluronoglucosaminidase 2
  ENSP ID: ENSP00000399677
MRAGPGPTVTLALVLAVSWAMELKPTAPPIFTGRPFVVAWDVPTQDCGPRLKVPLDLNAFDVQASPNEGFVNQNITIFYRDRLGLYPRFDSAGRSVHGGVPQNVSLWAHRKMLQKRVEHYI

SEQ ID NO: 39111 - protein, 473 aa, Homo sapiens; identical to SEQ ID NO: 39107
  Payload ID: 7839
  Gene Symbol: HYAL2
  Gene Name: hyaluronoglucosaminidase 2
  Uniprot ID: Q12891
  ENSP ID: ENSP00000401853

SEQ ID NO: 39112 - protein, 47 aa, Homo sapiens
  Payload ID: 7839
  Gene Symbol: HYAL2
  Gene Name: hyaluronoglucosaminidase 2
  ENSP ID: ENSP00000405855
MRAGPGPTVTLALVLAVSWAMELKPTAPPIFTGRPFVVAWDVPTQDC

SEQ ID NO: 39113 - protein, 473 aa, Homo sapiens; identical to SEQ ID NO: 39107
  Payload ID: 7839
  Gene Symbol: HYAL2
  Gene Name: hyaluronoglucosaminidase 2
  Uniprot ID: Q12891
  ENSP ID: ENSP00000406657

SEQ ID NO: 39114 - protein, 81 aa, Homo sapiens
  Payload ID: 7839
  Gene Symbol: HYAL2
  Gene Name: hyaluronoglucosaminidase 2
  ENSP ID: ENSP00000409642
MRAGPGPTVTLALVLAVSWAMELKPTAPPIFTGRPFVVAWDVPTQDCGPRLKVPLDLNAFDVQASPNEGFVNQNITIFYRD

SEQ ID NO: 39115 - protein, 76 aa, Homo sapiens
  Payload ID: 7839
  Gene Symbol: HYAL2
  Gene Name: hyaluronoglucosaminidase 2
  ENSP ID: ENSP00000414656
MRAGPGPTVTLALVLAVSWAMELKPTAPPIFTGRPFVVAWDVPTQDCGPRLKVPLDLNAFDVQASPNEGFVNQNIT

SEQ ID NO: 39116 - protein, 417 aa, Homo sapiens
  Payload ID: 7840
  Gene Symbol: HYAL3
  Gene Name: hyaluronoglucosaminidase 3
  Uniprot ID: O43820
  ENSP ID: ENSP00000337425
MTTQLGPALVLGVALCLGCGQPLPQVPERPFSVLWNVPSAHCEARFGVHLPLNALGIIANRGQHFHGQNMTIFYKNQLGLYPYFGPRGTAHNGGIPQALPLDRHLALAAYQIHHSLRPGFAGPAVLDWEEWCPLWAGNWGRRRAYQAASWAWAQQVFPDLDPQEQLYKAYTGFEQAARALMEDTLRVAQALRPHGLWGFYHYPACGNGWHSMASNYTGRCHAATLARNTQLHWLWAASSALFPSIYLPPRLPPAHHQAFVRHRLEEAFRVALVGHRHPLPVLAYVRLTHRRSGRFLSQDDLVQSIGVSAALGAAGVVLWGDLSLSSSEEECWHLHDYLVDTLGPYVINVTRAAMACSHQRCHGHGRCARRDPGQMEAFLHLWPDGSLGDWKSFSCHCYWGWAGPTCQEPRPGPKEAV

SEQ ID NO: 39117 - protein, 387 aa, Homo sapiens
  Payload ID: 7840
  Gene Symbol: HYAL3
  Gene Name: hyaluronoglucosaminidase 3
  Uniprot ID: O43820
  ENSP ID: ENSP00000351946
MTTQLGPALVLGVALCLGCGQPLPQVPERPFSVLWNVPSAHCEARFGVHLPLNALGIIANRGQHFHGQNMTIFYKNQLGLYPYFGPRGTAHNGGIPQALPLDRHLALAAYQIHHSLRPGFAGPAVLDWEEWCPLWAGNWGRRRAYQAASWAWAQQVFPDLDPQEQLYKAYTGFEQAARALMEDTLRVAQALRPHGLWGFYHYPACGNGWHSMASNYTGRCHAATLARNTQLHWLWAASSALFPSIYLPPRLPPAHHQAFVRHRLEEAFRVALVGHRHPLPVLAYVRLTHRRSGRFLSQEECWHLHDYLVDTLGPYVINVTRAAMACSHQRCHGHGRCARRDPGQMEAFLHLWPDGSLGDWKSFSCHCYWGWAGPTCQEPRPGPKEAV

SEQ ID NO: 39118 - protein, 159 aa, Homo sapiens
  Payload ID: 7840
  Gene Symbol: HYAL3
  Gene Name: hyaluronoglucosaminidase 3
  ENSP ID: ENSP00000391663
MTTQLGPALVLGVALCLGCGQPLPQVPERPFSVLWNVPSAHCEARFGVHLPLNALGIIANRGQHFHGQNMTIFYKNQLGLYPYFGPRGTAHNGGIPQALPLDRHLALAAYQIHHSLRPGFAGPAVLDWEEWCPLWAGNWGRRRAYQAASWAWAQQVFPD

SEQ ID NO: 39119 - protein, 387 aa, Homo sapiens; identical to SEQ ID NO: 39117
  Payload ID: 7840
  Gene Symbol: HYAL3
  Gene Name: hyaluronoglucosaminidase 3
  Uniprot ID: O43820
  ENSP ID: ENSP00000391922

SEQ ID NO: 39120 - protein, 168 aa, Homo sapiens
  Payload ID: 7840
  Gene Symbol: HYAL3
  Gene Name: hyaluronoglucosaminidase 3
  Uniprot ID: O43820
  ENSP ID: ENSP00000401092
MLPPAHHQAFVRHRLEEAFRVALVGHRHPLPVLAYVRLTHRRSGRFLSQDDLVQSIGVSAALGAAGVVLWGDLSLSSSEEECWHLHDYLVDTLGPYVINVTRAAMACSHQRCHGHGRCARRDPGQMEAFLHLWPDGSLGDWKSFSCHCYWGWAGPTCQEPRPGPKEAV

SEQ ID NO: 39121 - protein, 138 aa, Homo sapiens
  Payload ID: 7840
  Gene Symbol: HYAL3
  Gene Name: hyaluronoglucosaminidase 3
  Uniprot ID: O43820
  ENSP ID: ENSP00000424633
MLPPAHHQAFVRHRLEEAFRVALVGHRHPLPVLAYVRLTHRRSGRFLSQEECWHLHDYLVDTLGPYVINVTRAAMACSHQRCHGHGRCARRDPGQMEAFLHLWPDGSLGDWKSFSCHCYWGWAGPTCQEPRPGPKEAV

SEQ ID NO: 39122 - protein, 417 aa, Homo sapiens; identical to SEQ ID NO: 39116
  Payload ID: 7840
  Gene Symbol: HYAL3
  Gene Name: hyaluronoglucosaminidase 3
  Uniprot ID: O43820
  ENSP ID: ENSP00000479935

SEQ ID NO: 39123 - protein, 481 aa, Homo sapiens
  Payload ID: 7841
  Gene Symbol: HYAL4
  Gene Name: hyaluronoglucosaminidase 4
  Uniprot ID: Q2M3T9
  ENSP ID: ENSP00000223026
MKVLSEGQLKLCVVQPVHLTSWLLIFFILKSISCLKPARLPIYQRKPFIAAWNAPTDQCLIKYNLRLNLKMFPVIGSPLAKARGQNVTIFYVNRLGYYPWYTSQGVPINGGLPQNISLQVHLEKADQDINYYIPAEDFSGLAVIDWEYWRPQWARNWNSKDVYRQKSRKLISDMGKNVSATDIEYLAKVTFEESAKAFMKETIKLGIKSRPKGLWGYYLYPDCHNYNVYAPNYSGSCPEDEVLRNNELSWLWNSSAALYPSIGVWKSLGDSENILRFSKFRVHESMRISTMTSHDYALPVFVYTRLGYRDEPLFFLSKQDLVSTIGESAALGAAGIVIWGDMNLTASKANCTKVKQFVSSDLGSYIANVTRAAEVCSLHLCRNNGRCIRKMWNAPSYLHLNPASYHIEASEDGEFTVKGKASDTDLAVMADTFSCHCYQGYEGADCREIKTADGCSGVSPSPGSLMTLCLLLLASYRSIQL

SEQ ID NO: 39124 - protein, 481 aa, Homo sapiens; identical to SEQ ID NO: 39123
  Payload ID: 7841
  Gene Symbol: HYAL4
  Gene Name: hyaluronoglucosaminidase 4
  Uniprot ID: Q2M3T9
  ENSP ID: ENSP00000417186

SEQ ID NO: 39125 - protein, 45 aa, Homo sapiens
  Payload ID: 7841
  Gene Symbol: HYAL4
  Gene Name: hyaluronoglucosaminidase 4
  ENSP ID: ENSP00000417872
MKVLSEGQLKLCVVQPVHLTSWLLIFFILKSISCLKPARLPIYQR

SEQ ID NO: 39126 - protein, 63 aa, Homo sapiens
  Payload ID: 7841
  Gene Symbol: HYAL4
  Gene Name: hyaluronoglucosaminidase 4
  ENSP ID: ENSP00000419522
MKVLSEGQLKLCVVQPVHLTSWLLIFFILKSISCLKPARLPIYQRKPFIAAWNAPTDQCLIKY

SEQ ID NO: 39127 - protein, 349 aa, Homo sapiens
  Payload ID: 7841
  Gene Symbol: HYAL4
  Gene Name: hyaluronoglucosaminidase 4
  ENSP ID: ENSP00000420264
MKVLSEGQLKLCVVQPVHLTSWLLIFFILKSISCLKPARLPIYQRKPFIAAWNAPTDQCLIKYNLRLNLKMFPVIGSPLAKARGQNVTIFYVNRLGYYPWYTSQGVPINGGLPQNISLQVHLEKADQDINYYIPAEDFSGLAVIDWEYWRPQWARNWNSKDVYRQKSRKLISDMGKNVSATDIEYLAKVTFEESAKAFMKETIKLGIKSRPKGLWGYYLYPDCHNYNVYAPNYSGSCPEDEVLRNNELSWLWNSSAALYPSIGVWKSLGDSENILRFSKFRVHESMRISTMTSHDYALPVFVYTRLGYRDEPLFFLSKQDLVSTIGESAALGAAGIVIWGDMNLTASKV

SEQ ID NO: 39128 - protein, 151 aa, Homo sapiens
  Payload ID: 7842
  Gene Symbol:
  Gene Name: HYDIN
  ENSP ID: ENSP00000488915
  MOD_RES (1)..(1): Any amino acid
XPKVVTEEEVNRMLTPSEFLKEMSLTTEQRLAKTRLMCRPQIIELLDMGETTHQKFSGIDLDQALFQPFPSEIIFQNYTPCEVYEVPLILRNNDKIPRLVKVVEESSPYFKVISPKDIGHKVAPGVPSIFRILFTPEENKAFLYRTSYWNS

SEQ ID NO: 39129 - protein, 43 aa, Homo sapiens
  Payload ID: 7842
  Gene Symbol:
  Gene Name: HYDIN
  ENSP ID: ENSP00000488931
  MOD_RES (1)..(1): Any amino acid
XNSGRVQLEFSWVSEDTSKAVSFAKPDHQGFPTCHLESKVRSW

SEQ ID NO: 39130 - protein, 725 aa, Homo sapiens
  Payload ID: 7842
  Gene Symbol:
  Gene Name: HYDIN
  ENSP ID: ENSP00000488978
MESAGGFKLGEKKKLLKMTSRRLEESMGAVQMGLVNMFKGFQSKVLPPLSPKVVTEEEVNRMLTPSEFLKEMSLTTEQRLAKTRLMCRPQIIELLDMGETTHQKFSGIDLDQALFQPFPSEIIFQNYTPCEVYEVPLILRNNDKIPRLVKVVEESSPYFKVISPKDIGHKVAPGVPSIFRILFTPEENKDYAHTLTCVTEREKFIVPIKARGARAILDFPDKLNFSTCPVKYSTQKILLVRNIGNKNAVFHIKTCRPFSIEPAIGTLNVGESMQLEVEFEPQSVGDHSGRLIVCYDTGEKVFVSLYGAAIDMNIRLDKNSLTIEKTYISLANQRTITIHNRSNIIAHFLWKVFATQQEEDREKYRACDDLIKEEKDETDEFFEECITDPLLREHLSVLSRTFANQRRLVQGDSKLFFNNVFTVEPLEGDVWPNSSAEITVYFNPLEAKLYQQTIYCDILGREIRLPLRIKGEGMGPKIHFNFELLDIGKVFTGSAHCYEAILYNKGSIDALFNMTPPTSALGACFVFSPKEGIIEPSGVQAIQISFSSTILGNFEEEFLVNVNGSPEPVKLTIRGCVIGPTFHFNVPALHFGDVSFGFPHTLICSLNNTSLIPMTYKLRIPGDGLGHKSISYCEQHVDYKRPSWTKEEISSMKPKEFTISPDCGTIRPQGFAAIRVTLCSNTVQKYELALVVDVEGIGEEVLALLITARYCSPACSSPESPPSLQ

SEQ ID NO: 39131 - protein, 36 aa, Homo sapiens
  Payload ID: 7842
  Gene Symbol:
  Gene Name: HYDIN
  ENSP ID: ENSP00000489054
MTSRRLEESMGAVQMGLVNMFKGFQSKVLPPLSPKV

SEQ ID NO: 39132 - protein, 39 aa, Homo sapiens
  Payload ID: 7842
  Gene Symbol:
  Gene Name: HYDIN
  ENSP ID: ENSP00000489086
MTSRRLEESMGAVQMGLVNMFKGFQSKVLPPLSPKVVTE

SEQ ID NO: 39133 - protein, 528 aa, Homo sapiens
  Payload ID: 7842
  Gene Symbol:
  Gene Name: HYDIN
  ENSP ID: ENSP00000489101
VKYSTQKILLVRNIGNKNAVFHIKTCRPFSIEPAIGTLNVGESMQLEVEFEPQSVGDHSGRLIVCYDTGEKVFVSLYGAAIDMNIRLDKNSLTIEKTYISLANQRTITIHNRSNIIAHFLWKVFATQQEEDREKYRACDDLIKEEKDETDEFFEECITDPLLREHLSVLSRTFANQRRLVQGDSKLFFNNVFTVEPLEGDVWPNSSAEITVYFNPLEAKLYQQTIYCDILGREIRLPLRIKGEGMGPKIHFNFELLDIGKVFTGSAHCYEAILYNKGSIDALFNMTPPTSALGACFVFSPKEGIIEPSGVQAIQISFSSTILGNFEEEFLVNVNGSPEPVKLTIRGCVIGPTFHFNVPALHFGDVSFATQELRDPQVLIPFQRFPHTLICSLNNTSLIPMTYKLRIPGDGLGHKSISYCEQHVDYKRPSWTKEEISSMKPKEFTISPDCGTIRPQGFAAIRVTLCSNTVQKYELALVVDVEGIGEEVLALLITASAPELCNRKVMLSVLQWKIHRAKRSLPRDTVAVT

SEQ ID NO: 39134 - protein, 833 aa, Homo sapiens
  Payload ID: 7842
  Gene Symbol:
  Gene Name: HYDIN
  ENSP ID: ENSP00000489173
RTFANQRRLVQGDSKLFFNNVFTVEPLEGDVWPNSSAEITVYFNPLEAKLYQQTIYCDILGREIRLPLRIKGEGMGPKIHFNFELLDIGKVFTGSAHCYEAILYNKGSIDALFNMTPPTSALGACFVFSPKEGIIEPSGVQAIQISFSSTILGNFEEEFLVNVNGSPEPVKLTIRGCVIGPTFHFNVPALHFGDVSFGFPHTLICSLNNTSLIPMTYKLRIPGDGLGHKSISYCEQHVDYKRPSWTKEEISSMKPKEFTISPDCGTIRPQGFAAIRVTLCSNTVQKYELALVVDVEGIGEEVLALLITARCVVPALHLVNTEVDFGHCFLKYPYEKTLQLANQDDLPGFYEVQPQVCEEVPTVLFSSPTPSGVISPSSTIHIPLVLETQVTGEHRSTVYISIFGSQDPPLVCHLKSAGEGPVIYVHPNQVDFGNIYVLKDSSRILNLCNQSFIPAFFQAHMAHKKSLWTIEPNEGMVPPETDVQLALTANLNDTLTFKDCVILDIENSSTYRIPVQASGTGSTIVSDKPFAPELNLGAHFSLDTHYYHFKLINKGRRIQQLFWMNDSFRPQAKLSKKGRVKKGHAHVQPQPSGSQEPRDPQSPVFHLHPASMELYPGQAIDVILEGYSATPRKPNSILKPDYQPLAIKNISTLPVNLLLSTSGPFFICETDKSLLPATPEPIKLEIDEEKNLLIKFDPSYRNDLNNWVAEEILAIKYVEHPQIDSLDLRGEVHYPNLSFETKELDFGCILNDTELIRYVTITNCSPLVVKFRWFFLVNDEENQIRFVTLPKKPYSAPVSQMESIPATSEAASPPAILVTVESPEMDLNDFVKK

SEQ ID NO: 39135 - protein, 950 aa, Homo sapiens
  Payload ID: 7842
  Gene Symbol:
  Gene Name: HYDIN
  ENSP ID: ENSP00000489181
MESAGGFKLGMEPLSGGGVCEKKKLLKMTSRRLEESMGAVQMGLVNMFKGFQSKVLPPLSPKVVTEEEVNRMLTPSEFLKEMSLTTEQRLAKTRLMCRPQIIELLDMGETTHQKFSGIDLDQALFQPFPSEIIFQNYTPCEVYEVPLILRNNDKIPRLVKVVEESSPYFKVISPKDIGHKVAPGVPSIFRILFTPEENKDYAHTLTCVTEREKFIVPIKARGARAILDFPDKLNFSTCPVKYSTQKILLVRNIGNKNAVFHIKTCRPFSIEPAIGTLNVGESMQLEVEFEPQSVGDHSGRLIVCYDTGEKVFVSLYGAAIDMNIRLDKNSLTIEKTYISLANQRTITIHNRSNIIAHFLWKVFATQQEEDREKYRACDDLIKEEKDETDEFFEECITDPLLREHLSVLSRTFANQRRLVQGDSKLFFNNVFTVEPLEGDVWPNSSAEITVYFNPLEAKLYQQTIYCDILGREIRLPLRIKGEGMGPKIHFNFELLDIGKVFTGSAHCYEAILYNKGSIDALFNMTPPTSALGACFVFSPKEGIIEPSGVQAIQISFSSTILGNFEEEFLVNVNGSPEPVKLTIRGCVIGPTFHFNVPALHFGDVSFGFPHTLICSLNNTSLIPMTYKLRIPGDGLGHKSISYCEQHVDYKRPSWTKEEISSMKPKEFTISPDCGTIRPQGFAAIRVTLCSNTVQKYELALVVDVEGIGEEVLALLITARCVVPALHLVNTEVDFGHCFLKYPYEKTLQLANQDDLPGFYEVQPQVCEEVPTVLFSSPTPSGVISPSSTIHIPLVLETQVTGEHRSTVYISIFGSQDPPLVCHLKSAGEGPVIYVHPNQVDFGNIYVLKDSSRILNLCNQSFIPAFFQAHMAHKKSLWTIEPNEGMVPPETDVQLALTANLNDTLTFKDCVILDIENSSTYRIPVQASGTGSTIVSDKPFAPELNLGAHFR

SEQ ID NO: 39136 - protein, 940 aa, Homo sapiens
  Payload ID: 7842
  Gene Symbol:
  Gene Name: HYDIN
  ENSP ID: ENSP00000489221
MESAGGFKLGEKKKLLKMTSRRLEESMGAVQMGLVNMFKGFQSKVLPPLSPKVVTEEEVNRMLTPSEFLKEMSLTTEQRLAKTRLMCRPQIIELLDMGETTHQKFSGIDLDQALFQPFPSEIIFQNYTPCEVYEVPLILRNNDKIPRLVKVVEESSPYFKVISPKDIGHKVAPGVPSIFRILFTPEENKDYAHTLTCVTEREKFIVPIKARGARAILDFPDKLNFSTCPVKYSTQKILLVRNIGNKNAVFHIKTCRPFSIEPAIGTLNVGESMQLEVEFEPQSVGDHSGRLIVCYDTGEKVFVSLYGAAIDMNIRLDKNSLTIEKTYISLANQRTITIHNRSNIIAHFLWKVFATQQEEDREKYRACDDLIKEEKDETDEFFEECITDPLLREHLSVLSRTFANQRRLVQGDSKLFFNNVFTVEPLEGDVWPNSSAEITVYFNPLEAKLYQQTIYCDILGREIRLPLRIKGEGMGPKIHFNFELLDIGKVFTGSAHCYEAILYNKGSIDALFNMTPPTSALGACFVFSPKEGIIEPSGVQAIQISFSSTILGNFEEEFLVNVNGSPEPVKLTIRGCVIGPTFHFNVPALHFGDVSFGFPHTLICSLNNTSLIPMTYKLRIPGDGLGHKSISYCEQHVDYKRPSWTKEEISSMKPKEFTISPDCGTIRPQGFAAIRVTLCSNTVQKYELALVVDVEGIGEEVLALLITARCVVPALHLVNTEVDFGHCFLKYPYEKTLQLANQDDLPGFYEVQPQVCEEVPTVLFSSPTPSGVISPSSTIHIPLVLETQVTGEHRSTVYISIFGSQDPPLVCHLKSAGEGPVIYVHPNQVDFGNIYVLKDSSRILNLCNQSFIPAFFQAHMAHKKSLWTIEPNEGMVPPETDVQLALTANLNDTLTFKDCVILDIENSSTYRIPVQASGTGSTIVSDKPFAPELNLGAHFR

SEQ ID NO: 39137 - protein, 1017 aa, Homo sapiens
  Payload ID: 7842
  Gene Symbol:
  Gene Name: HYDIN
  ENSP ID: ENSP00000489246
MTSRRLEESMGAVQMGLVNMFKGFQSKVLPPLSPKVVTEEEVNRMLTPSEFLKEMSLTTEQRLAKTRLMCRPQIIELLDMGETTHQKFSGIDLDQALFQPFPSEIIFQNYTPCEVYEVPLILRNNDKIPRLVKVVEESSPYFKVISPKDIGHKVAPGVPSIFRILFTPEENKDYAHTLTCVTEREKFIVPIKARGARAILDFPDKLNFSTCPVKYSTQKILLVRNIGNKNAVFHIKTCRPFSIEPAIGTLNVGESMQLEVEFEPQSVGDHSGRLIVCYDTGEKVFVSLYGAAIDMNIRLDKNSLTIEKTYISLANQRTITIHNRSNIIAHFLWKVFATQQEEDREKYRACDDLIKEEKDETDEFFEECITDPLLREHLSVLSRTFANQRRLVQGDSKLFFNNVFTVEPLEGDVWPNSSAEITVYFNPLEAKLYQQTIYCDILGREIRLPLRIKGEGMGPKIHFNFELLDIGKVFTGSAHCYEAILYNKGSIDALFNMTPPTSALGACFVFSPKEGIIEPSGVQAIQISFSSTILGNFEEEFLVNVNGSPEPVKLTIRGCVIGPTFHFNVPALHFGDVSFGFPHTLICSLNNTSLIPMTYKLRIPGDGLGHKSISYCEQHVDYKRPSWTKEEISSMKPKEFTISPDCGTIRPQGFAAIRVTLCSNTVQKYELALVVDVEGIGEEVLALLITARCVVPALHLVNTEVDFGHCFLKYPYEKTLQLANQDDLPGFYEVQPQVCEEVPTVLFSSPTPSGVISPSSTIHIPLVLETQVTGEHRSTVYISIFGSQDPPLVCHLKSAGEGPVIYVHPNQVDFGNIYVLKDSSRILNLCNQSFIPAFFQAHMAHKKSLWTIEPNEGMVPPETDVQLALTANLNDTLTFKDCVILDIENSSTYRIPVQASGTGSTIVSDKPFAPELNLGAHFSLDTHYYHFKLINKGRRIQQLFWMNDSFRPQAKLSKKGRVKKGHAHVQPQPSGSQEPRDPQSPVFHLHPASMELYPGQAIDVILEGYSATPRVRG

SEQ ID NO: 39138 - protein, 113 aa, Homo sapiens
  Payload ID: 7842
  Gene Symbol:
  Gene Name: HYDIN
  ENSP ID: ENSP00000489274
  MOD_RES (1)..(1): Any amino acid
XIYVLKDSSRILNLCNQSFIPAFFQAHMAHKKSLWTIEPNEGMVPPETDVQLALTANLNDTLTFKDCVILDIENSSTYRIPVQASGTGSTIVSDKPFAPELNLGAHFRNLTVS

SEQ ID NO: 39139 - protein, 82 aa, Homo sapiens
  Payload ID: 7842
  Gene Symbol:
  Gene Name: HYDIN
  ENSP ID: ENSP00000489358
  MOD_RES (1)..(1): Any amino acid
XTYLEEEEDEESLEKIIFQTDKLQSIDSHSMEEVGEVENNPVSKAIARHLGIDISAEGRLAKNRKGIAIIIHGTPLSGRQQF

SEQ ID NO: 39140 - protein, 49 aa, Homo sapiens
  Payload ID: 7842
  Gene Symbol:
  Gene Name: HYDIN
  ENSP ID: ENSP00000489382
  MOD_RES (1)..(1): Any amino acid
XVLEENYQELQLQISANVDFASYHCQARDVRFKETLVYQTRVFDIMSCA

SEQ ID NO: 39141 - protein, 204 aa, Homo sapiens
  Payload ID: 7842
  Gene Symbol:
  Gene Name: HYDIN
  ENSP ID: ENSP00000489482
  MOD_RES (1)..(1): Any amino acid
XRILFTPEENKDYAHTLTCVTEREKFIVPIKARGARAILDFPDKLNFSTCPVKYSTQKILLVRNIGNKNAVFHIKTCRPFSIEPAIGTLNVGESMQLEVEFEPQSVGDHSGRLIVCYDTGEKVFVSLYGAAIDMNIRLDKNSLTIEKTYISLANQRTITIHNRSNIIAHFLWKVFATQQEEDREKYRWMAPFVPGQVWTWEYFL

SEQ ID NO: 39142 - protein, 127 aa, Homo sapiens
  Payload ID: 7842
  Gene Symbol:
  Gene Name: HYDIN
  ENSP ID: ENSP00000489503
  MOD_RES (1)..(1): Any amino acid
XKLRIPGDGLGHKSISYCEQHVDYKRPSWTKEEISSMKPKEFTISPDCGTIRPQGFAAIRVTLCSNTVQKYELALVVDVEGIGEEVLALLITASAPELCNRKVMLSVLQWKIHRAKRSLPRDTVAVT

SEQ ID NO: 39143 - protein, 5121 aa, Homo sapiens
  Payload ID: 7842
  Gene Symbol:
  Gene Name: HYDIN
  ENSP ID: ENSP00000489526
MTSRRLEESMGAVQMGLVNMFKGFQSKVLPPLSPKVVTEEEVNRMLTPSEFLKEMSLTTEQRLAKTRLMCRPQIIELLDMGETTHQKFSGIDLDQALFQPFPSEIIFQNYTPCEVYEVPLILRNNDKIPRLVKVVEESSPYFKVISPKDIGHKVAPGVPSIFRILFTPEENKDYAHTLTCVTEREKFIVPIKARGARAILDFPDKLNFSTCPVKYSTQKILLVRNIGNKNAVFHIKTCRPFSIEPAIGTLNVGESMQLEVEFEPQSVGDHSGRLIVCYDTGEKVFVSLYGAAIDMNIRLDKNSLTIEKTYISLANQRTITIHNRSNIIAHFLWKVFATQQEEDREKYRACDDLIKEEKDETDEFFEECITDPLLREHLSVLSRTFANQRRLVQGDSKLFFNNVFTVEPLEGDVWPNSSAEITVYFNPLEAKLYQQTIYCDILGREIRLPLRIKGEGMGPKIHFNFELLDIGKVFTGSAHCYEAILYNKGSIDALFNMTPPTSALGACFVFSPKEGIIEPSGVQAIQISFSSTILGNFEEEFLVNVNGSPEPVKLTIRGCVIGPTFHFNVPALHFGDVSFGFPHTLICSLNNTSLIPMTYKLRIPGDGLGHKSISYCEQHVDYKRPSWTKEEISSMKPKEFTISPDCGTIRPQGFAAIRVTLCSNTVQKYELALVVDVEGIGEEVLALLITARCVVPALHLVNTEVDFGHCFLKYPYEKTLQLANQDDLPGFYEVQPQVCEEVPTVLFSSPTPSGVISPSSTIHIPLVLETQVTGEHRSTVYISIFGSQDPPLVCHLKSAGEGPVIYVHPNQVDFGNIYVLKDSSRILNLCNQSFIPAFFQAHMAHKKSLWTIEPNEGMVPPETDVQLALTANLNDTLTFKDCVILDIENSSTYRIPVQASGTGSTIVSDKPFAPELNLGAHFSLDTHYYHFKLINKGRRIQQLFWMNDSFRPQAKLSKKGRVKKGHAHVQPQPSGSQEPRDPQSPVFHLHPASMELYPGQAIDVILEGYSATPRIVKEKLVCHAIIGAQKGKSLVMAVNITCEFVAPLIQLSTKQLIYRLEKKPNSILKPDYQPLAIKNISTLPVNLLLSTSGPFFICETDKSLLPATPEPIKLEIDEEKNLLIKFDPSYRNDLNNWVAEEILAIKYVEHPQIDSLDLRGEVHYPNLSFETKELDFGCILNDTELIRYVTITNCSPLVVKFRWFFLVNDEENQIRFVTLPKKPYSAPVSQMESIPATSEAASPPAILVTVESPEMDLNDFVKTVLVDEDARPEEKELRKTKASSVISDEIKISSTEIERIYSSQSQVEDQESLQTCEQNEMLSIGIEEVFDILPLFGVLQPHSSHQISFTFYGHANIIAQAKALCEVEEGPTYEITLKGEASLVNYSFDTKDIHYGLQLFDHVTEREITLTNMGKVGFEFKVLTDHQSSPDNLLPGVPLILPVSGFISSHQEQVLKVYYLPGVPEVFKRSFQIQIAHLDPENITLSGEGIFPQICLDLPRNLTANEKYEMFLNQARKNTDKEYNKCEMLDHFDIITEEVPEDEPAEVSAHLQMEVERLIVQSYVLEHQKTTTPDPMDDPCFSHRSRRKLAKIQLPEYILDFGYIILGEVRTHIIKIINTSHFPVSFHADKRVLHETGFSTELDRVKNLPHCETEIFEVRFDPQGANLPVGSKEVILPIKVVGGPTVHICLQAKVTIPTMTLSRGKVDFATIQCGQCLVETIQLSNHLQVPCEWFVQSQKPVDKLEKHMPKYLRQKLRAELKPKTRIFEIQPISGVLDPGEKSNVQVKFMPKEEKFYSQTLVFQIAQSAQKLTLLARGQGLEPRLEFSPSVLDLGPLLLCAPGDEAEVIVKNPCNFPIEFYSLEFDQQYLIEEKILRKLKGYDSYNTLLLPPRNPGEKLPPELYEYFKEIKKSKEEQMRAKYLENLAQENEEEDITSSDQGTSNSTKRTSLSRGISVTSNLEEWHALLVESKTYLEEEEDEESLEKIIFQTDKLQSIDSHSMEEVGEVENNPVSKAIARHLGIDISAEGRLAKNRKGIAIIIHGTPLSGKSANAVSVAKYYNAACLSIDSIVLEAVANSNNIPGIRARELCIRAAIEQSVKEGEEAAQEAAVGQNVIGQGRLSTDTLGKLASEMTLVAPEIKPGKSVRGSVVITKSKADSHGSGSQKQHHSHQSETPQISSSPLPPGPIHRWLSVSPSVGGETGLMSCVLPDELLVQILAERIQLSDCYRGVVFDGLDTLFAQNAAAALLCLLKAIGSREHIYILNMAQDYAAMKAQEKAKKEQEERKHKGALEKEKERLQNMDEEEYDALTEEEKLTFDRGIQQALRERKKREQERLAKEMQEKKLQQELERQKEEDELKRRVKKGKQGPIKEEPPMKKSQAANKQVPPLTKVDVKMETIERKISVREQTMSEKEELNKKKRNMGDVSMHGLPLVQDQEDSEGDNSKDPDKQLAPKFKTYELTLKDVQNILMYWDRKQGVQLPPAGMEEAPHEPDDQRQVPLGGRRGRKDRERERLEKERTEKERLEREKAERERLEKLRALEERSDWEGEGEEDHEGKKEKDLGVPFLDIQTPDFEGLSWKQALESDKLPKGEQILDILGLGASGPPIPPPALFSIVSYPVKRPPLTMTDDLEHFVFVIPPSEDISLDEKKEMEIESDFLATTNTTKAQEEQTSSSKGGKQKMKEKIDQVFEIQKDKRHMALNRKVLSGEPAGTISQLSDTDLDNFNGQHSQEKFTRLNHFRWIVPANGEVTLQVHFSSDEFGNFDQTFNFEILGTCCQYQLYCRGICTYPYICQDPKVVFPQRKMDMKTNEVIFKKYVMSTETYYFGPLLCGKSRDKYKSSLFPGNMETLTILNTSLMVVEASFYFQNDVKANTYFLEPNTMVLKPNEKQILNVWAYPTSVGVFEDSIVCCINDNPEPAIFQLSCQGIRPELELEPRQLHFDRLLLHRQESRVVLLRNVTLLPVAWRITSLEHLGDDFTVSLMQGTIPPEAEYGLHLYFQPTKPVNIKKAIRLEVLDAENLLGVVQIENIMVFAEAYDIALDITFPKGAEGGLDFGIVRVTEEAKQPLQLKNRGKYEIAFSFSVDSVGISTPNINSMISVQPKKGSLTPTEKPTNVQVFFHAKKEVKIEHQPVLRCQIIEPNISEGGEIIASIPIKFSANAVYSKYNITPSSVINFGALICGTRKSTTFTIENQGVTDFKFALYKLTGESPIHQKKAASHVRHARSRESESFYKTGSSRAAKFSDTIQKEVTTTGQARFAHGMFTVYPGFGSIPSGGQQVINVDCVADAMGKCEEFIAIDISGRDPAVHPAGILYTLLAEACLPAFVTENNALIFEEHQICTSANLHHILQTIESGGLFVEDENKFIFCNVLVGRQAKARFKISNVGKITCDVNIVVRPISNKPFARIVDIFEVEPSKMCIASHSHAFATVSFTPQIMQNYQCIFEATLDGLPSTLAKSRGLVFDIAGEGNLPRVTVVRPVLHNQYGNPLLLFKRLLLGHSEKLPLILKNNGVLPAQLHVDLQDELGVFSLKGRPTTAYIYITEENKPHVKAKKAHTASLVVSPGDTAEFDVVFHSQKVGRMRGIIHLSVINNQYEETSIHMVGEGYEDDITLDNIHGLVAPTSQEDISISEFTEIIEDNDMEDLVAAALVDHIQFGDCHIGHSYNASFTVTNHSQVNLIRFEWPVSATIAFSPQMGHLHPGCAKDIVVTMKSDVPINLKNMRIRCKLSRIMFQLPADQVPDWDDRMHTVKWVDVPRNMPGTFTTKRKVIETDPEPAHSVLEENYQELQLQISANVDFASYHCQARDVRFKETLVYQTRVFEFDVINSGRVQLEFSWVSEDTSKAVSFAKPDHQGSAQKDQLSQGTMHTGSTLDSTMDHWAEGSPQPFSVEPSSGIVPVGKIQKFKVKFSPLDIGDFESNLFCQIPNLPPGEQGPVLVAKGRSTLPICHFDLKDSDYISGHQRNPELRGSSGGALDPNTRVIEFTTVGIGGKNLRTFTILNPTNSTYSFCWISEEIESLQNPAAFTCLTEKGFIHPEKKAEIVFQFTPFHLGITESSWTFLIPEHNITVPFLLVGKTTEPLISLNKSHLNFSSLLIGREARETVQIINKEEQGFDFSFQDNSRYSEGFSNSLLVCPMEGWIPPLSRFPIDIFFTPKQEGDVNFNLICNVEKKVHPVTLNVKAEGYTMNVEIKCKDRTGSITLLTPNQTNIINFYEVELNECVQCEFNFINTGKFTFSFQAQLCGSKTLLQYLEFSPIDSTVDVGQSVHATLSFQPLKKCVLTDLELIIKISHGPTFMCNISGCAVSPAIHFSFTSYNFGTCFIYQAGMPPYKQTLVITNKEETPMSIDCLYTNTTHLEVNSRVDVVKPGNTLEIPITFYPRESINYQELIPFEINGLSQQTVEIKGKGTKMKILVLDPANRIVKLGAVLPGQVVKRTVSIMNNSLAQLTFNQSILFTIPELQEPKVLTLAPFHNITLKPKEVCKLEVIFAPKKRVPPFSEEVFMECMGLLRPLFLLSGCCQALEISLDQEHIPFGPVVYQTQATRRILMMNTGDVGARFKWDIKKFEPHFSISPEEGYITSGMEVSFEVTYHPTEVGKESLCKNILCYIQGGSPLSLTLSGVCVGPPAVKEVVNFTCQVRSKHTQTILLSNRTNQTWNLHPIFEGEHWEGPEFITLEAHQQNKPYEITYRPRTMNLENRKHQGTLFFPLPDGTGWLYALHGTSELPKAVANIYREVPCKTPYTELLPITNWLNKPQRFRVIVEILKPEKPDLSITMKGLDYIDVLSGSKKDYKLNFFSHKEGTYAAKVIFRNEVTNEFLYYNVSFRVIPSGIIKTIEMVTPVRQVASASIKLENPLPYSVTFSTECRMPDIALPSQFVVPANSEGTFSFEFQPLKAGETFGRLTLHNTDLGYYQYELYLKATPALPEKPVHFQTVLGSSQIILVKFINYTRQRTEYYCRTDCTDFHAEKLINAAPGGQGGTEASVEVLFEPSHLGETKGILILSSLAGGEYIIPLFGMALPPKPQGPFSIRAGYSIIIPFKNVFYHMVTFSIIVDNPAFTIRAGESVRPKKINNITVSFEGNPSGSKTPITTKLTVSCPPGEGSETGVKWVYYLKGITL

SEQ ID NO: 39144 - protein, 725 aa, Homo sapiens; identical to SEQ ID NO: 39130
  Payload ID: 7843
  Gene Symbol: HYDIN
  Gene Name: HYDIN, axonemal central pair apparatus protein
  ENSP ID: ENSP00000288168

SEQ ID NO: 39145 - protein, 1017 aa, Homo sapiens; identical to SEQ ID NO: 39137
  Payload ID: 7843
  Gene Symbol: HYDIN
  Gene Name: HYDIN, axonemal central pair apparatus protein
  Uniprot ID: Q4G0P3
  ENSP ID: ENSP00000314736

SEQ ID NO: 39146 - protein, 5121 aa, Homo sapiens; identical to SEQ ID NO: 39143
  Payload ID: 7843
  Gene Symbol: HYDIN
  Gene Name: HYDIN, axonemal central pair apparatus protein
  Uniprot ID: Q4G0P3
  ENSP ID: ENSP00000377197

SEQ ID NO: 39147 - protein, 940 aa, Homo sapiens; identical to SEQ ID NO: 39136
  Payload ID: 7843
  Gene Symbol: HYDIN
  Gene Name: HYDIN, axonemal central pair apparatus protein
  Uniprot ID: Q4G0P3
  ENSP ID: ENSP00000437341

SEQ ID NO: 39148 - protein, 204 aa, Homo sapiens; identical to SEQ ID NO: 39141
  Payload ID: 7843
  Gene Symbol: HYDIN
  Gene Name: HYDIN, axonemal central pair apparatus protein
  ENSP ID: ENSP00000437598
  MOD_RES (1)..(1): Any amino acid

SEQ ID NO: 39149 - protein, 36 aa, Homo sapiens; identical to SEQ ID NO: 39131
  Payload ID: 7843
  Gene Symbol: HYDIN
  Gene Name: HYDIN, axonemal central pair apparatus protein
  ENSP ID: ENSP00000440202

SEQ ID NO: 39150 - protein, 39 aa, Homo sapiens; identical to SEQ ID NO: 39132
  Payload ID: 7843
  Gene Symbol: HYDIN
  Gene Name: HYDIN, axonemal central pair apparatus protein
  ENSP ID: ENSP00000443525

SEQ ID NO: 39151 - protein, 950 aa, Homo sapiens; identical to SEQ ID NO: 39135
  Payload ID: 7843
  Gene Symbol: HYDIN
  Gene Name: HYDIN, axonemal central pair apparatus protein
  Uniprot ID: Q4G0P3
  ENSP ID: ENSP00000444970

SEQ ID NO: 39152 - protein, 127 aa, Homo sapiens; identical to SEQ ID NO: 39142
  Payload ID: 7843
  Gene Symbol: HYDIN
  Gene Name: HYDIN, axonemal central pair apparatus protein
  ENSP ID: ENSP00000446122
  MOD_RES (1)..(1): Any amino acid

SEQ ID NO: 39153 - protein, 113 aa, Homo sapiens; identical to SEQ ID NO: 39138
  Payload ID: 7843
  Gene Symbol: HYDIN
  Gene Name: HYDIN, axonemal central pair apparatus protein
  ENSP ID: ENSP00000462031
  MOD_RES (1)..(1): Any amino acid

SEQ ID NO: 39154 - protein, 43 aa, Homo sapiens; identical to SEQ ID NO: 39129
  Payload ID: 7843
  Gene Symbol: HYDIN
  Gene Name: HYDIN, axonemal central pair apparatus protein
  ENSP ID: ENSP00000462711
  MOD_RES (1)..(1): Any amino acid

SEQ ID NO: 39155 - protein, 151 aa, Homo sapiens; identical to SEQ ID NO: 39128
  Payload ID: 7843
  Gene Symbol: HYDIN
  Gene Name: HYDIN, axonemal central pair apparatus protein
  ENSP ID: ENSP00000463093
  MOD_RES (1)..(1): Any amino acid

SEQ ID NO: 39156 - protein, 49 aa, Homo sapiens; identical to SEQ ID NO: 39140
  Payload ID: 7843
  Gene Symbol: HYDIN
  Gene Name: HYDIN, axonemal central pair apparatus protein
  ENSP ID: ENSP00000463350
  MOD_RES (1)..(1): Any amino acid

SEQ ID NO: 39157 - protein, 528 aa, Homo sapiens; identical to SEQ ID NO: 39133
  Payload ID: 7843
  Gene Symbol: HYDIN
  Gene Name: HYDIN, axonemal central pair apparatus protein
  ENSP ID: ENSP00000463422

SEQ ID NO: 39158 - protein, 833 aa, Homo sapiens; identical to SEQ ID NO: 39134
  Payload ID: 7843
  Gene Symbol: HYDIN
  Gene Name: HYDIN, axonemal central pair apparatus protein
  ENSP ID: ENSP00000463767

SEQ ID NO: 39159 - protein, 82 aa, Homo sapiens; identical to SEQ ID NO: 39139
  Payload ID: 7843
  Gene Symbol: HYDIN
  Gene Name: HYDIN, axonemal central pair apparatus protein
  ENSP ID: ENSP00000479502
  MOD_RES (1)..(1): Any amino acid

SEQ ID NO: 39160 - protein, 273 aa, Homo sapiens
  Payload ID: 7844
  Gene Symbol: HVCN1
  Gene Name: hydrogen voltage gated channel 1
  Uniprot ID: Q96D96
  ENSP ID: ENSP00000242607
MATWDEKAVTRRAKVAPAERMSKFLRHFTVVGDDYHAWNINYKKWENEEEEEEEEQPPPTPVSGEEGRAAAPDVAPAPGPAPRAPLDFRGMLRKLFSSHRFQVIIICLVVLDALLVLAELILDLKIIQPDKNNYAAMVFHYMSITILVFFMMEIIFKLFVFRLEFFHHKFEILDAVVVVVSFILDIVLLFQEHQFEALGLLILLRLWRVARIINGIIISVKTRSERQLLRLKQMNVQLAAKIQHLEFSCSEKEQEIERLNKLLRQHGLLGEVN

SEQ ID NO: 39161 - protein, 273 aa, Homo sapiens; identical to SEQ ID NO: 39160
  Payload ID: 7844
  Gene Symbol: HVCN1
  Gene Name: hydrogen voltage gated channel 1
  Uniprot ID: Q96D96
  ENSP ID: ENSP00000349181

SEQ ID NO: 39162 - protein, 253 aa, Homo sapiens
  Payload ID: 7844
  Gene Symbol: HVCN1
  Gene Name: hydrogen voltage gated channel 1
  Uniprot ID: Q96D96
  ENSP ID: ENSP00000412052
MSKFLRHFTVVGDDYHAWNINYKKWENEEEEEEEEQPPPTPVSGEEGRAAAPDVAPAPGPAPRAPLDFRGMLRKLFSSHRFQVIIICLVVLDALLVLAELILDLKIIQPDKNNYAAMVFHYMSITILVFFMMEIIFKLFVFRLEFFHHKFEILDAVVVVVSFILDIVLLFQEHQFEALGLLILLRLWRVARIINGIIISVKTRSERQLLRLKQMNVQLAAKIQHLEFSCSEKEQEIERLNKLLRQHGLLGEVN

SEQ ID NO: 39163 - protein, 78 aa, Homo sapiens
  Payload ID: 7844
  Gene Symbol: HVCN1
  Gene Name: hydrogen voltage gated channel 1
  ENSP ID: ENSP00000447227
MATWDEKAVTRRAKVAPAERMSKFLRHFTVVGDDYHAWNINYKKWENEEEEEEEEQPPPTPVSGEEGRAAAPDVAPAP

SEQ ID NO: 39164 - protein, 79 aa, Homo sapiens
  Payload ID: 7844
  Gene Symbol: HVCN1
  Gene Name: hydrogen voltage gated channel 1
  ENSP ID: ENSP00000448379
MATWDEKAVTRRAKVAPAERMSKFLRHFTVVGDDYHAWNINYKKWENEEEEEEEEQPPPTPVSGHHHLLGGSGCPPGAC

SEQ ID NO: 39165 - protein, 255 aa, Homo sapiens
  Payload ID: 7844
  Gene Symbol: HVCN1
  Gene Name: hydrogen voltage gated channel 1
  Uniprot ID: Q96D96
  ENSP ID: ENSP00000449601
MATWDEKAVTRRAKVAPAERMSKFLRHFTVVGDDYHAWNINYKKWENEEEEEEEEQPPPTPVSGEEGRAAAPDVAPAPGPAPRAPLDFRGMLRKLFSSHRFQVIIICLVVLDALLVLAELILDLKIIQPDKNNYAAMVFHYMSITILVFFMMEIIFKLFVFRLEFFHHKFEILDAVVVVVSFILDIVLLFQEHQFEALGLLILLRLWRVARIINGIIISVKTRSERQLLRLKQMNVQLAAKIQHLEFSCSEKPLD

SEQ ID NO: 39166 - protein, 214 aa, Homo sapiens
  Payload ID: 7844
  Gene Symbol: HVCN1
  Gene Name: hydrogen voltage gated channel 1
  ENSP ID: ENSP00000450106
MATWDEKAVTRRAKVAPAERMSKFLRHFTVVGDDYHAWNINYKKWENEEEEEEEEQPPPTPVSGEEGRAAAPDVAPAPGPAPRAPLDFRGMLRKLFSSHRFQVIIICLVVLDALLVLAELILDLKIIQPDKNNYAAMVFHYMSITILVFFMMEIIFKLFVFRLEFFHHKFEILDAVVVVVSFILDIVLLFQEHQFEALGLLILLRLWRVARIIN

SEQ ID NO: 39167 - protein, 273 aa, Homo sapiens; identical to SEQ ID NO: 39160
  Payload ID: 7844
  Gene Symbol: HVCN1
  Gene Name: hydrogen voltage gated channel 1
  Uniprot ID: Q96D96
  ENSP ID: ENSP00000479812

SEQ ID NO: 39168 - protein, 299 aa, Homo sapiens
  Payload ID: 7845
  Gene Symbol: HYLS1
  Gene Name: hydrolethalus syndrome 1
  Uniprot ID: Q96M11
  ENSP ID: ENSP00000348815
MEELLPDGQIWANMDPEERMLAAATAFTHICAGQGEGDVRREAQSIQYDPYSKASVAPGKRPALPVQLQYPHVESNVPSETVSEASQRLRKPVMKRKVLRRKPDGEVLVTDESIISESESGTENDQDLWDLRQRLMNVQFQEDKESSFDVSQKFNLPHEYQGISQDQLICSLQREGMGSPAYEQDLIVASRPKSFILPKLDQLSRNRGKTDRVARYFEYKRDWDSIRLPGEDHRKELRWGVREQMLCRAEPQSKPQHIYVPNNYLVPTEKKRSALRWGVRCDLANGVIPRKLPFPLSPS

SEQ ID NO: 39169 - protein, 299 aa, Homo sapiens; identical to SEQ ID NO: 39168
  Payload ID: 7845
  Gene Symbol: HYLS1
  Gene Name: hydrolethalus syndrome 1
  Uniprot ID: Q96M11
  ENSP ID: ENSP00000414884

SEQ ID NO: 39170 - protein, 299 aa, Homo sapiens; identical to SEQ ID NO: 39168
  Payload ID: 7845
  Gene Symbol: HYLS1
  Gene Name: hydrolethalus syndrome 1
  Uniprot ID: Q96M11
  ENSP ID: ENSP00000436833

SEQ ID NO: 39171 - protein, 370 aa, Homo sapiens
  Payload ID: 7846
  Gene Symbol: HAO1
  Gene Name: hydroxyacid oxidase (glycolate oxidase) 1
  Uniprot ID: Q9UJM8
  ENSP ID: ENSP00000368066
MLPRLICINDYEQHAKSVLPKSIYDYYRSGANDEETLADNIAAFSRWKLYPRMLRNVAETDLSTSVLGQRVSMPICVGATAMQRMAHVDGELATVRACQSLGTGMMLSSWATSSIEEVAEAGPEALRWLQLYIYKDREVTKKLVRQAEKMGYKAIFVTVDTPYLGNRLDDVRNRFKLPPQLRMKNFETSTLSFSPEENFGDDSGLAAYVAKAIDPSISWEDIKWLRRLTSLPIVAKGILRGDDAREAVKHGLNGILVSNHGARQLDGVPATIDVLPEIVEAVEGKVEVFLDGGVRKGTDVLKALALGAKAVFVGRPIVWGLAFQGEKGVQDVLEILKEEFRLAMALSGCQNVKVIDKTLVRKNPLAVSKI

SEQ ID NO: 39172 - protein, 351 aa, Homo sapiens
  Payload ID: 7847
  Gene Symbol: HAO2
  Gene Name: hydroxyacid oxidase 2 (long chain)
  Uniprot ID: Q9NYQ3
  ENSP ID: ENSP00000316339
MSLVCLTDFQAHAREQLSKSTRDFIEGGADDSITRDDNIAAFKRIRLRPRYLRDVSEVDTRTTIQGEEISAPICIAPTGFHCLVWPDGEMSTARAAQAAGICYITSTFASCSLEDIVIAAPEGLRWFQLYVHPDLQLNKQLIQRVESLGFKALVITLDTPVCGNRRHDIRNQLRRNLTLTDLQSPKKGNAIPYFQMTPISTSLCWNDLSWFQSITRLPIILKGILTKEDAELAVKHNVQGIIVSNHGGRQLDEVLASIDALTEVVAAVKGKIEVYLDGGVRTGNDVLKALALGAKCIFLGRPILWGLACKGEHGVKEVLNILTNEFHTSMALTGCRSVAEINRNLVQFSRL

SEQ ID NO: 39173 - protein, 364 aa, Homo sapiens
  Payload ID: 7847
  Gene Symbol: HAO2
  Gene Name: hydroxyacid oxidase 2 (long chain)
  Uniprot ID: Q9NYQ3
  ENSP ID: ENSP00000354314
MEDKMWSECEGPEMSLVCLTDFQAHAREQLSKSTRDFIEGGADDSITRDDNIAAFKRIRLRPRYLRDVSEVDTRTTIQGEEISAPICIAPTGFHCLVWPDGEMSTARAAQAAGICYITSTFASCSLEDIVIAAPEGLRWFQLYVHPDLQLNKQLIQRVESLGFKALVITLDTPVCGNRRHDIRNQLRRNLTLTDLQSPKKGNAIPYFQMTPISTSLCWNDLSWFQSITRLPIILKGILTKEDAELAVKHNVQGIIVSNHGGRQLDEVLASIDALTEVVAAVKGKIEVYLDGGVRTGNDVLKALALGAKCIFLGRPILWGLACKGEHGVKEVLNILTNEFHTSMALTGCRSVAEINRNLVQFSRL

SEQ ID NO: 39174 - protein, 186 aa, Homo sapiens
  Payload ID: 7847
  Gene Symbol: HAO2
  Gene Name: hydroxyacid oxidase 2 (long chain)
  ENSP ID: ENSP00000393955
MSLVCLTDFQAHAREQLSKSTRDFIEGGADDSITRDDNIAAFKRIRLRPRYLRDVSEVDTRTTIQGEEISAPICIAPTGFHCLVWPDGEMSTARAPEGLRWFQLYVHPDLQLNKQLIQRVESLGFKALVITLDTPVCGNRRHDIRNQLRRNLTLTDLQSPKKGNAIPYFQMTPISTSLCWNDLSWF

SEQ ID NO: 39175 - protein, 351 aa, Homo sapiens; identical to SEQ ID NO: 39172
  Payload ID: 7847
  Gene Symbol: HAO2
  Gene Name: hydroxyacid oxidase 2 (long chain)
  Uniprot ID: Q9NYQ3
  ENSP ID: ENSP00000483507

SEQ ID NO: 39176 - protein, 314 aa, Homo sapiens
  Payload ID: 7848
  Gene Symbol: HADH
  Gene Name: hydroxyacyl-CoA dehydrogenase
  Uniprot ID: Q16836
  ENSP ID: ENSP00000312288
MAFVTRQFMRSVSSSSTASASAKKIIVKHVTVIGGGLMGAGIAQVAAATGHTVVLVDQTEDILAKSKKGIEESLRKVAKKKFAENLKAGDEFVEKTLSTIATSTDAASVVHSTDLVVEAIVENLKVKNELFKRLDKFAAEHTIFASNTSSLQITSIANATTRQDRFAGLHFFNPVPVMKLVEVIKTPMTSQKTFESLVDFSKALGKHPVSCKDTPGFIVNRLLVPYLMEAIRLYERGDASKEDIDTAMKLGAGYPMGPFELLDYVGLDTTKFIVDGWHEMDAENPLHQPSPSLNKLVAENKFGKKTGEGFYKYK

SEQ ID NO: 39177 - protein, 390 aa, Homo sapiens
  Payload ID: 7848
  Gene Symbol: HADH
  Gene Name: hydroxyacyl-CoA dehydrogenase
  ENSP ID: ENSP00000385638
MGRAGLEAPPPPCGVTGTPGARGLQGRVGPRPQSLAFRGCPPRASSLPGSPRCRRRCHTMAFVTRQFMRSVSSSSTASASAKKIIVKHVTVIGGGLMGAGIAQVAAATGHTVVLVDQTEDILAKSKKGIEESLRKVAKKKFAENLKAGDEFVEKTLSTIATSTDAASVVHSTDLVVEAIVENLKVKNELFKRLDKFAAEHTIFASNTSSLQITSIANATTRQDRFAGLHFFNPVPVMKLVEVIKTPMTSQKTFESLVDFSKALGKHPVSCKDTPGFIVNRLLVPYLMEAIRLYERDFQTCGDSNSGLGFSLKGDASKEDIDTAMKLGAGYPMGPFELLDYVGLDTTKFIVDGWHEMDAENPLHQPSPSLNKLVAENKFGKKTGEGFYKYK

SEQ ID NO: 39178 - protein, 52 aa, Homo sapiens
  Payload ID: 7848
  Gene Symbol: HADH
  Gene Name: hydroxyacyl-CoA dehydrogenase
  ENSP ID: ENSP00000425254
MAFVTRQFMRSVSSSSTASASAKKIIVKHVTVIGGGLMGAGIAQERGWPQQQ

SEQ ID NO: 39179 - protein, 318 aa, Homo sapiens
  Payload ID: 7848
  Gene Symbol: HADH
  Gene Name: hydroxyacyl-CoA dehydrogenase
  ENSP ID: ENSP00000425952
MCRTALGVTTLQDLGVCWRKEHDPAEMLRVGRAELGGWKPSWEAIVKEVAAATGHTVVLVDQTEDILAKSKKGIEESLRKVAKKKFAENLKAGDEFVEKTLSTIATSTDAASVVHSTDLVVEAIVENLKVKNELFKRLDKFAAEHTIFASNTSSLQITSIANATTRQDRFAGLHFFNPVPVMKLVEVIKTPMTSQKTFESLVDFSKALGKHPVSCKDTPGFIVNRLLVPYLMEAIRLYERGDASKEDIDTAMKLGAGYPMGPFELLDYVGLDTTKFIVDGWHEMDAENPLHQPSPSLNKLVAENKFGKKTGEGFYKYK

SEQ ID NO: 39180 - protein, 331 aa, Homo sapiens
  Payload ID: 7848
  Gene Symbol: HADH
  Gene Name: hydroxyacyl-CoA dehydrogenase
  Uniprot ID: Q16836
  ENSP ID: ENSP00000474560
MAFVTRQFMRSVSSSSTASASAKKIIVKHVTVIGGGLMGAGIAQVAAATGHTVVLVDQTEDILAKSKKGIEESLRKVAKKKFAENLKAGDEFVEKTLSTIATSTDAASVVHSTDLVVEAIVENLKVKNELFKRLDKFAAEHTIFASNTSSLQITSIANATTRQDRFAGLHFFNPVPVMKLVEVIKTPMTSQKTFESLVDFSKALGKHPVSCKDTPGFIVNRLLVPYLMEAIRLYERDFQTCGDSNSGLGFSLKGDASKEDIDTAMKLGAGYPMGPFELLDYVGLDTTKFIVDGWHEMDAENPLHQPSPSLNKLVAENKFGKKTGEGFYKYK

SEQ ID NO: 39181 - protein, 318 aa, Homo sapiens; identical to SEQ ID NO: 39179
  Payload ID: 7848
  Gene Symbol: HADH
  Gene Name: hydroxyacyl-CoA dehydrogenase
  ENSP ID: ENSP00000486771

SEQ ID NO: 39182 - protein, 763 aa, Homo sapiens
  Payload ID: 7849
  Gene Symbol: HADHA
  Gene Name: hydroxyacyl-CoA dehydrogenase/3-ketoacyl-CoA thiolase/enoyl-CoA hydratase (trifunctional protein), alpha subunit
  Uniprot ID: P40939
  ENSP ID: ENSP00000370023
MVACRAIGILSRFSAFRILRSRGYICRNFTGSSALLTRTHINYGVKGDVAVVRINSPNSKVNTLSKELHSEFSEVMNEIWASDQIRSAVLISSKPGCFIAGADINMLAACKTLQEVTQLSQEAQRIVEKLEKSTKPIVAAINGSCLGGGLEVAISCQYRIATKDRKTVLGTPEVLLGALPGAGGTQRLPKMVGVPAALDMMLTGRSIRADRAKKMGLVDQLVEPLGPGLKPPEERTIEYLEEVAITFAKGLADKKISPKRDKGLVEKLTAYAMTIPFVRQQVYKKVEEKVRKQTKGLYPAPLKIIDVVKTGIEQGSDAGYLCESQKFGELVMTKESKALMGLYHGQVLCKKNKFGAPQKDVKHLAILGAGLMGAGIAQVSVDKGLKTILKDATLTALDRGQQQVFKGLNDKVKKKALTSFERDSIFSNLTGQLDYQGFEKADMVIEAVFEDLSLKHRVLKEVEAVIPDHCIFASNTSALPISEIAAVSKRPEKVIGMHYFSPVDKMQLLEIITTEKTSKDTSASAVAVGLKQGKVIIVVKDGPGFYTTRCLAPMMSEVIRILQEGVDPKKLDSLTTSFGFPVGAATLVDEVGVDVAKHVAEDLGKVFGERFGGGNPELLTQMVSKGFLGRKSGKGFYIYQEGVKRKDLNSDMDSILASLKLPPKSEVSSDEDIQFRLVTRFVNEAVMCLQEGILATPAEGDIGAVFGLGFPPCLGGPFRFVDLYGAQKIVDRLKKYEAAYGKQFTPCQLLADHANSPNKKFYQ

SEQ ID NO: 39183 - protein, 250 aa, Homo sapiens
  Payload ID: 7849
  Gene Symbol: HADHA
  Gene Name: hydroxyacyl-CoA dehydrogenase/3-ketoacyl-CoA thiolase/enoyl-CoA hydratase (trifunctional protein), alpha subunit
  ENSP ID: ENSP00000438039
EKTSKDTSASAVAVGLKQGKVIIVVKDGPGFYTTRCLAPMMSEVIRILQEGVDPKKLDSLTTSFGFPVGAATLVDEVGVDVAKHVAEDLGKVFGERFGGGNPELLTQMVSKGFLGRKSGKGFYIYQEGVKRKDLNSDMDSILASLKLPPKSEVSSDEDIQFRLVTRFVNEAVMCLQEGILATPAEGDIGAVFGLGFPPCLGGWSRRLGRKLTLAWSPCCVSFNEVLFLYSGPFRFVDLYGAQKIVDRLKK

SEQ ID NO: 39184 - protein, 474 aa, Homo sapiens
  Payload ID: 7850
  Gene Symbol: HADHB
  Gene Name: hydroxyacyl-CoA dehydrogenase/3-ketoacyl-CoA thiolase/enoyl-CoA hydratase (trifunctional protein), beta subunit
  Uniprot ID: P55084
  ENSP ID: ENSP00000325136
MTILTYPFKNLPTASKWALRFSIRPLSCSSQLRAAPAVQTKTKKTLAKPNIRNVVVVDGVRTPFLLSGTSYKDLMPHDLARAALTGLLHRTSVPKEVVDYIIFGTVIQEVKTSNVAREAALGAGFSDKTPAHTVTMACISANQAMTTGVGLIASGQCDVIVAGGVELMSDVPIRHSRKMRKLMLDLNKAKSMGQRLSLISKFRFNFLAPELPAVSEFSTSETMGHSADRLAAAFAVSRLEQDEYALRSHSLAKKAQDEGLLSDVVPFKVPGKDTVTKDNGIRPSSLEQMAKLKPAFIKPYGTVTAANSSFLTDGASAMLIMAEEKALAMGYKPKAYLRDFMYVSQDPKDQLLLGPTYATPKVLEKAGLTMNDIDAFEFHEAFSGQILANFKAMDSDWFAENYMGRKTKVGLPPLEKFNNWGGSLSLGHPFGATGCRLVMAAANRLRKEGGQYGLVAACAAGGQGHAMIVEAYPK

SEQ ID NO: 39185 - protein, 351 aa, Homo sapiens
  Payload ID: 7850
  Gene Symbol: HADHB
  Gene Name: hydroxyacyl-CoA dehydrogenase/3-ketoacyl-CoA thiolase/enoyl-CoA hydratase (trifunctional protein), beta subunit
  ENSP ID: ENSP00000385411
MTILTYPFKNLPTASKWALRFSIRPLSCSSQLRAAPAVQTKTKKTLAKPNIRNVVVVDGVRTPFLLSGTSYKDLMPHDLARAALTGLLHRTSVPKEVVDYIIFGTVIQEVKTSNVAREAALGAGFSDKTPAHTVTMACISANQAMTTGKDTVTKDNGIRPSSLEQMAKLKPAFIKPYGTVTAANSSFLTDGASAMLIMAEEKALAMGYKPKAYLRDFMYVSQDPKDQLLLGPTYATPKVLEKAGLTMNDIDAFEFHEAFSGQILANFKAMDSDWFAENYMGRKTKVGLPPLEKFNNWGGSLSLGHPFGATGCRLVMAAANRLRKEGGQYGLVAACAAGGQGHAMIVEAYPK

SEQ ID NO: 39186 - protein, 175 aa, Homo sapiens
  Payload ID: 7850
  Gene Symbol: HADHB
  Gene Name: hydroxyacyl-CoA dehydrogenase/3-ketoacyl-CoA thiolase/enoyl-CoA hydratase (trifunctional protein), beta subunit
  ENSP ID: ENSP00000404633
MTILTYPFKNLPTASKWALRFSIRPLSCSSQLRAAPAVQTKTKKTLAKPNIRNVVVVDGVRTPFLLSGTSYKDLMPHDLARAALTGLLHRTSVPKEVVDYIIFGTVIQEVKTSNVAREAALGAGFSDKTPAHTVTMACISANQAMTTGVGLIASGQCDVIVAGGVELMSDVPIRH

SEQ ID NO: 39187 - protein, 84 aa, Homo sapiens
  Payload ID: 7850
  Gene Symbol: HADHB
  Gene Name: hydroxyacyl-CoA dehydrogenase/3-ketoacyl-CoA thiolase/enoyl-CoA hydratase (trifunctional protein), beta subunit
  ENSP ID: ENSP00000413103
MTILTYPFKNLPTASKWALRFSIRPLSCSSQLRAAPAVQTKTKKTLAKPNIRNVVVVDGVRTPFLLSGTSYKDLMPHDLARAAL

SEQ ID NO: 39188 - protein, 149 aa, Homo sapiens
  Payload ID: 7850
  Gene Symbol: HADHB
  Gene Name: hydroxyacyl-CoA dehydrogenase/3-ketoacyl-CoA thiolase/enoyl-CoA hydratase (trifunctional protein), beta subunit
  ENSP ID: ENSP00000415300
MTILTYPFKNLPTASKWALRFSIRPLSCSSQLRAAPAVQTKTKKTLAKPNIRNVVVVDGVRTPFLLSGTSYKDLMPHDLARAALTGLLHRTSVPKEVVDYIIFGTVIQEVKTSNVAREAALGAGFSDKTPAHTVTMACISANQAMTTGV

SEQ ID NO: 39189 - protein, 452 aa, Homo sapiens
  Payload ID: 7850
  Gene Symbol: HADHB
  Gene Name: hydroxyacyl-CoA dehydrogenase/3-ketoacyl-CoA thiolase/enoyl-CoA hydratase (trifunctional protein), beta subunit
  Uniprot ID: P55084
  ENSP ID: ENSP00000442665
MTLVSGWLLYGWIIAVQTKTKKTLAKPNIRNVVVVDGVRTPFLLSGTSYKDLMPHDLARAALTGLLHRTSVPKEVVDYIIFGTVIQEVKTSNVAREAALGAGFSDKTPAHTVTMACISANQAMTTGVGLIASGQCDVIVAGGVELMSDVPIRHSRKMRKLMLDLNKAKSMGQRLSLISKFRFNFLAPELPAVSEFSTSETMGHSADRLAAAFAVSRLEQDEYALRSHSLAKKAQDEGLLSDVVPFKVPGKDTVTKDNGIRPSSLEQMAKLKPAFIKPYGTVTAANSSFLTDGASAMLIMAEEKALAMGYKPKAYLRDFMYVSQDPKDQLLLGPTYATPKVLEKAGLTMNDIDAFEFHEAFSGQILANFKAMDSDWFAENYMGRKTKVGLPPLEKFNNWGGSLSLGHPFGATGCRLVMAAANRLRKEGGQYGLVAACAAGGQGHAMIVEAYPK

SEQ ID NO: 39190 - protein, 459 aa, Homo sapiens
  Payload ID: 7850
  Gene Symbol: HADHB
  Gene Name: hydroxyacyl-CoA dehydrogenase/3-ketoacyl-CoA thiolase/enoyl-CoA hydratase (trifunctional protein), beta subunit
  ENSP ID: ENSP00000444295
MTILTYPFKNLPTASKWALRFSIRPLSCSSQLRAAPAVQTKTKKTLAKPNIRNVVVVDGVRTPFLLSGTSGLLHRTSVPKEVVDYIIFGTVIQEVKTSNVAREAALGAGFSDKTPAHTVTMACISANQAMTTGVGLIASGQCDVIVAGGVELMSDVPIRHSRKMRKLMLDLNKAKSMGQRLSLISKFRFNFLAPELPAVSEFSTSETMGHSADRLAAAFAVSRLEQDEYALRSHSLAKKAQDEGLLSDVVPFKVPGKDTVTKDNGIRPSSLEQMAKLKPAFIKPYGTVTAANSSFLTDGASAMLIMAEEKALAMGYKPKAYLRDFMYVSQDPKDQLLLGPTYATPKVLEKAGLTMNDIDAFEFHEAFSGQILANFKAMDSDWFAENYMGRKTKVGLPPLEKFNNWGGSLSLGHPFGATGCRLVMAAANRLRKEGGQYGLVAACAAGGQGHAMIVEAYPK

SEQ ID NO: 39191 - protein, 260 aa, Homo sapiens [sequence omitted]

SEQ ID NO: 39192 - protein, 308 aa, Homo sapiens
  Payload ID: 7851
  Gene Symbol: HAGH
  Gene Name: hydroxyacylglutathione hydrolase
  Uniprot ID: Q16775
  ENSP ID: ENSP00000380514
MVVGRGLLGRRSLAALGAACARRGLGPALLGVFCHTDLRKNLTVDEGTMKVEVLPALTDNYMYLVIDDETKEAAIVDPVQPQKVVDAARKHGVKLTTVLTTHHHWDHAGGNEKLVKLESGLKVYGGDDRIGALTHKITHLSTLQVGSLNVKCLATPCHTSGHICYFVSKPGGSEPPAVFTGDTLFVAGCGKFYEGTADEMCKALLEVLGRLPPDTRVYCGHEYTINNLKFARHVEPGNAAIREKLAWAKEKYSIGEPTVPSTLAEEFTYNPFMRVREKTVQQHAGETDPVTTMRAVRREKDQFKMPRD

SEQ ID NO: 39193 - protein, 236 aa, Homo sapiens
  Payload ID: 7851
  Gene Symbol: HAGH
  Gene Name: hydroxyacylglutathione hydrolase
  Uniprot ID: Q16775
  ENSP ID: ENSP00000406552
MVVGRGLLGRRSLAALGAACARRGLGPALLGVFCHTDLRKNLTVDEGTMKVEVLPALTDNYMYLVIDDETKEAAIVDPVQPQKVVDAARKHGVKLTTVLTTHHHWDHAGGNEKLVKLESGLKVYGGDDRIGALTHKITHLSTLQVTPCLWLAAGSSMKGLRMRCVKLCWRSWAGSPRTQESTVATSTPSTTSSLHATWSPAMPPSGRSWPGPRRSTASGSPQCHPPWQRSLPTTPS

SEQ ID NO: 39194 - protein, 239 aa, Homo sapiens
  Payload ID: 7851
  Gene Symbol: HAGH
  Gene Name: hydroxyacylglutathione hydrolase
  ENSP ID: ENSP00000455355
  MOD_RES (1)..(1): Any amino acid
XKEAAIVDPVQPQKVVDAARKHGVKLTTVLTTHHHWDHAGGNEKLVKLESGLKVYGGDDRIGALTHKITHLSTLQVGSLNVKCLATPCHTSGHICYFVSKPGGSEPPAVFTGDTLFVAGCGKFYEGTADEMCKALLEVLGRLPPDTRVYCGHEYTINNLKFARHVEPGNAAIREKLAWAKEKYSIGEPTVPSTLAEEFTYNPFMRVREKTVQQHAGETDPVTTMRAVRREKDQFKMPRD

SEQ ID NO: 39195 - protein, 258 aa, Homo sapiens
  Payload ID: 7851
  Gene Symbol: HAGH
  Gene Name: hydroxyacylglutathione hydrolase
  ENSP ID: ENSP00000455422
MKVEVLPALTDNYMYLVIDDETKEAAIVDPVQPQKVVDAARKHGVKLTTVLTTHHHWDHAGGNEKLVKLESGLKVYGGDDRIGALTHKITHLSTLQVGSLNVKCLATPCHTSGHICYFVSKPGGSEPPAVFTGDTLFVAGCGKFYEGTADEMCKALLEVLGRLPPDTRVYCGHEYTINNLKFARHVEPGNAAIREKLAWAKEKYSIGEPTVPSTLAEEFTYNPFMRVSGPGSSGGRGSAQPAARCWPPQGEDGAAARR

SEQ ID NO: 39196 - protein, 160 aa, Homo sapiens
  Payload ID: 7851
  Gene Symbol: HAGH
  Gene Name: hydroxyacylglutathione hydrolase
  ENSP ID: ENSP00000455970
MKVEVLPALTDNYMYLVIDDETKEAAIVDPVQPQKVVDAARKHGVKLTTVLTTHHHWDHAGGNEKLVKLESGLKVYGGDDRIGALTHKITHLSTLQVGSLNVKCLATPCHTSGHICYFVSKPGGSEPPAVFTGDTLFVAGCGKFYEGTADEMCKALLEVL

SEQ ID NO: 39197 - protein, 64 aa, Homo sapiens
  Payload ID: 7851
  Gene Symbol: HAGH
  Gene Name: hydroxyacylglutathione hydrolase
  ENSP ID: ENSP00000457986
LAWAKEKYSIGEPTVPSTLAEEFTYNPFMRVREKTVQQHAGETDPVTTMRAVRREKDQFKMPRD

SEQ ID NO: 39198 - protein, 290 aa, Homo sapiens
  Payload ID: 7852
  Gene Symbol: HAGHL
  Gene Name: hydroxyacylglutathione hydrolase-like
  Uniprot ID: Q6PII5
  ENSP ID: ENSP00000341952
MKVKVIPVLEDNYMYLVIEELTREAVAVDVAVPKRLLEIVGREGVSLTAVLTTHHHWDHARGNPELARLRPGLAVLGADERIFSLTRRLAHGEELRFGAIHVRCLLTPGHTAGHMSYFLWEDDCPDPPALFSGDALSVAGCGSCLEGSAQQMYQSLAELGTLPPETKVFCGHEHTLSNLEFAQKVEPCNDHVRAKLSWAKARPLSRRGKRVGGEGTGFGVGGALRQGLMVTGACGHSRRGMRMTCPLCRRLWARSASTTPSCGWREYGCCPGASTVTWTLRKASGDCVLG

SEQ ID NO: 39199 - protein, 282 aa, Homo sapiens
  Payload ID: 7852
  Gene Symbol: HAGHL
  Gene Name: hydroxyacylglutathione hydrolase-like
  Uniprot ID: Q6PII5
  ENSP ID: ENSP00000374353
MKVKVIPVLEDNYMYLVIEELTREAVAVDVAVPKRLLEIVGREGVSLTAVLTTHHHWDHARGNPELARLRPGLAVLGADERIFSLTRRLAHGEELRFGAIHVRCLLTPGHTAGHMSYFLWEDDCPDPPALFSGDALSVAGCGSCLEGSAQQMYQSLAELGTLPPETKVFCGHEHTLSNLEFAQKVEPCNDHVRAKLSWAKKRDEDDVPTVPSTLGEERLYNPFLRVAEEPVRKFTGKAVPADVLEALCKERARFEQAGEPRQPQARALLALQWGLLSAAPHD

SEQ ID NO: 39200 - protein, 202 aa, Homo sapiens
  Payload ID: 7852
  Gene Symbol: HAGHL
  Gene Name: hydroxyacylglutathione hydrolase-like
  Uniprot ID: Q6PII5
  ENSP ID: ENSP00000447170
MKVKVIPVLEDNYMYLVIEELTREAVAVDVAVPKRLLEIVGREGVSLTAVLTTHHHWDHARGNPELARLRPGLAVLGADERIFSLTRRLAHGEELRFGAIHVRCLLTPGHTAGHMSYFLWEDDCPDPPALFSGTRSAERAHPASRRPRPICSDPPSPARRRAVGGRLRLVPGGQRPADVPEPGRAGYPAPRDEGVLRPRAHA

SEQ ID NO: 39201 - protein, 84 aa, Homo sapiens
  Payload ID: 7852
  Gene Symbol: HAGHL
  Gene Name: hydroxyacylglutathione hydrolase-like
  ENSP ID: ENSP00000454712
MKVKVIPVLEDNYMYLVIEELTREAVAVDVAVPKRGPRAGKPGAGAASSRAGGAGRGRAHLLADAQAGARRGAAEGVLRPRAHA

SEQ ID NO: 39202 - protein, 192 aa, Homo sapiens
  Payload ID: 7852
  Gene Symbol: HAGHL
  Gene Name: hydroxyacylglutathione hydrolase-like
  ENSP ID: ENSP00000455616
MKVKVIPVLEDNYMYLVIEELTREAVAVDVAVPKRLLEIVGREGVSLTAVLTTHHHWDHARGNPELARLRPGLAVLGADERIFSLTRRLAHGEELRFGAIHVRCLLTPGHTAGHMSYFLWEDDCPDPPALFSGTRSAERAHPASRRPRPICSDPPSPARRRAVGGRLRLVPGGQRPADVPEPGRAGYPAPRD

SEQ ID NO: 39203 - protein, 108 aa, Homo sapiens
  Payload ID: 7852
  Gene Symbol: HAGHL
  Gene Name: hydroxyacylglutathione hydrolase-like
  ENSP ID: ENSP00000456104
MEGVGHRDRLCYRHSRPFQLLEIVGREGVSLTAVLTTHHHWDHARGNPELARLRPGLAVLGADERIFSLTRRLAHGEELRFGAIHVRCLLTPGHTAGHMSYFLWEDDC

SEQ ID NO: 39204 - protein, 227 aa, Homo sapiens
  Payload ID: 7852
  Gene Symbol: HAGHL
  Gene Name: hydroxyacylglutathione hydrolase-like
  ENSP ID: ENSP00000456390
MKVKVIPVLEDNYMYLVIEELTREAVAVDVAVPKRLLEIVGREGVSLTAVLTTHHHWDHARGNPELARLRPGLAVLGADERIFSLTRRLAHGEELRFGAIHVRCLLTPGHTAGHMSYFLWEDDCPDPPALFSGDALSVAGCGSCLEGSAQQMYQSLAELGTLPPETKVFCGHEHTLSNLEFAQKVEPCNDHVRAKLSWAKKRDEDDVPTVPSTLGEERLYNPFLRVA

SEQ ID NO: 39205 - protein, 200 aa, Homo sapiens
  Payload ID: 7852
  Gene Symbol: HAGHL
  Gene Name: hydroxyacylglutathione hydrolase-like
  ENSP ID: ENSP00000456978
MKVKVIPVLEDNYMYLVIEELTREAVAVDVAVPKRLLEIVGREGVSLTAVLTTHHHWDHARGNPELARLRPGLAVLGADERIFSLTRRLAHGEELRFGAIHVRCLLTPGHTAGHMSYFLWEDDCPDPPALFSGDALSVAGCGSCLEGSAQQMYQSLAELGTLPPETKVFCGHEHTLSNLEFAQKVEPCNDHVRAKLSWAK

SEQ ID NO: 39206 - protein, 202 aa, Homo sapiens; identical to SEQ ID NO: 39200
  Payload ID: 7852
  Gene Symbol: HAGHL
  Gene Name: hydroxyacylglutathione hydrolase-like
  Uniprot ID: Q6PII5
  ENSP ID: ENSP00000457219

SEQ ID NO: 39207 - protein, 94 aa, Homo sapiens
  Payload ID: 7852
  Gene Symbol: HAGHL
  Gene Name: hydroxyacylglutathione hydrolase-like
  ENSP ID: ENSP00000457486
GHTAGHMSYFLWEDDCPDPPALFSGTRSAERAHPASRRPRPICSDPPSPARRRAVGGRLRLVPGGQRPADVPEPGRAGYPAPRDEGVLRPRAHA

SEQ ID NO: 39208 - protein, 21 aa, Homo sapiens
  Payload ID: 7852
  Gene Symbol: HAGHL
  Gene Name: hydroxyacylglutathione hydrolase-like
  ENSP ID: ENSP00000458711
  MOD_RES (1)..(1): Any amino acid
XGRAGYPAPRDEGVLRPRAHA

SEQ ID NO: 39209 - protein, 13 aa, Homo sapiens
  Payload ID: 7852
  Gene Symbol: HAGHL
  Gene Name: hydroxyacylglutathione hydrolase-like
  ENSP ID: ENSP00000459148
MKVKVIPVLEDNY

SEQ ID NO: 39210 - protein, 172 aa, Homo sapiens
  Payload ID: 7852
  Gene Symbol: HAGHL
  Gene Name: hydroxyacylglutathione hydrolase-like
  ENSP ID: ENSP00000460451
MKVKVIPVLEDNYMYLVIEELTREAVAVDVAVPKRLLEIVGREGVSLTAVLTTHHHWDHARGNPELARLRPGLAVLGADERIFSLTRRLAHGEELRFGAIHVRCLLTPGHTAGHMSYFLWEDDCPDPPALFSGDALSVAGCGSCLEGSAQQMYQSLAELGTLPPETVSGPGP

SEQ ID NO: 39211 - protein, 76 aa, Homo sapiens
  Payload ID: 7853
  Gene Symbol:
  Gene Name: Hydroxyacyl-thioester dehydratase type 2, mitochondrial [Source:UniProtKB/Swiss-Prot
  Acc:P86397]
  ENSP ID: ENSP00000477762
MFPLISSHHLWWGGLRRTVCLNLPVLTLQHFQHMHIKVGDRAELRRAFTQTDVATFSELTGDVNPLHLNEDFAKHT

SEQ ID NO: 39212 - protein, 71 aa, Homo sapiens
  Payload ID: 7853
  Gene Symbol:
  Gene Name: Hydroxyacyl-thioester dehydratase type 2, mitochondrial [Source:UniProtKB/Swiss-Prot
  Acc:P86397]
  ENSP ID: ENSP00000478964
MFPLISSHHLWWGGLRRTVCLNLPVLTLQHFQHMHIKVGDRAELRRAFTQTDVATFSELTGDVNPLHLNED

SEQ ID NO: 39213 - protein, 168 aa, Homo sapiens [sequence omitted]

SEQ ID NO: 39214 - protein, 54 aa, Homo sapiens
  Payload ID: 7853
  Gene Symbol:
  Gene Name: Hydroxyacyl-thioester dehydratase type 2, mitochondrial [Source:UniProtKB/Swiss-Prot
  Acc:P86397]
  ENSP ID: ENSP00000481678
MFPLISSHHLWWGGLRRTVCLNLPVLTLQHFQHMHIKVGDRAELRRAFTQTDVA

SEQ ID NO: 39215 - protein, 168 aa, Homo sapiens [sequence omitted]

SEQ ID NO: 39216 - protein, 168 aa, Homo sapiens [sequence omitted]

SEQ ID NO: 39217 - protein, 346 aa, Homo sapiens
  Payload ID: 7854
  Gene Symbol: HCAR1
  Gene Name: hydroxycarboxylic acid receptor 1
  Uniprot ID: Q9BXC0
  ENSP ID: ENSP00000389255
MYNGSCCRIEGDTISQVMPPLLIVAFVLGALGNGVALCGFCFHMKTWKPSTVYLFNLAVADFLLMICLPFRTDYYLRRRHWAFGDIPCRVGLFTLAMNRAGSIVFLTVVAADRYFKVVHPHHAVNTISTRVAAGIVCTLWALVILGTVYLLLENHLCVQETAVSCESFIMESANGWHDIMFQLEFFMPLGIILFCSFKIVWSLRRRQQLARQARMKKATRFIMVVAIVFITCYLPSVSARLYFLWTVPSSACDPSVHGALHITLSFTYMNSMLDPLVYYFSSPSFPKFYNKLKICSLKPKQPGHSKTQRPEEMPISNLGRRSCISVANSFQSQSDGQWDPHIVEWH

SEQ ID NO: 39218 - protein, 363 aa, Homo sapiens [sequence omitted]

SEQ ID NO: 39219 - protein, 387 aa, Homo sapiens
  Payload ID: 7856
  Gene Symbol: HCAR3
  Gene Name: hydroxycarboxylic acid receptor 3
  Uniprot ID: P49019
  ENSP ID: ENSP00000436714
MNRHHLQDHFLEIDKKNCCVFRDDFIAKVLPPVLGLEFIFGLLGNGLALWIFCFHLKSWKSSRIFLFNLAVADFLLIICLPFVMDYYVRRSDWKFGDIPCRLVLFMFAMNRQGSIIFLTVVAVDRYFRVVHPHHALNKISNWTAAIISCLLWGITVGLTVHLLKKKLLIQNGTANVCISFSICHTFRWHEAMFLLEFFLPLGIILFCSARIIWSLRQRQMDRHAKIKRAITFIMVVAIVFVICFLPSVVVRIHIFWLLHTSGTQNCEVYRSVDLAFFITLSFTYMNSMLDPVVYYFSSPSFPNFFSTLINRCLQRKITGEPDNNRSTSVELTGDPNKTRGAPEALIANSGEPWSPSYLGPTSNNHSKKGHCHQEPASLEKQLGCCIE

SEQ ID NO: 39220 - protein, 373 aa, Homo sapiens
  Payload ID: 7857
  Gene Symbol: HSD3B1
  Gene Name: hydroxy-delta-5-steroid dehydrogenase, 3 beta- and steroid delta-isomerase 1
  Uniprot ID: P14060
  ENSP ID: ENSP00000358421
MTGWSCLVTGAGGFLGQRIIRLLVKEKELKEIRVLDKAFGPELREEFSKLQNKTKLTVLEGDILDEPFLKRACQDVSVIIHTACIIDVFGVTHRESIMNVNVKGTQLLLEACVQASVPVFIYTSSIEVAGPNSYKEIIQNGHEEEPLENTWPAPYPHSKKLAEKAVLAANGWNLKNGGTLYTCALRPMYIYGEGSRFLSASINEALNNNGILSSVGKFSTVNPVYVGNVAWAHILALRALQDPKKAPSIRGQFYYISDDTPHQSYDNLNYTLSKEFGLRLDSRWSFPLSLMYWIGFLLEIVSFLLRPIYTYRPPFNRHIVTLSNSVFTFSYKKAQRDLAYKPLYSWEEAKQKTVEWVGSLVDRHKETLKSKTQ

SEQ ID NO: 39221 - protein, 373 aa, Homo sapiens; identical to SEQ ID NO: 39220
  Payload ID: 7857
  Gene Symbol: HSD3B1
  Gene Name: hydroxy-delta-5-steroid dehydrogenase, 3 beta- and steroid delta-isomerase 1
  Uniprot ID: P14060
  ENSP ID: ENSP00000432268

SEQ ID NO: 39222 - protein, 81 aa, Homo sapiens
  Payload ID: 7857
  Gene Symbol: HSD3B1
  Gene Name: hydroxy-delta-5-steroid dehydrogenase, 3 beta- and steroid delta-isomerase 1
  ENSP ID: ENSP00000435999
MTGWSCLVTGAGGFLGQRIIRLLVKEKELKEIRVLDKAFGPELREEFSKLQNKTKLTVLEGDILDEPFLKRACQDVSVIIH

SEQ ID NO: 39223 - protein, 372 aa, Homo sapiens
  Payload ID: 7858
  Gene Symbol: HSD3B2
  Gene Name: hydroxy-delta-5-steroid dehydrogenase, 3 beta- and steroid delta-isomerase 2
  Uniprot ID: P26439
  ENSP ID: ENSP00000358424
MGWSCLVTGAGGLLGQRIVRLLVEEKELKEIRALDKAFRPELREEFSKLQNRTKLTVLEGDILDEPFLKRACQDVSVVIHTACIIDVFGVTHRESIMNVNVKGTQLLLEACVQASVPVFIYTSSIEVAGPNSYKEIIQNGHEEEPLENTWPTPYPYSKKLAEKAVLAANGWNLKNGDTLYTCALRPTYIYGEGGPFLSASINEALNNNGILSSVGKFSTVNPVYVGNVAWAHILALRALRDPKKAPSVRGQFYYISDDTPHQSYDNLNYILSKEFGLRLDSRWSLPLTLMYWIGFLLEVVSFLLSPIYSYQPPFNRHTVTLSNSVFTFSYKKAQRDLAYKPLYSWEEAKQKTVEWVGSLVDRHKETLKSKTQ

SEQ ID NO: 39224 - protein, 195 aa, Homo sapiens
  Payload ID: 7858
  Gene Symbol: HSD3B2
  Gene Name: hydroxy-delta-5-steroid dehydrogenase, 3 beta- and steroid delta-isomerase 2
  ENSP ID: ENSP00000388292
MGWSCLVTGAGGLLGQRIVRLLVEEKELKEIRALDKAFRPELREEFSKLQNRTKLTVLEGDILDEPFLKRACQDVSVVIHTACIIDVFGVTHRESIMNVNVKGTQLLLEACVQASVPVFIYTSSIEVAGPNSYKEIIQNGHEEEPLENTWPTPYPYSKKLAEKAVLAANGWNLKNGDTLYTCALRPTYIYGEGGP

SEQ ID NO: 39225 - protein, 372 aa, Homo sapiens; identical to SEQ ID NO: 39223
  Payload ID: 7858
  Gene Symbol: HSD3B2
  Gene Name: hydroxy-delta-5-steroid dehydrogenase, 3 beta- and steroid delta-isomerase 2
  Uniprot ID: P26439
  ENSP ID: ENSP00000445122

SEQ ID NO: 39226 - protein, 196 aa, Homo sapiens
  Payload ID: 7859
  Gene Symbol: HSD3B7
  Gene Name: hydroxy-delta-5-steroid dehydrogenase, 3 beta- and steroid delta-isomerase 7
  Uniprot ID: Q9H2F3
  ENSP ID: ENSP00000262520
MADSAQAQKLVYLVTGGCGFLGEHVVRMLLQREPRLGELRVFDQHLGPWLEELKTGPVRVTAIQGDVTQAHEVAAAVAGAHVVIHTAGLVDVFGRASPKTIHEVNVQGTRNVIEACVQTGTRFLVYTSSMEVVGPNTKGHPFYRGNEDTPYEAVHRHPYPCSKALAEWLVLEANGRKAMLPGCTCWQPGSWSSGQP

SEQ ID NO: 39227 - protein, 369 aa, Homo sapiens
  Payload ID: 7859
  Gene Symbol: HSD3B7
  Gene Name: hydroxy-delta-5-steroid dehydrogenase, 3 beta- and steroid delta-isomerase 7
  Uniprot ID: Q9H2F3
  ENSP ID: ENSP00000297679
MADSAQAQKLVYLVTGGCGFLGEHVVRMLLQREPRLGELRVFDQHLGPWLEELKTGPVRVTAIQGDVTQAHEVAAAVAGAHVVIHTAGLVDVFGRASPKTIHEVNVQGTRNVIEACVQTGTRFLVYTSSMEVVGPNTKGHPFYRGNEDTPYEAVHRHPYPCSKALAEWLVLEANGRKVRGGLPLVTCALRPTGIYGEGHQIMRDFYRQGLRLGGWLFRAIPASVEHGRVYVGNVAWMHVLAARELEQRATLMGGQVYFCYDGSPYRSYEDFNMEFLGPCGLRLVGARPLLPYWLLVFLAALNALLQWLLRPLVLYAPLLNPYTLAVANTTFTVSTDKAQRHFGYEPLFSWEDSRTRTILWVQAATGSAQ

SEQ ID NO: 39228 - protein, 176 aa, Homo sapiens
  Payload ID: 7859
  Gene Symbol: HSD3B7
  Gene Name: hydroxy-delta-5-steroid dehydrogenase, 3 beta- and steroid delta-isomerase 7
  ENSP ID: ENSP00000459689
MADSAQAQKLVYLVTGGCGFLGEHVVRMLLQREPRLGELRVFDQHLGPWLEELKTGPVRVTAIQGDVTQAHEVAAAVAGAHVVIHTAGLVDVFGRASPKTIHEVNVQGTRNVIEACVQTGTRFLVYTSSMEVVGPNTKGHPFYRGNEDTPYEAVHRHPYPCSKALAEWLVLEANGR

SEQ ID NO: 39229 - protein, 219 aa, Homo sapiens
  Payload ID: 7859
  Gene Symbol: HSD3B7
  Gene Name: hydroxy-delta-5-steroid dehydrogenase, 3 beta- and steroid delta-isomerase 7
  ENSP ID: ENSP00000459852
MADSAQAQKLVYLVTGGCGFLGEHVVRMLLQREPRLGELRVFDQHLGPWLEELKTGSCWGSLWWRGCGRFPNPSQAGIPTPAVEQMMLVSVHMDGSRPVRVTAIQGDVTQAHEVAAAVAGAHVVIHTAGLVDVFGRASPKTIHEVNVQGTRNVIEACVQTGTRFLVYTSSMEVVGPNTKGHPFYRGNEDTPYEAVHRHPYPCSKALAEWLVLEANGRKV

SEQ ID NO: 39230 - protein, 373 aa, Homo sapiens
  Payload ID: 7860
  Gene Symbol: HYKK
  Gene Name: hydroxylysine kinase
  Uniprot ID: A2RU49
  ENSP ID: ENSP00000373640
MSSGNYQQSEALSKPTFSEEQASALVESVFGLKVSKVRPLPSYDDQNFHVYVSKTKDGPTEYVLKISNTKASKNPDLIEVQNHIIMFLKAAGFPTASVCHTKGDNTASLVSVDSGSEIKSYLVRLLTYLPGRPIAELPVSPQLLYEIGKLAAKLDKTLQRFHHPKLSSLHRENFIWNLKNVPLLEKYLYALGQNRNREIVEHVIHLFKEEVMTKLSHFRECINHGDLNDHNILIESSKSASGNAEYQVSGILDFGDMSYGYYVFEVAITIMYMMIESKSPIQVGGHVLAGFESITPLTAVEKGALFLLVCSRFCQSLVMAAYSCQLYPENKDYLMVTAKTGWKHLQQMFDMGQKAVEEIWFETAKSYESGISM

SEQ ID NO: 39231 - protein, 220 aa, Homo sapiens
  Payload ID: 7860
  Gene Symbol: HYKK
  Gene Name: hydroxylysine kinase
  Uniprot ID: A2RU49
  ENSP ID: ENSP00000386197
MSSGNYQQSEALSKPTFSEEQASALVESVFGLKVSKVRPLPSYDDQNFHVYVSKTKDGPTEYVLKISNTKASKNPDLIEVQNHIIMFLKAAGFPTASVCHTKGDNTASLVSVDSGSEIKSYLVRLLTYLPGRPIAELPVSPQLLYEIGKLAAKLDKTLQRFHHPKLSSLHRENFIWNLKNVPLLEKYLYALGQNRNREIVEHVIHLFKEEVMTKLSHFRE

SEQ ID NO: 39232 - protein, 220 aa, Homo sapiens; identical to SEQ ID NO: 39231
  Payload ID: 7860
  Gene Symbol: HYKK
  Gene Name: hydroxylysine kinase
  Uniprot ID: A2RU49
  ENSP ID: ENSP00000454850

SEQ ID NO: 39233 - protein, 373 aa, Homo sapiens; identical to SEQ ID NO: 39230
  Payload ID: 7860
  Gene Symbol: HYKK
  Gene Name: hydroxylysine kinase
  Uniprot ID: A2RU49
  ENSP ID: ENSP00000455459

SEQ ID NO: 39234 - protein, 172 aa, Homo sapiens
  Payload ID: 7860
  Gene Symbol: HYKK
  Gene Name: hydroxylysine kinase
  Uniprot ID: A2RU49
  ENSP ID: ENSP00000456614
MSSGNYQQSEALSKPTFSEEQASALVESVFGLKVSKVRPLPSYDDQNFHVYVSKTKDGPTEYVLKISNTKASKNPDLIEVQNHIIMFLKAAGFPTASVCHTKGDNTASLVSVDSGSEIKSYLVRLLTYLPGRPIAELPVSPQLLYEIGKLAAKLDKTLQEGKPRVTPLLAKN

SEQ ID NO: 39235 - protein, 226 aa, Homo sapiens
  Payload ID: 7860
  Gene Symbol: HYKK
  Gene Name: hydroxylysine kinase
  ENSP ID: ENSP00000457154
MSSGNYQQSEALSKPTFSEEQASALVESVFGLKVSKVRPLPSYDDQNFHVYVSKTKDGPTEYVLKISNTKASKNPDLIEVQNHIIMFLKAAGFPTASVCHTKGDNTASLVSVDSGSEIKSYLVRLLTYLPGRPIAELPVSPQLLYEIGKLAAKLDKTLQRFHHPKLSSLHRENFIWNLKNVPLLEKYLYALGQNRNREIVEHVIHLFKEEVMTKLSHFRECEYSPN

SEQ ID NO: 39236 - protein, 361 aa, Homo sapiens [sequence omitted]

SEQ ID NO: 39237 - protein, 344 aa, Homo sapiens
  Payload ID: 7861
  Gene Symbol: HMBS
  Gene Name: hydroxymethylbilane synthase
  Uniprot ID: P08397
  ENSP ID: ENSP00000376584
MRVIRVGTRKSQLARIQTDSVVATLKASYPGLQFEIIAMSTTGDKILDTALSKIGEKSLFTKELEHALEKNEVDLVVHSLKDLPTVLPPGFTIGAICKRENPHDAVVFHPKFVGKTLETLPEKSVVGTSSLRRAAQLQRKFPHLEFRSIRGNLNTRLRKLDEQQEFSAIILATAGLQRMGWHNRVGQILHPEECMYAVGQGALGVEVRAKDQDILDLVGVLHDPETLLRCIAERAFLRHLEGGCSVPVAVHTAMKDGQLYLTGGVWSLDGSDSIQETMQATIHVPAQHEDGPEDDPQLVGITARNIPRGPQLAAQNLGISLANLLLSKGAKNILDVARQLNDAH

SEQ ID NO: 39238 - protein, 344 aa, Homo sapiens; identical to SEQ ID NO: 39237
  Payload ID: 7861
  Gene Symbol: HMBS
  Gene Name: hydroxymethylbilane synthase
  Uniprot ID: P08397
  ENSP ID: ENSP00000392041

SEQ ID NO: 39239 - protein, 321 aa, Homo sapiens
  Payload ID: 7861
  Gene Symbol: HMBS
  Gene Name: hydroxymethylbilane synthase
  Uniprot ID: P08397
  ENSP ID: ENSP00000438424
MSGNGNAAATAEENSPKMRVIRVGTRKSQLARIQTDSVVATLKASYPGLQFEIIAMSTTGDKILDTALSKIGEKSLFTKELEHALEKNEVDLVVHSLKDLPTVLPPGFTIGAICKRENPHDAVVFHPKFVGKTLETLPEKSVVGTSSLRRAAQLQRKFPHLEFRSIRGNLNTRLRKLDEQQEFSAIILATAGLQRMGWHNRVGQILHPEECMYAVGQEGGCSVPVAVHTAMKDGQLYLTGGVWSLDGSDSIQETMQATIHVPAQHEDGPEDDPQLVGITARNIPRGPQLAAQNLGISLANLLLSKGAKNILDVARQLNDAH

SEQ ID NO: 39240 - protein, 119 aa, Homo sapiens
  Payload ID: 7861
  Gene Symbol: HMBS
  Gene Name: hydroxymethylbilane synthase
  ENSP ID: ENSP00000438726
MSGNGNAAATAEENSPKMRVIRVGTRKSQLARIQTDSVVATLKASYPGLQFEIRDKILDTALSKIGEKSLFTKELEHALEKNEVDLVVHSLKDLPTVLPPGFTIGAICKRENPHDAVVF

SEQ ID NO: 39241 - protein, 63 aa, Homo sapiens
  Payload ID: 7861
  Gene Symbol: HMBS
  Gene Name: hydroxymethylbilane synthase
  ENSP ID: ENSP00000439904
MSGNGNAAATALARIQTDSVVATLKASYPGLQFEISEFSGKEWKLMGSPVPREERTQHFWLCL

SEQ ID NO: 39242 - protein, 187 aa, Homo sapiens
  Payload ID: 7861
  Gene Symbol: HMBS
  Gene Name: hydroxymethylbilane synthase
  ENSP ID: ENSP00000440092
MRVIRVGTRKSQLARIQTDSVVATLKASYPGLQFEIIAMSTTGDKILDTALSKIGEKSLFTKELEHALEKNEVDLVVHSLKDLPTVLPPGFTIGAICKRENPHDAVVFHPKFVGKTLETLPEKSVVGTSSLRRAAQLQRKFPHLEFRSIRGNLNTRLRKLDEQQEFSAIILATAGLQRMGWHNRVGQ

SEQ ID NO: 39243 - protein, 187 aa, Homo sapiens; identical to SEQ ID NO: 39242
  Payload ID: 7861
  Gene Symbol: HMBS
  Gene Name: hydroxymethylbilane synthase
  ENSP ID: ENSP00000442079

SEQ ID NO: 39244 - protein, 304 aa, Homo sapiens
  Payload ID: 7861
  Gene Symbol: HMBS
  Gene Name: hydroxymethylbilane synthase
  Uniprot ID: P08397
  ENSP ID: ENSP00000443058
MRVIRVGTRKSQLARIQTDSVVATLKASYPGLQFEIIAMSTTGDKILDTALSKIGEKSLFTKELEHALEKNEVDLVVHSLKDLPTVLPPGFTIGAICKRENPHDAVVFHPKFVGKTLETLPEKSVVGTSSLRRAAQLQRKFPHLEFRSIRGNLNTRLRKLDEQQEFSAIILATAGLQRMGWHNRVGQILHPEECMYAVGQEGGCSVPVAVHTAMKDGQLYLTGGVWSLDGSDSIQETMQATIHVPAQHEDGPEDDPQLVGITARNIPRGPQLAAQNLGISLANLLLSKGAKNILDVARQLNDAH

SEQ ID NO: 39245 - protein, 344 aa, Homo sapiens; identical to SEQ ID NO: 39237
  Payload ID: 7861
  Gene Symbol: HMBS
  Gene Name: hydroxymethylbilane synthase
  Uniprot ID: P08397
  ENSP ID: ENSP00000444730

SEQ ID NO: 39246 - protein, 81 aa, Homo sapiens
  Payload ID: 7861
  Gene Symbol: HMBS
  Gene Name: hydroxymethylbilane synthase
  ENSP ID: ENSP00000444817
MSGNGNAAATAVSAEPVTSTLWASGRAVQRLAPGCHPQSSIGRKQPKDESDSRGYPQEPACSHTDGQCGGNIESLVPWPAV

SEQ ID NO: 39247 - protein, 81 aa, Homo sapiens
  Payload ID: 7861
  Gene Symbol: HMBS
  Gene Name: hydroxymethylbilane synthase
  ENSP ID: ENSP00000444849
MSGNGNAAATAEENSPKMRVIRVGTRKSQLARIQTDSVVATLKASYPGLQFEISEFSGKEWKLMGSPVPREERTQHFWLCL

SEQ ID NO: 39248 - protein, 330 aa, Homo sapiens
  Payload ID: 7861
  Gene Symbol: HMBS
  Gene Name: hydroxymethylbilane synthase
  ENSP ID: ENSP00000445429
MSGNGNAAATALARIQTDSVVATLKASYPGLQFEIIAMSTTGDKILDTALSKIGEKSLFTKELEHALEKNEVDLVVHSLKDLPTVLPPGFTIGAICKRENPHDAVVFHPKFVGKTLETLPEKSVVGTSSLRRAAQLQRKFPHLEFRSIRGNLNTRLRKLDEQQEFSAIILATAGLQRMGWHNRVGQGALGVEVRAKDQDILDLVGVLHDPETLLRCIAERAFLRHLEGGCSVPVAVHTAMKDGQLYLTGGVWSLDGSDSIQETMQATIHVPAQHEDGPEDDPQLVGITARNIPRGPQLAAQNLGISLANLLLSKGAKNILDVARQLNDAH

SEQ ID NO: 39249 - protein, 191 aa, Homo sapiens
  Payload ID: 7861
  Gene Symbol: HMBS
  Gene Name: hydroxymethylbilane synthase
  ENSP ID: ENSP00000445599
MSGNGNAAATAEENSPKMRVIRVGTRKSQLARIQTDSVVATLKASYPGLQFEIIAMSTTGDKILDTALSKIGEKSLFTKELEHALEKNERENPHDAVVFHPKFVGKTLETLPEKSVVGTSSLRRAAQLQRKFPHLEFRSIRGNLNTRLRKLDEQQEFSAIILATAGLQRMGWHNRVGQILHPEECMYAVGQ

SEQ ID NO: 39250 - protein, 178 aa, Homo sapiens
  Payload ID: 7862
  Gene Symbol: HPGD
  Gene Name: hydroxyprostaglandin dehydrogenase 15-(NAD)
  Uniprot ID: P15428
  ENSP ID: ENSP00000296521
MHVNGKVALVTGAAQGIGRAFAEALLLKGAKVALVDWNLEAGVQCKAALDEQFEPQKTLFIQCDVADQQQLRDTFRKVVDHFGRLDILVNNAGVNNEKNWEKTLQINLVSVISGTYLGLDYMSKQNGGEGGIIINMSSLAGLMPVAQQPVYCASKHGIVGFTRSAAPTIDCQWIDNTH

SEQ ID NO: 39251 - protein, 266 aa, Homo sapiens [sequence omitted]

SEQ ID NO: 39252 - protein, 198 aa, Homo sapiens
  Payload ID: 7862
  Gene Symbol: HPGD
  Gene Name: hydroxyprostaglandin dehydrogenase 15-(NAD)
  Uniprot ID: P15428
  ENSP ID: ENSP00000398720
MHVNGKVALVTGAAQGIGRAFAEALLLKGAKVALVDWNLEAGVQCKAALDEQFEPQKTLFIQCDVADQQQLRGLMPVAQQPVYCASKHGIVGFTRSAALAANLMNSGVRLNAICPGFVNTAILESIEKEENMGQYIEYKDHIKDMIKYYGILDPPLIANGLITLIEDDALNGAIMKITTSKGIHFQDYDTTPFQAKTQ

SEQ ID NO: 39253 - protein, 176 aa, Homo sapiens
  Payload ID: 7862
  Gene Symbol: HPGD
  Gene Name: hydroxyprostaglandin dehydrogenase 15-(NAD)
  ENSP ID: ENSP00000420892
MHVNGKVALVTGAAQGIGRAFAEALLLKGAKVALVDWNLEAGVQCKAALDEQFEPQKTLFIQCDVADQQQLRDTFRKVVDHFGRLDILVNNAGVNNEKNWEKTLQINLVSVISGTYLGLDYMSKQNGGEGGIIINMSSLAGISSVCRHLKTWLAEVLPSSAGSSQGYFRTAGFLFL

SEQ ID NO: 39254 - protein, 145 aa, Homo sapiens
  Payload ID: 7862
  Gene Symbol: HPGD
  Gene Name: hydroxyprostaglandin dehydrogenase 15-(NAD)
  Uniprot ID: P15428
  ENSP ID: ENSP00000422418
MSKQNGGEGGIIINMSSLAGLMPVAQQPVYCASKHGIVGFTRSAALAANLMNSGVRLNAICPGFVNTAILESIEKEENMGQYIEYKDHIKDMIKYYGILDPPLIANGLITLIEDDALNGAIMKITTSKGIHFQDYDTTPFQAKTQ

SEQ ID NO: 39255 - protein, 99 aa, Homo sapiens
  Payload ID: 7862
  Gene Symbol: HPGD
  Gene Name: hydroxyprostaglandin dehydrogenase 15-(NAD)
  ENSP ID: ENSP00000423066
MSKQNGGEGGIIINMSSLAGLMPVAQQPVYCASKHGIVGFTRSAALAANLMNSGVRLNAICPGFVNTAILESIEKEENMGQYIEYKDHIKDMIKYYGIL

SEQ ID NO: 39256 - protein, 97 aa, Homo sapiens
  Payload ID: 7862
  Gene Symbol: HPGD
  Gene Name: hydroxyprostaglandin dehydrogenase 15-(NAD)
  ENSP ID: ENSP00000423110
MSKQNGGEGGIIINMSSLAGLMPVAQQPVYCASKHGIVGFTRSAALAANLMNSGVRLNAICPGFVNTAILESIEKEENMGQYIEYKDHIKDMIKYYG

SEQ ID NO: 39257 - protein, 87 aa, Homo sapiens
  Payload ID: 7862
  Gene Symbol: HPGD
  Gene Name: hydroxyprostaglandin dehydrogenase 15-(NAD)
  ENSP ID: ENSP00000425741
MHVNGKVALVTGAAQGIGRAFAEALLLKGAKVALVDWNLEAGVQCKAALDEQFEPQKTLFIQCDVADQQQLRGFCYQWNLSWFGLHE

SEQ ID NO: 39258 - protein, 37 aa, Homo sapiens
  Payload ID: 7862
  Gene Symbol: HPGD
  Gene Name: hydroxyprostaglandin dehydrogenase 15-(NAD)
  ENSP ID: ENSP00000427699
MHVNGKVALVTGAAQGIGRAFAEALLLKGAKTLLEKL

SEQ ID NO: 39259 - protein, 145 aa, Homo sapiens; identical to SEQ ID NO: 39254
  Payload ID: 7862
  Gene Symbol: HPGD
  Gene Name: hydroxyprostaglandin dehydrogenase 15-(NAD)
  Uniprot ID: P15428
  ENSP ID: ENSP00000438017

SEQ ID NO: 39260 - protein, 143 aa, Homo sapiens
  Payload ID: 7862
  Gene Symbol: HPGD
  Gene Name: hydroxyprostaglandin dehydrogenase 15-(NAD)
  Uniprot ID: P15428
  ENSP ID: ENSP00000443644
MHVNGKVALVTGAAQGIGRAFAEALLLKGAKVALVDWNLEAGVQCKAALDEQFEPQKTLFIQCDVADQQQLRDTFRKVVDHFGRLDILVNNAGVNNEKNWEKTLQINLVSVISGTYLGLDYMSKQNGGEGGIIINMSSLAAHH

SEQ ID NO: 39261 - protein, 277 aa, Homo sapiens
  Payload ID: 7863
  Gene Symbol: HYI
  Gene Name: hydroxypyruvate isomerase (putative)
  Uniprot ID: Q5T013
  ENSP ID: ENSP00000361502
MAPLRFSANLSWLFPELSGLPARVRAAGSSGFEAVEVAWPYAETPEALARAAREAGLRLVLINTPPGDQEKGEMGLGAVPGRQAAFREGLEQAVRYAKALGCPRIHLMAGRVPQGADRIAVKAEMEAVFLENLRHAAGVLAQEDLVGLLEPINTRITDPQYFLDTPQQAAAILQKVGRPNLQLQMDIFHWQIMDGNLTGNIREFLPIVGHVQVAQVPGRGEPSSPGELNFPYLFQLLEDEGYKGFVGCEYQPRGDTVEGLSWLRSYWDRRGHPEAGQ

SEQ ID NO: 39262 - protein, 238 aa, Homo sapiens
  Payload ID: 7863
  Gene Symbol: HYI
  Gene Name: hydroxypyruvate isomerase (putative)
  ENSP ID: ENSP00000361507
  MOD_RES (1)..(1): Any amino acid
XYAETPEALARAAREAGLRLVLINTPPGDQEKGEMGLGAVPGRQAAFREGLEQAVRYAKALGCPRIHLMAGRVPQGADRIAVKAEMEAVFLENLRHAAGVLAQEDLVGLLEPINTRITDPQYFLDTPQQAAAILQKVGRPNLQLQMDIFHWQIMDGNLTGNIREFLPIVGHVQVAQVPGRGEPSSPGELNFPYLFQLLEDEGYKGFVGCEYQPRGDTVEGLSWLRSYWDRRGHPEAGQ

SEQ ID NO: 39263 - protein, 247 aa, Homo sapiens
  Payload ID: 7863
  Gene Symbol: HYI
  Gene Name: hydroxypyruvate isomerase (putative)
  Uniprot ID: Q5T013
  ENSP ID: ENSP00000361509
MAPLRFSANLSWLFPELSGLPARVRAAGSSGFEAVEVAWPYAETPEALARAAREAGLRLVLINTPPGDQEKGEMGLGAVPGRQAAFREGLEQAVRYAKALGCPRIHLMAGRVPQGADRIAVKAEMEAVFLENLRHAAGVLAQEDLVGLLEPINTRITDPQYFLDTPQQAAAILQKVGRPNLQLQMDIFHWQIMDGNLTGNIREFLPIVGHVQVAQVPGRGEPSSPGELNFPYLFQLLEDEGYKGFVG

SEQ ID NO: 39264 - protein, 213 aa, Homo sapiens
  Payload ID: 7863
  Gene Symbol: HYI
  Gene Name: hydroxypyruvate isomerase (putative)
  ENSP ID: ENSP00000361510
  MOD_RES (1)..(1): Any amino acid
XAGSSGFEAVEVAWPYAETPEALARAAREAGLRLVLINTPPGDQEKGEMGLGAVPGRQAAFREGLEQAVRIHLMAGRVPQGADRIAVKAEMEAVFLENLRHAAGVLAQEDLVGLLEPINTRITDPQYFLDTPQQAAAILQKVGRPNLQLQMDIFHWQIMDGNLTGNIREFLPIVGHVQVAQVPGRGEPSSPGELNFPYLFQLLEDEGYKGFVG

SEQ ID NO: 39265 - protein, 302 aa, Homo sapiens
  Payload ID: 7863
  Gene Symbol: HYI
  Gene Name: hydroxypyruvate isomerase (putative)
  ENSP ID: ENSP00000361511
MAPLRFSANLSWLFPELSGLPARVRAAGSSGFEAVEVAWPYAETPEALARAAREAGLRLVLINTPPGDQEKGEMGLGAVPGRQAAFREGLEQAVRSGHCLMGRKLSVPCKGAVARGGLVYLAAFLRLDMIHLMAGRVPQGADRIAVKAEMEAVFLENLRHAAGVLAQEDLVGLLEPINTRITDPQYFLDTPQQAAAILQKVGRPNLQLQMDIFHWQIMDGNLTGNIREFLPIVGHVQVAQVPGRGEPSSPGELNFPYLFQLLEDEGYKGFVGCEYQPRGDTVEGLSWLRSYWDRRGHPEAGQ

SEQ ID NO: 39266 - protein, 276 aa, Homo sapiens
  Payload ID: 7863
  Gene Symbol: HYI
  Gene Name: hydroxypyruvate isomerase (putative)
  ENSP ID: ENSP00000428399
MAPLRFSANLSWLFPELSGLPARVRAAGSSGFEAVEVAWPYAETPEALARAAREAGLRLVLINTPPGDQEKGEMGLGAVPGRQAAFREGLEQAVRYAKALGCPRIHLMAGRVPQGADRIAVKAEMEAVFLENLRHAAGVLAQEDLVGLLEPINTRITDPQYFLDTPQQAAAILQKVGRPNLQLQMDIFHWQIMDGNLTGNIREFLPIVGHVQVAQVPGRGEPSSPGELNFPYLFQLLEDEGYKGFVGCEYQPRGEAWPWGRELWRDPDRGCFLLVG

SEQ ID NO: 39267 - protein, 161 aa, Homo sapiens
  Payload ID: 7863
  Gene Symbol: HYI
  Gene Name: hydroxypyruvate isomerase (putative)
  ENSP ID: ENSP00000428501
  MOD_RES (1)..(1): Any amino acid
XAVPGRQAAFREGLEQAVRYAKALGCPRIHLMAGRVPQGADRIAVKAEMEAVFLENLRHAAGVLAQEDLVGLLEPINTRITDPQYFLDTPQQAAAILQKDIFHWQIMDGNLTGNIREFLPIVGHVQVAQVPGRGEPSSPGELNFPYLFQLLEDEGYKGFVG

SEQ ID NO: 39268 - protein, 186 aa, Homo sapiens
  Payload ID: 7863
  Gene Symbol: HYI
  Gene Name: hydroxypyruvate isomerase (putative)
  ENSP ID: ENSP00000428803
  MOD_RES (1)..(1): Any amino acid
XQAAFREGLEQAVRYAKALGCPRIHLMAGRVPQGADRIAVKAEMEAVFLENLRHAAGVLAQEDLVGLLEPINTRITDPQYFLDTPQQAAAILQKDIFHWQIMDGNLTGNIREFLPIVGHVQVAQVPGRGEPSSPGELNFPYLFQLLEDEGYKGFVGCEYQPRGDTVEGLSWLRSYWDRRGHPEAGQ

SEQ ID NO: 39269 - protein, 272 aa, Homo sapiens
  Payload ID: 7863
  Gene Symbol: HYI
  Gene Name: hydroxypyruvate isomerase (putative)
  ENSP ID: ENSP00000461969
MAPLRFSANLSWLFPELSGLPARVRAAGSSGFEAVEVAWPYAETPEALARAAREAGLRLVLINTPPGDQEKGEMGLGAVPGRQAAFREGLEQAVRSGHCLMGRKLSVPCKGAVARGGLVYLAAFLRLDMIHLMAGRVPQGADRIAVKAEMEAVFLENLRHAAGVLAQEDLVGLLEPINTRITDPQYFLDTPQQAAAILQKVGRPNLQLQMDIFHWQIMDGNLTGNIREFLPIVGHVQVAQVPGRGEPSSPGELNFPYLFQLLEDEGYKGFVG

SEQ ID NO: 39270 - protein, 278 aa, Homo sapiens
  Payload ID: 7864
  Gene Symbol: HSD11B1
  Gene Name: hydroxysteroid (11-beta) dehydrogenase 1
  ENSP ID: ENSP00000261465
MAFMKKYLLPILGLFMAYYYYSANEEFRPEMLQGKKVIVTGASKGIGREMAYHLAKMGAHVVVTARSKETLQKVVSHCLELGAASAHYIAGTMEDMTFAEQFVAQAGKLMGGLDMLILNHITNTSLNLFHDDIHHVRKSMEVNFLSYVVLTVAALPMLKQSNGSIVVVSSLAGKVAYPMVAAYSASKFALDGFFSSIRKEYSVSRVNVSITLCVLGLIDTETAMKAVSGIVHMQAAPKEECALEIIKGGALRQEEVYYDSSLWTTLLIRNPCRKILEF

SEQ ID NO: 39271 - protein, 292 aa, Homo sapiens
  Payload ID: 7864
  Gene Symbol: HSD11B1
  Gene Name: hydroxysteroid (11-beta) dehydrogenase 1
  Uniprot ID: P28845
  ENSP ID: ENSP00000355994
MAFMKKYLLPILGLFMAYYYYSANEEFRPEMLQGKKVIVTGASKGIGREMAYHLAKMGAHVVVTARSKETLQKVVSHCLELGAASAHYIAGTMEDMTFAEQFVAQAGKLMGGLDMLILNHITNTSLNLFHDDIHHVRKSMEVNFLSYVVLTVAALPMLKQSNGSIVVVSSLAGKVAYPMVAAYSASKFALDGFFSSIRKEYSVSRVNVSITLCVLGLIDTETAMKAVSGIVHMQAAPKEECALEIIKGGALRQEEVYYDSSLWTTLLIRNPCRKILEFLYSTSYNMDRFINK

SEQ ID NO: 39272 - protein, 292 aa, Homo sapiens; identical to SEQ ID NO: 39271
  Payload ID: 7864
  Gene Symbol: HSD11B1
  Gene Name: hydroxysteroid (11-beta) dehydrogenase 1
  Uniprot ID: P28845
  ENSP ID: ENSP00000355995

SEQ ID NO: 39273 - protein, 182 aa, Homo sapiens
  Payload ID: 7864
  Gene Symbol: HSD11B1
  Gene Name: hydroxysteroid (11-beta) dehydrogenase 1
  ENSP ID: ENSP00000478430
MAFMKKYLLPILGLFMAYYYYSANEEFRPEMLQGKKVIVTGASKGIGREMAYHLAKMGAHVVVTARSKETLQKVVSHCLELGAASAHYIAGTMEDMTFAEQFVAQAGKLMGGLDMLILNHITNTSLNLFHDDIHHVRKSMEVNFLSYVVLTVAALPMLKQSNGSIVVVSSLAGKVAYPMVAA

SEQ ID NO: 39274 - protein, 205 aa, Homo sapiens
  Payload ID: 7865
  Gene Symbol: HSD11B1L
  Gene Name: hydroxysteroid (11-beta) dehydrogenase 1-like
  Uniprot ID: Q7Z5J1
  ENSP ID: ENSP00000301382
MKVLLLTGLGALFFAYYWDDNFDPGGLDYLVLNHIGGAPAGTRARSPQATRWLMQVNFVSYVQLTSRALPSLTDSKGSLVVVSSLLGRVPTSFSTPYSAAKFALDGFFGSLRRELDVQDVNVAITMCVLGLRDRASAAEAVRGVTRVKAAPGPKAALAVIRGGATRAAGVFYPWRFRLLCLLRRWLPRPRAWFIRQELNVTAAAA

SEQ ID NO: 39275 - protein, 286 aa, Homo sapiens
  Payload ID: 7865
  Gene Symbol: HSD11B1L
  Gene Name: hydroxysteroid (11-beta) dehydrogenase 1-like
  Uniprot ID: Q7Z5J1
  ENSP ID: ENSP00000340436
MKVLLLTGLGALFFAYYWDDNFDPASLQGARVLLTGANAGVGEELAYHYARLGSHLVLTAHTEALLQKVVGNCRKLGAPKVFYIAADMASPEAPESVVQFALDKLGGLDYLVLNHIGGAPAGTRARSPQATRWLMQVNFVSYVQLTSRALPSLTDSKGSLVVVSSLLGRVPTSFSTPYSAAKFALDGFFGSLRRELDVQDVNVAITMCVLGLRDRASAAEAVRGVTRVKAAPGPKAALAVIRGGATRAAGVFYPWRFRLLCLLRRWLPRPRAWFIRQELNVTAAAA

SEQ ID NO: 39276 - protein, 199 aa, Homo sapiens
  Payload ID: 7865
  Gene Symbol: HSD11B1L
  Gene Name: hydroxysteroid (11-beta) dehydrogenase 1-like
  Uniprot ID: Q7Z5J1
  ENSP ID: ENSP00000343451
MASPEAPESVVQFALDKLGGLDYLVLNHIGGAPAGTRARSPQATRWLMQVNFVSYVQLTSRALPSLTDSKGSLVVVSSLLGRVPTSFSTPYSAAKFALDGFFGSLRRELDVQDVNVAITMCVLGLRDRASAAEAVRGVTRVKAAPGPKAALAVIRGGATRAAGVFYPWRFRLLCLLRRWLPRPRAWFIRQELNVTAAAA

SEQ ID NO: 39277 - protein, 181 aa, Homo sapiens
  Payload ID: 7865
  Gene Symbol: HSD11B1L
  Gene Name: hydroxysteroid (11-beta) dehydrogenase 1-like
  Uniprot ID: Q7Z5J1
  ENSP ID: ENSP00000398955
MQVNFVSYVQLTSRALPSLTDSKGSLVVVSSLLGRVPTSFSTPYSAAKFALDGFFGSLRRELDVQDVNVAITMCVLGLRDRASAAEAVRSSTSRPRQPEHRGVPLQSQTAMFLPPTVPGARTLTETPLRGWPQPKMKSSRQKSKTEKNDGHLEPVTAWEVQVPRVRRLCRGLARPHLFGHD

SEQ ID NO: 39278 - protein, 315 aa, Homo sapiens
  Payload ID: 7865
  Gene Symbol: HSD11B1L
  Gene Name: hydroxysteroid (11-beta) dehydrogenase 1-like
  Uniprot ID: Q7Z5J1
  ENSP ID: ENSP00000407154
MKVLLLTGLGALFFAYYWDDNFDPASLQGARVLLTGANAGVGEELAYHYARLGSHLVLTAHTEALLQKVVGNCRKLGAPKVFYIAADMASPEAPESVVQFALDKLGGLDYLVLNHIGGAPAGTRARSPQATRWLMQVNFVSYVQLTSRALPSLTDSKGSLVVVSSLLGRVPTSFSTPYSAAKFALDGFFGSLRRELDVQDVNVAITMCVLGLRDRASAAEAVRSSTSRPRQPEHRGVPLQSQTAMFLPPTVPGARTLTETPLRGWPQPKMKSSRQKSKTEKNDGHLEPVTAWEVQVPRVRRLCRGLARPHLFGHD

SEQ ID NO: 39279 - protein, 87 aa, Homo sapiens
  Payload ID: 7865
  Gene Symbol: HSD11B1L
  Gene Name: hydroxysteroid (11-beta) dehydrogenase 1-like
  Uniprot ID: Q7Z5J1
  ENSP ID: ENSP00000409592
MKVLLLTGLGALFFAYYWDDNFDPASLQGARVLLTGANAGVGEELAYHYARLGSHLVLTAHTEALLQKARWLTLVVSTLGGRGKWIT

SEQ ID NO: 39280 - protein, 32 aa, Homo sapiens
  Payload ID: 7865
  Gene Symbol: HSD11B1L
  Gene Name: hydroxysteroid (11-beta) dehydrogenase 1-like
  ENSP ID: ENSP00000462058
MKVLLLTGLGALFFAYYWDDNFDPASRERECC

SEQ ID NO: 39281 - protein, 75 aa, Homo sapiens
  Payload ID: 7865
  Gene Symbol: HSD11B1L
  Gene Name: hydroxysteroid (11-beta) dehydrogenase 1-like
  ENSP ID: ENSP00000462113
MKVLLLTGLGALFFAYYWDDNFDPASLQGARVLLTGANAGVGEELAYHYARLGSHLVLTAHTEALLQKAGWTTSC

SEQ ID NO: 39282 - protein, 152 aa, Homo sapiens
  Payload ID: 7865
  Gene Symbol: HSD11B1L
  Gene Name: hydroxysteroid (11-beta) dehydrogenase 1-like
  Uniprot ID: Q7Z5J1
  ENSP ID: ENSP00000462586
MQVNFVSYVQLTSRALPSLTDSKGSLVVVSSLLGRVPTSFSTPYSAAKFALDGFFGSLRRELDVQDVNVAITMCVLGLRDRASAAEAVRGVTRVKAAPGPKAALAVIRGGATRAAGVFYPWRFRLLCLLRRWLPRPRAWFIRQELNVTAAAA

SEQ ID NO: 39283 - protein, 135 aa, Homo sapiens
  Payload ID: 7865
  Gene Symbol: HSD11B1L
  Gene Name: hydroxysteroid (11-beta) dehydrogenase 1-like
  ENSP ID: ENSP00000462921
  MOD_RES (1)..(1): Any amino acid
XLGALFFAYYWDDNFDPGGLDYLVLNHIGGAPAGTRARSPQATRWLMQVNFVSYVQLTSRALPSLTDSKGSLVVVSSLLGRVPTSFSTPYSAAKFALDGFFGSLRRELDVQDVNVAITMCVLGLRDRASAAEAVR

SEQ ID NO: 39284 - protein, 286 aa, Homo sapiens; identical to SEQ ID NO: 39275
  Payload ID: 7865
  Gene Symbol: HSD11B1L
  Gene Name: hydroxysteroid (11-beta) dehydrogenase 1-like
  Uniprot ID: Q7Z5J1
  ENSP ID: ENSP00000462975

SEQ ID NO: 39285 - protein, 234 aa, Homo sapiens
  Payload ID: 7865
  Gene Symbol: HSD11B1L
  Gene Name: hydroxysteroid (11-beta) dehydrogenase 1-like
  Uniprot ID: Q7Z5J1
  ENSP ID: ENSP00000463073
MKVLLLTGLGALFFAYYWDDNFDPGGLDYLVLNHIGGAPAGTRARSPQATRWLMQVNFVSYVQLTSRALPSLTDSKGSLVVVSSLLGRVPTSFSTPYSAAKFALDGFFGSLRRELDVQDVNVAITMCVLGLRDRASAAEAVRSSTSRPRQPEHRGVPLQSQTAMFLPPTVPGARTLTETPLRGWPQPKMKSSRQKSKTEKNDGHLEPVTAWEVQVPRVRRLCRGLARPHLFGHD

SEQ ID NO: 39286 - protein, 189 aa, Homo sapiens
  Payload ID: 7865
  Gene Symbol: HSD11B1L
  Gene Name: hydroxysteroid (11-beta) dehydrogenase 1-like
  ENSP ID: ENSP00000463187
MKVLLLTGLGALFFAYYWDDNFDPGKLCELRATDVAGAAQPDGQQGLPGGGVLAARPRAHVVLHSLLGGQVCAGRLLRLPAAGAGRAGRERGHHHVRPGPPRSRLRRRGSQGSHEGQGGPGAQGSPGRDPRRRHARGRRLLPVAFPPAVLAPALATAPAGLVYPPGAQRHGRGSLSTGGCPSSPRRQCS

SEQ ID NO: 39287 - protein, 47 aa, Homo sapiens
  Payload ID: 7865
  Gene Symbol: HSD11B1L
  Gene Name: hydroxysteroid (11-beta) dehydrogenase 1-like
  ENSP ID: ENSP00000463274
MKVLLLTGLGALFFAYYWDDNFDPGGRELPEAGRPQGLLHRGGHGLP

SEQ ID NO: 39288 - protein, 286 aa, Homo sapiens; identical to SEQ ID NO: 39275
  Payload ID: 7865
  Gene Symbol: HSD11B1L
  Gene Name: hydroxysteroid (11-beta) dehydrogenase 1-like
  Uniprot ID: Q7Z5J1
  ENSP ID: ENSP00000463794

SEQ ID NO: 39289 - protein, 152 aa, Homo sapiens; identical to SEQ ID NO: 39282
  Payload ID: 7865
  Gene Symbol: HSD11B1L
  Gene Name: hydroxysteroid (11-beta) dehydrogenase 1-like
  Uniprot ID: Q7Z5J1
  ENSP ID: ENSP00000464454

SEQ ID NO: 39290 - protein, 75 aa, Homo sapiens; identical to SEQ ID NO: 39281
  Payload ID: 7865
  Gene Symbol: HSD11B1L
  Gene Name: hydroxysteroid (11-beta) dehydrogenase 1-like
  ENSP ID: ENSP00000464563

SEQ ID NO: 39291 - protein, 143 aa, Homo sapiens
  Payload ID: 7865
  Gene Symbol: HSD11B1L
  Gene Name: hydroxysteroid (11-beta) dehydrogenase 1-like
  ENSP ID: ENSP00000464652
MKVLLLTGLGALFFAYYWDDNFDPASLQGARVLLTGANAGVGEELAYHYARLGSHLVLTAHTEALLQKVVGNCRKLGAPKVFYIAADMASPEAPESVVQFALDKLGGLDYLVLNHIGGAPAGTRARSPQATRWLMQVNFVSYV

SEQ ID NO: 39292 - protein, 333 aa, Homo sapiens
  Payload ID: 7865
  Gene Symbol: HSD11B1L
  Gene Name: hydroxysteroid (11-beta) dehydrogenase 1-like
  ENSP ID: ENSP00000480443
MANLGTLQLLPPRFKRFSCLSLPNIWITGMPVPATSVPCPSAGPHRTMKVLLLTGLGALFFAYYWDDNFDPASLQGARVLLTGANAGVGEELAYHYARLGSHLVLTAHTEALLQKVVGNCRKLGAPKVFYIAADMASPEAPESVVQFALDKLGGLDYLVLNHIGGAPAGTRARSPQATRWLMQVNFVSYVQLTSRALPSLTDSKGSLVVVSSLLGRVPTSFSTPYSAAKFALDGFFGSLRRELDVQDVNVAITMCVLGLRDRASAAEAVRGVTRVKAAPGPKAALAVIRGGATRAAGVFYPWRFRLLCLLRRWLPRPRAWFIRQELNVTAAAA

SEQ ID NO: 39293 - protein, 405 aa, Homo sapiens
  Payload ID: 7866
  Gene Symbol: HSD11B2
  Gene Name: hydroxysteroid (11-beta) dehydrogenase 2
  Uniprot ID: P80365
  ENSP ID: ENSP00000316786
MERWPWPSGGAWLLVAARALLQLLRSDLRLGRPLLAALALLAALDWLCQRLLPPPAALAVLAAAGWIALSRLARPQRLPVATRAVLITGCDSGFGKETAKKLDSMGFTVLATVLELNSPGAIELRTCCSPRLRLLQMDLTKPGDISRVLEFTKAHTTSTGLWGLVNNAGHNEVVADAELSPVATFRSCMEVNFFGALELTKGLLPLLRSSRGRIVTVGSPAGDMPYPCLGAYGTSKAAVALLMDTFSCELLPWGVKVSIIQPGCFKTESVRNVGQWEKRKQLLLANLPQELLQAYGKDYIEHLHGQFLHSLRLAMSDLTPVVDAITDALLAARPRRRYYPGQGLGLMYFIHYYLPEGLRRRFLQAFFISHCLPRALQPGQPGTTPPQDAAQDPNLSPGPSPAVAR

SEQ ID NO: 39294 - protein, 58 aa, Homo sapiens
  Payload ID: 7866
  Gene Symbol: HSD11B2
  Gene Name: hydroxysteroid (11-beta) dehydrogenase 2
  ENSP ID: ENSP00000473429
LLAALDWLCQRLLPPPAALAVLAAAGWIALSRLARPQRLPVATRAVLITGAWIPSRPW

SEQ ID NO: 39295 - protein, 329 aa, Homo sapiens
  Payload ID: 7867
  Gene Symbol: HSD17B1
  Gene Name: hydroxysteroid (17-beta) dehydrogenase 1
  ENSP ID: ENSP00000225929
MARTVVLITGCSSGIGLHLAVRLASDPSQSFKVYATLRDLKTQGRLWEAARALACPPGSLETLQLDVRDSKSVAAARERVTEGRVDVLVCNAGLGLLGPLEALGEDAVASVLDVNVVGTVRMLQAFLPDMKRRGSGRVLVTGSVGGLMGLPFNDVYCASKFALEGLCESLAVLLLPFGVHSLSLIECGPVHTAFMEKVLGSPEEVLDRTDIHTFHRFYQYLAHSKQVFREAAQNPEEVAEVFLTALRAPKPTLRYFTTERFLPLLRMRLDDPSGSNYVTAMHREVFGDVPAKAEAGAEAGGGAGPGAEDEAGRGAVGDPELGDPPAAPQ

SEQ ID NO: 39296 - protein, 149 aa, Homo sapiens
  Payload ID: 7867
  Gene Symbol: HSD17B1
  Gene Name: hydroxysteroid (17-beta) dehydrogenase 1
  ENSP ID: ENSP00000465128
MARTVVLITGCSSGIGLHLAVRLASDPSQSFKVYATLRDLKTQGRLWEAARALACPPGSLETLQLDVRDSKSVAAARERVTEGRVDVLVCNAGLGLLGPLEALGEDAVASVLDVNVVGTVRMLQAFLPDMKRRGSGRVLVTGSVGGLMA

SEQ ID NO: 39297 - protein, 328 aa, Homo sapiens
  Payload ID: 7867
  Gene Symbol: HSD17B1
  Gene Name: hydroxysteroid (17-beta) dehydrogenase 1
  Uniprot ID: P14061
  ENSP ID: ENSP00000466799
MARTVVLITGCSSGIGLHLAVRLASDPSQSFKVYATLRDLKTQGRLWEAARALACPPGSLETLQLDVRDSKSVAAARERVTEGRVDVLVCNAGLGLLGPLEALGEDAVASVLDVNVVGTVRMLQAFLPDMKRRGSGRVLVTGSVGGLMGLPFNDVYCASKFALEGLCESLAVLLLPFGVHLSLIECGPVHTAFMEKVLGSPEEVLDRTDIHTFHRFYQYLAHSKQVFREAAQNPEEVAEVFLTALRAPKPTLRYFTTERFLPLLRMRLDDPSGSNYVTAMHREVFGDVPAKAEAGAEAGGGAGPGAEDEAGRGAVGDPELGDPPAAPQ

SEQ ID NO: 39298 - protein, 261 aa, Homo sapiens
  Payload ID: 7868
  Gene Symbol: HSD17B10
  Gene Name: hydroxysteroid (17-beta) dehydrogenase 10
  Uniprot ID: Q99714
  ENSP ID: ENSP00000168216
MAAACRSVKGLVAVITGGASGLGLATAERLVGQGASAVLLDLPNSGGEAQAKKLGNNCVFAPADVTSEKDVQTALALAKGKFGRVDVAVNCAGIAVASKTYNLKKGQTHTLEDFQRVLDVNLMGTFNVIRLVAGEMGQNEPDQGGQRGVIINTASVAAFEGQVGQAAYSASKGGIVGMTLPIARDLAPIGIRVMTIAPGLFGTPLLTSLPEKVCNFLASQVPFPSRLGDPAEYAHLVQAIIENPFLNGEVIRLDGAIRMQP

SEQ ID NO: 39299 - protein, 169 aa, Homo sapiens
  Payload ID: 7868
  Gene Symbol: HSD17B10
  Gene Name: hydroxysteroid (17-beta) dehydrogenase 10
  ENSP ID: ENSP00000364447
MAAACRSVKGLVAVITGGASGLGLATAERLVGQGASAVLLDLPNSGGEAQAKKLGNNCVFAPADVTSEKDVQTALALAKGKFGRVDVAVNCAGIAVASKTYNLKKGQTHTLEDFQRVLDVNLMGTFNVIRLVAGEMGQNEPDQGGQRGVIINTASVAAFEGQVCLAPHC

SEQ ID NO: 39300 - protein, 252 aa, Homo sapiens
  Payload ID: 7868
  Gene Symbol: HSD17B10
  Gene Name: hydroxysteroid (17-beta) dehydrogenase 10
  Uniprot ID: Q99714
  ENSP ID: ENSP00000364453
MAAACRSVKGLVAVITGGASGLGLATAERLVGQGASAVLLDLPNSGGEAQAKKLGNNCVFAPADVTSEKDVQTALALAKGKFGRVDVAVNCAGIAVASKTYNLKKGQTHTLEDFQRVLDVNLMGTFNVIRLVAGEMGQNEPDQGGQRGVIINTASVAAFEGQVGQAAYSASKGGIVGMTLPIARDLAPIGLFGTPLLTSLPEKVCNFLASQVPFPSRLGDPAEYAHLVQAIIENPFLNGEVIRLDGAIRMQP

SEQ ID NO: 39301 - protein, 300 aa, Homo sapiens
  Payload ID: 7869
  Gene Symbol: HSD17B11
  Gene Name: hydroxysteroid (17-beta) dehydrogenase 11
  Uniprot ID: Q8NBQ5
  ENSP ID: ENSP00000351035
MKFLLDILLLLPLLIVCSLESFVKLFIPKRRKSVTGEIVLITGAGHGIGRLTAYEFAKLKSKLVLWDINKHGLEETAAKCKGLGAKVHTFVVDCSNREDIYSSAKKVKAEIGDVSILVNNAGVVYTSDLFATQDPQIEKTFEVNVLAHFWTTKAFLPAMTKNNHGHIVTVASAAGHVSVPFLLAYCSSKFAAVGFHKTLTDELAALQITGVKTTCLCPNFVNTGFIKNPSTSLGPTLEPEEVVNRLMHGILTEQKMIFIPSSIAFLTTLERILPERFLAVLKRKISVKFDAVIGYKMKAQ

SEQ ID NO: 39302 - protein, 256 aa, Homo sapiens
  Payload ID: 7869
  Gene Symbol: HSD17B11
  Gene Name: hydroxysteroid (17-beta) dehydrogenase 11
  ENSP ID: ENSP00000423775
MKFLLDILLLLPLLIVCSLESFVKLFIPKRRKSVTGEIVLITGAGHGIGRLTAYEFAKLKSKLVLWDINKHGLEETAAKCKGLGAKVHTFVVDCSNREDIYSSAKKTTKAFLPAMTKNNHGHIVTVASAAGHVSVPFLLAYCSSKFAAVGFHKTLTDELAALQITGVKTTCLCPNFVNTGFIKNPSTSLGPTLEPEEVVNRLMHGILTEQKMIFIPSSIAFLTTLERILPERFLAVLKRKISVKFDAVIGYKMKAQ

SEQ ID NO: 39303 - protein, 312 aa, Homo sapiens
  Payload ID: 7870
  Gene Symbol: HSD17B12
  Gene Name: hydroxysteroid (17-beta) dehydrogenase 12
  Uniprot ID: Q53GQ0
  ENSP ID: ENSP00000278353
MESALPAAGFLYWVGAGTVAYLALRISYSLFTALRVWGVGNEAGVGPGLGEWAVVTGSTDGIGKSYAEELAKHGMKVVLISRSKDKLDQVSSEIKEKFKVETRTIAVDFASEDIYDKIKTGLAGLEIGILVNNVGMSYEYPEYFLDVPDLDNVIKKMININILSVCKMTQLVLPGMVERSKGAILNISSGSGMLPVPLLTIYSATKTFVDFFSQCLHEEYRSKGVFVQSVLPYFVATKLAKIRKPTLDKPSPETFVKSAIKTVGLQSRTNGYLIHALMGSIISNLPSWIYLKIVMNMNKSTRAHYLKKTKKN

SEQ ID NO: 39304 - protein, 98 aa, Homo sapiens
  Payload ID: 7870
  Gene Symbol: HSD17B12
  Gene Name: hydroxysteroid (17-beta) dehydrogenase 12
  Uniprot ID: Q53GQ0
  ENSP ID: ENSP00000379052
MESALPAAGFLYWVGAGTVAYLALRISYSLFTALRVWGVGNEAGVGPGLGEWAVVTGSTDGIGKSYAEELAKHGMKVVLISRSKDKLDQVSSEISNYT

SEQ ID NO: 39305 - protein, 164 aa, Homo sapiens
  Payload ID: 7870
  Gene Symbol: HSD17B12
  Gene Name: hydroxysteroid (17-beta) dehydrogenase 12
  ENSP ID: ENSP00000436582
MESALPAAGFLYWVGAGTVAYLALRISYSLFTALRVWGVGNEAGVGPGLGEWAEEKFKVETRTIAVDFASEDIYDKIKTGLAGLEIGILVNNVGMSYEYPEYFLDVPDLDNVIKKMININILSVCKMTQLVLPGMVERSKGAILNISSGSGMLPVPLLTIYSAT

SEQ ID NO: 39306 - protein, 264 aa, Homo sapiens
  Payload ID: 7871
  Gene Symbol: HSD17B13
  Gene Name: hydroxysteroid (17-beta) dehydrogenase 13
  Uniprot ID: Q7Z5P4
  ENSP ID: ENSP00000305438
MNIILEILLLLITIIYSYLESLVKFFIPQRRKSVAGEIVLITGAGHGIGRQTTYEFAKRQSILVLWDINKVKKEVGDVTIVVNNAGTVYPADLLSTKDEEITKTFEVNILGHFWITKALLPSMMERNHGHIVTVASVCGHEGIPYLIPYCSSKFAAVGFHRGLTSELQALGKTGIKTSCLCPVFVNTGFTKNPSTRLWPVLETDEVVRSLIDGILTNKKMIFVPSYINIFLRLQKFLPERASAILNRMQNIQFEAVVGHKIKMK

SEQ ID NO: 39307 - protein, 300 aa, Homo sapiens
  Payload ID: 7871
  Gene Symbol: HSD17B13
  Gene Name: hydroxysteroid (17-beta) dehydrogenase 13
  Uniprot ID: Q7Z5P4
  ENSP ID: ENSP00000333300
MNIILEILLLLITIIYSYLESLVKFFIPQRRKSVAGEIVLITGAGHGIGRQTTYEFAKRQSILVLWDINKRGVEETAAECRKLGVTAHAYVVDCSNREEIYRSLNQVKKEVGDVTIVVNNAGTVYPADLLSTKDEEITKTFEVNILGHFWITKALLPSMMERNHGHIVTVASVCGHEGIPYLIPYCSSKFAAVGFHRGLTSELQALGKTGIKTSCLCPVFVNTGFTKNPSTRLWPVLETDEVVRSLIDGILTNKKMIFVPSYINIFLRLQKFLPERASAILNRMQNIQFEAVVGHKIKMK

SEQ ID NO: 39308 - protein, 270 aa, Homo sapiens
  Payload ID: 7872
  Gene Symbol: HSD17B14
  Gene Name: hydroxysteroid (17-beta) dehydrogenase 14
  Uniprot ID: Q9BPX1
  ENSP ID: ENSP00000263278
MATGTRYAGKVVVVTGGGRGIGAGIVRAFVNSGARVVICDKDESGGRALEQELPGAVFILCDVTQEDDVKTLVSETIRRFGRLDCVVNNAGHHPPPQRPEETSAQGFRQLLELNLLGTYTLTKLALPYLRKSQGNVINISSLVGAIGQAQAVPYVATKGAVTAMTKALALDESPYGVRVNCISPGNIWTPLWEELAALMPDPRATIREGMLAQPLGRMGQPAEVGAAAVFLASEANFCTGIELLVTGGAELGYGCKASRSTPVDAPDIPS

SEQ ID NO: 39309 - protein, 176 aa, Homo sapiens
  Payload ID: 7872
  Gene Symbol: HSD17B14
  Gene Name: hydroxysteroid (17-beta) dehydrogenase 14
  ENSP ID: ENSP00000469557
VICDKDESGGRALEQELPGAVFILCDVTQEDDVKTLVSETIRRFGRLDCVVNNAGHHPPPQRPEETSAQGFRQLLELNLLGTYTLTKLALPYLRKSQGNVINISSLVGAIGQAQAVPYVATKGAVTAMTKALALDESPYGVRVNCHWAAWASPLRSGLRQCSWPPKPTSARALNCS

SEQ ID NO: 39310 - protein, 106 aa, Homo sapiens
  Payload ID: 7872
  Gene Symbol: HSD17B14
  Gene Name: hydroxysteroid (17-beta) dehydrogenase 14
  ENSP ID: ENSP00000471631
GQAQAVPYVATKGAVTAMTKALALDESPYGVRVNCISPGNIWTPLWEELAALMPDPRATIREGMLAQVEVGFRSSHWAAWASPLRSGLRQCSWPPKPTSARALNCS

SEQ ID NO: 39311 - protein, 246 aa, Homo sapiens
  Payload ID: 7872
  Gene Symbol: HSD17B14
  Gene Name: hydroxysteroid (17-beta) dehydrogenase 14
  ENSP ID: ENSP00000472746
MATGTRYAGKVVVVTGGGRGIGAGIVRAFVNSGARVVICDKDESGGRALEQELPGAVFILCDVTQEDDVKDISFLLRPWFLRPSADLAAWIVLSTTLATLALPYLRKSQGNVINISSLVGAIGQAQAVPYVATKGAVTAMTKALALDESPYGVRVNCISPGNIWTPLWEELAALMPDPRATIREGMLAQPLGRMGQPAEVGAAAVFLASEANFCTGIELLVTGGAELGYGCKASRSTPVDAPDIPS

SEQ ID NO: 39312 - protein, 387 aa, Homo sapiens
  Payload ID: 7873
  Gene Symbol: HSD17B2
  Gene Name: hydroxysteroid (17-beta) dehydrogenase 2
  Uniprot ID: P37059
  ENSP ID: ENSP00000199936
MSTFFSDTAWICLAVPTVLCGTVFCKYKKSSGQLWSWMVCLAGLCAVCLLILSPFWGLILFSVSCFLMYTYLSGQELLPVDQKAVLVTGGDCGLGHALCKYLDELGFTVFAGVLNENGPGAEELRRTCSPRLSVLQMDITKPVQIKDAYSKVAAMLQDRGLWAVINNAGVLGFPTDGELLLMTDYKQCMAVNFFGTVEVTKTFLPLLRKSKGRLVNVSSMGGGAPMERLASYGSSKAAVTMFSSVMRLELSKWGIKVASIQPGGFLTNIAGTSDKWEKLEKDILDHLPAEVQEDYGQDYILAQRNFLLLINSLASKDFSPVLRDIQHAILAKSPFAYYTPGKGAYLWICLAHYLPIGIYDYFAKRHFGQDKPMPRALRMPNYKKKAT

SEQ ID NO: 39313 - protein, 200 aa, Homo sapiens
  Payload ID: 7873
  Gene Symbol: HSD17B2
  Gene Name: hydroxysteroid (17-beta) dehydrogenase 2
  ENSP ID: ENSP00000454931
SGQELLPVDQKAVLVTGGDCGLGHALCKYLDELGFTVFAGVLNENGPGAEELRRTCSPRLSVLQMDITKPVQIKDAYSKVAAMLQDRGLWAVINNAGVLGFPTDGELLLMTDYKQCMAVNFFGTVEVTKTFLPLLRKSKGRLVNVSSMGGESAFSHMVMGCPSQDMAHGILCGRTKMQGMQRQGWVRISQIVYTLLVLSQ

SEQ ID NO: 39314 - protein, 66 aa, Homo sapiens
  Payload ID: 7873
  Gene Symbol: HSD17B2
  Gene Name: hydroxysteroid (17-beta) dehydrogenase 2
  ENSP ID: ENSP00000455992
MDITKPVQIKDAYSKVAAMLQDRGLWAVINNAGVLGFPTDGELLLMTDYKQCMAVNFFGTVEVTKT

SEQ ID NO: 39315 - protein, 188 aa, Homo sapiens
  Payload ID: 7873
  Gene Symbol: HSD17B2
  Gene Name: hydroxysteroid (17-beta) dehydrogenase 2
  ENSP ID: ENSP00000456471
RRTCSPRLSVLQMDITKPVQIKDAYSKVAAMLQDRGLWAVINNAGVLGFPTDGELLLMTDYKQCMAVNFFGTVEVTKTFLPLLRKSKGRLVNVSSMGGGAPMERLASYGSSKAAVTMFSSVMRLELSKWGIKVASIQPGGFLTSRFLSPRTCDVHPGRNPEGPLGLTEHTLNPSLLSKMSTARDQLKG

SEQ ID NO: 39316 - protein, 220 aa, Homo sapiens
  Payload ID: 7873
  Gene Symbol: HSD17B2
  Gene Name: hydroxysteroid (17-beta) dehydrogenase 2
  ENSP ID: ENSP00000456529
MDITKPVQIKDAYSKVAAMLQDRGLWAVINNAGVLGFPTDGELLLMTDYKQCMAVNFFGTVEVTKTFLPLLRKSKGRLVNVSSMGGGAPMERLASYGSSKAAVTMFSSVMRLELSKWGIKVASIQPGGFLTNIAGTSDKWEKLEKDILDHLPAEVQEDYGQDYILAQRNFLLLINSLASKDFSPVLRDIQHAILAKSPFAYYTPGKGAYLWICLAHYLPI

SEQ ID NO: 39317 - protein, 133 aa, Homo sapiens
  Payload ID: 7873
  Gene Symbol: HSD17B2
  Gene Name: hydroxysteroid (17-beta) dehydrogenase 2
  ENSP ID: ENSP00000457943
MSTFFSDTAWICLAVPTVLCGTVFCKYKKSSGQLWSWMVCLAGLCAVCLLILSPFWGLILFSVSCFLMYTYLSGQELLPVDQKAVLVTGLWAVINNAGVLGFPTDGELLLMTDYKQCMAVNFFGTVEVTKTFL

SEQ ID NO: 39318 - protein, 260 aa, Homo sapiens
  Payload ID: 7874
  Gene Symbol: HSD17B3
  Gene Name: hydroxysteroid (17-beta) dehydrogenase 3
  Uniprot ID: P37058
  ENSP ID: ENSP00000364411
MGDVLEQFFILTGLLVCLACLAKCVRFSRCVLLNYWKVLPKSFLRSMGQWAVITGAGDGIGKAYSFELAKRGLNVVLISRTLEKLEAIATEIERTTGRSVKIIQADFTKDDIYEHIKEKLAGLEIGILVNNVGMLPNLLPSHFLNAPDEIQSLIHCNITSVVKMTQLILKHMESRQKGLILNISSGIALFPWPLYSMYSASKAFVCAFSKALQEEYKAKEVIIQAGFLSLIPAWAFYSGAFQRLLLTHYVAYLKLNTKVR

SEQ ID NO: 39319 - protein, 310 aa, Homo sapiens
  Payload ID: 7874
  Gene Symbol: HSD17B3
  Gene Name: hydroxysteroid (17-beta) dehydrogenase 3
  Uniprot ID: P37058
  ENSP ID: ENSP00000364412
MGDVLEQFFILTGLLVCLACLAKCVRFSRCVLLNYWKVLPKSFLRSMGQWAVITGAGDGIGKAYSFELAKRGLNVVLISRTLEKLEAIATEIERTTGRSVKIIQADFTKDDIYEHIKEKLAGLEIGILVNNVGMLPNLLPSHFLNAPDEIQSLIHCNITSVVKMTQLILKHMESRQKGLILNISSGIALFPWPLYSMYSASKAFVCAFSKALQEEYKAKEVIIQVLTPYAVSTAMTKYLNTNVITKTADEFVKESLNYVTIGGETCGCLAHEILAGFLSLIPAWAFYSGAFQRLLLTHYVAYLKLNTKVR

SEQ ID NO: 39320 - protein, 736 aa, Homo sapiens
  Payload ID: 7875
  Gene Symbol: HSD17B4
  Gene Name: hydroxysteroid (17-beta) dehydrogenase 4
  Uniprot ID: P51659
  ENSP ID: ENSP00000256216
MGSPLRFDGRVVLVTGAGAGLGRAYALAFAERGALVVVNDLGGDFKGVGKGSLAADKVVEEIRRRGGKAVANYDSVEEGEKVVKTALDAFGRIDVVVNNAGILRDRSFARISDEDWDIIHRVHLRGSFQVTRAAWEHMKKQKYGRIIMTSSASGIYGNFGQANYSAAKLGLLGLANSLAIEGRKSNIHCNTIAPNAGSRMTQTVMPEDLVEALKPEYVAPLVLWLCHESCEENGGLFEVGAGWIGKLRWERTLGAIVRQKNHPMTPEAVKANWKKICDFENASKPQSIQESTGSIIEVLSKIDSEGGVSANHTSRATSTATSGFAGAIGQKLPPFSYAYTELEAIMYALGVGASIKDPKDLKFIYEGSSDFSCLPTFGVIIGQKSMMGGGLAEIPGLSINFAKVLHGEQYLELYKPLPRAGKLKCEAVVADVLDKGSGVVIIMDVYSYSEKELICHNQFSLFLVGSGGFGGKRTSDKVKVAVAIPNRPPDAVLTDTTSLNQAALYRLSGDWNPLHIDPNFASLAGFDKPILHGLCTFGFSARRVLQQFADNDVSRFKAIKARFAKPVYPGQTLQTEMWKEGNRIHFQTKVQETGDIVISNAYVDLAPTSGTSAKTPSEGGKLQSTFVFEEIGRRLKDIGPEVVKKVNAVFEWHITKGGNIGAKWTIDLKSGSGKVYQGPAKGAADTTIILSDEDFMEVVLGKLDPQKAFFSGRLKARGNIMLSQKLQMILKDYAKL

SEQ ID NO: 39321 - protein, 500 aa, Homo sapiens
  Payload ID: 7875
  Gene Symbol: HSD17B4
  Gene Name: hydroxysteroid (17-beta) dehydrogenase 4
  ENSP ID: ENSP00000390208
MGSPLRFDGRVVLVTGAGAGLGRAYALAFAERGALVVVNDLGGDFKGVGKGSLAADKVVEEIRRRGGKAVANYDSVEEGEKVVKTALDAFGRIDVVVNNAGILRDRSFARISDEDWDIIHRVHLRGSFQVTRAAWEHMKKQKYGRIIMTSSASGIYGNFGQANYSAAKLGLLGLANSLAIEGRKSNIHCNTIAPNAGSRMTQTVMPEDLVEALKPEYVAPLVLWLCHESCEENGGLFEVGAGWIGKLRWERTLGAIVRQKNHPMTPEAVKANWKKICDFENASKPQSIQESTGSIIEVLSKIDSEGGVSANHTSRATSTATSGFAGAIGQKLPPFSYAYTELEAIMYALGVGASIKDPKDLKFIYEGSSDFSCLPTFGVIIGQKSMMGGGLAEIPGLSINFAKVLHGEQYLELYKPLPRAGKLKCEAVVADVLDKGSGVVIIMDVYSYSEKELICHNQFSLFLVGSGGFGGKRTSDKVKPTQCEDDEDEDLYDDLLPLTE

SEQ ID NO: 39322 - protein, 596 aa, Homo sapiens
  Payload ID: 7875
  Gene Symbol: HSD17B4
  Gene Name: hydroxysteroid (17-beta) dehydrogenase 4
  ENSP ID: ENSP00000411960
MKKQKIIMTSSASGIYGNFGQANYSAAKLGLLGLANSLAIEGRKSNIHCNTIAPNAGSRMTQTVMPEDLVEALKPEYVAPLVLWLCHESCEENGGLFEVGAGWIGKLRWERTLGAIVRQKNHPMTPEAVKANWKKICDFENASKPQSIQESTGSIIEVLSKIDSEGGVSANHTSRATSTATSGFAGAIGQKLPPFSYAYTELEAIMYALGVGASIKDPKDLKFIYEGSSDFSCLPTFGVIIGQKSMMGGGLAEIPGLSINFAKVLHGEQYLELYKPLPRAGKLKCEAVVADVLDKGSGVVIIMDVYSYSEKELICHNQFSLFLVGSGGFGGKRTSDKVKVAVAIPNRPPDAVLTDTTSLNQAALYRLSGDWNPLHIDPNFASLAGFDKPILHGLCTFGFSARRVLQQFADNDVSRFKAIKARFAKPVYPGQTLQTEMWKEGNRIHFQTKVQETGDIVISNAYVDLAPTSGTSAKTPSEGGKLQSTFVFEEIGRRLKDIGPEVVKKVNAVFEWHITKGGNIGAKWTIDLKSGSGKVYQGPAKGAADTTIILSDEDFMEVVLGKLDPQKAFFSGRLKARGNIMLSQKLQMILKDYAKL

SEQ ID NO: 39323 - protein, 761 aa, Homo sapiens
  Payload ID: 7875
  Gene Symbol: HSD17B4
  Gene Name: hydroxysteroid (17-beta) dehydrogenase 4
  Uniprot ID: P51659
  ENSP ID: ENSP00000420914
MVILEAPHLLRRKEPETPGLSSRIGPSLCPGFCRKRSVSCCFQNLCNNPMEKIISQCRFFVSMNDLGGDFKGVGKGSLAADKVVEEIRRRGGKAVANYDSVEEGEKVVKTALDAFGRIDVVVNNAGILRDRSFARISDEDWDIIHRVHLRGSFQVTRAAWEHMKKQKYGRIIMTSSASGIYGNFGQANYSAAKLGLLGLANSLAIEGRKSNIHCNTIAPNAGSRMTQTVMPEDLVEALKPEYVAPLVLWLCHESCEENGGLFEVGAGWIGKLRWERTLGAIVRQKNHPMTPEAVKANWKKICDFENASKPQSIQESTGSIIEVLSKIDSEGGVSANHTSRATSTATSGFAGAIGQKLPPFSYAYTELEAIMYALGVGASIKDPKDLKFIYEGSSDFSCLPTFGVIIGQKSMMGGGLAEIPGLSINFAKVLHGEQYLELYKPLPRAGKLKCEAVVADVLDKGSGVVIIMDVYSYSEKELICHNQFSLFLVGSGGFGGKRTSDKVKVAVAIPNRPPDAVLTDTTSLNQAALYRLSGDWNPLHIDPNFASLAGFDKPILHGLCTFGFSARRVLQQFADNDVSRFKAIKARFAKPVYPGQTLQTEMWKEGNRIHFQTKVQETGDIVISNAYVDLAPTSGTSAKTPSEGGKLQSTFVFEEIGRRLKDIGPEVVKKVNAVFEWHITKGGNIGAKWTIDLKSGSGKVYQGPAKGAADTTIILSDEDFMEVVLGKLDPQKAFFSGRLKARGNIMLSQKLQMILKDYAKL

SEQ ID NO: 39324 - protein, 718 aa, Homo sapiens
  Payload ID: 7875
  Gene Symbol: HSD17B4
  Gene Name: hydroxysteroid (17-beta) dehydrogenase 4
  Uniprot ID: P51659
  ENSP ID: ENSP00000424613
MGSPLRFDGRVVLVTGAGAVNDLGGDFKGVGKGSLAADKVVEEIRRRGGKAVANYDSVEEGEKVVKTALDAFGRIDVVVNNAGILRDRSFARISDEDWDIIHRVHLRGSFQVTRAAWEHMKKQKYGRIIMTSSASGIYGNFGQANYSAAKLGLLGLANSLAIEGRKSNIHCNTIAPNAGSRMTQTVMPEDLVEALKPEYVAPLVLWLCHESCEENGGLFEVGAGWIGKLRWERTLGAIVRQKNHPMTPEAVKANWKKICDFENASKPQSIQESTGSIIEVLSKIDSEGGVSANHTSRATSTATSGFAGAIGQKLPPFSYAYTELEAIMYALGVGASIKDPKDLKFIYEGSSDFSCLPTFGVIIGQKSMMGGGLAEIPGLSINFAKVLHGEQYLELYKPLPRAGKLKCEAVVADVLDKGSGVVIIMDVYSYSEKELICHNQFSLFLVGSGGFGGKRTSDKVKVAVAIPNRPPDAVLTDTTSLNQAALYRLSGDWNPLHIDPNFASLAGFDKPILHGLCTFGFSARRVLQQFADNDVSRFKAIKARFAKPVYPGQTLQTEMWKEGNRIHFQTKVQETGDIVISNAYVDLAPTSGTSAKTPSEGGKLQSTFVFEEIGRRLKDIGPEVVKKVNAVFEWHITKGGNIGAKWTIDLKSGSGKVYQGPAKGAADTTIILSDEDFMEVVLGKLDPQKAFFSGRLKARGNIMLSQKLQMILKDYAKL

SEQ ID NO: 39325 - protein, 712 aa, Homo sapiens
  Payload ID: 7875
  Gene Symbol: HSD17B4
  Gene Name: hydroxysteroid (17-beta) dehydrogenase 4
  ENSP ID: ENSP00000424940
MEKIISQCRFFVSMNDLGGDFKGVGKGSLAADKVVEEIRRRGGKAVANYDSVEEGEKVVKTALDAFGRIDVVVNNAGILRDRSFARISDEDWDIIHRVHLRGSFQVTRAAWEHMKKQKYGRIIMTSSASGIYGNFGQANYSAAKLGLLGLANSLAIEGRKSNIHCNTIAPNAGSRMTQTVMPEDLVEALKPEYVAPLVLWLCHESCEENGGLFEVGAGWIGKLRWERTLGAIVRQKNHPMTPEAVKANWKKICDFENASKPQSIQESTGSIIEVLSKIDSEGGVSANHTSRATSTATSGFAGAIGQKLPPFSYAYTELEAIMYALGVGASIKDPKDLKFIYEGSSDFSCLPTFGVIIGQKSMMGGGLAEIPGLSINFAKVLHGEQYLELYKPLPRAGKLKCEAVVADVLDKGSGVVIIMDVYSYSEKELICHNQFSLFLVGSGGFGGKRTSDKVKVAVAIPNRPPDAVLTDTTSLNQAALYRLSGDWNPLHIDPNFASLAGFDKPILHGLCTFGFSARRVLQQFADNDVSRFKAIKARFAKPVYPGQTLQTEMWKEGNRIHFQTKVQETGDIVISNAYVDLAPTSGTSAKTPSEGGKLQSTFVFEEIGRRLKDIGPEVVKKVNAVFEWHITKGGNIGAKWTIDLKSGSGKVYQGPAKGAADTTIILSDEDFMEVVLGKLDPQKAFFSGRLKARGNIMLSQKLQMILKDYAKL

SEQ ID NO: 39326 - protein, 599 aa, Homo sapiens
  Payload ID: 7875
  Gene Symbol: HSD17B4
  Gene Name: hydroxysteroid (17-beta) dehydrogenase 4
  ENSP ID: ENSP00000425993
MKKQKYGRIIMTSSASGIYGNFGQANYSAAKLGLLGLANSLAIEGRKSNIHCNTIAPNAGSRMTQTVMPEDLVEALKPEYVAPLVLWLCHESCEENGGLFEVGAGWIGKLRWERTLGAIVRQKNHPMTPEAVKANWKKICDFENASKPQSIQESTGSIIEVLSKIDSEGGVSANHTSRATSTATSGFAGAIGQKLPPFSYAYTELEAIMYALGVGASIKDPKDLKFIYEGSSDFSCLPTFGVIIGQKSMMGGGLAEIPGLSINFAKVLHGEQYLELYKPLPRAGKLKCEAVVADVLDKGSGVVIIMDVYSYSEKELICHNQFSLFLVGSGGFGGKRTSDKVKVAVAIPNRPPDAVLTDTTSLNQAALYRLSGDWNPLHIDPNFASLAGFDKPILHGLCTFGFSARRVLQQFADNDVSRFKAIKARFAKPVYPGQTLQTEMWKEGNRIHFQTKVQETGDIVISNAYVDLAPTSGTSAKTPSEGGKLQSTFVFEEIGRRLKDIGPEVVKKVNAVFEWHITKGGNIGAKWTIDLKSGSGKVYQGPAKGAADTTIILSDEDFMEVVLGKLDPQKAFFSGRLKARGNIMLSQKLQMILKDYAKL

SEQ ID NO: 39327 - protein, 474 aa, Homo sapiens
  Payload ID: 7875
  Gene Symbol: HSD17B4
  Gene Name: hydroxysteroid (17-beta) dehydrogenase 4
  ENSP ID: ENSP00000426272
MISAHYNLCPLGSSDSPTSASQVAGITESTGSIIEVLSKIDSEGGVSANHTSRATSTATSGFAGAIGQKLPPFSYAYTELEAIMYALGVGASIKDPKDLKFIYEGSSDFSCLPTFGVIIGQKSMMGGGLAEIPGLSINFAKVLHGEQYLELYKPLPRAGKLKCEAVVADVLDKGSGVVIIMDVYSYSEKELICHNQFSLFLVGSGGFGGKRTSDKVKVAVAIPNRPPDAVLTDTTSLNQAALYRLSGDWNPLHIDPNFASLAGFDKPILHGLCTFGFSARRVLQQFADNDVSRFKAIKARFAKPVYPGQTLQTEMWKEGNRIHFQTKVQETGDIVISNAYVDLAPTSGTSAKTPSEGGKLQSTFVFEEIGRRLKDIGPEVVKKVNAVFEWHITKGGNIGAKWTIDLKSGSGKVYQGPAKGAADTTIILSDEDFMEVVLGKLDPQKAFFSGRLKARGNIMLSQKLQMILKDYAKL

SEQ ID NO: 39328 - protein, 317 aa, Homo sapiens
  Payload ID: 7876
  Gene Symbol: HSD17B6
  Gene Name: hydroxysteroid (17-beta) dehydrogenase 6
  Uniprot ID: O14756
  ENSP ID: ENSP00000318631
MWLYLAAFVGLYYLLHWYRERQVVSHLQDKYVFITGCDSGFGNLLARQLDARGLRVLAACLTEKGAEQLRGQTSDRLETVTLDVTKMESIAAATQWVKEHVGDRGLWGLVNNAGILTPITLCEWLNTEDSMNMLKVNLIGVIQVTLSMLPLVRRARGRIVNVSSILGRVAFFVGGYCVSKYGVEAFSDILRREIQHFGVKISIVEPGYFRTGMTNMTQSLERMKQSWKEAPKHIKETYGQQYFDALYNIMKEGLLNCSTNLNLVTDCMEHALTSVHPRTRYSAGWDAKFFFIPLSYLPTSLADYILTRSWPKPAQAV

SEQ ID NO: 39329 - protein, 317 aa, Homo sapiens; identical to SEQ ID NO: 39328
  Payload ID: 7876
  Gene Symbol: HSD17B6
  Gene Name: hydroxysteroid (17-beta) dehydrogenase 6
  Uniprot ID: O14756
  ENSP ID: ENSP00000450698

SEQ ID NO: 39330 - protein, 317 aa, Homo sapiens; identical to SEQ ID NO: 39328
  Payload ID: 7876
  Gene Symbol: HSD17B6
  Gene Name: hydroxysteroid (17-beta) dehydrogenase 6
  Uniprot ID: O14756
  ENSP ID: ENSP00000451406

SEQ ID NO: 39331 - protein, 88 aa, Homo sapiens
  Payload ID: 7876
  Gene Symbol: HSD17B6
  Gene Name: hydroxysteroid (17-beta) dehydrogenase 6
  ENSP ID: ENSP00000451497
MWLYLAAFVGLYYLLHWYRERQVVSHLQDKYVFITGCDSGFGNLLARQLDARGLRVLAACLTEKGAEQLRGQTSDRLETVTLDVTKME

SEQ ID NO: 39332 - protein, 317 aa, Homo sapiens; identical to SEQ ID NO: 39328
  Payload ID: 7876
  Gene Symbol: HSD17B6
  Gene Name: hydroxysteroid (17-beta) dehydrogenase 6
  Uniprot ID: O14756
  ENSP ID: ENSP00000451753

SEQ ID NO: 39333 - protein, 75 aa, Homo sapiens
  Payload ID: 7876
  Gene Symbol: HSD17B6
  Gene Name: hydroxysteroid (17-beta) dehydrogenase 6
  ENSP ID: ENSP00000452103
MWLYLAAFVGLYYLLHWYRERQVVSHLQDKYVFITGCDSGFGNLLARQLDARGLRVLAACLTEKGAEQLRGQTSD

SEQ ID NO: 39334 - protein, 317 aa, Homo sapiens; identical to SEQ ID NO: 39328
  Payload ID: 7876
  Gene Symbol: HSD17B6
  Gene Name: hydroxysteroid (17-beta) dehydrogenase 6
  Uniprot ID: O14756
  ENSP ID: ENSP00000452273

SEQ ID NO: 39335 - protein, 341 aa, Homo sapiens
  Payload ID: 7877
  Gene Symbol: HSD17B7
  Gene Name: hydroxysteroid (17-beta) dehydrogenase 7
  Uniprot ID: P56937
  ENSP ID: ENSP00000254521
MRKVVLITGASSGIGLALCKRLLAEDDELHLCLACRNMSKAEAVCAALLASHPTAEVTIVQVDVSNLQSVFRASKELKQRFQRLDCIYLNAGIMPNPQLNIKALFFGLFSRKVIHMFSTAEGLLTQGDKITADGLQEVFETNVFGHFILIRELEPLLCHSDNPSQLIWTSSRSARKSNFSLEDFQHSKGKEPYSSSKYATDLLSVALNRNFNQQGLYSNVACPGTALTNLTYGILPPFIWTLLMPAILLLRFFANAFTLTPYNGTEALVWLFHQKPESLNPLIKYLSATTGFGRNYIMTQKMDLDEDTAEKFYQKLLELEKHIRVTIQKTDNQARLSGSCL

SEQ ID NO: 39336 - protein, 111 aa, Homo sapiens
  Payload ID: 7877
  Gene Symbol: HSD17B7
  Gene Name: hydroxysteroid (17-beta) dehydrogenase 7
  ENSP ID: ENSP00000356889
MRKVVLITGASSGIGLALCKRLLAEDDELHLCLACRNMSKAEAVCAALLASHPTAEVTIVQVDVSNLQSVFRASKELKQRFQRLDCIYLNAGIMPNPQLNIKALFFGLFSS

SEQ ID NO: 39337 - protein, 84 aa, Homo sapiens
  Payload ID: 7877
  Gene Symbol: HSD17B7
  Gene Name: hydroxysteroid (17-beta) dehydrogenase 7
  ENSP ID: ENSP00000356892
MRKVVLITGASSGIGLALCKRLLAEDDELHLCLACRNMSKAEAVCAALLASHPTAEVTIVQVDVSNLQSVFRASKELKQRYISC

SEQ ID NO: 39338 - protein, 109 aa, Homo sapiens
  Payload ID: 7877
  Gene Symbol: HSD17B7
  Gene Name: hydroxysteroid (17-beta) dehydrogenase 7
  ENSP ID: ENSP00000436334
MRKVVLITGASSGIGLALCKRLLAEDDELHLCLACRNMSKAEAVCAALLASHPTAEVTIVQVDVSNLQSVFRASKELKQRMIKKWLYVICVEDHVSEIRLYISKCWDHA

SEQ ID NO: 39339 - protein, 62 aa, Homo sapiens
  Payload ID: 7877
  Gene Symbol: HSD17B7
  Gene Name: hydroxysteroid (17-beta) dehydrogenase 7
  ENSP ID: ENSP00000476930
  MOD_RES (1)..(1): Any amino acid
XSLEDFQHSKGKEPYSSSKYATDLLSVALNRNFNQQVLYSSVYVIKYLPHYMEVGLSITIFR

SEQ ID NO: 39340 - protein, 261 aa, Homo sapiens
  Payload ID: 7878
  Gene Symbol: HSD17B8
  Gene Name: hydroxysteroid (17-beta) dehydrogenase 8
  Uniprot ID: Q92506
  ENSP ID: ENSP00000230236
MASQLQNRLRSALALVTGAGSGIGRAVSVRLAGEGATVAACDLDRAAAQETVRLLGGPGSKEGPPRGNHAAFQADVSEARAARCLLEQVQACFSRPPSVVVSCAGITQDEFLLHMSEDDWDKVIAVNLKGTFLVTQAAAQALVSNGCRGSIINISSIVGKVGNVGQTNYAASKAGVIGLTQTAARELGRHGIRCNSVLPGFIATPMTQKVPQKVVDKITEMIPMGHLGDPEDVADVVAFLASEDSGYITGTSVEVTGGLFM

SEQ ID NO: 39341 - protein, 261 aa, Homo sapiens; identical to SEQ ID NO: 39340
  Payload ID: 7878
  Gene Symbol: HSD17B8
  Gene Name: hydroxysteroid (17-beta) dehydrogenase 8
  Uniprot ID: Q92506
  ENSP ID: ENSP00000363794

SEQ ID NO: 39342 - protein, 261 aa, Homo sapiens; identical to SEQ ID NO: 39340
  Payload ID: 7878
  Gene Symbol: HSD17B8
  Gene Name: hydroxysteroid (17-beta) dehydrogenase 8
  Uniprot ID: Q92506
  ENSP ID: ENSP00000387753

SEQ ID NO: 39343 - protein, 261 aa, Homo sapiens; identical to SEQ ID NO: 39340
  Payload ID: 7878
  Gene Symbol: HSD17B8
  Gene Name: hydroxysteroid (17-beta) dehydrogenase 8
  Uniprot ID: Q92506
  ENSP ID: ENSP00000403538

SEQ ID NO: 39344 - protein, 261 aa, Homo sapiens; identical to SEQ ID NO: 39340
  Payload ID: 7878
  Gene Symbol: HSD17B8
  Gene Name: hydroxysteroid (17-beta) dehydrogenase 8
  Uniprot ID: Q92506
  ENSP ID: ENSP00000406488

SEQ ID NO: 39345 - protein, 261 aa, Homo sapiens; identical to SEQ ID NO: 39340
  Payload ID: 7878
  Gene Symbol: HSD17B8
  Gene Name: hydroxysteroid (17-beta) dehydrogenase 8
  Uniprot ID: Q92506
  ENSP ID: ENSP00000413950

SEQ ID NO: 39346 - protein, 330 aa, Homo sapiens
  Payload ID: 7879
  Gene Symbol: HSDL1
  Gene Name: hydroxysteroid dehydrogenase like 1
  Uniprot ID: Q3SXM5
  ENSP ID: ENSP00000219439
MAAVDSFYLLYREIARSCNCYMEALALVGAWYTARKSITVICDFYSLIRLHFIPRLGSRADLIKQYGRWAVVSGATDGIGKAYAEELASRGLNIILISRNEEKLQVVAKDIADTYKVETDIIVADFSSGREIYLPIREALKDKDVGILVNNVGVFYPYPQYFTQLSEDKLWDIINVNIAAASLMVHVVLPGMVERKKGAIVTISSGSCCKPTPQLAAFSASKAYLDHFSRALQYEYASKGIFVQSLIPFYVATSMTAPSNFLHRCSWLVPSPKVYAHHAVSTLGISKRTTGYWSHSIQFLFAQYMPEWLWVWGANILNRSLRKEALSCTA

SEQ ID NO: 39347 - protein, 275 aa, Homo sapiens
  Payload ID: 7879
  Gene Symbol: HSDL1
  Gene Name: hydroxysteroid dehydrogenase like 1
  Uniprot ID: Q3SXM5
  ENSP ID: ENSP00000407437
MAAVDSFYLLYREIARSCNCYMEALALVGAWYTARKSITVICDFYSLIRLHFIPRLGSRADLIKQYGRWAVVSGATDGIGKAYAEELASRGLNIILISRNEEKLQYFTQLSEDKLWDIINVNIAAASLMVHVVLPGMVERKKGAIVTISSGSCCKPTPQLAAFSASKAYLDHFSRALQYEYASKGIFVQSLIPFYVATSMTAPSNFLHRCSWLVPSPKVYAHHAVSTLGISKRTTGYWSHSIQFLFAQYMPEWLWVWGANILNRSLRKEALSCTA

SEQ ID NO: 39348 - protein, 70 aa, Homo sapiens
  Payload ID: 7879
  Gene Symbol: HSDL1
  Gene Name: hydroxysteroid dehydrogenase like 1
  ENSP ID: ENSP00000454856
MAAVDSFYLLYREIARSCNCYMEALALVGAWYTARKSITVICDFYSLIRLHFIPRLGSRADLIKQYGRWA

SEQ ID NO: 39349 - protein, 108 aa, Homo sapiens
  Payload ID: 7879
  Gene Symbol: HSDL1
  Gene Name: hydroxysteroid dehydrogenase like 1
  ENSP ID: ENSP00000455797
MAAVDSFYLLYREIARSCNCYMEALALVGAWYTARKSITVICDFYSLIRLHFIPRLGSRADLIKQYGRWAVVSGATDGIGKAYAEELASRGLNIILISRNEEKLQVVA

SEQ ID NO: 39350 - protein, 111 aa, Homo sapiens
  Payload ID: 7879
  Gene Symbol: HSDL1
  Gene Name: hydroxysteroid dehydrogenase like 1
  ENSP ID: ENSP00000457026
MAAVDSFYLLYREIARSCNCYMEALALVGAWYTARKSITVICDFYSLIRLHFIPRLGSRADLIKQYGRWAVVSGATDGIGKAYAEELASRGLNIILISRNEEKLQVVAKDI

SEQ ID NO: 39351 - protein, 345 aa, Homo sapiens
  Payload ID: 7880
  Gene Symbol: HSDL2
  Gene Name: hydroxysteroid dehydrogenase like 2
  Uniprot ID: Q6YN16
  ENSP ID: ENSP00000381783
MLPNTGRLAGCTVFITGASRGIGKAIALKAAKDGANIVIAAKTAQPHPKLLGTIYTAAEEIEAVGGKALPCIVDVRDEQQISAAVEKAIKKFGAYTIAKYGMSMYVLGMAEEFKGEIAVNALWPKTAIHTAAMDMLGGPGIESQCRKVDIIADAAYSIFQKPKSFTGNFVIDENILKEEGIENFDVYAIKPGHPLQPDFFLDEYPEAVSKKVESTGAVPEFKEEKLQLQPKPRSGAVEETFRIVKDSLSDDVVKATQAIYLFELSGEDGGTWFLDLKSKGGNVGYGEPSDQADVVMSMTTDDFVKMFSGKLKPTMAFMSGKLKIKGNMALAIKLEKLMNQMNARL

SEQ ID NO: 39352 - protein, 418 aa, Homo sapiens
  Payload ID: 7880
  Gene Symbol: HSDL2
  Gene Name: hydroxysteroid dehydrogenase like 2
  Uniprot ID: Q6YN16
  ENSP ID: ENSP00000381785
MLPNTGRLAGCTVFITGASRGIGKAIALKAAKDGANIVIAAKTAQPHPKLLGTIYTAAEEIEAVGGKALPCIVDVRDEQQISAAVEKAIKKFGGIDILVNNASAISLTNTLDTPTKRLDLMMNVNTRGTYLASKACIPYLKKSKVAHILNISPPLNLNPVWFKQHCAYTIAKYGMSMYVLGMAEEFKGEIAVNALWPKTAIHTAAMDMLGGPGIESQCRKVDIIADAAYSIFQKPKSFTGNFVIDENILKEEGIENFDVYAIKPGHPLQPDFFLDEYPEAVSKKVESTGAVPEFKEEKLQLQPKPRSGAVEETFRIVKDSLSDDVVKATQAIYLFELSGEDGGTWFLDLKSKGGNVGYGEPSDQADVVMSMTTDDFVKMFSGKLKPTMAFMSGKLKIKGNMALAIKLEKLMNQMNARL

SEQ ID NO: 39353 - protein, 733 aa, Homo sapiens
  Payload ID: 7881
  Gene Symbol: HIC1
  Gene Name: hypermethylated in cancer 1
  Uniprot ID: Q14526
  ENSP ID: ENSP00000314080
MTFPEADILLKSGECAGQTMLDTMEAPGHSRQLLLQLNNQRTKGFLCDVIIVVQNALFRAHKNVLAASSAYLKSLVVHDNLLNLDHDMVSPAVFRLVLDFIYTGRLADGAEAAAAAAVAPGAEPSLGAVLAAASYLQIPDLVALCKKRLKRHGKYCHLRGGGGGGGGYAPYGRPGRGLRAATPVIQACYPSPVGPPPPPAAEPPSGPEAAVNTHCAELYASGPGPAAALCASERRCSPLCGLDLSKKSPPGSAAPERPLAERELPPRPDSPPSAGPAAYKEPPLALPSLPPLPFQKLEEAAPPSDPFRGGSGSPGPEPPGRPDGPSLLYRWMKHEPGLGSYGDELGRERGSPSERCEERGGDAAVSPGGPPLGLAPPPRYPGSLDGPGAGGDGDDYKSSSEETGSSEDPSPPGGHLEGYPCPHLAYGEPESFGDNLYVCIPCGKGFPSSEQLNAHVEAHVEEEEALYGRAEAAEVAAGAAGLGPPFGGGGDKVAGAPGGLGELLRPYRCASCDKSYKDPATLRQHEKTHWLTRPYPCTICGKKFTQRGTMTRHMRSHLGLKPFACDACGMRFTRQYRLTEHMRIHSGEKPYECQVCGGKFAQQRNLISHMKMHAVGGAAGAAGALAGLGGLPGVPGPDGKGKLDFPEGVFAVARLTAEQLSLKQQDKAAAAELLAQTTHFLHDPKVALESLYPLAKFTAELGLSPDKAAEVLSQGAHLAAGPDGRTIDRFSPT

SEQ ID NO: 39354 - protein, 714 aa, Homo sapiens
  Payload ID: 7881
  Gene Symbol: HIC1
  Gene Name: hypermethylated in cancer 1
  Uniprot ID: Q14526
  ENSP ID: ENSP00000382742
MLDTMEAPGHSRQLLLQLNNQRTKGFLCDVIIVVQNALFRAHKNVLAASSAYLKSLVVHDNLLNLDHDMVSPAVFRLVLDFIYTGRLADGAEAAAAAAVAPGAEPSLGAVLAAASYLQIPDLVALCKKRLKRHGKYCHLRGGGGGGGGYAPYGRPGRGLRAATPVIQACYPSPVGPPPPPAAEPPSGPEAAVNTHCAELYASGPGPAAALCASERRCSPLCGLDLSKKSPPGSAAPERPLAERELPPRPDSPPSAGPAAYKEPPLALPSLPPLPFQKLEEAAPPSDPFRGGSGSPGPEPPGRPDGPSLLYRWMKHEPGLGSYGDELGRERGSPSERCEERGGDAAVSPGGPPLGLAPPPRYPGSLDGPGAGGDGDDYKSSSEETGSSEDPSPPGGHLEGYPCPHLAYGEPESFGDNLYVCIPCGKGFPSSEQLNAHVEAHVEEEEALYGRAEAAEVAAGAAGLGPPFGGGGDKVAGAPGGLGELLRPYRCASCDKSYKDPATLRQHEKTHWLTRPYPCTICGKKFTQRGTMTRHMRSHLGLKPFACDACGMRFTRQYRLTEHMRIHSGEKPYECQVCGGKFAQQRNLISHMKMHAVGGAAGAAGALAGLGGLPGVPGPDGKGKLDFPEGVFAVARLTAEQLSLKQQDKAAAAELLAQTTHFLHDPKVALESLYPLAKFTAELGLSPDKAAEVLSQGAHLAAGPDGRTIDRFSPT

SEQ ID NO: 39355 - protein, 96 aa, Homo sapiens
  Payload ID: 7881
  Gene Symbol: HIC1
  Gene Name: hypermethylated in cancer 1
  ENSP ID: ENSP00000460268
MLDTMEAPGHSRQLLLQLNNQRTKGFLCDVIIVVQNALFRAHKNVLAASSAYLKSLVVHDNLLNLDHDMVSPAVFRLVLDFIYTGRLADGAEAAAA

SEQ ID NO: 39356 - protein, 9 aa, Homo sapiens
  Payload ID: 7881
  Gene Symbol: HIC1
  Gene Name: hypermethylated in cancer 1
  ENSP ID: ENSP00000461476
MLDTMEAPG

SEQ ID NO: 39357 - protein, 84 aa, Homo sapiens
  Payload ID: 7881
  Gene Symbol: HIC1
  Gene Name: hypermethylated in cancer 1
  ENSP ID: ENSP00000467045
MLDTMEAPGHSRQLLLQLNNQRTKGFLCDVIIVVQNALFRAHKNVLAASSAYLKSLVVHDNLLNLDHDMVSPAVFRLVLDFIYT

SEQ ID NO: 39358 - protein, 66 aa, Homo sapiens
  Payload ID: 7881
  Gene Symbol: HIC1
  Gene Name: hypermethylated in cancer 1
  ENSP ID: ENSP00000476554
MLDTMEAPGHSRQLLLQLNNQRTKGFLCDVIIVVQNALFRAHKNVLAASSAYLKSLVVHDNLLNLD

SEQ ID NO: 39359 - protein, 714 aa, Homo sapiens; identical to SEQ ID NO: 39354
  Payload ID: 7881
  Gene Symbol: HIC1
  Gene Name: hypermethylated in cancer 1
  Uniprot ID: Q14526
  ENSP ID: ENSP00000477858

SEQ ID NO: 39360 - protein, 615 aa, Homo sapiens
  Payload ID: 7882
  Gene Symbol: HIC2
  Gene Name: hypermethylated in cancer 2
  Uniprot ID: Q96JB3
  ENSP ID: ENSP00000384889
MVSGPLALRWCAWAGRGDMGPDMELPSHSKQLLLQLNQQRTKGFLCDVIIMVENSIFRAHKNVLAASSIYFKSLVLHDNLINLDTDMVSSTVFQQILDFIYTGKLLPSDQPAEPNFSTLLTAASYLQLPELAALCRRKLKRAGKPFGSGRAGSTGMGRPPRSQRLSTASVIQARYQGLVDGRKGAHAPQELPQAKGSDDELFLGGSNQDSVQGLGRAVCPAGGEAGLGGCSSSTNGSSGGCEQELGLDLSKKSPPLPPATPGPHLTPDDAAQLSDSQHGSPPAASAPPVANSASYSELGGTPDEPMDLEGAEDNHLSLLEAPGGQPRKSLRHSTRKKEWGKKEPVAGSPFERREAGPKGPCPGEEGEGVGDRVPNGILASGAGPSGPYGEPPYPCKEEEENGKDASEDSAQSGSEGGSGHASAHYMYRQEGYETVSYGDNLYVCIPCAKGFPSSEQLNAHVETHTEEELFIKEEGAYETGSGGAEEEAEDLSAPSAAYTAEPRPFKCSVCEKTYKDPATLRQHEKTHWLTRPFPCNICGKMFTQRGTMTRHMRSHLGLKPFACDECGMRFTRQYRLTEHMRVHSGEKPYECQLCGGKFTQQRNLISHLRMHTSPS

SEQ ID NO: 39361 - protein, 615 aa, Homo sapiens; identical to SEQ ID NO: 39360
  Payload ID: 7882
  Gene Symbol: HIC2
  Gene Name: hypermethylated in cancer 2
  Uniprot ID: Q96JB3
  ENSP ID: ENSP00000385319

SEQ ID NO: 39362 - protein, 615 aa, Homo sapiens; identical to SEQ ID NO: 39360
  Payload ID: 7882
  Gene Symbol: HIC2
  Gene Name: hypermethylated in cancer 2
  Uniprot ID: Q96JB3
  ENSP ID: ENSP00000387757

SEQ ID NO: 39363 - protein, 890 aa, Homo sapiens
  Payload ID: 7883
  Gene Symbol: HCN1
  Gene Name: hyperpolarization activated cyclic nucleotide gated potassium channel 1
  Uniprot ID: O60741
  ENSP ID: ENSP00000307342
MEGGGKPNSSSNSRDDGNSVFPAKASATGAGPAAAEKRLGTPPGGGGAGAKEHGNSVCFKVDGGGGGGGGGGGGEEPAGGFEDAEGPRRQYGFMQRQFTSMLQPGVNKFSLRMFGSQKAVEKEQERVKTAGFWIIHPYSDFRFYWDLIMLIMMVGNLVIIPVGITFFTEQTTTPWIIFNVASDTVFLLDLIMNFRTGTVNEDSSEIILDPKVIKMNYLKSWFVVDFISSIPVDYIFLIVEKGMDSEVYKTARALRIVRFTKILSLLRLLRLSRLIRYIHQWEEIFHMTYDLASAVVRIFNLIGMMLLLCHWDGCLQFLVPLLQDFPPDCWVSLNEMVNDSWGKQYSYALFKAMSHMLCIGYGAQAPVSMSDLWITMLSMIVGATCYAMFVGHATALIQSLDSSRRQYQEKYKQVEQYMSFHKLPADMRQKIHDYYEHRYQGKIFDEENILNELNDPLREEIVNFNCRKLVATMPLFANADPNFVTAMLSKLRFEVFQPGDYIIREGAVGKKMYFIQHGVAGVITKSSKEMKLTDGSYFGEICLLTKGRRTASVRADTYCRLYSLSVDNFNEVLEEYPMMRRAFETVAIDRLDRIGKKNSILLQKFQKDLNTGVFNNQENEILKQIVKHDREMVQAIAPINYPQMTTLNSTSSTTTPTSRMRTQSPPVYTATSLSHSNLHSPSPSTQTPQPSAILSPCSYTTAVCSPPVQSPLAARTFHYASPTASQLSLMQQQPQQQVQQSQPPQTQPQQPSPQPQTPGSSTPKNEVHKSTQALHNTNLTREVRPLSASQPSLPHEVSTLISRPHPTVGESLASIPQPVTAVPGTGLQAGGRSTVPQRVTLFRQMSSGAIPPNRGVPPAPPPPAAALPRESSSVLNTDPDAEKPRFASNL

SEQ ID NO: 39364 - protein, 295 aa, Homo sapiens
  Payload ID: 7883
  Gene Symbol: HCN1
  Gene Name: hyperpolarization activated cyclic nucleotide gated potassium channel 1
  ENSP ID: ENSP00000489134
MEGGGKPNSSSNSRDDGNSVFPAKASATGAGPAAAEKRLGTPPGGGGAGAKEHGNSVCFKVDGGGGGGGGGGGGEEPAGGFEDAEGPRRQYGFMQRQFTSMLQPGVNKFSLRMFGSQKAVEKEQERVKTAGFWIIHPYSDFRFYWDLIMLIMMVGNLVIIPVGITFFTEQTTTPWIIFNVASDTVFLLDLIMNFRTGTVNEDSSEIILDPKVIKMNYLKSWFVVDFISSIPVDYIFLIVEKGMDSEVYKTARALRIVRFTKILSLLRLLRLSRLIRYIHQWEEVRCIFFFFKSIS

SEQ ID NO: 39365 - protein, 889 aa, Homo sapiens
  Payload ID: 7884
  Gene Symbol: HCN2
  Gene Name: hyperpolarization activated cyclic nucleotide gated potassium channel 2
  Uniprot ID: Q9UL51
  ENSP ID: ENSP00000251287
MDARGGGGRPGESPGATPAPGPPPPPPPAPPQQQPPPPPPPAPPPGPGPAPPQHPPRAEALPPEAADEGGPRGRLRSRDSSCGRPGTPGAASTAKGSPNGECGRGEPQCSPAGPEGPARGPKVSFSCRGAASGPAPGPGPAEEAGSEEAGPAGEPRGSQASFMQRQFGALLQPGVNKFSLRMFGSQKAVEREQERVKSAGAWIIHPYSDFRFYWDFTMLLFMVGNLIIIPVGITFFKDETTAPWIVFNVVSDTFFLMDLVLNFRTGIVIEDNTEIILDPEKIKKKYLRTWFVVDFVSSIPVDYIFLIVEKGIDSEVYKTARALRIVRFTKILSLLRLLRLSRLIRYIHQWEEIFHMTYDLASAVMRICNLISMMLLLCHWDGCLQFLVPMLQDFPRNCWVSINGMVNHSWSELYSFALFKAMSHMLCIGYGRQAPESMTDIWLTMLSMIVGATCYAMFIGHATALIQSLDSSRRQYQEKYKQVEQYMSFHKLPADFRQKIHDYYEHRYQGKMFDEDSILGELNGPLREEIVNFNCRKLVASMPLFANADPNFVTAMLTKLKFEVFQPGDYIIREGTIGKKMYFIQHGVVSVLTKGNKEMKLSDGSYFGEICLLTRGRRTASVRADTYCRLYSLSVDNFNEVLEEYPMMRRAFETVAIDRLDRIGKKNSILLHKVQHDLNSGVFNNQENAIIQEIVKYDREMVQQAELGQRVGLFPPPPPPPQVTSAIATLQQAAAMSFCPQVARPLVGPLALGSPRLVRRPPPGPAPAAASPGPPPPASPPGAPASPRAPRTSPYGGLPAAPLAGPALPARRLSRASRPLSASQPSLPHGAPGPAASTRPASSSTPRLGPTPAARAAAPSPDRRDSASPGAAGGLDPQDSARSRLSSNL

SEQ ID NO: 39366 - protein, 774 aa, Homo sapiens
  Payload ID: 7885
  Gene Symbol: HCN3
  Gene Name: hyperpolarization activated cyclic nucleotide gated potassium channel 3
  Uniprot ID: Q9P1Z3
  ENSP ID: ENSP00000357342
MEAEQRPAAGASEGATPGLEAVPPVAPPPATAASGPIPKSGPEPKRRHLGTLLQPTVNKFSLRVFGSHKAVEIEQERVKSAGAWIIHPYSDFRFYWDLIMLLLMVGNLIVLPVGITFFKEENSPPWIVFNVLSDTFFLLDLVLNFRTGIVVEEGAEILLAPRAIRTRYLRTWFLVDLISSIPVDYIFLVVELEPRLDAEVYKTARALRIVRFTKILSLLRLLRLSRLIRYIHQWEEIFHMTYDLASAVVRIFNLIGMMLLLCHWDGCLQFLVPMLQDFPPDCWVSINHMVNHSWGRQYSHALFKAMSHMLCIGYGQQAPVGMPDVWLTMLSMIVGATCYAMFIGHATALIQSLDSSRRQYQEKYKQVEQYMSFHKLPADTRQRIHEYYEHRYQGKMFDEESILGELSEPLREEIINFTCRGLVAHMPLFAHADPSFVTAVLTKLRFEVFQPGDLVVREGSVGRKMYFIQHGLLSVLARGARDTRLTDGSYFGEICLLTRGRRTASVRADTYCRLYSLSVDHFNAVLEEFPMMRRAFETVAMDRLLRIGKKNSILQRKRSEPSPGSSGGIMEQHLVQHDRDMARGVRGRAPSTGAQLSGKPVLWEPLVHAPLQAAAVTSNVAIALTHQRGPLPLSPDSPATLLARSAWRSAGSPASPLVPVRAGPWASTSRLPAPPARTLHASLSRAGRSQVSLLGPPPGGGGRRLGPRGRPLSASQPSLPQRATGDGSPGRKGSGSERLPPSGLLAKPPRTAQPPRPPVPEPATPRGLQLSANM

SEQ ID NO: 39367 - protein, 774 aa, Homo sapiens; identical to SEQ ID NO: 39366
  Payload ID: 7885
  Gene Symbol: HCN3
  Gene Name: hyperpolarization activated cyclic nucleotide gated potassium channel 3
  Uniprot ID: Q9P1Z3
  ENSP ID: ENSP00000458364

SEQ ID NO: 39368 - protein, 1203 aa, Homo sapiens
  Payload ID: 7886
  Gene Symbol: HCN4
  Gene Name: hyperpolarization activated cyclic nucleotide gated potassium channel 4
  Uniprot ID: Q9Y3Q4
  ENSP ID: ENSP00000261917
MDKLPPSMRKRLYSLPQQVGAKAWIMDEEEDAEEEGAGGRQDPSRRSIRLRPLPSPSPSAAAGGTESRSSALGAADSEGPARGAGKSSTNGDCRRFRGSLASLGSRGGGSGGTGSGSSHGHLHDSAEERRLIAEGDASPGEDRTPPGLAAEPERPGASAQPAASPPPPQQPPQPASASCEQPSVDTAIKVEGGAAAGDQILPEAEVRLGQAGFMQRQFGAMLQPGVNKFSLRMFGSQKAVEREQERVKSAGFWIIHPYSDFRFYWDLTMLLLMVGNLIIIPVGITFFKDENTTPWIVFNVVSDTFFLIDLVLNFRTGIVVEDNTEIILDPQRIKMKYLKSWFMVDFISSIPVDYIFLIVETRIDSEVYKTARALRIVRFTKILSLLRLLRLSRLIRYIHQWEEIFHMTYDLASAVVRIVNLIGMMLLLCHWDGCLQFLVPMLQDFPDDCWVSINNMVNNSWGKQYSYALFKAMSHMLCIGYGRQAPVGMSDVWLTMLSMIVGATCYAMFIGHATALIQSLDSSRRQYQEKYKQVEQYMSFHKLPPDTRQRIHDYYEHRYQGKMFDEESILGELSEPLREEIINFNCRKLVASMPLFANADPNFVTSMLTKLRFEVFQPGDYIIREGTIGKKMYFIQHGVVSVLTKGNKETKLADGSYFGEICLLTRGRRTASVRADTYCRLYSLSVDNFNEVLEEYPMMRRAFETVALDRLDRIGKKNSILLHKVQHDLNSGVFNYQENEIIQQIVQHDREMAHCAHRVQAAASATPTPTPVIWTPLIQAPLQAAAATTSVAIALTHHPRLPAAIFRPPPGSGLGNLGAGQTPRHLKRLQSLIPSALGSASPASSPSQVDTPSSSSFHIQQLAGFSAPAGLSPLLPSSSSSPPPGACGSPSAPTPSAGVAATTIAGFGHFHKALGGSLSSSDSPLLTPLQPGARSPQAAQPSPAPPGARGGLGLPEHFLPPPPSSRSPSSSPGQLGQPPGELSLGLATGPLSTPETPPRQPEPPSLVAGASGGASPVGFTPRGGLSPPGHSPGPPRTFPSAPPRASGSHGSLLLPPASSPPPPQVPQRRGTPPLTPGRLTQDLKLISASQPALPQDGAQTLRRASPHSSGESMAAFPLFPRAGGGSGGSGSSGGLGPPGRPYGAIPGQHVTLPRKTSSGSLPPPLSLFGARATSSGGPPLTAGPQREPGARPEPVRSKLPSNL

SEQ ID NO: 39369 - protein, 131 aa, Homo sapiens
  Payload ID: 7887
  Gene Symbol: HCRT
  Gene Name: hypocretin (orexin) neuropeptide precursor
  Uniprot ID: O43612
  ENSP ID: ENSP00000293330
MNLPSTKVSWAAVTLLLLLLLLPPALLSSGAAAQPLPDCCRQKTCSCRLYELLHGAGNHAAGILTLGKRRSGPPGLQGRLQRLLQASGNHAAGILTMGRRAGAEPAPRPCLGRRCSAPAAASVAPGGQSGI

SEQ ID NO: 39370 - protein, 389 aa, Homo sapiens
  Payload ID: 7888
  Gene Symbol: HCRTR1
  Gene Name: hypocretin (orexin) receptor 1
  ENSP ID: ENSP00000362809
MEPSATPGAQMGVPPGSREPSPVPPDYEDEFLRYLWRDYLYPKQYEWVLIAAYVAVFVVALVGNTLVCLAVWRNHHMRTVTNYFIVNLSLADVLVTAICLPASLLVDITESWLFGHALCKVIPYLQAVSVSVAVLTLSFIALDRWYAICHPLLFKSTARRARGSILGIWAVSLAIMVPQAAVMECSSVLPELANRTRLFSVCDERWADDLYPKIYHSCFFIVTYLAPLGLMAMAYFQIFRKLWGRQIPGTTSALVRNWKRPSDQLGDLEQGLSGEPQPRARAFLAEVKQMRARRKTAKMLMVVLLVFALCYLPISVLNVLKRVFGMFRQASDREAVYACFTFSHWLVYANSAANPIIYNFLSGCKEKSLALSCPSCPGHDPHLAAALCS

SEQ ID NO: 39371 - protein, 425 aa, Homo sapiens
  Payload ID: 7888
  Gene Symbol: HCRTR1
  Gene Name: hypocretin (orexin) receptor 1
  Uniprot ID: O43613
  ENSP ID: ENSP00000362810
MEPSATPGAQMGVPPGSREPSPVPPDYEDEFLRYLWRDYLYPKQYEWVLIAAYVAVFVVALVGNTLVCLAVWRNHHMRTVTNYFIVNLSLADVLVTAICLPASLLVDITESWLFGHALCKVIPYLQAVSVSVAVLTLSFIALDRWYAICHPLLFKSTARRARGSILGIWAVSLAIMVPQAAVMECSSVLPELANRTRLFSVCDERWADDLYPKIYHSCFFIVTYLAPLGLMAMAYFQIFRKLWGRQIPGTTSALVRNWKRPSDQLGDLEQGLSGEPQPRARAFLAEVKQMRARRKTAKMLMVVLLVFALCYLPISVLNVLKRVFGMFRQASDREAVYACFTFSHWLVYANSAANPIIYNFLSGKFREQFKAAFSCCLPGLGPCGSLKAPSPRSSASHKSLSLQSRCSISKISEHVVLTSVTTVLP

SEQ ID NO: 39372 - protein, 425 aa, Homo sapiens; identical to SEQ ID NO: 39371
  Payload ID: 7888
  Gene Symbol: HCRTR1
  Gene Name: hypocretin (orexin) receptor 1
  Uniprot ID: O43613
  ENSP ID: ENSP00000384387

SEQ ID NO: 39373 - protein, 444 aa, Homo sapiens
  Payload ID: 7889
  Gene Symbol: HCRTR2
  Gene Name: hypocretin (orexin) receptor 2
  Uniprot ID: O43614
  ENSP ID: ENSP00000359899
MSGTKLEDSPPCRNWSSASELNETQEPFLNPTDYDDEEFLRYLWREYLHPKEYEWVLIAGYIIVFVVALIGNVLVCVAVWKNHHMRTVTNYFIVNLSLADVLVTITCLPATLVVDITETWFFGQSLCKVIPYLQTVSVSVSVLTLSCIALDRWYAICHPLMFKSTAKRARNSIVIIWIVSCIIMIPQAIVMECSTVFPGLANKTTLFTVCDERWGGEIYPKMYHICFFLVTYMAPLCLMVLAYLQIFRKLWCRQIPGTSSVVQRKWKPLQPVSQPRGPGQPTKSRMSAVAAEIKQIRARRKTARMLMIVLLVFAICYLPISILNVLKRVFGMFAHTEDRETVYAWFTFSHWLVYANSAANPIIYNFLSGKFREEFKAAFSCCCLGVHHRQEDRLTRGRTSTESRKSLTTQISNFDNISKLSEQVVLTSISTLPAANGAGPLQNW

SEQ ID NO: 39374 - protein, 444 aa, Homo sapiens; identical to SEQ ID NO: 39373
  Payload ID: 7889
  Gene Symbol: HCRTR2
  Gene Name: hypocretin (orexin) receptor 2
  Uniprot ID: O43614
  ENSP ID: ENSP00000477548

SEQ ID NO: 39375 - protein, 218 aa, Homo sapiens
  Payload ID: 7890
  Gene Symbol: HPRT1
  Gene Name: hypoxanthine phosphoribosyltransferase 1
  Uniprot ID: P00492
  ENSP ID: ENSP00000298556
MATRSPGVVISDDEPGYDLDLFCIPNHYAEDLERVFIPHGLIMDRTERLARDVMKEMGGHHIVALCVLKGGYKFFADLLDYIKALNRNSDRSIPMTVDFIRLKSYCNDQSTGDIKVIGGDDLSTLTGKNVLIVEDIIDTGKTMQTLLSLVRQYNPKMVKVASLLVKRTPRSVGYKPDFVGFEIPDKFVVGYALDYNEYFRDLNHVCVISETGKAKYKA

SEQ ID NO: 39376 - protein, 735 aa, Homo sapiens
  Payload ID: 7891
  Gene Symbol: HIF1A
  Gene Name: hypoxia inducible factor 1, alpha subunit (basic helix-loop-helix transcription factor)
  Uniprot ID: Q16665
  ENSP ID: ENSP00000323326
MEGAGGANDKKKISSERRKEKSRDAARSRRSKESEVFYELAHQLPLPHNVSSHLDKASVMRLTISYLRVRKLLDAGDLDIEDDMKAQMNCFYLKALDGFVMVLTDDGDMIYISDNVNKYMGLTQFELTGHSVFDFTHPCDHEEMREMLTHRNGLVKKGKEQNTQRSFFLRMKCTLTSRGRTMNIKSATWKVLHCTGHIHVYDTNSNQPQCGYKKPPMTCLVLICEPIPHPSNIEIPLDSKTFLSRHSLDMKFSYCDERITELMGYEPEELLGRSIYEYYHALDSDHLTKTHHDMFTKGQVTTGQYRMLAKRGGYVWVETQATVIYNTKNSQPQCIVCVNYVVSGIIQHDLIFSLQQTECVLKPVESSDMKMTQLFTKVESEDTSSLFDKLKKEPDALTLLAPAAGDTIISLDFGSNDTETDDQQLEEVPLYNDVMLPSPNEKLQNINLAMSPLPTAETPKPLRSSADPALNQEVALKLEPNPESLELSFTMPQIQDQTPSPSDGSTRQSSPEPNSPSEYCFYVDSDMVNEFKLELVEKLFAEDTEAKNPFSTQDTDLDLEMLAPYIPMDDDFQLRSFDQLSPLESSSASPESASPQSTVTVFQQTQIQEPTANATTTTATTDELKTVTKDRMEDIKILIASPSPTHIHKETTSATSSPYRDTQSRTASPNRAGKGVIEQTEKSHPRSPNVLSVALSQRTTVPEEELNPKILALQNAQRKRKMEHDGSLFQAVGII

SEQ ID NO: 39377 - protein, 826 aa, Homo sapiens
  Payload ID: 7891
  Gene Symbol: HIF1A
  Gene Name: hypoxia inducible factor 1, alpha subunit (basic helix-loop-helix transcription factor)
  Uniprot ID: Q16665
  ENSP ID: ENSP00000338018
MEGAGGANDKKKISSERRKEKSRDAARSRRSKESEVFYELAHQLPLPHNVSSHLDKASVMRLTISYLRVRKLLDAGDLDIEDDMKAQMNCFYLKALDGFVMVLTDDGDMIYISDNVNKYMGLTQFELTGHSVFDFTHPCDHEEMREMLTHRNGLVKKGKEQNTQRSFFLRMKCTLTSRGRTMNIKSATWKVLHCTGHIHVYDTNSNQPQCGYKKPPMTCLVLICEPIPHPSNIEIPLDSKTFLSRHSLDMKFSYCDERITELMGYEPEELLGRSIYEYYHALDSDHLTKTHHDMFTKGQVTTGQYRMLAKRGGYVWVETQATVIYNTKNSQPQCIVCVNYVVSGIIQHDLIFSLQQTECVLKPVESSDMKMTQLFTKVESEDTSSLFDKLKKEPDALTLLAPAAGDTIISLDFGSNDTETDDQQLEEVPLYNDVMLPSPNEKLQNINLAMSPLPTAETPKPLRSSADPALNQEVALKLEPNPESLELSFTMPQIQDQTPSPSDGSTRQSSPEPNSPSEYCFYVDSDMVNEFKLELVEKLFAEDTEAKNPFSTQDTDLDLEMLAPYIPMDDDFQLRSFDQLSPLESSSASPESASPQSTVTVFQQTQIQEPTANATTTTATTDELKTVTKDRMEDIKILIASPSPTHIHKETTSATSSPYRDTQSRTASPNRAGKGVIEQTEKSHPRSPNVLSVALSQRTTVPEEELNPKILALQNAQRKRKMEHDGSLFQAVGIGTLLQQPDDHAATTSLSWKRVKGCKSSEQNGMEQKTIILIPSDLACRLLGQSMDESGLPQLTSYDCEVNAPIQGSRNLLQGEELLRALDQVN

SEQ ID NO: 39378 - protein, 827 aa, Homo sapiens
  Payload ID: 7891
  Gene Symbol: HIF1A
  Gene Name: hypoxia inducible factor 1, alpha subunit (basic helix-loop-helix transcription factor)
  ENSP ID: ENSP00000378446
MEGAGGANDKKNRISSERRKEKSRDAARSRRSKESEVFYELAHQLPLPHNVSSHLDKASVMRLTISYLRVRKLLDAGDLDIEDDMKAQMNCFYLKALDGFVMVLTDDGDMIYISDNVNKYMGLTQFELTGHSVFDFTHPCDHEEMREMLTHRNGLVKKGKEQNTQRSFFLRMKCTLTSRGRTMNIKSATWKVLHCTGHIHVYDTNSNQPQCGYKKPPMTCLVLICEPIPHPSNIEIPLDSKTFLSRHSLDMKFSYCDERITELMGYEPEELLGRSIYEYYHALDSDHLTKTHHDMFTKGQVTTGQYRMLAKRGGYVWVETQATVIYNTKNSQPQCIVCVNYVVSGIIQHDLIFSLQQTECVLKPVESSDMKMTQLFTKVESEDTSSLFDKLKKEPDALTLLAPAAGDTIISLDFGSNDTETDDQQLEEVPLYNDVMLPSPNEKLQNINLAMSPLPTAETPKPLRSSADPALNQEVALKLEPNPESLELSFTMPQIQDQTPSPSDGSTRQSSPEPNSPSEYCFYVDSDMVNEFKLELVEKLFAEDTEAKNPFSTQDTDLDLEMLAPYIPMDDDFQLRSFDQLSPLESSSASPESASPQSTVTVFQQTQIQEPTANATTTTATTDELKTVTKDRMEDIKILIASPSPTHIHKETTSATSSPYRDTQSRTASPNRAGKGVIEQTEKSHPRSPNVLSVALSQRTTVPEEELNPKILALQNAQRKRKMEHDGSLFQAVGIGTLLQQPDDHAATTSLSWKRVKGCKSSEQNGMEQKTIILIPSDLACRLLGQSMDESGLPQLTSYDCEVNAPIQGSRNLLQGEELLRALDQVN

SEQ ID NO: 39379 - protein, 850 aa, Homo sapiens
  Payload ID: 7891
  Gene Symbol: HIF1A
  Gene Name: hypoxia inducible factor 1, alpha subunit (basic helix-loop-helix transcription factor)
  Uniprot ID: Q16665
  ENSP ID: ENSP00000437955
MSSQCRSLENKFVFLKEGLGNSKPEELEEIRIENGRISSERRKEKSRDAARSRRSKESEVFYELAHQLPLPHNVSSHLDKASVMRLTISYLRVRKLLDAGDLDIEDDMKAQMNCFYLKALDGFVMVLTDDGDMIYISDNVNKYMGLTQFELTGHSVFDFTHPCDHEEMREMLTHRNGLVKKGKEQNTQRSFFLRMKCTLTSRGRTMNIKSATWKVLHCTGHIHVYDTNSNQPQCGYKKPPMTCLVLICEPIPHPSNIEIPLDSKTFLSRHSLDMKFSYCDERITELMGYEPEELLGRSIYEYYHALDSDHLTKTHHDMFTKGQVTTGQYRMLAKRGGYVWVETQATVIYNTKNSQPQCIVCVNYVVSGIIQHDLIFSLQQTECVLKPVESSDMKMTQLFTKVESEDTSSLFDKLKKEPDALTLLAPAAGDTIISLDFGSNDTETDDQQLEEVPLYNDVMLPSPNEKLQNINLAMSPLPTAETPKPLRSSADPALNQEVALKLEPNPESLELSFTMPQIQDQTPSPSDGSTRQSSPEPNSPSEYCFYVDSDMVNEFKLELVEKLFAEDTEAKNPFSTQDTDLDLEMLAPYIPMDDDFQLRSFDQLSPLESSSASPESASPQSTVTVFQQTQIQEPTANATTTTATTDELKTVTKDRMEDIKILIASPSPTHIHKETTSATSSPYRDTQSRTASPNRAGKGVIEQTEKSHPRSPNVLSVALSQRTTVPEEELNPKILALQNAQRKRKMEHDGSLFQAVGIGTLLQQPDDHAATTSLSWKRVKGCKSSEQNGMEQKTIILIPSDLACRLLGQSMDESGLPQLTSYDCEVNAPIQGSRNLLQGEELLRALDQVN

SEQ ID NO: 39380 - protein, 767 aa, Homo sapiens [sequence omitted]

SEQ ID NO: 39381 - protein, 349 aa, Homo sapiens
  Payload ID: 7892
  Gene Symbol: HIF1AN
  Gene Name: hypoxia inducible factor 1, alpha subunit inhibitor
  Uniprot ID: Q9NWT6
  ENSP ID: ENSP00000299163
MAATAAEAVASGSGEPREEAGALGPAWDESQLRSYSFPTRPIPRLSQSDPRAEELIENEEPVVLTDTNLVYPALKWDLEYLQENIGNGDFSVYSASTHKFLYYDEKKMANFQNFKPRSNREEMKFHEFVEKLQDIQQRGGEERLYLQQTLNDTVGRKIVMDFLGFNWNWINKQQGKRGWGQLTSNLLLIGMEGNVTPAHYDEQQNFFAQIKGYKRCILFPPDQFECLYPYPVHHPCDRQSQVDFDNPDYERFPNFQNVVGYETVVGPGDVLYIPMYWWHHIESLLNGGITITVNFWYKGAPTPKRIEYPLKAHQKVAIMRNIEKMLGEALGNPQEVGPLLNTMIKGRYN

SEQ ID NO: 39382 - protein, 35 aa, Homo sapiens
  Payload ID: 7892
  Gene Symbol: HIF1AN
  Gene Name: hypoxia inducible factor 1, alpha subunit inhibitor
  ENSP ID: ENSP00000432791
MAATAAEAVASGSGEPREEAGALGPAWDESQSLWC

SEQ ID NO: 39383 - protein, 191 aa, Homo sapiens
  Payload ID: 7892
  Gene Symbol: HIF1AN
  Gene Name: hypoxia inducible factor 1, alpha subunit inhibitor
  ENSP ID: ENSP00000433360
MANFQNFKPRSNREEMKFHEFVEKLQDIQQRGGEERLYLQQTLNDTVGRKIVMDFLGFNWNWINKQQGKRGWGQLTSNLLLIGMEGNVTPAHYDEQQNFFAQIKGYKRCILFPPDQFECLYPYPVHHPCDRQSQVDFDNPDYERFPNFQNVVGYETVVGPGDVLYIPMYWWHHIESLLNGGITITVNFWYK

SEQ ID NO: 39384 - protein, 600 aa, Homo sapiens
  Payload ID: 7893
  Gene Symbol: HIF3A
  Gene Name: hypoxia inducible factor 3, alpha subunit
  Uniprot ID: Q9Y2N7
  ENSP ID: ENSP00000244303
MRPAAGAARRPRCCTSWLTRCPSPAASAPTWTRPLSCASPSATCACTASAPQLELIGHSIFDFIHPCDQEELQDALTPQQTLSRRKVEAPTERCFSLRMKSTLTSRGRTLNLKAATWKVLNCSGHMRAYKPPAQTSPAGSPDSEPPLQCLVLICEAIPHPGSLEPPLGRGAFLSRHSLDMKFTYCDDRIAEVAGYSPDDLIGCSAYEYIHALDSDAVSKSIHTLLSKGQAVTGQYRFLARSGGYLWTQTQATVVSGGRGPQSESIVCVHFLISQVEETGVVLSLEQTEQHSRRPIQRGAPSQKDTPNPGDSLDTPGPRILAFLHPPSLSEAALAADPRRFCSPDLRRLLGPILDGASVAATPSTPLATRHPQSPLSADLPDELPVGTENVHRLFTSGKDTEAVETDLDIAQDADALDLEMLAPYISMDDDFQLNASEQLPRAYHRPLGAVPRPRARSFHGLSPPALEPSLLPRWGSDPRLSCSSPSRGDPSASSPMAGARKRTLAQSSEDEDEGVELLGVRPPKRSPSPEHENFLLFPLSLSFLLTGGPAPGSLQDPSTPLLNLNEPLGLGPSLLSPYSDEDTTQPGGPFQPRAGSAQAD

SEQ ID NO: 39385 - protein, 667 aa, Homo sapiens
  Payload ID: 7893
  Gene Symbol: HIF3A
  Gene Name: hypoxia inducible factor 3, alpha subunit
  Uniprot ID: Q9Y2N7
  ENSP ID: ENSP00000300862
MDWQDHRSTTELRKEKSRDAARSRRSQETEVLYQLAHTLPFARGVSAHLDKASIMRLTISYLRMHRLCAAGEWNQVGAGGEPLDACYLKALEGFVMVLTAEGDMAYLSENVSKHLGLSQLELIGHSIFDFIHPCDQEELQDALTPQQTLSRRKVEAPTERCFSLRMKSTLTSRGRTLNLKAATWKVLNCSGHMRAYKPPAQTSPAGSPDSEPPLQCLVLICEAIPHPGSLEPPLGRGAFLSRHSLDMKFTYCDDRIAEVAGYSPDDLIGCSAYEYIHALDSDAVSKSIHTLLSKGQAVTGQYRFLARSGGYLWTQTQATVVSGGRGPQSESIVCVHFLISQVEETGVVLSLEQTEQHSRRPIQRGAPSQKDTPNPGDSLDTPGPRILAFLHPPSLSEAALAADPRRFCSPDLRRLLGPILDGASVAATPSTPLATRHPQSPLSADLPDELPVGTENVHRLFTSGKDTEAVETDLDIAQDADALDLEMLAPYISMDDDFQLNASEQLPRAYHRPLGAVPRPRARSFHGLSPPALEPSLLPRWGSDPRLSCSSPSRGDPSASSPMAGARKRTLAQSSEDEDEGVELLGVRPPKRSPSPEHENFLLFPLSLSFLLTGGPAPGSLQDPSTPLLNLNEPLGLGPSLLSPYSDEDTTQPGGPFQPRAGSAQAD

SEQ ID NO: 39386 - protein, 669 aa, Homo sapiens
  Payload ID: 7893
  Gene Symbol: HIF3A
  Gene Name: hypoxia inducible factor 3, alpha subunit
  Uniprot ID: Q9Y2N7
  ENSP ID: ENSP00000366898
MALGLQRARSTTELRKEKSRDAARSRRSQETEVLYQLAHTLPFARGVSAHLDKASIMRLTISYLRMHRLCAAGEWNQVGAGGEPLDACYLKALEGFVMVLTAEGDMAYLSENVSKHLGLSQLELIGHSIFDFIHPCDQEELQDALTPQQTLSRRKVEAPTERCFSLRMKSTLTSRGRTLNLKAATWKVLNCSGHMRAYKPPAQTSPAGSPDSEPPLQCLVLICEAIPHPGSLEPPLGRGAFLSRHSLDMKFTYCDDRIAEVAGYSPDDLIGCSAYEYIHALDSDAVSKSIHTLLSKGQAVTGQYRFLARSGGYLWTQTQATVVSGGRGPQSESIVCVHFLISQVEETGVVLSLEQTEQHSRRPIQRGAPSQKDTPNPGDSLDTPGPRILAFLHPPSLSEAALAADPRRFCSPDLRRLLGPILDGASVAATPSTPLATRHPQSPLSADLPDELPVGTENVHRLFTSGKDTEAVETDLDIAQDADALDLEMLAPYISMDDDFQLNASEQLPRAYHRPLGAVPRPRARSFHGLSPPALEPSLLPRWGSDPRLSCSSPSRGDPSASSPMAGARKRTLAQSSEDEDEGVELLGVRPPKRSPSPEHENFLLFPLSLSFLLTGGPAPGSLQDPSTPLLNLNEPLGLGPSLLSPYSDEDTTQPGGPFQPRAGSAQAD

SEQ ID NO: 39387 - protein, 69 aa, Homo sapiens
  Payload ID: 7893
  Gene Symbol: HIF3A
  Gene Name: hypoxia inducible factor 3, alpha subunit
  ENSP ID: ENSP00000432613
MRPAAGAARRPRCCTSWLTRCPSPAASAPTWTRPLSCASPSATCACTASAPQGSGTRWEQGENHWMPAT

SEQ ID NO: 39388 - protein, 81 aa, Homo sapiens
  Payload ID: 7893
  Gene Symbol: HIF3A
  Gene Name: hypoxia inducible factor 3, alpha subunit
  ENSP ID: ENSP00000432809
MALGLQRARSTTELRKEKSRDAARSRRSQETEVLYQLAHTLPFARGVSAHLDKASIMRLTISYLRMHRLCAAAGAHWTQHL

SEQ ID NO: 39389 - protein, 450 aa, Homo sapiens
  Payload ID: 7893
  Gene Symbol: HIF3A
  Gene Name: hypoxia inducible factor 3, alpha subunit
  ENSP ID: ENSP00000434653
MRPAAGAARRPRCCTSWLTRCPSPAASAPTWTRPLSCASPSATCACTASAPQLELIGHSIFDFIHPCDQEELQDALTPQQTLSRRKVEAPTERCFSLRMKSTLTSRGRTLNLKAATWKVLNCSGHMRAYKPPAQTSPAGSPDSEPPLQCLVLICEAIPHPGSLEPPLGRGAFLSRHSLDMKFTYCDDRIAEVAGYSPDDLIGCSAYEYIHALDSDAVSKSIHTLLSKGQAVTGQYRFLARSGGYLWTQTQATVVSGGRGPQSESIVCVHFLISQVEETGVVLSLEQTEQHSRRPIQRGAPSQKDTPNPGDSLDTPGPRILAFLHPPSLSEAALAADPRRFCSPDLRRLLGPILDGASVAATPSTPLATRHPQSPLSADLPDELPVGTENVHRLFTSGKDTEAVETDLDIAQDPSTPLLNLNEPLGFHFVTQSGVQWHKHSSPQPRPPGLK

SEQ ID NO: 39390 - protein, 93 aa, Homo sapiens
  Payload ID: 7893
  Gene Symbol: HIF3A
  Gene Name: hypoxia inducible factor 3, alpha subunit
  ENSP ID: ENSP00000434700
  MOD_RES (1)..(1): Any amino acid
XSEPPLQCLVLICEAIPHPGSLEPPLGRGAFLSRHSLDMKFTYCDDRNGDSGFSLLECQSWLCILSQMTSPLCATISSPILWNHNRTCLVQSF

SEQ ID NO: 39391 - protein, 148 aa, Homo sapiens
  Payload ID: 7893
  Gene Symbol: HIF3A
  Gene Name: hypoxia inducible factor 3, alpha subunit
  ENSP ID: ENSP00000435200
MRPAAGAARRPRCCTSWLTRCPSPAASAPTWTRPLSCASPSATCACTASAPQATRMYPHFLGGAWEWNQVGAGGEPLDACYLKALEGFVMVLTAEGDMAYLSENVSKHLGLSQLELIGHSIFDFIHPCDQEELQDALTPQQTLSRRKV

SEQ ID NO: 39392 - protein, 69 aa, Homo sapiens; identical to SEQ ID NO: 39387
  Payload ID: 7893
  Gene Symbol: HIF3A
  Gene Name: hypoxia inducible factor 3, alpha subunit
  ENSP ID: ENSP00000435532

SEQ ID NO: 39393 - protein, 69 aa, Homo sapiens; identical to SEQ ID NO: 39387
  Payload ID: 7893
  Gene Symbol: HIF3A
  Gene Name: hypoxia inducible factor 3, alpha subunit
  ENSP ID: ENSP00000469031

SEQ ID NO: 39394 - protein, 594 aa, Homo sapiens
  Payload ID: 7893
  Gene Symbol: HIF3A
  Gene Name: hypoxia inducible factor 3, alpha subunit
  ENSP ID: ENSP00000471560
MRPAAGAARRPRCCTSWLTRCPSPAASAPTWTRPLSCASPSATCACTASAPQLELIGHSIFDFIHPCDQEELQDALTPQQTLSRRKVEAPTERCFSLRMKSTLTSRGRTLNLKAATWKVLNCSGHMRAYKPPAQTSPAGSPDSEPPLQCLVLICEAIPHPGSLEPPLGRGAFLSRHSLDMKFTYCDDRIAEVAGYSPDDLIGCSAYEYIHALDSDAVSKSIHTLLSKGQAVTGQYRFLARSGGYLWTQTQATVVSGGRGPQSESIVCVHFLISQVEETGVVLSLEQTEQHSRRPIQRGAPSQKDTPNPGDSLDTPGPRILAFLHPPSLSEAALAADPRRFCSPDLRRLLGPILDGASVAATPSTPLATRHPQSPLSADLPDELPVGTENVHRLFTSGKDTEAVETDLDIAQDADALDLEMLAPYISMDDDFQLNASEQLPRAYHRPLGAVPRPRARSFHGLSPPALEPSLLPRWGSDPRLSCSSPSRGDPSASSPMAGARKRTLAQSSEDEDEGVELLGVRPPKRSPSPEHENFLLFPLSLSFLLTGGPAPGSLQDPSTPLLNLNEPLGFHFVTQSGVQWHKHSSPQPRPPGLK

SEQ ID NO: 39395 - protein, 63 aa, Homo sapiens
  Payload ID: 7894
  Gene Symbol: HILPDA
  Gene Name: hypoxia inducible lipid droplet-associated
  Uniprot ID: Q9Y5L2
  ENSP ID: ENSP00000257696
MKHVLNLYLLGVVLTLLSIFVRVMESLEGLLESPSPGTSWTTRSQLANTEPTKGLPDHPSRSM

SEQ ID NO: 39396 - protein, 63 aa, Homo sapiens; identical to SEQ ID NO: 39395
  Payload ID: 7894
  Gene Symbol: HILPDA
  Gene Name: hypoxia inducible lipid droplet-associated
  Uniprot ID: Q9Y5L2
  ENSP ID: ENSP00000388871

SEQ ID NO: 39397 - protein, 656 aa, Homo sapiens
  Payload ID: 7895
  Gene Symbol: HYOU1
  Gene Name: hypoxia up-regulated 1
  ENSP ID: ENSP00000431874
MADKVRRQRPRRRVCWALVAVLLADLLALSDTLAVMSVDLGSESMKVAIVKPGVPMEIVLNKESRRKTPVIVTLKENERFFGDSAASMAIKNPKATLRYFQHLLGKQADNPHVALYQARFPEHELTFDPQRQTVHFQISSQLQFSPEEVLGMVLNYSRSLAEDFAEQPIKDAVITVPVFFNQAERRAVLQAARMAGLKVLQLINDNTATALSYGVFRRKDINTTAQNIMFYDMGSGSTVCTIVTYQMVKTKEAGMQPQLQIRGVGFDRTLGGLEMELRLRERLAGLFNEQRKGQRAKDVRENPRAMAKLLREANRLKTVLSANADHMAQIEGLMDDVDFKAKVTRVEFEELCADLFERVPGPVQQALQSAEMSLDEIEQVILVGGATRVPRVQEVLLKAVGKEELGKNINADEAAAMGAVYQAAALSKAFKVKPFVVRDAVVYPILVEFTREVEEEPGIHSLKHNKRVLFSRMGPYPQRKVITFNRYSHDFNFHINYGDLGFLGPEDLRVFGSQNLTTVKLKGVGDSFKKYPDYESKGIKAHFNLDESGVLSLDRVESVFETLVEDSAEEESTLTKLGNTISSLFGGGTTPDAKENGTDTVQEEEESPAEGSKDEPGEQVELKEEAEAPVEDGSQPPPPEPKGDATPEGEKATEKE

SEQ ID NO: 39398 - protein, 38 aa, Homo sapiens
  Payload ID: 7895
  Gene Symbol: HYOU1
  Gene Name: hypoxia up-regulated 1
  ENSP ID: ENSP00000442727
MADKVRRQRPRRRVCWALVAVLLADLLALSGNLGGKHR

SEQ ID NO: 39399 - protein, 224 aa, Homo sapiens
  Payload ID: 7895
  Gene Symbol: HYOU1
  Gene Name: hypoxia up-regulated 1
  ENSP ID: ENSP00000462951
MADKVRRQRPRRRVCWALVAVLLADLLALSDTLAVMSVDLGSESMKVAIVKPGVPMEIVLNKESRRKTPVIVTLKENERFFGDSAASMAIKNPKATLRYFQHLLGKQADNPHVALYQARFPEHELTFDPQRQTVHFQISSQLQFSPEEVLGMVLNYSRSLAEDFAEQPIKDAVITVPVFFNQAERRAVLQAARMAGLKVLQLINDNTATALSYGVFRRKDINTT

SEQ ID NO: 39400 - protein, 211 aa, Homo sapiens
  Payload ID: 7895
  Gene Symbol: HYOU1
  Gene Name: hypoxia up-regulated 1
  ENSP ID: ENSP00000463318
MADKVRRQRPRRRVCWALVAVLLADLLALSDTLAVMSVDLGSESMKVAIVKPGVPMEIVLNKESRRKTPVIVTLKENERFFGDSAASMAIKNPKATLRYFQHLLGKQADNPHVALYQARFPEHELTFDPQRQTVHFQISSQLQFSPEEVLGMVLNYSRSLAEDFAEQPIKDAVITVPVFFNQAERRAVLQAARMAGLKVLQLINDNTATAL

SEQ ID NO: 39401 - protein, 154 aa, Homo sapiens
  Payload ID: 7895
  Gene Symbol: HYOU1
  Gene Name: hypoxia up-regulated 1
  ENSP ID: ENSP00000463515
MADKVRRQRPRRRVCWALVAVLLADLLALSDTLAVMSVDLGSESMKVAIVKPGVPMEIVLNKESRRKTPVIVTLKENERFFGDSAASMAIKNPKATLRYFQHLLGKQADNPHVALYQARFPEHELTFDPQRQTVHFQISSQLQFSPEEVLGMVL

SEQ ID NO: 39402 - protein, 149 aa, Homo sapiens
  Payload ID: 7895
  Gene Symbol: HYOU1
  Gene Name: hypoxia up-regulated 1
  ENSP ID: ENSP00000463742
MADKVRRQRPRRRVCWALVAVLLADLLALSDTLAVMSVDLGSESMKVAIVKPGVPMEIVLNKESRRKTPVIVTLKENERFFGDSAASMAIKNPKATLRYFQHLLGKQADNPHVALYQARFPEHELTFDPQRQTVHFQISSQLQFSPEEV

SEQ ID NO: 39403 - protein, 38 aa, Homo sapiens; identical to SEQ ID NO: 39398
  Payload ID: 7895
  Gene Symbol: HYOU1
  Gene Name: hypoxia up-regulated 1
  ENSP ID: ENSP00000464026

SEQ ID NO: 39404 - protein, 678 aa, Homo sapiens
  Payload ID: 7895
  Gene Symbol: HYOU1
  Gene Name: hypoxia up-regulated 1
  ENSP ID: ENSP00000467866
MADKVRRQRPRRRVCWALVAVLLADLLALSDTLAVMSVDLGSESMKVAIVKPGVPMEIVLNKESRRKTPVIVTLKENERFFGDSAASMAIKNPKATLRYFQHLLGKQADNPHVALYQARFPEHELTFDPQRQTVHFQISSQLQFSPEEVLGMVLNYSRSLAEDFAEQPIKDAVITVPVFFNQAERRAVLQAARMAGLKVLQLINDNTATALSYGVFRRKDINTTAQNIMFYDMGSGSTVCTIVTYQMVKTKEAGMQPQLQIRGVGFDRTLGGLEMELRLRERLAGLFNEQRKGQRAKDVRENPRAMAKLLREANRLKTVLSANADHMAQIEGLMDDVDFKAKVTRVEFEELCADLFERVPGPVQQALQSAEMSLDEIEQVILVGGATRVPRVQEVLLKAVGKEELGKNINADEAAAMGAVYQAAALSKAFKVKPFVVRDAVVYPILVEFTREVEEEPGIHSLKHNKRVLFSRMGPYPQRKVITFNRYSHDFNFHINYGDLGFLGPEDLRVFGSQNLTTVKLKGVGDSFKKYPDYESKGIKAHFNLDESGVLSLDRVESVFETLVEDSAEEESTLTKLGNTISSLFGGGTTPDAKENGTDTVQEEEESPAEGSKDEPGEQVELKEEAEAPVEDGSQPPPPEPKGDATPEGEKATEKENGDKSEAQKPVVCRASVTRFGF

SEQ ID NO: 39405 - protein, 102 aa, Homo sapiens
  Payload ID: 7895
  Gene Symbol: HYOU1
  Gene Name: hypoxia up-regulated 1
  ENSP ID: ENSP00000479845
MADKVRRQRPRRRVCWALVAVLLADLLALSDTLAVMSVDLGSESMKVAIVKPGVPMEIVLNKESRRKTPVIVTLKENERFFGDSAASMAIKNPKATLRYFQH

SEQ ID NO: 39406 - protein, 999 aa, Homo sapiens
  Payload ID: 7895
  Gene Symbol: HYOU1
  Gene Name: hypoxia up-regulated 1
  Uniprot ID: Q9Y4L1
  ENSP ID: ENSP00000480150
MADKVRRQRPRRRVCWALVAVLLADLLALSDTLAVMSVDLGSESMKVAIVKPGVPMEIVLNKESRRKTPVIVTLKENERFFGDSAASMAIKNPKATLRYFQHLLGKQADNPHVALYQARFPEHELTFDPQRQTVHFQISSQLQFSPEEVLGMVLNYSRSLAEDFAEQPIKDAVITVPVFFNQAERRAVLQAARMAGLKVLQLINDNTATALSYGVFRRKDINTTAQNIMFYDMGSGSTVCTIVTYQMVKTKEAGMQPQLQIRGVGFDRTLGGLEMELRLRERLAGLFNEQRKGQRAKDVRENPRAMAKLLREANRLKTVLSANADHMAQIEGLMDDVDFKAKVTRVEFEELCADLFERVPGPVQQALQSAEMSLDEIEQVILVGGATRVPRVQEVLLKAVGKEELGKNINADEAAAMGAVYQAAALSKAFKVKPFVVRDAVVYPILVEFTREVEEEPGIHSLKHNKRVLFSRMGPYPQRKVITFNRYSHDFNFHINYGDLGFLGPEDLRVFGSQNLTTVKLKGVGDSFKKYPDYESKGIKAHFNLDESGVLSLDRVESVFETLVEDSAEEESTLTKLGNTISSLFGGGTTPDAKENGTDTVQEEEESPAEGSKDEPGEQVELKEEAEAPVEDGSQPPPPEPKGDATPEGEKATEKENGDKSEAQKPSEKAEAGPEGVAPAPEGEKKQKPARKRRMVEEIGVELVVLDLPDLPEDKLAQSVQKLQDLTLRDLEKQEREKAANSLEAFIFETQDKLYQPEYQEVSTEEQREEISGKLSAASTWLEDEGVGATTVMLKEKLAELRKLCQGLFFRVEERKKWPERLSALDNLLNHSSMFLKGARLIPEMDQIFTEVEMTTLEKVINETWAWKNATLAEQAKLPATEKPVLLSKDIEAKMMALDREVQYLLNKAKFTKPRPRPKDKNGTRAEPPLNASASDQGEKVIPPAGQTEDAEPISEPEKVETGSEPGDTEPLELGGPGAEPEQKEQSTGQKRPLKNDEL

SEQ ID NO: 39407 - protein, 677 aa, Homo sapiens
  Payload ID: 7895
  Gene Symbol: HYOU1
  Gene Name: hypoxia up-regulated 1
  ENSP ID: ENSP00000480248
MADKVRRQRPRRRVCWALVAVLLADLLALSDTLAVMSVDLGSESMKVAIVKPGVPMEIVLNKESRRKTPVIVTLKENERFFGDSAASMAIKNPKATLRYFQHLLGKQADNPHVALYQARFPEHELTFDPQRQTVHFQISSQLQFSPEEVLGMVLNYSRSLAEDFAEQPIKDAVITVPVFFNQAERRAVLQAARMAGLKVLQLINDNTATALSYGVFRRKDINTTAQNIMFYDMGSGSTVCTIVTYQMVKTKEAGMQPQLQIRGVGFDRTLGGLEMELRLRERLAGLFNEQRKGQRAKDVRENPRAMAKLLREANRLKTVLSANADHMAQIEGLMDDVDFKAKVTRVEFEELCADLFERVPGPVQQALQSAEMSLDEIEQVILVGGATRVPRVQEVLLKAVGKEELGKNINADEAAAMGAVYQAAALSKAFKVKPFVVRDAVVYPILVEFTREVEEEPGIHSLKHNKRVLFSRMGPYPQRKVITFNRYSHDFNFHINYGDLGFLGPEDLRVFGSQNLTTVKLKGVGDSFKKYPDYESKGIKAHFNLDESGVLSLDRVESVFETLVEDSAEEESTLTKLGNTISSLFGGGTTPDAKENGTDTVQEEEESPAEGSKDEPGEQVELKEEAEAPVEDGSQPPPPEPKGDATPEGEKATEKENGDKSEAQASVCRASVTRFGF

SEQ ID NO: 39408 - protein, 147 aa, Homo sapiens
  Payload ID: 7895
  Gene Symbol: HYOU1
  Gene Name: hypoxia up-regulated 1
  ENSP ID: ENSP00000482199
MADKVRRQRPRRRVCWALVAVLLADLLALSDTLAVMSVDLGSESMKVAIVKPGVPMEIVLNKESRRKTPVIVTLKENERFFGDSAASMAIKNPKATLRYFQHLLGKQADNPHVALYQARFPEHELTFDPQRQTVHFQISSQLQFSPL

SEQ ID NO: 39409 - protein, 937 aa, Homo sapiens
  Payload ID: 7895
  Gene Symbol: HYOU1
  Gene Name: hypoxia up-regulated 1
  ENSP ID: ENSP00000483106
MADKVRRQRPRRRVCWALVAVLLADLLALSDTLAVMSVDLGSESMKVAIVKPGVPMEIVLNKESRRKTPVIVTLKENERFFGDSAASMAIKNPKATLRYFQHLLGKQADNPHVALYQARFPEHELTFDPQRQTVHFQISSQLQFSPEEVLGMVLNYSRSLAEDFAEQPIKDAVITVPVFFNQAERRAVLQAARMAGLKVLQLINDNTATALSYGVFRRKDINTTAQNIMFYDMGSGSTVCTIVTYQMVKTKEAGMQPQLQIRGVGFDRTLGGLEMELRLRERLAGLFNEQRKGQRAKDVRENPRAMAKLLREANRLKTVLSANADHMAQIEGLMDDVDFKAKVTRVEFEELCADLFERVPGPVQQALQSAEMSLDEIEQVILVGGATRVPRVQEVLLKAVGKEELGKNINADEAAAMGAVYQAAALSKAFKVKPFVVRDAVVYPILVEFTREVEEEPGIHSLKHNKRVLFSRMGPYPQRKVITFNRYSHDFNFHINYGDLGFLGPEDLRVFGSQNLTTVKLKGVGDSFKKYPDYESKGIKAHFNLDESGVLSLDRVESVFETLVEDSAEEESTLTKLGNTISSLFGGGTTPDAKENGTDTVQKPSEKAEAGPEGVAPAPEGEKKQKPARKRRMVEEIGVELVVLDLPDLPEDKLAQSVQKLQDLTLRDLEKQEREKAANSLEAFIFETQDKLYQPEYQEVSTEEQREEISGKLSAASTWLEDEGVGATTVMLKEKLAELRKLCQGLFFRVEERKKWPERLSALDNLLNHSSMFLKGARLIPEMDQIFTEVEMTTLEKVINETWAWKNATLAEQAKLPATEKPVLLSKDIEAKMMALDREVQYLLNKAKFTKPRPRPKDKNGTRAEPPLNASASDQGEKVIPPAGQTEDAEPISEPEKVETGSEPGDTEPLELGGPGAEPEQKEQSTGQKRPLKNDEL

SEQ ID NO: 39410 - protein, 937 aa, Homo sapiens; identical to SEQ ID NO: 39409
  Payload ID: 7895
  Gene Symbol: HYOU1
  Gene Name: hypoxia up-regulated 1
  ENSP ID: ENSP00000484186

SEQ ID NO: 39411 - protein, 92 aa, Homo sapiens
  Payload ID: 7895
  Gene Symbol: HYOU1
  Gene Name: hypoxia up-regulated 1
  ENSP ID: ENSP00000484622
MADKVRRQRPRRRVCWALVAVLLADLLALSDTLAVMSVDLGSESMKVAIVKPGVPMEIVLNKESRRKTPVIVTLKENERFFGDSAASMAIKN

SEQ ID NO: 39412 - protein, 937 aa, Homo sapiens; identical to SEQ ID NO: 39409
  Payload ID: 7895
  Gene Symbol: HYOU1
  Gene Name: Hypoxia up-regulated 1
  ENSP ID: ENSP00000485827

SEQ ID NO: 39413 - protein, 38 aa, Homo sapiens; identical to SEQ ID NO: 39398
  Payload ID: 7895
  Gene Symbol: HYOU1
  Gene Name: Hypoxia up-regulated 1
  ENSP ID: ENSP00000485927

SEQ ID NO: 39414 - protein, 224 aa, Homo sapiens; identical to SEQ ID NO: 39399
  Payload ID: 7895
  Gene Symbol: HYOU1
  Gene Name: Hypoxia up-regulated 1
  ENSP ID: ENSP00000486231

SEQ ID NO: 39415 - protein, 211 aa, Homo sapiens; identical to SEQ ID NO: 39400
  Payload ID: 7895
  Gene Symbol: HYOU1
  Gene Name: Hypoxia up-regulated 1
  ENSP ID: ENSP00000486257

SEQ ID NO: 39416 - protein, 38 aa, Homo sapiens; identical to SEQ ID NO: 39398
  Payload ID: 7895
  Gene Symbol: HYOU1
  Gene Name: Hypoxia up-regulated 1
  ENSP ID: ENSP00000486396

SEQ ID NO: 39417 - protein, 147 aa, Homo sapiens; identical to SEQ ID NO: 39408
  Payload ID: 7895
  Gene Symbol: HYOU1
  Gene Name: Hypoxia up-regulated 1
  ENSP ID: ENSP00000486458

SEQ ID NO: 39418 - protein, 92 aa, Homo sapiens; identical to SEQ ID NO: 39411
  Payload ID: 7895
  Gene Symbol: HYOU1
  Gene Name: Hypoxia up-regulated 1
  ENSP ID: ENSP00000486491

SEQ ID NO: 39419 - protein, 102 aa, Homo sapiens; identical to SEQ ID NO: 39405
  Payload ID: 7895
  Gene Symbol: HYOU1
  Gene Name: Hypoxia up-regulated 1
  ENSP ID: ENSP00000486534

SEQ ID NO: 39420 - protein, 677 aa, Homo sapiens; identical to SEQ ID NO: 39407
  Payload ID: 7895
  Gene Symbol: HYOU1
  Gene Name: Hypoxia up-regulated 1
  ENSP ID: ENSP00000486718

SEQ ID NO: 39421 - protein, 154 aa, Homo sapiens; identical to SEQ ID NO: 39401
  Payload ID: 7895
  Gene Symbol: HYOU1
  Gene Name: Hypoxia up-regulated 1
  ENSP ID: ENSP00000486747

SEQ ID NO: 39422 - protein, 999 aa, Homo sapiens; identical to SEQ ID NO: 39406
  Payload ID: 7895
  Gene Symbol: HYOU1
  Gene Name: Hypoxia up-regulated 1
  ENSP ID: ENSP00000486825

SEQ ID NO: 39423 - protein, 937 aa, Homo sapiens; identical to SEQ ID NO: 39409
  Payload ID: 7895
  Gene Symbol: HYOU1
  Gene Name: Hypoxia up-regulated 1
  ENSP ID: ENSP00000486966

SEQ ID NO: 39424 - protein, 678 aa, Homo sapiens; identical to SEQ ID NO: 39404
  Payload ID: 7895
  Gene Symbol: HYOU1
  Gene Name: Hypoxia up-regulated 1
  ENSP ID: ENSP00000487018

SEQ ID NO: 39425 - protein, 149 aa, Homo sapiens; identical to SEQ ID NO: 39402
  Payload ID: 7895
  Gene Symbol: HYOU1
  Gene Name: Hypoxia up-regulated 1
  ENSP ID: ENSP00000487063

SEQ ID NO: 39426 - protein, 656 aa, Homo sapiens; identical to SEQ ID NO: 39397
  Payload ID: 7895
  Gene Symbol: HYOU1
  Gene Name: Hypoxia up-regulated 1
  ENSP ID: ENSP00000487387

SEQ ID NO: 39427 - protein, 356 aa, Homo sapiens
  Payload ID: 7896
  Gene Symbol: IBA57
  Gene Name: IBA57 homolog, iron-sulfur cluster assembly
  Uniprot ID: Q5T440
  ENSP ID: ENSP00000355672
MATAALLRGATPGRGGPVWRWRLRAAPRCRLAHSSCSPGGDPTAGAAWACFRLDGRTLLRVRGPDAAPFLLGLLTNELPLPSPAAAGAPPAARAGYAHFLNVQGRTLYDVILYGLQEHSEVSGFLLECDSSVQGALQKHLALYRIRRKVTVEPHPELRVWAVLPSSPEACGAASLQERAGAAAILIRDPRTARMGWRLLTQDEGPALVPGGRLGDLWDYHQHRYLQGVPEGVRDLPPGVALPLESNLAFMNGVSFTKGCYIGQELTARTHHMGVIRKRLFPVRFLDPLPTSGITPGATVLTASGQTVGKFRAGQGNVGLALLWSEKIKGPLHIRASEGAQVALAASVPDWWPTVSK

SEQ ID NO: 39428 - protein, 90 aa, Homo sapiens
  Payload ID: 7897
  Gene Symbol: IDNK
  Gene Name: idnK, gluconokinase homolog (E. coli)
  ENSP ID: ENSP00000365599
MAAPGALLVMGVSGSGKSTVGALLASELGWKFYDADDYHPEENRRKMGKGIPLNDQRCSLGTACGSSLFSPEENVQRHINTRKRWCSSEV

SEQ ID NO: 39429 - protein, 187 aa, Homo sapiens
  Payload ID: 7897
  Gene Symbol: IDNK
  Gene Name: idnK, gluconokinase homolog (E. coli)
  Uniprot ID: Q5T6J7
  ENSP ID: ENSP00000365601
MAAPGALLVMGVSGSGKSTVGALLASELGWKFYDADDYHPEENRRKMGKGIPLNDQDRIPWLCNLHDILLRDVASGQRVVLACSALKKTYRDILTQGKDGVALKCEESGKEAKQAEMQLLVVHLSGSFEVISGRLLKREGHFMPPELLQSQFETLEPPAAPENFIQISVDKNVSEIIATIMETLKMK

SEQ ID NO: 39430 - protein, 59 aa, Homo sapiens
  Payload ID: 7897
  Gene Symbol: IDNK
  Gene Name: idnK, gluconokinase homolog (E. coli)
  ENSP ID: ENSP00000385324
MAAPGALLVMGVSGSGNWDGNSMMLMIITRRKIEGRWEKAYRSMTRTGFHGSVTCMTFY

SEQ ID NO: 39431 - protein, 141 aa, Homo sapiens
  Payload ID: 7897
  Gene Symbol: IDNK
  Gene Name: idnK, gluconokinase homolog (E. coli)
  Uniprot ID: Q5T6J7
  ENSP ID: ENSP00000403290
MGKGIPLNDQDRIPWLCNLHDILLRDVASGQRVVLACSALKKTYRDILTQGKDGVALKCEESGKEAKQAEMQLLVVHLSGSFEVISGRLLKREGHFMPPELLQSQFETLEPPAAPENFIQISVDKNVSEIIATIMETLKMK

SEQ ID NO: 39432 - protein, 106 aa, Homo sapiens
  Payload ID: 7897
  Gene Symbol: IDNK
  Gene Name: idnK, gluconokinase homolog (E. coli)
  ENSP ID: ENSP00000434673
MAAPGALLVMGTLTLSPRLEYSGVISAHCNLCLLSSSDCHASASGVTGVTGVHHHTQLSFVFLVETGFCHVGRASPELLASSDPPASASQSAGIIGVSQGLNLTWS

SEQ ID NO: 39433 - protein, 90 aa, Homo sapiens
  Payload ID: 7897
  Gene Symbol: IDNK
  Gene Name: idnK, gluconokinase homolog (E. coli)
  ENSP ID: ENSP00000436381
MGKGIPLNDQDRIPWLCNLHDILLRDVASGQRVVLACSALKKTYRDILTQGKDGVALKCEESGKEAKQAEMQLLVVHLSGSFEVISGRLL

SEQ ID NO: 39434 - protein, 550 aa, Homo sapiens
  Payload ID: 7898
  Gene Symbol: IDS
  Gene Name: iduronate 2-sulfatase
  Uniprot ID: P22304
  ENSP ID: ENSP00000339801
MPPPRTGRGLLWLGLVLSSVCVALGSETQANSTTDALNVLLIIVDDLRPSLGCYGDKLVRSPNIDQLASHSLLFQNAFAQQAVCAPSRVSFLTGRRPDTTRLYDFNSYWRVHAGNFSTIPQYFKENGYVTMSVGKVFHPGISSNHTDDSPYSWSFPPYHPSSEKYENTKTCRGPDGELHANLLCPVDVLDVPEGTLPDKQSTEQAIQLLEKMKTSASPFFLAVGYHKPHIPFRYPKEFQKLYPLENITLAPDPEVPDGLPPVAYNPWMDIRQREDVQALNISVPYGPIPVDFQRKIRQSYFASVSYLDTQVGRLLSALDDLQLANSTIIAFTSDHGWALGEHGEWAKYSNFDVATHVPLIFYVPGRTASLPEAGEKLFPYLDPFDSASQLMEPGRQSMDLVELVSLFPTLAGLAGLQVPPRCPVPSFHVELCREGKNLLKHFRFRDLEEDPYLPGNPRELIAYSQYPRPSDIPQWNSDKPSLKDIKIMGYSIRTIDYRYTVWVGFNPDEFLANFSDIHAGELYFVDSDPLQDHNMYNDSQGGDLFQLLMP

SEQ ID NO: 39435 - protein, 343 aa, Homo sapiens
  Payload ID: 7898
  Gene Symbol: IDS
  Gene Name: iduronate 2-sulfatase
  Uniprot ID: P22304
  ENSP ID: ENSP00000359470
MPPPRTGRGLLWLGLVLSSVCVALGSETQANSTTDALNVLLIIVDDLRPSLGCYGDKLVRSPNIDQLASHSLLFQNAFAQQAVCAPSRVSFLTGRRPDTTRLYDFNSYWRVHAGNFSTIPQYFKENGYVTMSVGKVFHPGISSNHTDDSPYSWSFPPYHPSSEKYENTKTCRGPDGELHANLLCPVDVLDVPEGTLPDKQSTEQAIQLLEKMKTSASPFFLAVGYHKPHIPFRYPKEFQKLYPLENITLAPDPEVPDGLPPVAYNPWMDIRQREDVQALNISVPYGPIPVDFQRKIRQSYFASVSYLDTQVGRLLSALDDLQLANSTIIAFTSDHGFLMRTNT

SEQ ID NO: 39436 - protein, 179 aa, Homo sapiens
  Payload ID: 7898
  Gene Symbol: IDS
  Gene Name: iduronate 2-sulfatase
  ENSP ID: ENSP00000390241
MPPPRTGRGLLWLGLVLSSVCVALGSETQANSTTDALNVLLIIVDDLRPSLGCYGDKLVRSPNIDQLASHSLLFQNAFAQQAVCAPSRVSFLTGRRPDTTRLYDFNSYWRVHAGNFSTIPQYFKENGYVTMSVGKVFHPGTAPCPESGFSWFVVSESSIPILGMGLSLQSPLLAGRVPR

SEQ ID NO: 39437 - protein, 312 aa, Homo sapiens
  Payload ID: 7898
  Gene Symbol: IDS
  Gene Name: iduronate 2-sulfatase
  Uniprot ID: P22304
  ENSP ID: ENSP00000418264
MPPPRTGRGLLWLGLVLSSVCVALGSETQANSTTDALNVLLIIVDDLRPSLGCYGDKLVRSPNIDQLASHSLLFQNAFAQQAVCAPSRVSFLTGRRPDTTRLYDFNSYWRVHAGNFSTIPQYFKENGYVTMSVGKVFHPGISSNHTDDSPYSWSFPPYHPSSEKYENTKTCRGPDGELHANLLCPVDVLDVPEGTLPDKQSTEQAIQLLEKMKTSASPFFLAVGYHKPHIPFRYPKEFQKLYPLENITLAPDPEVPDGLPPVAYNPWMDIRQREDVQALNISVPYGPIPVDFQEDQSSTGFRLKTSSTRKYK

SEQ ID NO: 39438 - protein, 106 aa, Homo sapiens
  Payload ID: 7898
  Gene Symbol: IDS
  Gene Name: iduronate 2-sulfatase
  ENSP ID: ENSP00000428980
RSPNIDQLASHSLLFQNAFAQQAVCAPSRVSFLTGRRPDTTRLYDFNSYWRVHAGNFSTIPQYFKENGYVTMSVGKVFHPALVGTHFSAESLFSRPFSVSIGPASR

SEQ ID NO: 39439 - protein, 86 aa, Homo sapiens
  Payload ID: 7898
  Gene Symbol: IDS
  Gene Name: iduronate 2-sulfatase
  ENSP ID: ENSP00000429745
MPPPRTGRGLLWLGLVLSSVCVALGSETQANSTTDALNVLLIIVDDLRPSLGCYGDKLVRSPNIDQLASHSLLFQNAFAQQAVCAP

SEQ ID NO: 39440 - protein, 653 aa, Homo sapiens
  Payload ID: 7899
  Gene Symbol: IDUA
  Gene Name: iduronidase, alpha-L-
  Uniprot ID: P35475
  ENSP ID: ENSP00000247933
MRPLRPRAALLALLASLLAAPPVAPAEAPHLVHVDAARALWPLRRFWRSTGFCPPLPHSQADQYVLSWDQQLNLAYVGAVPHRGIKQVRTHWLLELVTTRGSTGRGLSYNFTHLDGYLDLLRENQLLPGFELMGSASGHFTDFEDKQQVFEWKDLVSSLARRYIGRYGLAHVSKWNFETWNEPDHHDFDNVSMTMQGFLNYYDACSEGLRAASPALRLGGPGDSFHTPPRSPLSWGLLRHCHDGTNFFTGEAGVRLDYISLHRKGARSSISILEQEKVVAQQIRQLFPKFADTPIYNDEADPLVGWSLPQPWRADVTYAAMVVKVIAQHQNLLLANTTSAFPYALLSNDNAFLSYHPHPFAQRTLTARFQVNNTRPPHVQLLRKPVLTAMGLLALLDEEQLWAEVSQAGTVLDSNHTVGVLASAHRPQGPADAWRAAVLIYASDDTRAHPNRSVAVTLRLRGVPPGPGLVYVTRYLDNGLCSPDGEWRRLGRPVFPTAEQFRRMRAAEDPVAAAPRPLPAGGRLTLRPALRLPSLLLVHVCARPEKPPGQVTRLRALPLTQGQLVLVWSDEHVGSKCLWTYEIQFSQDGKAYTPVSRKPSTFNLFVFSPDTGAVSGSYRVRALDYWARPGPFSDPVPYLEVPVPRGPPSPGNP

SEQ ID NO: 39441 - protein, 224 aa, Homo sapiens
  Payload ID: 7899
  Gene Symbol: IDUA
  Gene Name: iduronidase, alpha-L-
  ENSP ID: ENSP00000422952
MRPLRPRAALLALLASLLAAPPVAPAEAPHLVHVDAARALWPLRRFWRSTGFWGSTGRGLSYNFTHLDGYLDLLRENQLLPGFELMGSASGHFTDFEDKQQVFEWKDLVSSLARRYIGRYGLAHVSKWNFETWNEPDHHDFDNVSMTMQGFLNYYDACSEGLRAASPALRLGGPGDSFHTPPRSPLSWGLLRHCHDGTNFFTGEAGVRLDYISLHRKGARSSIS

SEQ ID NO: 39442 - protein, 232 aa, Homo sapiens
  Payload ID: 7899
  Gene Symbol: IDUA
  Gene Name: iduronidase, alpha-L-
  ENSP ID: ENSP00000423685
LAHPGPGIGAGPSPGSAGPSPLPGMDGRWALLDPESIVRGSTGRGLSYNFTHLDGYLDLLRENQLLPGFELMGSASGHFTDFEDKQQVFEWKDLVSSLARRYIGRYGLAHVSKWNFETWNEPDHHDFDNVSMTMQGFLNYYDACSEGLRAASPALRLGGPGDSFHTPPRSPLSWGLLRHCHDGTNFFTGEAGVRLDYISLHRKGARSSISILEQEKVVAQQIRQLFPKFADT

SEQ ID NO: 39443 - protein, 176 aa, Homo sapiens
  Payload ID: 7899
  Gene Symbol: IDUA
  Gene Name: iduronidase, alpha-L-
  ENSP ID: ENSP00000424227
MCLPSECHSHWTQVQASLSPAAPCPPPWLPRGSTGRGLSYNFTHLDGYLDLLRENQLLPGFELMGSASGHFTDFEDKQQVFEWKDLVSSLARRYIGRYGLAHVSKWNFETWNEPDHHDFDNVSMTMQGFLNYYDACSEGLRAASPALRLGGPGDSFHTPPRSPLSWGLLRHCHDGT

SEQ ID NO: 39444 - protein, 195 aa, Homo sapiens
  Payload ID: 7899
  Gene Symbol: IDUA
  Gene Name: iduronidase, alpha-L-
  ENSP ID: ENSP00000424847
  MOD_RES (1)..(1): Any amino acid
XVPCAPAPRCWRSWPRSWPRPRWPRPRPRTWCMWTRPARCGPCGASGGAQASAPRCHTARLTSTSSAGTSSSTSPMWAPSLTAASSRGSTGRGLSYNFTHLDGYLDLLRENQLLPGFELMGSASGHFTDFEDKQQVFEWKDLVSSLARRYIGRYGLAHVSKWNFETWNEPDHHDFDNVSMTMQGFLNYYDACSEG

SEQ ID NO: 39445 - protein, 521 aa, Homo sapiens
  Payload ID: 7899
  Gene Symbol: IDUA
  Gene Name: iduronidase, alpha-L-
  ENSP ID: ENSP00000425081
MGSASGHFTDFEDKQQVFEWKDLVSSLARRYIGRYGLAHVSKWNFETWNEPDHHDFDNVSMTMQGFLNYYDACSEGLRAASPALRLGGPGDSFHTPPRSPLSWGLLRHCHDGTNFFTGEAGVRLDYISLHRKGARSSISILEQEKVVAQQIRQLFPKFADTPIYNDEADPLVGWSLPQPWRADVTYAAMVVKVIAQHQNLLLANTTSAFPYALLSNDNAFLSYHPHPFAQRTLTARFQVNNTRPPHVQLLRKPVLTAMGLLALLDEEQLWAEVSQAGTVLDSNHTVGVLASAHRPQGPADAWRAAVLIYASDDTRAHPNRSVAVTLRLRGVPPGPGLVYVTRYLDNGLCSPDGEWRRLGRPVFPTAEQFRRMRAAEDPVAAAPRPLPAGGRLTLRPALRLPSLLLVHVCARPEKPPGQVTRLRALPLTQGQLVLVWSDEHVGSKCLWTYEIQFSQDGKAYTPVSRKPSTFNLFVFSPDTGAVSGSYRVRALDYWARPGPFSDPVPYLEVPVPRGPPSPGNP

SEQ ID NO: 39446 - protein, 53 aa, Homo sapiens
  Payload ID: 7900
  Gene Symbol: IGIP
  Gene Name: IgA-inducing protein
  Uniprot ID: A6NJ69
  ENSP ID: ENSP00000327344
MCSYYHMKKRSVSGCNITIFAVMFSHLSAGKSPCGNQANVLCISRLEFVQYQS

SEQ ID NO: 39447 - protein, 110 aa, Homo sapiens
  Payload ID: 7901
  Gene Symbol: IGFL1
  Gene Name: IGF-like family member 1
  Uniprot ID: Q6UW32
  ENSP ID: ENSP00000415823
MAPRGCIVAVFAIFCISRLLCSHGAPVAPMTPYLMLCQPHKRCGDKFYDPLQHCCYDDAVVPLARTQTCGNCTFRVCFEQCCPWTFMVKLINQNCDSARTSDDRLCRSVS

SEQ ID NO: 39448 - protein, 119 aa, Homo sapiens
  Payload ID: 7902
  Gene Symbol: IGFL2
  Gene Name: IGF-like family member 2
  Uniprot ID: Q6UWQ7
  ENSP ID: ENSP00000366922
MVPRIFAPAYVSVCLLLLCPREVIAPAGSEPWLCQPAPRCGDKIYNPLEQCCYNDAIVSLSETRQCGPPCTFWPCFELCCLDSFGLTNDFVVKLKVQGVNSQCHSSPISSKCESRRRFP

SEQ ID NO: 39449 - protein, 130 aa, Homo sapiens
  Payload ID: 7902
  Gene Symbol: IGFL2
  Gene Name: IGF-like family member 2
  Uniprot ID: Q6UWQ7
  ENSP ID: ENSP00000395219
MRFSVSGMRTDYPRSVLAPAYVSVCLLLLCPREVIAPAGSEPWLCQPAPRCGDKIYNPLEQCCYNDAIVSLSETRQCGPPCTFWPCFELCCLDSFGLTNDFVVKLKVQGVNSQCHSSPISSKCESRRRFP

SEQ ID NO: 39450 - protein, 84 aa, Homo sapiens
  Payload ID: 7902
  Gene Symbol: IGFL2
  Gene Name: IGF-like family member 2
  ENSP ID: ENSP00000471085
QPAPRCGDKIYNPLEQCCYNDAIVSLSETRQCGPPCTFWPCFELCCLDSFGLTNDFVVKLKVQGVNSQCHSSPISSKCERRRFP

SEQ ID NO: 39451 - protein, 125 aa, Homo sapiens
  Payload ID: 7903
  Gene Symbol: IGFL3
  Gene Name: IGF-like family member 3
  Uniprot ID: Q6UXB1
  ENSP ID: ENSP00000344860
MRPRCCILALVCWITVFLLQCSKGTTDAPVGSGLWLCQPTPRCGNKIYNPSEQCCYDDAILSLKETRRCGSTCTFWPCFELCCPESFGPQQKFLVKLRVLGMKSQCHLSPISRSCTRNRRHVLYP

SEQ ID NO: 39452 - protein, 124 aa, Homo sapiens
  Payload ID: 7904
  Gene Symbol: IGFL4
  Gene Name: IGF-like family member 4
  Uniprot ID: Q6B9Z1
  ENSP ID: ENSP00000366926
MVPRISAAIFIFELLGSNSEGVTDLRLWLCQPAPRCGEWTYNPLEQCCDDGVILDLNQTRLCGSSCTFWPCFQHCCLESLGSQNQTVVRFKVPGMKPDCKSSPITRICAQEYHPKSPVSRSDLI

SEQ ID NO: 39453 - protein, 30 aa, Homo sapiens
  Payload ID: 7904
  Gene Symbol: IGFL4
  Gene Name: IGF-like family member 4
  ENSP ID: ENSP00000470169
MKPDCKSSPITRICAQEYHPKSPVSRSDLI

SEQ ID NO: 39454 - protein, 355 aa, Homo sapiens
  Payload ID: 7905
  Gene Symbol: IGFLR1
  Gene Name: IGF-like family receptor 1
  Uniprot ID: Q9H665
  ENSP ID: ENSP00000246532
MGPGRCLLTALLLLALAPPPEASQYCGRLEYWNPDNKCCSSCLQRFGPPPCPDYEFRENCGLNDHGDFVTPPFRKCSSGQCNPDGAELCSPCGGGAVTPTPAAGGGRTPWRCRERPVPAKGHCPLTPGNPGAPSSQERSSPASSIAWRTPEPVPQQAWPNFLPLVVLVLLLTLAVIAILLFILLWHLCWPKEKADPYPYPGLVCGVPNTHTPSSSHLSSPGALETGDTWKEASLLPLLSRELSSLASQPLSRLLDELEVLEELIVLLDPEPGPGGGMAHGTTRHLAARYGLPAAWSTFAYSLRPSRSPLRALIEMVVAREPSASLGQLGTHLAQLGRADALRVLSKLGSSGVCWA

SEQ ID NO: 39455 - protein, 187 aa, Homo sapiens
  Payload ID: 7905
  Gene Symbol: IGFLR1
  Gene Name: IGF-like family receptor 1
  ENSP ID: ENSP00000465962
MGPGRCLLTALLLLALAPPPEASQYCGRLEYWNPDNKCCSSCLQRFGPPPCPGALETGDTWKEASLLPLLSRELSSLASQPLSRLLDELEVLEELIVLLDPEPGPGGGMAHGTTRHLAARYGLPAAWSTFAYSLRPSRSPLRALIEMVVAREPSASLGQLGTHLAQLGRADALRVLSKLGSSGVCWA

SEQ ID NO: 39456 - protein, 355 aa, Homo sapiens; identical to SEQ ID NO: 39454
  Payload ID: 7905
  Gene Symbol: IGFLR1
  Gene Name: IGF-like family receptor 1
  Uniprot ID: Q9H665
  ENSP ID: ENSP00000466181

SEQ ID NO: 39457 - protein, 167 aa, Homo sapiens
  Payload ID: 7905
  Gene Symbol: IGFLR1
  Gene Name: IGF-like family receptor 1
  Uniprot ID: Q9H665
  ENSP ID: ENSP00000467750
MGPGRCLLTALLLLALAPPPEASQYCGRLEYWNPDNKCCSSCLQRFGPPPCPELSSLASQPLSRLLDELEVLEELIVLLDPEPGPGGGMAHGTTRHLAARYGLPAAWSTFAYSLRPSRSPLRALIEMVVAREPSASLGQLGTHLAQLGRADALRVLSKLGSSGVCWA

SEQ ID NO: 39458 - protein, 16 aa, Homo sapiens
  Payload ID: 7905
  Gene Symbol: IGFLR1
  Gene Name: IGF-like family receptor 1
  ENSP ID: ENSP00000467842
MGPGRCLLTALLLLAL

SEQ ID NO: 39459 - protein, 132 aa, Homo sapiens
  Payload ID: 7905
  Gene Symbol: IGFLR1
  Gene Name: IGF-like family receptor 1
  ENSP ID: ENSP00000468545
MGPGRCLLTALLLLALAPPPEASQYCGRLEYWNPDNKCCSSCLQRFGPPPCPDYEFRENCGLNDHGDFVTPPFRKCSSGQCNPDGAELCSPCGGGAVTPTPAAGGGRTPWRCREAGPCQGALPPHTWKPRRP

SEQ ID NO: 39460 - protein, 138 aa, Homo sapiens
  Payload ID: 7905
  Gene Symbol: IGFLR1
  Gene Name: IGF-like family receptor 1
  ENSP ID: ENSP00000468644
MGPGRCLLTALLLLALAPPPEASQYCGRLEYWNPDNKCCSSCLQRFGPPPCPDYEFRENCGLNDHGDFVTPPFRKCSSGQCNPDGAELCSPCGGGAVTPTPAAGGGRTPWRCRERPVPAKGHCPLTPGNPGAPSSQER

SEQ ID NO: 39461 - protein, 60 aa, Homo sapiens
  Payload ID: 7905
  Gene Symbol: IGFLR1
  Gene Name: IGF-like family receptor 1
  ENSP ID: ENSP00000474913
  MOD_RES (1)..(1): Any amino acid
XGRLEYWNPDNKCCSSCLQRFGPPPCPGENPRPSLAWAELAEAGPCQGALPPHTWKPRRP

SEQ ID NO: 39462 - protein, 74 aa, Homo sapiens
  Payload ID: 7905
  Gene Symbol: IGFLR1
  Gene Name: IGF-like family receptor 1
  ENSP ID: ENSP00000476009
  MOD_RES (1)..(1): Any amino acid
XNCGLNDHGDFVTPPFRKCSSGQCNPDGAELCSPCGGGAVTPTPAAGGGRTPWRCREAPWRQGTHGRRPHYFHS

SEQ ID NO: 39463 - protein, 119 aa, Homo sapiens
  Payload ID: 7906
  Gene Symbol:
  Gene Name: IGHV2-70
  ENSP ID: ENSP00000375043
MDILCSTLLLLTVPSWVLSQVTLKESGPALVKPTQTLTLTCTFSGFSLSTSGMRVSWIRQPPGKALEWLARIDWDDDKFYSTSLKTRLTISKDTSKNQVVLTMTNMDPVDTATYYCARI

SEQ ID NO: 39464 - protein, 119 aa, Homo sapiens; identical to SEQ ID NO: 39463
  Payload ID: 7906
  Gene Symbol:
  Gene Name: IGHV2-70
  ENSP ID: ENSP00000488441

SEQ ID NO: 39465 - protein, 336 aa, Homo sapiens
  Payload ID: 7907
  Gene Symbol: IGLON5
  Gene Name: IgLON family member 5
  Uniprot ID: A6NGN9
  ENSP ID: ENSP00000270642
MPPPAPGARLRLLAAAALAGLAVISRGLLSQSLEFNSPADNYTVCEGDNATLSCFIDEHVTRVAWLNRSNILYAGNDRWTSDPRVRLLINTPEEFSILITEVGLGDEGLYTCSFQTRHQPYTTQVYLIVHVPARIVNISSPVTVNEGGNVNLLCLAVGRPEPTVTWRQLRDGFTSEGEILEISDIQRGQAGEYECVTHNGVNSAPDSRRVLVTVNYPPTITDVTSARTALGRAALLRCEAMAVPPADFQWYKDDRLLSSGTAEGLKVQTERTRSMLLFANVSARHYGNYTCRAANRLGASSASMRLLRPGSLENSAPRPPGLLALLSALGWLWWRM

SEQ ID NO: 39466 - protein, 557 aa, Homo sapiens
  Payload ID: 7908
  Gene Symbol: IK
  Gene Name: IK cytokine, down-regulator of HLA II
  Uniprot ID: Q13123
  ENSP ID: ENSP00000396301
MPERDSEPFSNPLAPDGHDVDDPHSFHQSKLTNEDFRKLLMTPRAAPTSAPPSKSRHHEMPREYNEDEDPAARRRKKKSYYAKLRQQEIERERELAEKYRDRAKERRDGVNKDYEETELISTTANYRAVGPTAEADKSAAEKRRQLIQESKFLGGDMEHTHLVKGLDFALLQKVRAEIASKEKEEEELMEKPQKETKKDEDPENKIEFKTRLGRNVYRMLFKSKAYERNELFLPGRMAYVVDLDDEYADTDIPTTLIRSKADCPTMEAQTTLTTNDIVISKLTQILSYLRQGTRNKKLKKKDKGKLEEKKPPEADMNIFEDIGDYVPSTTKTPRDKERERYRERERDRERDRDRDRERERERDRERERERDREREEEKKRHSYFEKPKVDDEPMDVDKGPGSTKELIKSINEKFAGSAGWEGTESLKKPEDKKQLGDFFGMSNSYAECYPATMDDMAVDSDEEVDYSKMDQGNKKGPLGRWDFDTQEEYSEYMNNKEALPKAAFQYGIKMSEGRKTRRFKETNDKAELDRQWKKISAIIEKRKKMEADGVEVKRPKY

SEQ ID NO: 39467 - protein, 73 aa, Homo sapiens
  Payload ID: 7908
  Gene Symbol: IK
  Gene Name: IK cytokine, down-regulator of HLA II
  ENSP ID: ENSP00000421930
MPERDSEPFSNPLAPDGHDVDDPHSFHQLECSGAISAHHNLRLPGSSNSPASAFRVAGITDQNSPMKTSGNFS

SEQ ID NO: 39468 - protein, 267 aa, Homo sapiens
  Payload ID: 7908
  Gene Symbol: IK
  Gene Name: IK cytokine, down-regulator of HLA II
  ENSP ID: ENSP00000422641
MPERDSEPFSNPLAPDGHDVDDPHSFHQSKLTNEDFRKLLMTPRAAPTSAPPSKSRHHEMPREYNEDEDPAARRRKKKSYYAKLRQQEIERERELAEKYRDRAKERRDGVNKDYEETELISTTANYRAVGPTAEADKSAAEKRRQLIQESKFLGGDMEHTHLVKGLDFALLQKVRAEIASKEKEEEELMEKPQKETKKDEDPENKIEFKTRLGRNVYRMLFKSKAYERNELFLPGRMAYVVDLDDEYADTDIPTTLIRSKADCPTME

SEQ ID NO: 39469 - protein, 140 aa, Homo sapiens
  Payload ID: 7908
  Gene Symbol: IK
  Gene Name: IK cytokine, down-regulator of HLA II
  ENSP ID: ENSP00000424622
MPERDSEPFSNPLAPDGHDVDDPHSFHQSKLTNEDFRKLLMTPRAAPTSAPPSKSRHHDEFLVSSRMPREYNEDEDPAARRRKKKSYYAKLRQQEIERERELAEKYRDRAKERRDGVNKDYEETELISTTANYRAVGPTA

SEQ ID NO: 39470 - protein, 107 aa, Homo sapiens
  Payload ID: 7908
  Gene Symbol: IK
  Gene Name: IK cytokine, down-regulator of HLA II
  ENSP ID: ENSP00000425564
MGEPFSNPLAPDGHDVDDPHSFHQSKLTNEDFRKLLMTPRAAPTSAPPSKSRHHEMPREYNEDEDPAARRRKKKSYYAKLRQQEIERERELAEKYRDRAKERRDGVN

SEQ ID NO: 39471 - protein, 212 aa, Homo sapiens
  Payload ID: 7908
  Gene Symbol: IK
  Gene Name: IK cytokine, down-regulator of HLA II
  ENSP ID: ENSP00000426764
MMGGFCEPFSNPLAPDGHDVDDPHSFHQSKLTNEDFRKLLMTPRAAPTSAPPSKSRHHEMPREYNEDEDPAARRRKKKSYYAKLRQQEIERERELAEKYRDRAKERRDGVNKDYEETELISTTANYRAVGPTAEADKSAAEKRRQLIQESKFLGGDMEHTHLVKGLDFALLQKVRAEIASKEKEEEELMEKPQKETKKDEDPENKIEFKTRL

SEQ ID NO: 39472 - protein, 240 aa, Homo sapiens [sequence omitted]

SEQ ID NO: 39473 - protein, 162 aa, Homo sapiens
  Payload ID: 7908
  Gene Symbol: IK
  Gene Name: IK cytokine, down-regulator of HLA II
  ENSP ID: ENSP00000481369
MNIFEDIGDYVPSTTKTPRDKERERYRERERDRERDRDRDRERERERDRERERERDREREEEKKRHSYFEKPKVDDEPMDVDKGPGSTKELIKSINEKFAGSAGWEGTESLKKPEDKKQLGDFFGMSNSYAECYPATMDDMAVDSDEEVDYSKMDQGNKKGP

SEQ ID NO: 39474 - protein, 519 aa, Homo sapiens
  Payload ID: 7909
  Gene Symbol: IKZF1
  Gene Name: IKAROS family zinc finger 1 (Ikaros)
  Uniprot ID: Q13422
  ENSP ID: ENSP00000331614
MDADEGQDMSQVSGKESPPVSDTPDEGDEPMPIPEDLSTTSGGQQSSKSDRVVASNVKVETQSDEENGRACEMNGEECAEDLRMLDASGEKMNGSHRDQGSSALSGVGGIRLPNGKLKCDICGIICIGPNVLMVHKRSHTGERPFQCNQCGASFTQKGNLLRHIKLHSGEKPFKCHLCNYACRRRDALTGHLRTHSVGKPHKCGYCGRSYKQRSSLEEHKERCHNYLESMGLPGTLYPVIKEETNHSEMAEDLCKIGSERSLVLDRLASNVAKRKSSMPQKFLGDKGLSDTPYDSSASYEKENEMMKSHVMDQAINNAINYLGAESLRPLVQTPPGGSEVVPVISPMYQLHKPLAEGTPRSNHSAQDSAVENLLLLSKAKLVPSEREASPSNSCQDSTDTESNNEEQRSGLIYLTNHIAPHARNGLSLKEEHRAYDLLRAASENSQDALRVVSTSGEQMKVYKCEHCRVLFLDHVMYTIHMGCHGFRDPFECNMCGYHSQDRYEFSSHITRGEHRFHMS

SEQ ID NO: 39475 - protein, 249 aa, Homo sapiens
  Payload ID: 7909
  Gene Symbol: IKZF1
  Gene Name: IKAROS family zinc finger 1 (Ikaros)
  ENSP ID: ENSP00000340080
MDADEGQDMSQVSGDKGLSDTPYDSSASYEKENEMMKSHVMDQAINNAINYLGAESLRPLVQTPPGGSEVVPVISPMYQLHKPLAEGTPRSNHSAQDSAVENLLLLSKAKLVPSEREASPSNSCQDSTDTESNNEEQRSGLIYLTNHIAPHARNGLSLKEEHRAYDLLRAASENSQDALRVVSTSGEQMKVYKCEHCRVLFLDHVMYTIHMGCHGFRDPFECNMCGYHSQDRYEFSSHITRGEHRFHMS

SEQ ID NO: 39476 - protein, 376 aa, Homo sapiens
  Payload ID: 7909
  Gene Symbol: IKZF1
  Gene Name: IKAROS family zinc finger 1 (Ikaros)
  Uniprot ID: Q13422
  ENSP ID: ENSP00000342485
MDADEGQDMSQVSGKESPPVSDTPDEGDEPMPIPEDLSTTSGGQQSSKSDRVVASNVKVETQSDEENGRACEMNGEECAEDLRMLDASGEKMNGSHRDQGSSALSGVGGIRLPNGKLKCDICGIICIGPNVLMVHKRSHTGDKGLSDTPYDSSASYEKENEMMKSHVMDQAINNAINYLGAESLRPLVQTPPGGSEVVPVISPMYQLHKPLAEGTPRSNHSAQDSAVENLLLLSKAKLVPSEREASPSNSCQDSTDTESNNEEQRSGLIYLTNHIAPHARNGLSLKEEHRAYDLLRAASENSQDALRVVSTSGEQMKVYKCEHCRVLFLDHVMYTIHMGCHGFRDPFECNMCGYHSQDRYEFSSHITRGEHRFHMS

SEQ ID NO: 39477 - protein, 432 aa, Homo sapiens
  Payload ID: 7909
  Gene Symbol: IKZF1
  Gene Name: IKAROS family zinc finger 1 (Ikaros)
  Uniprot ID: Q13422
  ENSP ID: ENSP00000342750
MDADEGQDMSQVSGKESPPVSDTPDEGDEPMPIPEDLSTTSGGQQSSKSDRVVGERPFQCNQCGASFTQKGNLLRHIKLHSGEKPFKCHLCNYACRRRDALTGHLRTHSVGKPHKCGYCGRSYKQRSSLEEHKERCHNYLESMGLPGTLYPVIKEETNHSEMAEDLCKIGSERSLVLDRLASNVAKRKSSMPQKFLGDKGLSDTPYDSSASYEKENEMMKSHVMDQAINNAINYLGAESLRPLVQTPPGGSEVVPVISPMYQLHKPLAEGTPRSNHSAQDSAVENLLLLSKAKLVPSEREASPSNSCQDSTDTESNNEEQRSGLIYLTNHIAPHARNGLSLKEEHRAYDLLRAASENSQDALRVVSTSGEQMKVYKCEHCRVLFLDHVMYTIHMGCHGFRDPFECNMCGYHSQDRYEFSSHITRGEHRFHMS

SEQ ID NO: 39478 - protein, 432 aa, Homo sapiens
  Payload ID: 7909
  Gene Symbol: IKZF1
  Gene Name: IKAROS family zinc finger 1 (Ikaros)
  Uniprot ID: Q13422
  ENSP ID: ENSP00000349928
MDADEGQDMSQVSGKESPPVSDTPDEGDEPMPIPEDLSTTSGGQQSSKSDRVVASNVKVETQSDEENGRACEMNGEECAEDLRMLDASGEKMNGSHRDQGSSALSGVGGIRLPNGKLKCDICGIICIGPNVLMVHKRSHTGERPFQCNQCGASFTQKGNLLRHIKLHSGEKPFKCHLCNYACRRRDALTGHLRTHSGDKGLSDTPYDSSASYEKENEMMKSHVMDQAINNAINYLGAESLRPLVQTPPGGSEVVPVISPMYQLHKPLAEGTPRSNHSAQDSAVENLLLLSKAKLVPSEREASPSNSCQDSTDTESNNEEQRSGLIYLTNHIAPHARNGLSLKEEHRAYDLLRAASENSQDALRVVSTSGEQMKVYKCEHCRVLFLDHVMYTIHMGCHGFRDPFECNMCGYHSQDRYEFSSHITRGEHRFHMS

SEQ ID NO: 39479 - protein, 477 aa, Homo sapiens
  Payload ID: 7909
  Gene Symbol: IKZF1
  Gene Name: IKAROS family zinc finger 1 (Ikaros)
  Uniprot ID: Q13422
  ENSP ID: ENSP00000352123
MDADEGQDMSQVSGKESPPVSDTPDEGDEPMPIPEDLSTTSGGQQSSKSDRVVASNVKVETQSDEENGRACEMNGEECAEDLRMLDASGEKMNGSHRDQGSSALSGVGGIRLPNGKLKCDICGIICIGPNVLMVHKRSHTGERPFQCNQCGASFTQKGNLLRHIKLHSGEKPFKCHLCNYACRRRDALTGHLRTHSVIKEETNHSEMAEDLCKIGSERSLVLDRLASNVAKRKSSMPQKFLGDKGLSDTPYDSSASYEKENEMMKSHVMDQAINNAINYLGAESLRPLVQTPPGGSEVVPVISPMYQLHKPLAEGTPRSNHSAQDSAVENLLLLSKAKLVPSEREASPSNSCQDSTDTESNNEEQRSGLIYLTNHIAPHARNGLSLKEEHRAYDLLRAASENSQDALRVVSTSGEQMKVYKCEHCRVLFLDHVMYTIHMGCHGFRDPFECNMCGYHSQDRYEFSSHITRGEHRFHMS

SEQ ID NO: 39480 - protein, 174 aa, Homo sapiens
  Payload ID: 7909
  Gene Symbol: IKZF1
  Gene Name: IKAROS family zinc finger 1 (Ikaros)
  ENSP ID: ENSP00000388478
MDADEGQDMSQVSGKESPPVSDTPDEGDEPMPIPEDLSTTSGGQQSSKSDRVVVTYGADDFRDFHAIIPKSFSRKYMPCFWKTKACLHLLSCKYRTCMFLHQPPRYIKYSLFYSLDTYHIIFGYLYHKVQNEGLGSCAVSWEHGSGVTVRVGVTVALMGLLLRRCCWTALRLLL

SEQ ID NO: 39481 - protein, 432 aa, Homo sapiens; identical to SEQ ID NO: 39477
  Payload ID: 7909
  Gene Symbol: IKZF1
  Gene Name: IKAROS family zinc finger 1 (Ikaros)
  Uniprot ID: Q13422
  ENSP ID: ENSP00000396554

SEQ ID NO: 39482 - protein, 294 aa, Homo sapiens
  Payload ID: 7909
  Gene Symbol: IKZF1
  Gene Name: IKAROS family zinc finger 1 (Ikaros)
  ENSP ID: ENSP00000401507
MDADEGQDMSQVSVIKEETNHSEMAEDLCKIGSERSLVLDRLASNVAKRKSSMPQKFLGDKGLSDTPYDSSASYEKENEMMKSHVMDQAINNAINYLGAESLRPLVQTPPGGSEVVPVISPMYQLHKPLAEGTPRSNHSAQDSAVENLLLLSKAKLVPSEREASPSNSCQDSTDTESNNEEQRSGLIYLTNHIAPHARNGLSLKEEHRAYDLLRAASENSQDALRVVSTSGEQMKVYKCEHCRVLFLDHVMYTIHMGCHGFRDPFECNMCGYHSQDRYEFSSHITRGEHRFHMS

SEQ ID NO: 39483 - protein, 67 aa, Homo sapiens
  Payload ID: 7909
  Gene Symbol: IKZF1
  Gene Name: IKAROS family zinc finger 1 (Ikaros)
  ENSP ID: ENSP00000409588
PPVSDTPDEGDEPMPIPEDLSTTSGGQQSSKSDRVVGDKGLSDTPYDSSASYEKENEMMKSHVMDQA

SEQ ID NO: 39484 - protein, 477 aa, Homo sapiens; identical to SEQ ID NO: 39479
  Payload ID: 7909
  Gene Symbol: IKZF1
  Gene Name: IKAROS family zinc finger 1 (Ikaros)
  Uniprot ID: Q13422
  ENSP ID: ENSP00000413025

SEQ ID NO: 39485 - protein, 336 aa, Homo sapiens
  Payload ID: 7909
  Gene Symbol: IKZF1
  Gene Name: IKAROS family zinc finger 1 (Ikaros)
  ENSP ID: ENSP00000478368
MDADEGQDMSQVSVGKPHKCGYCGRSYKQRSSLEEHKERCHNYLESMGLPGTLYPVIKEETNHSEMAEDLCKIGSERSLVLDRLASNVAKRKSSMPQKFLGDKGLSDTPYDSSASYEKENEMMKSHVMDQAINNAINYLGAESLRPLVQTPPGGSEVVPVISPMYQLHKPLAEGTPRSNHSAQDSAVENLLLLSKAKLVPSEREASPSNSCQDSTDTESNNEEQRSGLIYLTNHIAPHARNGLSLKEEHRAYDLLRAASENSQDALRVVSTSGEQMKVYKCEHCRVLFLDHVMYTIHMGCHGFRDPFECNMCGYHSQDRYEFSSHITRGEHRFHMS

SEQ ID NO: 39486 - protein, 268 aa, Homo sapiens
  Payload ID: 7909
  Gene Symbol: IKZF1
  Gene Name: IKAROS family zinc finger 1 (Ikaros)
  ENSP ID: ENSP00000483016
MDADEGQDMSQVSGKESPPVSDTPDEGDEPMPIPEDLSTTSGGQQSSKSDRVVVTYGADDFRDFHAIIPKSFSRERPFQCNQCGASFTQKGNLLRHIKLHKPLAEGTPRSNHSAQDSAVENLLLLSKAKLVPSEREASPSNSCQDSTDTESNNEEQRSGLIYLTNHIAPHARNGLSLKEEHRAYDLLRAASENSQDALRVVSTSGEQMKVYKCEHCRVLFLDHVMYTIHMGCHGFRDPFECNMCGYHSQDRYEFSSHITRGEHRFHMS

SEQ ID NO: 39487 - protein, 532 aa, Homo sapiens
  Payload ID: 7910
  Gene Symbol: IKZF2
  Gene Name: IKAROS family zinc finger 2 (Helios)
  ENSP ID: ENSP00000342876
MHCTLTMETEAIDGYITCDNELSPEREHSNMAIDLTSSTPNGQHASPSHMTSTNSVKLEMQSDEECDRKPLSREDEIRGHDEGSSLEEPLIESSEVADNRKVQELQGEGGIRLPNGKLKCDVCGMVCIGPNVLMVHKRSHTGERPFHCNQCGASFTQKGNLLRHIKLHSGEKPFKCPFCSYACRRRDALTGHLRTHSVGKPHKCNYCGRSYKQRSSLEEHKERCHNYLQNVSMEAAGQVMSHHVPPMEDCKEQEPIMDNNISLVPFERPAVIEKLTGNMGKRKSSTPQKFVGEKLMRFSYPDIHFDMNLTYEKEAELMQSHMMDQAINNAITYLGAEALHPLMQHPPSTIAEVAPVISSAYSQVYHPNRIERPISRETADSHENNMDGPISLIRPKSRPQEREASPSNSCLDSTDSESSHDDHQSYQGHPALNPKRKQSPAYMKEDVKALDTTKAPKGSLKDIYKVFNGEGEQIRAFKCEHCRVLFLDHVMYTIHMGCHGYRDPLECNICGYRSQDRYEFSSHIVRGEHTFH

SEQ ID NO: 39488 - protein, 500 aa, Homo sapiens
  Payload ID: 7910
  Gene Symbol: IKZF2
  Gene Name: IKAROS family zinc finger 2 (Helios)
  Uniprot ID: Q9UKS7
  ENSP ID: ENSP00000363439
METEAIDGYITCDNELSPEREHSNMAIDLTSSTPNGQHASPSHMTSTNSVKLEMQSDEECDRKPLSREDEIRGHDEGSSLEEPLIESSEVADNRKVQELQGEGGIRLPNGERPFHCNQCGASFTQKGNLLRHIKLHSGEKPFKCPFCSYACRRRDALTGHLRTHSVGKPHKCNYCGRSYKQRSSLEEHKERCHNYLQNVSMEAAGQVMSHHVPPMEDCKEQEPIMDNNISLVPFERPAVIEKLTGNMGKRKSSTPQKFVGEKLMRFSYPDIHFDMNLTYEKEAELMQSHMMDQAINNAITYLGAEALHPLMQHPPSTIAEVAPVISSAYSQVYHPNRIERPISRETADSHENNMDGPISLIRPKSRPQEREASPSNSCLDSTDSESSHDDHQSYQGHPALNPKRKQSPAYMKEDVKALDTTKAPKGSLKDIYKVFNGEGEQIRAFKCEHCRVLFLDHVMYTIHMGCHGYRDPLECNICGYRSQDRYEFSSHIVRGEHTFH

SEQ ID NO: 39489 - protein, 52 aa, Homo sapiens
  Payload ID: 7910
  Gene Symbol: IKZF2
  Gene Name: IKAROS family zinc finger 2 (Helios)
  Uniprot ID: Q9UKS7
  ENSP ID: ENSP00000363446
METEAIDGYITCDNELSPEREHSNMAIDLTSSTPNGQHASPSHMTSRSFSKI

SEQ ID NO: 39490 - protein, 148 aa, Homo sapiens
  Payload ID: 7910
  Gene Symbol: IKZF2
  Gene Name: IKAROS family zinc finger 2 (Helios)
  Uniprot ID: Q9UKS7
  ENSP ID: ENSP00000389548
METEAIDGYITCDNELSPEREHSNMAIDLTSSTPNGQHASPSHMTSTNSVKLEMQSDEECDRKPLSREDEIRGHDEGSSLEEPLIESSEVADNRKVQELQGEGGIRLPNGKLKCDVCGMVCIGPNVLMVHKRSHTGVAVVKTTFSEFC

SEQ ID NO: 39491 - protein, 92 aa, Homo sapiens
  Payload ID: 7910
  Gene Symbol: IKZF2
  Gene Name: IKAROS family zinc finger 2 (Helios)
  ENSP ID: ENSP00000390045
MHCTLTMETEAIDGYITCDNELSPEREHSNMAIDLTSSTPNGQHASPSHMTSSKSSFYDFFLCVCVSPATDFNLLGLWGPLTLWYSYCYRFC

SEQ ID NO: 39492 - protein, 409 aa, Homo sapiens
  Payload ID: 7910
  Gene Symbol: IKZF2
  Gene Name: IKAROS family zinc finger 2 (Helios)
  ENSP ID: ENSP00000395203
MTSTNSVKLEMQSDEECDRKPLSREDEIRGHDEGSSLEEPLIESSEVADNRKVQELQGEGGIRLPNGERPFHCNQCGASFTQKGNLLRHIKLHSGEKPFKCPFCSYACRRRDALTGHLRTHSVGKPHKCNYCGRSYKQRSSLEEHKERCHNYLQNVSMEAAGQVMSHHGEKLMRFSYPDIHFDMNLTYEKEAELMQSHMMDQAINNAITYLGAEALHPLMQHPPSTIAEVAPVISSAYSQVYHPNRIERPISRETADSHENNMDGPISLIRPKSRPQEREASPSNSCLDSTDSESSHDDHQSYQGHPALNPKRKQSPAYMKEDVKALDTTKAPKGSLKDIYKVFNGEGEQIRAFKCEHCRVLFLDHVMYTIHMGCHGYRDPLECNICGYRSQDRYEFSSHIVRGEHTFH

SEQ ID NO: 39493 - protein, 239 aa, Homo sapiens
  Payload ID: 7910
  Gene Symbol: IKZF2
  Gene Name: IKAROS family zinc finger 2 (Helios)
  Uniprot ID: Q9UKS7
  ENSP ID: ENSP00000396253
METEAIDGYITCDNELSPEREHSNMAIDLTSSTPNGQHASPSHMTSTNSVKLEMQSDEECDRKPLSREDEIRGHDEGSSLEEPLIESSEVADNRKVQELQGEGGIRLPNGKLKCDVCGMVCIGPNVLMVHKRSHTGERPFHCNQCGASFTQKGNLLRHIKLHSGEKPFKCPFCSYACRRRDALTGHLRTHSVGKPHKCNYCGRSYKQRSSLEEHKERCHNYLQNVSMEAAGQVMSHHDS

SEQ ID NO: 39494 - protein, 83 aa, Homo sapiens
  Payload ID: 7910
  Gene Symbol: IKZF2
  Gene Name: IKAROS family zinc finger 2 (Helios)
  ENSP ID: ENSP00000402132
METEAIDGYITCDNELSPEREHSNMAIDLTSSTPNGQHASPSHMTSTNSVKLEMQSDEECDRKPLSREDEIRGHDEGSSLEEP

SEQ ID NO: 39495 - protein, 125 aa, Homo sapiens
  Payload ID: 7910
  Gene Symbol: IKZF2
  Gene Name: IKAROS family zinc finger 2 (Helios)
  ENSP ID: ENSP00000406783
MHCTLTMETEAIDGYITCDNELSPEREHSNMAIDLTSSTPNGQHASPSHMTSTNSVKLEMQSDEECDRKPLSREDEIRGHDEGSSLEEPLIESSEVADNRKVQELQGEGGIRLPNGERPFHCNQC

SEQ ID NO: 39496 - protein, 411 aa, Homo sapiens
  Payload ID: 7910
  Gene Symbol: IKZF2
  Gene Name: IKAROS family zinc finger 2 (Helios)
  ENSP ID: ENSP00000410447
MTSTNSVKLEMQSDEECDRKPLSREDEIRGHDEGSSLEEPLIESSEVADNRKVQELQGEGGIRLPNGERPFHCNQCGASFTQKGNLLRHIKLHSGEKPFKCPFCSYACRRRDALTGHLRTHSVPPMEDCKEQEPIMDNNISLVPFERPAVIEKLTGNMGKRKSSTPQKFVGEKLMRFSYPDIHFDMNLTYEKEAELMQSHMMDQAINNAITYLGAEALHPLMQHPPSTIAEVAPVISSAYSQVYHPNRIERPISRETADSHENNMDGPISLIRPKSRPQEREASPSNSCLDSTDSESSHDDHQSYQGHPALNPKRKQSPAYMKEDVKALDTTKAPKGSLKDIYKVFNGEGEQIRAFKCEHCRVLFLDHVMYTIHMGCHGYRDPLECNICGYRSQDRYEFSSHIVRGEHTFH

SEQ ID NO: 39497 - protein, 52 aa, Homo sapiens; identical to SEQ ID NO: 39489
  Payload ID: 7910
  Gene Symbol: IKZF2
  Gene Name: IKAROS family zinc finger 2 (Helios)
  Uniprot ID: Q9UKS7
  ENSP ID: ENSP00000411444

SEQ ID NO: 39498 - protein, 526 aa, Homo sapiens [sequence omitted]

SEQ ID NO: 39499 - protein, 52 aa, Homo sapiens; identical to SEQ ID NO: 39489
  Payload ID: 7910
  Gene Symbol: IKZF2
  Gene Name: IKAROS family zinc finger 2 (Helios)
  Uniprot ID: Q9UKS7
  ENSP ID: ENSP00000413680

SEQ ID NO: 39500 - protein, 431 aa, Homo sapiens
  Payload ID: 7911
  Gene Symbol: IKZF3
  Gene Name: IKAROS family zinc finger 3 (Aiolos)
  Uniprot ID: Q9UKT9
  ENSP ID: ENSP00000341977
MEDIQTNAELKSTQEQSVPAESAAVLNDYSLTKSHEMENVDSGEGPANEDEDIGDDSMKVKDEYSERDENVLKSEPMGNAEEPEIPYSYSREYNEYENIKLERHVVSFDSSRPTSGKMNCDVCGLSCISFNVLMVHKRSHTGERPFQCNQCGASFTQKGNLLRHIKLHTGEKPFKCHLCNYACQRRDALTGHLRTHSGEKRHCFDVNYNSSYMYEKESELIQTRMMDQAINNAISYLGAEALRPLVQTPPAPTSEMVPVISSMYPIALTRAEMSNGAPQELEKKSIHLPEKSVPSERGLSPNNSGHDSTDTDSNHEERQNHIYQQNHMVLSRARNGMPLLKEVPRSYELLKPPPICPRDSVKVINKEGEVMDVYRCDHCRVLFLDYVMFTIHMGCHGFRDPFECNMCGYRSHDRYEFSSHIARGEHRALLK

SEQ ID NO: 39501 - protein, 470 aa, Homo sapiens
  Payload ID: 7911
  Gene Symbol: IKZF3
  Gene Name: IKAROS family zinc finger 3 (Aiolos)
  Uniprot ID: Q9UKT9
  ENSP ID: ENSP00000344471
MEDIQTNAELKSTQEQSVPAESAAVLNDYSLTKSHEMENVDSGEGPANEDEDIGDDSMKVKDEYSERDENVLKSEPMGNAEEPEIPYSYSREYNEYENIKLERHVVSFDSSRPTSGKMNCDVCGLSCISFNVLMVHKRSHTGERPFQCNQCGASFTQKGNLLRHIKLHTGEKPFKCHLCNYACQRRDALTGHLRTHSVEKPYKCEFCGRSYKQRSSLEEHKERCRTFLQSTDPGDTGEKRHCFDVNYNSSYMYEKESELIQTRMMDQAINNAISYLGAEALRPLVQTPPAPTSEMVPVISSMYPIALTRAEMSNGAPQELEKKSIHLPEKSVPSERGLSPNNSGHDSTDTDSNHEERQNHIYQQNHMVLSRARNGMPLLKEVPRSYELLKPPPICPRDSVKVINKEGEVMDVYRCDHCRVLFLDYVMFTIHMGCHGFRDPFECNMCGYRSHDRYEFSSHIARGEHRALLK

SEQ ID NO: 39502 - protein, 509 aa, Homo sapiens
  Payload ID: 7911
  Gene Symbol: IKZF3
  Gene Name: IKAROS family zinc finger 3 (Aiolos)
  Uniprot ID: Q9UKT9
  ENSP ID: ENSP00000344544
MEDIQTNAELKSTQEQSVPAESAAVLNDYSLTKSHEMENVDSGEGPANEDEDIGDDSMKVKDEYSERDENVLKSEPMGNAEEPEIPYSYSREYNEYENIKLERHVVSFDSSRPTSGKMNCDVCGLSCISFNVLMVHKRSHTGERPFQCNQCGASFTQKGNLLRHIKLHTGEKPFKCHLCNYACQRRDALTGHLRTHSVEKPYKCEFCGRSYKQRSSLEEHKERCRTFLQSTDPGDTASAEARHIKAEMGSERALVLDRLASNVAKRKSSMPQKFIGEKRHCFDVNYNSSYMYEKESELIQTRMMDQAINNAISYLGAEALRPLVQTPPAPTSEMVPVISSMYPIALTRAEMSNGAPQELEKKSIHLPEKSVPSERGLSPNNSGHDSTDTDSNHEERQNHIYQQNHMVLSRARNGMPLLKEVPRSYELLKPPPICPRDSVKVINKEGEVMDVYRCDHCRVLFLDYVMFTIHMGCHGFRDPFECNMCGYRSHDRYEFSSHIARGEHRALLK

SEQ ID NO: 39503 - protein, 470 aa, Homo sapiens
  Payload ID: 7911
  Gene Symbol: IKZF3
  Gene Name: IKAROS family zinc finger 3 (Aiolos)
  Uniprot ID: Q9UKT9
  ENSP ID: ENSP00000345622
MEDIQTNAELKSTQEQSVPAESAAVLNDYSLTKSHEMENVDSGEGPANEDEDIGDDSMKVKDEYSERDENVLKSEPMGNAEEPEIPYSYSREYNEYENIKLERHVVSFDSSRPTSGKMNCDVCGLSCISFNVLMVHKRSHTGERPFQCNQCGASFTQKGNLLRHIKLHTGEKPFKCHLCNYACQRRDALTGHLRTHSASAEARHIKAEMGSERALVLDRLASNVAKRKSSMPQKFIGEKRHCFDVNYNSSYMYEKESELIQTRMMDQAINNAISYLGAEALRPLVQTPPAPTSEMVPVISSMYPIALTRAEMSNGAPQELEKKSIHLPEKSVPSERGLSPNNSGHDSTDTDSNHEERQNHIYQQNHMVLSRARNGMPLLKEVPRSYELLKPPPICPRDSVKVINKEGEVMDVYRCDHCRVLFLDYVMFTIHMGCHGFRDPFECNMCGYRSHDRYEFSSHIARGEHRALLK

SEQ ID NO: 39504 - protein, 366 aa, Homo sapiens
  Payload ID: 7911
  Gene Symbol: IKZF3
  Gene Name: IKAROS family zinc finger 3 (Aiolos)
  Uniprot ID: Q9UKT9
  ENSP ID: ENSP00000367179
MEDIQTNAELKSTQEQSVPAESAAVLNDYSLTKSHEMENVDSGEGPANEDEDIGVEKPYKCEFCGRSYKQRSSLEEHKERCRTFLQSTDPGDTASAEARHIKAEMGSERALVLDRLASNVAKRKSSMPQKFIGEKRHCFDVNYNSSYMYEKESELIQTRMMDQAINNAISYLGAEALRPLVQTPPAPTSEMVPVISSMYPIALTRAEMSNGAPQELEKKSIHLPEKSVPSERGLSPNNSGHDSTDTDSNHEERQNHIYQQNHMVLSRARNGMPLLKEVPRSYELLKPPPICPRDSVKVINKEGEVMDVYRCDHCRVLFLDYVMFTIHMGCHGFRDPFECNMCGYRSHDRYEFSSHIARGEHRALLK

SEQ ID NO: 39505 - protein, 375 aa, Homo sapiens
  Payload ID: 7911
  Gene Symbol: IKZF3
  Gene Name: IKAROS family zinc finger 3 (Aiolos)
  Uniprot ID: Q9UKT9
  ENSP ID: ENSP00000367180
MEDIQTNAELKSTQEQSVPAESAAVLNDYSLTKSHEMENVDSGEGPANEDEDIGDDSMKVKDEYSERDENVLKSEPMGNAEEPEIPYSYSREYNEYENIKLERHVVSFDSSRPTSGKMNCDVCGLSCISFNVLMVHKRSHTGEKRHCFDVNYNSSYMYEKESELIQTRMMDQAINNAISYLGAEALRPLVQTPPAPTSEMVPVISSMYPIALTRAEMSNGAPQELEKKSIHLPEKSVPSERGLSPNNSGHDSTDTDSNHEERQNHIYQQNHMVLSRARNGMPLLKEVPRSYELLKPPPICPRDSVKVINKEGEVMDVYRCDHCRVLFLDYVMFTIHMGCHGFRDPFECNMCGYRSHDRYEFSSHIARGEHRALLK

SEQ ID NO: 39506 - protein, 288 aa, Homo sapiens
  Payload ID: 7911
  Gene Symbol: IKZF3
  Gene Name: IKAROS family zinc finger 3 (Aiolos)
  Uniprot ID: Q9UKT9
  ENSP ID: ENSP00000367188
MEDIQTNAELKSTQEQSVPAESAAVLNDYSLTKSHEMENVDSGEGPANEDEDIGGEKRHCFDVNYNSSYMYEKESELIQTRMMDQAINNAISYLGAEALRPLVQTPPAPTSEMVPVISSMYPIALTRAEMSNGAPQELEKKSIHLPEKSVPSERGLSPNNSGHDSTDTDSNHEERQNHIYQQNHMVLSRARNGMPLLKEVPRSYELLKPPPICPRDSVKVINKEGEVMDVYRCDHCRVLFLDYVMFTIHMGCHGFRDPFECNMCGYRSHDRYEFSSHIARGEHRALLK

SEQ ID NO: 39507 - protein, 422 aa, Homo sapiens
  Payload ID: 7911
  Gene Symbol: IKZF3
  Gene Name: IKAROS family zinc finger 3 (Aiolos)
  Uniprot ID: Q9UKT9
  ENSP ID: ENSP00000367194
MEDIQTNAELKSTQEQSVPAESAAVLNDYSLTKSHEMENVDSGEGPANEDEDIGGERPFQCNQCGASFTQKGNLLRHIKLHTGEKPFKCHLCNYACQRRDALTGHLRTHSVEKPYKCEFCGRSYKQRSSLEEHKERCRTFLQSTDPGDTASAEARHIKAEMGSERALVLDRLASNVAKRKSSMPQKFIGEKRHCFDVNYNSSYMYEKESELIQTRMMDQAINNAISYLGAEALRPLVQTPPAPTSEMVPVISSMYPIALTRAEMSNGAPQELEKKSIHLPEKSVPSERGLSPNNSGHDSTDTDSNHEERQNHIYQQNHMVLSRARNGMPLLKEVPRSYELLKPPPICPRDSVKVINKEGEVMDVYRCDHCRVLFLDYVMFTIHMGCHGFRDPFECNMCGYRSHDRYEFSSHIARGEHRALLK

SEQ ID NO: 39508 - protein, 327 aa, Homo sapiens
  Payload ID: 7911
  Gene Symbol: IKZF3
  Gene Name: IKAROS family zinc finger 3 (Aiolos)
  Uniprot ID: Q9UKT9
  ENSP ID: ENSP00000377741
MEDIQTNAELKSTQEQSVPAESAAVLNDYSLTKSHEMENVDSGEGPANEDEDIGASAEARHIKAEMGSERALVLDRLASNVAKRKSSMPQKFIGEKRHCFDVNYNSSYMYEKESELIQTRMMDQAINNAISYLGAEALRPLVQTPPAPTSEMVPVISSMYPIALTRAEMSNGAPQELEKKSIHLPEKSVPSERGLSPNNSGHDSTDTDSNHEERQNHIYQQNHMVLSRARNGMPLLKEVPRSYELLKPPPICPRDSVKVINKEGEVMDVYRCDHCRVLFLDYVMFTIHMGCHGFRDPFECNMCGYRSHDRYEFSSHIARGEHRALLK

SEQ ID NO: 39509 - protein, 414 aa, Homo sapiens
  Payload ID: 7911
  Gene Symbol: IKZF3
  Gene Name: IKAROS family zinc finger 3 (Aiolos)
  Uniprot ID: Q9UKT9
  ENSP ID: ENSP00000403027
MEDIQTNAELKSTQEQSVPAESAAVLNDYSLTKSHEMENVDSGEGPANEDEDIGDDSMKVKDEYSERDENVLKSEPMGNAEEPEIPYSYSREYNEYENIKLERHVVSFDSSRPTSGKMNCDVCGLSCISFNVLMVHKRSHTASAEARHIKAEMGSERALVLDRLASNVAKRKSSMPQKFIGEKRHCFDVNYNSSYMYEKESELIQTRMMDQAINNAISYLGAEALRPLVQTPPAPTSEMVPVISSMYPIALTRAEMSNGAPQELEKKSIHLPEKSVPSERGLSPNNSGHDSTDTDSNHEERQNHIYQQNHMVLSRARNGMPLLKEVPRSYELLKPPPICPRDSVKVINKEGEVMDVYRCDHCRVLFLDYVMFTIHMGCHGFRDPFECNMCGYRSHDRYEFSSHIARGEHRALLK

SEQ ID NO: 39510 - protein, 436 aa, Homo sapiens
  Payload ID: 7911
  Gene Symbol: IKZF3
  Gene Name: IKAROS family zinc finger 3 (Aiolos)
  Uniprot ID: Q9UKT9
  ENSP ID: ENSP00000403776
MEDIQTNAELKSTQEQSVPADDSMKVKDEYSERDENVLKSEPMGNAEEPEIPYSYSREYNEYENIKLERHVVSFDSSRPTSGKMNCDVCGLSCISFNVLMVHKRSHTGERPFQCNQCGASFTQKGNLLRHIKLHTGEKPFKCHLCNYACQRRDALTGHLRTHSASAEARHIKAEMGSERALVLDRLASNVAKRKSSMPQKFIGEKRHCFDVNYNSSYMYEKESELIQTRMMDQAINNAISYLGAEALRPLVQTPPAPTSEMVPVISSMYPIALTRAEMSNGAPQELEKKSIHLPEKSVPSERGLSPNNSGHDSTDTDSNHEERQNHIYQQNHMVLSRARNGMPLLKEVPRSYELLKPPPICPRDSVKVINKEGEVMDVYRCDHCRVLFLDYVMFTIHMGCHGFRDPFECNMCGYRSHDRYEFSSHIARGEHRALLK

SEQ ID NO: 39511 - protein, 453 aa, Homo sapiens
  Payload ID: 7911
  Gene Symbol: IKZF3
  Gene Name: IKAROS family zinc finger 3 (Aiolos)
  Uniprot ID: Q9UKT9
  ENSP ID: ENSP00000420463
MEDIQTNAELKSTQEQSVPAESAAVLNDYSLTKSHEMENVDSGEGPANEDEDIGDDSMKVKDEYSERDENVLKSEPMGNAEEPEIPYSYSREYNEYENIKLERHVVSFDSSRPTSGKMNCDVCGLSCISFNVLMVHKRSHTVEKPYKCEFCGRSYKQRSSLEEHKERCRTFLQSTDPGDTASAEARHIKAEMGSERALVLDRLASNVAKRKSSMPQKFIGEKRHCFDVNYNSSYMYEKESELIQTRMMDQAINNAISYLGAEALRPLVQTPPAPTSEMVPVISSMYPIALTRAEMSNGAPQELEKKSIHLPEKSVPSERGLSPNNSGHDSTDTDSNHEERQNHIYQQNHMVLSRARNGMPLLKEVPRSYELLKPPPICPRDSVKVINKEGEVMDVYRCDHCRVLFLDYVMFTIHMGCHGFRDPFECNMCGYRSHDRYEFSSHIARGEHRALLK

SEQ ID NO: 39512 - protein, 475 aa, Homo sapiens
  Payload ID: 7911
  Gene Symbol: IKZF3
  Gene Name: IKAROS family zinc finger 3 (Aiolos)
  Uniprot ID: Q9UKT9
  ENSP ID: ENSP00000438972
MEDIQTNAELKSTQEQSVPADDSMKVKDEYSERDENVLKSEPMGNAEEPEIPYSYSREYNEYENIKLERHVVSFDSSRPTSGKMNCDVCGLSCISFNVLMVHKRSHTGERPFQCNQCGASFTQKGNLLRHIKLHTGEKPFKCHLCNYACQRRDALTGHLRTHSVEKPYKCEFCGRSYKQRSSLEEHKERCRTFLQSTDPGDTASAEARHIKAEMGSERALVLDRLASNVAKRKSSMPQKFIGEKRHCFDVNYNSSYMYEKESELIQTRMMDQAINNAISYLGAEALRPLVQTPPAPTSEMVPVISSMYPIALTRAEMSNGAPQELEKKSIHLPEKSVPSERGLSPNNSGHDSTDTDSNHEERQNHIYQQNHMVLSRARNGMPLLKEVPRSYELLKPPPICPRDSVKVINKEGEVMDVYRCDHCRVLFLDYVMFTIHMGCHGFRDPFECNMCGYRSHDRYEFSSHIARGEHRALLK

SEQ ID NO: 39513 - protein, 262 aa, Homo sapiens
  Payload ID: 7911
  Gene Symbol: IKZF3
  Gene Name: IKAROS family zinc finger 3 (Aiolos)
  Uniprot ID: Q9UKT9
  ENSP ID: ENSP00000462452
MGSERALVLDRLASNVAKRKSSMPQKFIGEKRHCFDVNYNSSYMYEKESELIQTRMMDQAINNAISYLGAEALRPLVQTPPAPTSEMVPVISSMYPIALTRAEMSNGAPQELEKKSIHLPEKSVPSERGLSPNNSGHDSTDTDSNHEERQNHIYQQNHMVLSRARNGMPLLKEVPRSYELLKPPPICPRDSVKVINKEGEVMDVYRCDHCRVLFLDYVMFTIHMGCHGFRDPFECNMCGYRSHDRYEFSSHIARGEHRALLK

SEQ ID NO: 39514 - protein, 263 aa, Homo sapiens
  Payload ID: 7911
  Gene Symbol: IKZF3
  Gene Name: IKAROS family zinc finger 3 (Aiolos)
  Uniprot ID: Q9UKT9
  ENSP ID: ENSP00000462791
MEDIQTNAELKSTQEQSVPAESAAVLNDYSLTKSHEMENVDSGEGPANEDEDIGDDSMKVKDEYSERDENVLKSEPMGNAEEPEIPYSYSREYNEYENIKLERHVVSFDSSRPTSGKMNCDVCGLSCISFNVLMVHKRSHTGERPFQCNQCGASFTQKGNLLRHIKLHTGEKPFKCHLCNYACQRRDALTGHLRTHSVEKPYKCEFCGRSYKQRSSLEEHKERCRTFLQSTDPGDTGTGWGWVELSHLGIRLQDLNVPWCRLH

SEQ ID NO: 39515 - protein, 207 aa, Homo sapiens
  Payload ID: 7911
  Gene Symbol: IKZF3
  Gene Name: IKAROS family zinc finger 3 (Aiolos)
  ENSP ID: ENSP00000463505
MEDIQTNAELKSTQEQSVPAESAAVLNDYSLTKSHEMENVDSGEGPANEDEDIGDDSMKVKDEYSERDENVLKSEPMGNAEEPEIPYSYSREYNEYENIKLERHVVSFDSSRPTSGKMNCDVCGLSCISFNVLMVHKRSHTVEKPYKCEFCGRSYKQRSSLEEHKERCRTFLQSTDPGDTGTGWGWVELSHLGIRLQDLNVPWCRLH

SEQ ID NO: 39516 - protein, 262 aa, Homo sapiens; identical to SEQ ID NO: 39513
  Payload ID: 7911
  Gene Symbol: IKZF3
  Gene Name: IKAROS family zinc finger 3 (Aiolos)
  Uniprot ID: Q9UKT9
  ENSP ID: ENSP00000485515

SEQ ID NO: 39517 - protein, 585 aa, Homo sapiens
  Payload ID: 7912
  Gene Symbol: IKZF4
  Gene Name: IKAROS family zinc finger 4 (Eos)
  Uniprot ID: Q9H2S9
  ENSP ID: ENSP00000262032
MHTPPALPRRFQGGGRVRTPGSHRQGKDNLERDPSGGCVPDFLPQAQDSNHFIMESLFCESSGDSSLEKEFLGAPVGPSVSTPNSQHSSPSRSLSANSIKVEMYSDEESSRLLGPDERLLEKDDSVIVEDSLSEPLGYCDGSGPEPHSPGGIRLPNGKLKCDVCGMVCIGPNVLMVHKRSHTGERPFHCNQCGASFTQKGNLLRHIKLHSGEKPFKCPFCNYACRRRDALTGHLRTHSVSSPTVGKPYKCNYCGRSYKQQSTLEEHKERCHNYLQSLSTEAQALAGQPGDEIRDLEMVPDSMLHSSSERPTFIDRLANSLTKRKRSTPQKFVGEKQMRFSLSDLPYDVNSGGYEKDVELVAHHSLEPGFGSSLAFVGAEHLRPLRLPPTNCISELTPVISSVYTQMQPLPGRLELPGSREAGEGPEDLADGGPLLYRPRGPLTDPGASPSNGCQDSTDTESNHEDRVAGVVSLPQGPPPQPPPTIVVGRHSPAYAKEDPKPQEGLLRGTPGPSKEVLRVVGESGEPVKAFKCEHCRILFLDHVMFTIHMGCHGFRDPFECNICGYHSQDRYEFSSHIVRGEHKVG

SEQ ID NO: 39518 - protein, 585 aa, Homo sapiens; identical to SEQ ID NO: 39517
  Payload ID: 7912
  Gene Symbol: IKZF4
  Gene Name: IKAROS family zinc finger 4 (Eos)
  Uniprot ID: Q9H2S9
  ENSP ID: ENSP00000412101

SEQ ID NO: 39519 - protein, 585 aa, Homo sapiens; identical to SEQ ID NO: 39517
  Payload ID: 7912
  Gene Symbol: IKZF4
  Gene Name: IKAROS family zinc finger 4 (Eos)
  Uniprot ID: Q9H2S9
  ENSP ID: ENSP00000448419

SEQ ID NO: 39520 - protein, 10 aa, Homo sapiens
  Payload ID: 7912
  Gene Symbol: IKZF4
  Gene Name: IKAROS family zinc finger 4 (Eos)
  ENSP ID: ENSP00000449168
MHTPPALPRR

SEQ ID NO: 39521 - protein, 48 aa, Homo sapiens
  Payload ID: 7912
  Gene Symbol: IKZF4
  Gene Name: IKAROS family zinc finger 4 (Eos)
  ENSP ID: ENSP00000449857
MHTPPALPRRFQGGGRVRTPGSHRQGKDNVAGTHLWRRSSSGPQWGPR

SEQ ID NO: 39522 - protein, 540 aa, Homo sapiens
  Payload ID: 7912
  Gene Symbol: IKZF4
  Gene Name: IKAROS family zinc finger 4 (Eos)
  ENSP ID: ENSP00000450020
MTAVPLTSRNPRFLEGSGDSSLEKEFLGAPVGPSVSTPNSQHSSPSRSLSANSIKVEMYSDEESSRLLGPDERLLEKDDSVIVEDSLSEPLGYCDGSGPEPHSPGGIRLPNGKLKCDVCGMVCIGPNVLMVHKRSHTGERPFHCNQCGASFTQKGNLLRHIKLHSGEKPFKCPFCNYACRRRDALTGHLRTHSVSSPTVGKPYKCNYCGRSYKQQSTLEEHKERCHNYLQSLSTEAQALAGQPGDEIRDLEMVPDSMLHSSSERPTFIDRLANSLTKRKRSTPQKFVGEKQMRFSLSDLPYDVNSGGYEKDVELVAHHSLEPGFGSSLAFVGAEHLRPLRLPPTNCISELTPVISSVYTQMQPLPGRLELPGSREAGEGPEDLADGGPLLYRPRGPLTDPGASPSNGCQDSTDTESNHEDRVAGVVSLPQGPPPQPPPTIVVGRHSPAYAKEDPKPQEGLLRGTPGPSKEVLRVVGESGEPVKAFKCEHCRILFLDHVMFTIHMGCHGFRDPFECNICGYHSQDRYEFSSHIVRGEHKVG

SEQ ID NO: 39523 - protein, 419 aa, Homo sapiens
  Payload ID: 7913
  Gene Symbol: IKZF5
  Gene Name: IKAROS family zinc finger 5 (Pegasus)
  Uniprot ID: Q9H5V7
  ENSP ID: ENSP00000357881
MGEKKPEPLDFVKDFQEYLTQQTHHVNMISGSVSGDKEAEALQGAGTDGDQNGLDHPSVEVSLDENSGMLVDGFERTFDGKLKCRYCNYASKGTARLIEHIRIHTGEKPHRCHLCPFASAYERHLEAHMRSHTGEKPYKCELCSFRCSDRSNLSHHRRRKHKMVPIKGTRSSLSSKKMWGVLQKKTSNLGYSRRALINLSPPSMVVQKPDYLNDFTHEIPNIQTDSYESMAKTTPTGGLPRDPQELMVDNPLNQLSTLAGQLSSLPPENQNPASPDVVPCPDEKPFMIQQPSTQAVVSAVSASIPQSSSPTSPEPRPSHSQRNYSPVAGPSSEPSAHTSTPSIGNSQPSTPAPALPVQDPQLLHHCQHCDMYFADNILYTIHMGCHGYENPFQCNICGCKCKNKYDFACHFARGQHNQH

SEQ ID NO: 39524 - protein, 419 aa, Homo sapiens; identical to SEQ ID NO: 39523
  Payload ID: 7913
  Gene Symbol: IKZF5
  Gene Name: IKAROS family zinc finger 5 (Pegasus)
  Uniprot ID: Q9H5V7
  ENSP ID: ENSP00000478056

SEQ ID NO: 39525 - protein, 377 aa, Homo sapiens
  Payload ID: 7914
  Gene Symbol: IKBIP
  Gene Name: IKBKB interacting protein
  Uniprot ID: Q70UQ0
  ENSP ID: ENSP00000299157
MSEVKSRKKSGPKGAPAAEPGKRSEGGKTPVARSSGGGGWADPRTCLSLLSLGTCLGLAWFVFQQSEKFAKVENQYQLLKLETNEFQQLQSKISLISEKLESTESILQEATSSMSLMTQFEQEVSNLQDIMHDIQNNEEVLTQRMQSLNEKFQNITDFWKRSLEEMNINTDIFKSEAKHIHSQVTVQINSAEQEIKLLTERLKDLEDSTLRNIRTVKRQEEEDLLRVEEQLGSDTKAIEKLEEEQHALFARDEDLTNKLSDYEPKVEECKTHLPTIESAIHSVLRVSQDLIETEKKMEDLTMQMFNMEDDMLKAVSEIMEMQKTLEGIQYDNSILKMQNELDILKEKVHDFIAYSSTGEKGTLKEYNIENKGIGGDF

SEQ ID NO: 39526 - protein, 350 aa, Homo sapiens
  Payload ID: 7914
  Gene Symbol: IKBIP
  Gene Name: IKBKB interacting protein
  Uniprot ID: Q70UQ0
  ENSP ID: ENSP00000343471
MSEVKSRKKSGPKGAPAAEPGKRSEGGKTPVARSSGGGGWADPRTCLSLLSLGTCLGLAWFVFQQSEKFAKVENQYQLLKLETNEFQQLQSKISLISEKWQKSEAIMEQLKSFQIIAHLKRLQEEINEVKTWSNRITEKQDILNNSLTTLSQDITKVDQSTTSMAKDVGLKITSVKTDIRRISGLVTDVISLTDSVQELENKIEKVEKNTVKNIGDLLSSSIDRTATLRKTASENSQRINSVKKTLTELKSDFDKHTDRFLSLEGDRAKVLKTVTFANDLKPKVYNLKKDFSRLEPLVNDLTLRIGRLVTDLLQREKEIAFLSEKISNLTIVQAEIKDIKDEIAHISDMN

SEQ ID NO: 39527 - protein, 70 aa, Homo sapiens
  Payload ID: 7914
  Gene Symbol: IKBIP
  Gene Name: IKBKB interacting protein
  Uniprot ID: Q70UQ0
  ENSP ID: ENSP00000376762
MSEVKSRKKSGPKGAPAAEPGKRSEGGKTPVARSSGGGGWADPRTCLSLLSLGTCLGLACGRNLKLSWNN

SEQ ID NO: 39528 - protein, 620 aa, Homo sapiens
  Payload ID: 7915
  Gene Symbol: ITK
  Gene Name: IL2-inducible T-cell kinase
  Uniprot ID: Q08881
  ENSP ID: ENSP00000398655
MNNFILLEEQLIKKSQQKRRTSPSNFKVRFFVLTKASLAYFEDRHGKKRTLKGSIELSRIKCVEIVKSDISIPCHYKYPFQVVHDNYLLYVFAPDRESRQRWVLALKEETRNNNSLVPKYHPNFWMDGKWRCCSQLEKLATGCAQYDPTKNASKKPLPPTPEDNRRPLWEPEETVVIALYDYQTNDPQELALRRNEEYCLLDSSEIHWWRVQDRNGHEGYVPSSYLVEKSPNNLETYEWYNKSISRDKAEKLLLDTGKEGAFMVRDSRTAGTYTVSVFTKAVVSENNPCIKHYHIKETNDNPKRYYVAEKYVFDSIPLLINYHQHNGGGLVTRLRYPVCFGRQKAPVTAGLRYGKWVIDPSELTFVQEIGSGQFGLVHLGYWLNKDKVAIKTIREGAMSEEDFIEEAEVMMKLSHPKLVQLYGVCLEQAPICLVFEFMEHGCLSDYLRTQRGLFAAETLLGMCLDVCEGMAYLEEACVIHRDLAARNCLVGENQVIKVSDFGMTRFVLDDQYTSSTGTKFPVKWASPEVFSFSRYSSKSDVWSFGVLMWEVFSEGKIPYENRSNSEVVEDISTGFRLYKPRLASTHVYQIMNHCWKERPEDRPAFSRLLRQLAEIAESGL

SEQ ID NO: 39529 - protein, 73 aa, Homo sapiens
  Payload ID: 7915
  Gene Symbol: ITK
  Gene Name: IL2-inducible T-cell kinase
  ENSP ID: ENSP00000430327
MDGKWRCCSQLEKLATGCAQYDPTKNASKKPLPPTPEDNRRPLWEPEETVVIALYDYQTNDPQELALRRNEEY

SEQ ID NO: 39530 - protein, 116 aa, Homo sapiens
  Payload ID: 7915
  Gene Symbol: ITK
  Gene Name: IL2-inducible T-cell kinase
  ENSP ID: ENSP00000431054
MNNFILLEEQLIKKSQQKRRTSPSNFKVRFFVLTKASLAYFEDRHGKKRTLKGSIELSRIKCVEIVKSDISIPCHYKYPFQVVHDNYLLYVFAPDRESRQRWVLALKEEKGSRYVA

SEQ ID NO: 39531 - protein, 632 aa, Homo sapiens
  Payload ID: 7916
  Gene Symbol: ILVBL
  Gene Name: ilvB (bacterial acetolactate synthase)-like
  Uniprot ID: A1L0T0
  ENSP ID: ENSP00000263383
METPAAAAPAGSLFPSFLLLACGTLVAALLGAAHRLGLFYQLLHKVDKASVRHGGENVAAVLRAHGVRFIFTLVGGHISPLLVACEKLGIRVVDTRHEVTAVFAADAMARLSGTVGVAAVTAGPGLTNTVTAVKNAQMAQSPILLLGGAASTLLQNRGALQAVDQLSLFRPLCKFCVSVRRVRDIVPTLRAAMAAAQSGTPGPVFVELPVDVLYPYFMVQKEMVPAKPPKGLVGRVVSWYLENYLANLFAGAWEPQPEGPLPLDIPQASPQQVQRCVEILSRAKRPLMVLGSQALLTPTSADKLRAAVETLGVPCFLGGMARGLLGRNHPLHIRENRSAALKKADVIVLAGTVCDFRLSYGRVLSHSSKIIIVNRNREEMLLNSDIFWKPQEAVQGDVGSFVLKLVEGLQGQTWAPDWVEELREADRQKEQTFREKAAMPVAQHLNPVQVLQLVEETLPDNSILVVDGGDFVGTAAHLVQPRGPLRWLDPGAFGTLGVGAGFALGAKLCRPDAEVWCLFGDGAFGYSLIEFDTFVRHKIPVMALVGNDAGWTQISREQVPSLGSNVACGLAYTDYHKAAMGLGARGLLLSRENEDQVVKVLHDAQQQCRDGHPVVVNILIGRTDFRDGSIAV

SEQ ID NO: 39532 - protein, 166 aa, Homo sapiens
  Payload ID: 7916
  Gene Symbol: ILVBL
  Gene Name: ilvB (bacterial acetolactate synthase)-like
  ENSP ID: ENSP00000433355
METPAAAAPAGSLFPSFLLLACGTLVAALLGAAHRLGLFYQLLHKVDKASVRHGGENVAAVLRAHGVRFIFTLVGGHISPLLVACEKLGIRVVDTRHEVTAVFAADAMARLSGTVGVAAVTAGPGLTNTVTAVKNAQMAQSPILLLGGAASTLLQNRGALQAVDQL

SEQ ID NO: 39533 - protein, 52 aa, Homo sapiens
  Payload ID: 7916
  Gene Symbol: ILVBL
  Gene Name: ilvB (bacterial acetolactate synthase)-like
  ENSP ID: ENSP00000434734
METPAAAAPAGSLFPSFLLLACGTLVAALLGAAHRLGLFYQLLHKGRWAWRQ

SEQ ID NO: 39534 - protein, 262 aa, Homo sapiens
  Payload ID: 7916
  Gene Symbol: ILVBL
  Gene Name: ilvB (bacterial acetolactate synthase)-like
  ENSP ID: ENSP00000435516
METPAAAAPAGSLFPSFLLLACGTLVAALLGAAHRLGLFYQLLHKVDKASVRHGGENVAAVLRAHGVRFIFTLVGGHISPLLVACEKLGIRVVDTRHEVTAVFAADAMARLSGTVGVAAVTAGPGLTNTVTAVKNAQMAQSPILLLGGAASTLLQNRGALQAVDQLSLFRPLCKFCVSVRRVRDIVPTLRAAMAAAQSGTPGPVFVELPVDVLYPYFMVQKEMVPAKPPKGLVGRVVSWYLENYLANLFAGAWEPQPEGPLP

SEQ ID NO: 39535 - protein, 229 aa, Homo sapiens
  Payload ID: 7916
  Gene Symbol: ILVBL
  Gene Name: ilvB (bacterial acetolactate synthase)-like
  ENSP ID: ENSP00000470834
MVQKEMVPAKPPKGLVGRVVSWYLENYLANLFAGAWEPQPEGPLPLDIPQASPQQVQRCVEILSRAKRPLMVLGSQALLTPTSADKLRAAVETLGVPCFLGGMARGLLGRNHPLHIRENRSAALKKADVIVLAGTVCDFRLSYGRVLSHSSKIIIVNRNREEMLLNSDIFWKPQEAVQGDVGSFVLKLVEGLQGQTWAPDWVEELREADRQKEQTFREKAAMPVAQHLN

SEQ ID NO: 39536 - protein, 525 aa, Homo sapiens
  Payload ID: 7916
  Gene Symbol: ILVBL
  Gene Name: ilvB (bacterial acetolactate synthase)-like
  ENSP ID: ENSP00000470942
MARLSGTVGVAAVTAGPGLTNTVTAVKNAQMAQSPILLLGGAASTLLQNRGALQAVDQLSLFRPLCKFCVSVRRVRDIVPTLRAAMAAAQSGTPGPVFVELPVDVLYPYFMVQKEMVPAKPPKGLVGRVVSWYLENYLANLFAGAWEPQPEGPLPLDIPQASPQQVQRCVEILSRAKRPLMVLGSQALLTPTSADKLRAAVETLGVPCFLGGMARGLLGRNHPLHIRENRSAALKKADVIVLAGTVCDFRLSYGRVLSHSSKIIIVNRNREEMLLNSDIFWKPQEAVQGDVGSFVLKLVEGLQGQTWAPDWVEELREADRQKEQTFREKAAMPVAQHLNPVQVLQLVEETLPDNSILVVDGGDFVGTAAHLVQPRGPLRWLDPGAFGTLGVGAGFALGAKLCRPDAEVWCLFGDGAFGYSLIEFDTFVRHKIPVMALVGNDAGWTQISREQVPSLGSNVACGLAYTDYHKAAMGLGARGLLLSRENEDQVVKVLHDAQQQCRDGHPVVVNILIGRTDFRDGSIAV

SEQ ID NO: 39537 - protein, 165 aa, Homo sapiens
  Payload ID: 7916
  Gene Symbol: ILVBL
  Gene Name: ilvB (bacterial acetolactate synthase)-like
  ENSP ID: ENSP00000471762
MARLSGTVGVAAVTAGPGLTNTVTAVKNAQMAQSPILLLGGAASTLLQNRGALQAVDQLSLFRPLCKFCVSVRRVRDIVPTLRAAMAAAQSGTPGPVFVELPVDVLYPYFMVQKEMVPAKPPKGLVGRVVSWYLENYLANLFAGAWEPQPEGPLPLDIPQASPQQ

SEQ ID NO: 39538 - protein, 206 aa, Homo sapiens
  Payload ID: 7917
  Gene Symbol: ICT1
  Gene Name: immature colon carcinoma transcript 1
  Uniprot ID: Q14197
  ENSP ID: ENSP00000301585
MAATRCLRWGLSRAGVWLLPPPARCPRRALHKQKDGTEFKSIYSLDKLYPESQGSDTAWRVPNGAKQADSDIPLDRLTISYCRSSGPGGQNVNKVNSKAEVRFHLATAEWIAEPVRQKIAITHKNKINRLGELILTSESSRYQFRNLADCLQKIRDMITEASQTPKEPTKEDVKLHRIRIENMNRERLRQKRIHSAVKTSRRVDMD

SEQ ID NO: 39539 - protein, 192 aa, Homo sapiens
  Payload ID: 7917
  Gene Symbol: ICT1
  Gene Name: immature colon carcinoma transcript 1
  ENSP ID: ENSP00000462256
MAATRCLRWGLSRAGVWLLPPPARCPRRALHKQKDGTEFKSIYSLDKLYPESQGSDTAWRVPNGAKQADSDIPLDRLTISYCRSSGPGGQNVNKVNSKAEVRFHLATAEWIAEPVRQKIAITFFICSLQHKNKINRLGELILTSESSRYQFRNLADCLQKIRDMITEASQTPKEPTKEDVKLHRIRIENMNR

SEQ ID NO: 39540 - protein, 71 aa, Homo sapiens
  Payload ID: 7917
  Gene Symbol: ICT1
  Gene Name: immature colon carcinoma transcript 1
  ENSP ID: ENSP00000464192
  MOD_RES (1)..(1): Any amino acid
XLLPPPARCPRRALHKQKDGTEFKSIYSLDKLYPESQGSDTAWRVPNGAKQADSDIPLERYLYLKGTPWIQ

SEQ ID NO: 39541 - protein, 223 aa, Homo sapiens
  Payload ID: 7918
  Gene Symbol: IER2
  Gene Name: immediate early response 2
  Uniprot ID: Q9BTL4
  ENSP ID: ENSP00000292433
MEVQKEAQRIMTLSVWKMYHSRMQRGGLRLHRSLQLSLVMRSARELYLSAKVEALEPEVSLPAALPSDPRLHPPREAESTAETATPDGEHPFPEPMDTQEAPTAEETSACCAPRPAKVSRKRRSSSLSDGGDAGLVPSKKARLEEKEEEEGASSEVADRLQPPPAQAEGAFPNLARVLQRRFSGLLNCSPAAPPTAPPACEAKPACRPADSMLNVLVRAVVAF

SEQ ID NO: 39542 - protein, 223 aa, Homo sapiens; identical to SEQ ID NO: 39541
  Payload ID: 7918
  Gene Symbol: IER2
  Gene Name: immediate early response 2
  Uniprot ID: Q9BTL4
  ENSP ID: ENSP00000465617

SEQ ID NO: 39543 - protein, 223 aa, Homo sapiens; identical to SEQ ID NO: 39541
  Payload ID: 7918
  Gene Symbol: IER2
  Gene Name: immediate early response 2
  Uniprot ID: Q9BTL4
  ENSP ID: ENSP00000467294

SEQ ID NO: 39544 - protein, 156 aa, Homo sapiens
  Payload ID: 7919
  Gene Symbol: IER3
  Gene Name: immediate early response 3
  Uniprot ID: P46695
  ENSP ID: ENSP00000259874
MCHSRSCHPTMTILQAPTPAPSTIPGPRRGSGPEIFTFDPLPEPAAAPAGRPSASRGHRKRSRRVLYPRVVRRQLPVEEPNPAKRLLFLLLTIVFCQILMAEEGVPAPLPPEDAPNAASLAPTPVSAVLEPFNLTSEPSDYALDLSTFLQQHPAAF

SEQ ID NO: 39545 - protein, 138 aa, Homo sapiens
  Payload ID: 7919
  Gene Symbol: IER3
  Gene Name: immediate early response 3
  ENSP ID: ENSP00000365557
MCHSRSCHPTMTILQAPTPAPSTIPGPRRGSGPEIFTFDPLPEPAAAPAGRPSASRGHRKRSRRVLYPRVVSIAEVGIRGVRCPGVTGERPDSRGLDLTCLLFCLPLGPAPAASRGTEPSQKASLSAAHHRLLPDPDG

SEQ ID NO: 39546 - protein, 156 aa, Homo sapiens
  Payload ID: 7919
  Gene Symbol: IER3
  Gene Name: immediate early response 3
  Uniprot ID: P46695
  ENSP ID: ENSP00000373054
MCHSRSCHPTMTILQAPTPAPSTIPGPRRGSGPEIFTFDPLPEPAAAPAGRPSASRGHRKRSRRVLYPRVVRRQLPVEEPNPAKRLLFLLLTIVFCQILMAEEGVPAPLPPEDAPNAASLAPTPVSPVLEPFNLTSEPSDYALDLSTFLQQHPAAF

SEQ ID NO: 39547 - protein, 138 aa, Homo sapiens; identical to SEQ ID NO: 39545
  Payload ID: 7919
  Gene Symbol: IER3
  Gene Name: immediate early response 3
  ENSP ID: ENSP00000383354

SEQ ID NO: 39548 - protein, 138 aa, Homo sapiens; identical to SEQ ID NO: 39545
  Payload ID: 7919
  Gene Symbol: IER3
  Gene Name: immediate early response 3
  ENSP ID: ENSP00000394148

SEQ ID NO: 39549 - protein, 156 aa, Homo sapiens; identical to SEQ ID NO: 39546
  Payload ID: 7919
  Gene Symbol: IER3
  Gene Name: immediate early response 3
  Uniprot ID: P46695
  ENSP ID: ENSP00000397956

SEQ ID NO: 39550 - protein, 138 aa, Homo sapiens; identical to SEQ ID NO: 39545
  Payload ID: 7919
  Gene Symbol: IER3
  Gene Name: immediate early response 3
  ENSP ID: ENSP00000398052

SEQ ID NO: 39551 - protein, 156 aa, Homo sapiens; identical to SEQ ID NO: 39546
  Payload ID: 7919
  Gene Symbol: IER3
  Gene Name: immediate early response 3
  Uniprot ID: P46695
  ENSP ID: ENSP00000398139

SEQ ID NO: 39552 - protein, 156 aa, Homo sapiens; identical to SEQ ID NO: 39546
  Payload ID: 7919
  Gene Symbol: IER3
  Gene Name: immediate early response 3
  Uniprot ID: P46695
  ENSP ID: ENSP00000406245

SEQ ID NO: 39553 - protein, 138 aa, Homo sapiens; identical to SEQ ID NO: 39545
  Payload ID: 7919
  Gene Symbol: IER3
  Gene Name: immediate early response 3
  ENSP ID: ENSP00000411106

SEQ ID NO: 39554 - protein, 156 aa, Homo sapiens; identical to SEQ ID NO: 39546
  Payload ID: 7919
  Gene Symbol: IER3
  Gene Name: immediate early response 3
  Uniprot ID: P46695
  ENSP ID: ENSP00000412283

SEQ ID NO: 39555 - protein, 138 aa, Homo sapiens; identical to SEQ ID NO: 39545
  Payload ID: 7919
  Gene Symbol: IER3
  Gene Name: immediate early response 3
  ENSP ID: ENSP00000412861

SEQ ID NO: 39556 - protein, 82 aa, Homo sapiens
  Payload ID: 7920
  Gene Symbol: IER3IP1
  Gene Name: immediate early response 3 interacting protein 1
  Uniprot ID: Q9Y5U9
  ENSP ID: ENSP00000256433
MAFTLYSLLQAALLCVNAIAVLHEERFLKNIGWGTDQGIGGFGEEPGIKSQLMNLIRSVRTVMRVPLIIVNSIAIVLLLLFG

SEQ ID NO: 39557 - protein, 327 aa, Homo sapiens
  Payload ID: 7921
  Gene Symbol: IER5
  Gene Name: immediate early response 5
  Uniprot ID: Q5VY09
  ENSP ID: ENSP00000356549
MEFKLEAHRIVSISLGKIYNSRVQRGGIKLHKNLLVSLVLRSARQVYLSDPCPGLYLAGPAGTPAPPPQQQPGEPAAGPPAGWGEPPPPAARASWPETEPQPERSSVSDAPRVGDEVPVATVTGVGDVFQGGEADATEAAWSRVEGPRQAAAREAEGTAGGWGVFPEVSRAARRPCGCPLGGEDPPGTPAATPRAACCCAPQPAEDEPPAPPAVCPRKRCAAGVGGGPAGCPAPGSTPLKKPRRNLEQPPSGGEDDDAEEMETGNVANLISIFGSSFSGLLRKSPGGGREEEEGEESGPEAAEPGQICCDKPVLRDMNPWSTAIVAF

SEQ ID NO: 39558 - protein, 404 aa, Homo sapiens
  Payload ID: 7922
  Gene Symbol: IER5L
  Gene Name: immediate early response 5-like
  Uniprot ID: Q5T953
  ENSP ID: ENSP00000361569
MECALDAQSLISISLRKIHSSRTQRGGIKLHKNLLVSYVLRNARQLYLSERYAELYRRQQQQQQQQPPHHQHQHLAYAAPGMPASAADFGPLQLGGGGDAEAREPAARHQLHQLHQLHQLHLQQQLHQHQHPAPRGCAAAAAAGAPAGGAGALSELPGCAALQPPHGAPHRGQPLEPLQPGPAPLPLPLPPPAPAALCPRDPRAPAACSAPPGAAPPAAAASPPASPAPASSPGFYRGAYPTPSDFGLHCSSQTTVLDLDTHVVTTVENGYLHQDCCASAHCPCCGQGAPGPGLASAAGCKRKYYPGQEEEEDDEEDAGGLGAEPPGGAPFAPCKRARFEDFCPDSSPDASNISNLISIFGSGFSGLVSRQPDSSEQPPPLNGQLCAKQALASLGAWTRAIVAF

SEQ ID NO: 39559 - protein, 463 aa, Homo sapiens
  Payload ID: 7923
  Gene Symbol: IRGC
  Gene Name: immunity-related GTPase family, cinema
  Uniprot ID: Q6NXR0
  ENSP ID: ENSP00000244314
MATSKLPVVPGEEENTILMAKERLEALRTAFESGDLPQAASHLQELLASTESIRLEVGVTGESGAGKSSLINALRGLEAEDPGAALTGVMETTMQPSPYPHPQFPDVTLWDLPGAGSPGCPADKYLKQVDFSRYDFFLLVSPRRCGAVETRLAAEILCQGKKFYFVRTKVDEDLAATRTQRPSGFREAAVLQEIRDHCAERLREAGVADPRIFLVSNLSPARYDFPTLVSTWEHDLPSHRRHAGLLSLPDISLEALQKKKAMLQEQVLKTALVLGVIQALPVPGLAAAYDDALLIHSLRGYHRSFGLDDDSLAKLAEQVGKQAGDLRSVIRSPLANEVSPETVLRLYSQSSDGAMRVARAFERGIPVFGTLVAGGISFGAVYTMLQGCLNEMAEDAQRVRIKALEDDEPQPEVSLEVASDNGVEKGGSGEGGGEEAPLSTCRKLGLLLKYILDSWKKHDSEEK

SEQ ID NO: 39560 - protein, 275 aa, Homo sapiens
  Payload ID: 7923
  Gene Symbol: IRGC
  Gene Name: immunity-related GTPase family, cinema
  ENSP ID: ENSP00000471425
MPRPRRCEWLPSPLQALRITHPVTLPCPPPPSEPLATMATSKLPVVPGEEENTILMAKERLEALRTAFESGDLPQAASHLQELLASTESIRLEVGVTGESGAGKSSLINALRGLEAEDPGAALTGVMETTMQPSPYPHPQFPDVTLWDLPGAGSPGCPADKYLKQVDFSRYDFFLLVSPRRCGAVETRLAAEILCQGKKFYFVRTKVDEDLAATRTQRPSGFREAAVLQEIRDHCAERLREAGVADPRIFLVSNLSPARYDFPTLVSTWEHDLPS

SEQ ID NO: 39561 - protein, 181 aa, Homo sapiens
  Payload ID: 7924
  Gene Symbol: IRGM
  Gene Name: immunity-related GTPase family, M
  Uniprot ID: A1A4Y4
  ENSP ID: ENSP00000428220
MEAMNVEKASADGNLPEVISNIKETLKIVSRTPVNITMAGDSGNGMSTFISALRNTGHEGKASPPTELVKATQRCASYFSSHFSNVVLWDLPGTGSATTTLENYLMEMQFNRYDFIMVASAQFSMNHVMLAKTAEDMGKKFYIVWTKLDMDLSTGALPEVQLLQIRENVLENLQKERVCEY

SEQ ID NO: 39562 - protein, 71 aa, Homo sapiens
  Payload ID: 7924
  Gene Symbol: IRGM
  Gene Name: immunity-related GTPase family, M
  ENSP ID: ENSP00000429819
  MOD_RES (1)..(1): Any amino acid
XNHVMLAKTAEDMGKKFYIVWTKLDMDLSTGALPEVQLLQIRENVLENLQKERSSRNQQVYPNHSHVPLAC

SEQ ID NO: 39563 - protein, 623 aa, Homo sapiens
  Payload ID: 7925
  Gene Symbol: IRGQ
  Gene Name: immunity-related GTPase family, Q
  Uniprot ID: Q8WZA9
  ENSP ID: ENSP00000387535
MPPPQGDVTALFLGPPGLGKSALIAALCDKDVETLEAPEGRPDSGVPSLRAAGPGLFLGELSCPPAAPGPWAAEANVLVLVLPGPEGNGEPLAPALGEAALAALARGTPLLAVRNLRPGDSQTAAQARDQTAALLNSAGLGAADLFVLPANCGSSDGCEELERLRAALQSQAEALRRLLPPAQDGFEVLGAAELEAVREAFETGGLEAALSWVRSGLERLGSARLDLAVAGKADVGLVVDMLLGLDPGDPGAAPASVPTAPTPFPAPERPNVVLWTVPLGHTGTATTAAAASHPTHYDALILVTPGAPTEKDWAQVQALLLPDAPLVCVRTDGEGEDPECLGEGKMENPKGESLKNAGGGGLENALSKGREKCSAGSQKAGSGEGPGKAGSEGLQQVVGMKKSGGGDSERAAALSPEDETWEVLEEAPPPVFPLRPGGLPGLCEWLRRALPPAQAGALLLALPPASPSAARTKAAALRAGAWRPALLASLAAAAAPLPGLGWACDVALLRGQLAEWRRGLGLEPTALARRERALGLASGELAARAHFPGPVTRAEVEARLGAWAGEGTAGGAALGALSFLWPAGGAAATGGLGYRAAHGVLLQALDEMRADAEAVLAPPEPAQ

SEQ ID NO: 39564 - protein, 136 aa, Homo sapiens
  Payload ID: 7925
  Gene Symbol: IRGQ
  Gene Name: immunity-related GTPase family, Q
  ENSP ID: ENSP00000470686
MPPPQGDVTALFLGPPGLGKSALIAALCDKDVETLEAPEGRPDSGVPSLRAAGPGLFLGELSCPPAAPGPWAAEANVLVLVLPGPEGNGEPLAPALGEAALAALARGTPLLAVRNLRPGDSQTAAQARDQTAALLN

SEQ ID NO: 39565 - protein, 623 aa, Homo sapiens; identical to SEQ ID NO: 39563
  Payload ID: 7925
  Gene Symbol: IRGQ
  Gene Name: immunity-related GTPase family, Q
  Uniprot ID: Q8WZA9
  ENSP ID: ENSP00000472250

SEQ ID NO: 39566 - protein, 467 aa, Homo sapiens
  Payload ID: 7926
  Gene Symbol: IGSF21
  Gene Name: immunoglobin superfamily, member 21
  Uniprot ID: Q96ID5
  ENSP ID: ENSP00000251296
MRTAPSLRRCVCLLLAAILDLARGYLTVNIEPLPPVVAGDAVTLKCNFKTDGRMREIVWYRVTDGGTIKQKIFTFDAMFSTNYSHMENYRKREDLVYQSTVRLPEVRISDNGPYECHVGIYDRATREKVVLASGNIFLNVMAPPTSIEVVAADTPAPFSRYQAQNFTLVCIVSGGKPAPMVYFKRDGEPIDAVPLSEPPAASSGPLQDSRPFRSLLHRDLDDTKMQKSLSLLDAENRGGRPYTERPSRGLTPDPNILLQPTTENIPETVVSREFPRWVHSAEPTYFLRHSRTPSSDGTVEVRALLTWTLNPQIDNEALFSCEVKHPALSMPMQAEVTLVAPKGPKIVMTPSRARVGDTVRILVHGFQNEVFPEPMFTWTRVGSRLLDGSAEFDGKELVLERVPAELNGSMYRCTAQNPLGSTDTHTRLIVFENPNIPRGTEDSNGSIGPTGARLTLVLALTVILELT

SEQ ID NO: 39567 - protein, 339 aa, Homo sapiens
  Payload ID: 7927
  Gene Symbol: IGBP1
  Gene Name: immunoglobulin (CD79A) binding protein 1
  Uniprot ID: P78318
  ENSP ID: ENSP00000348784
MAAEDELQLPRLPELFETGRQLLDEVEVATEPAGSRIVQEKVFKGLDLLEKAAEMLSQLDLFSRNEDLEEIASTDLKYLLVPAFQGALTMKQVNPSKRLDHLQRAREHFINYLTQCHCYHVAEFELPKTMNNSAENHTANSSMAYPSLVAMASQRQAKIQRYKQKKELEHRLSAMKSAVESGQADDERVREYYLLHLQRWIDISLEEIESIDQEIKILRERDSSREASTSNSSRQERPPVKPFILTRNMAQAKVFGAGYPSLPTMTVSDWYEQHRKYGALPDQGIAKAAPEEFRKAAQQQEEQEEKEEEDDEQTLHRAREWDDWKDTHPRGYGNRQNMG

SEQ ID NO: 39568 - protein, 339 aa, Homo sapiens; identical to SEQ ID NO: 39567
  Payload ID: 7927
  Gene Symbol: IGBP1
  Gene Name: immunoglobulin (CD79A) binding protein 1
  Uniprot ID: P78318
  ENSP ID: ENSP00000363661

SEQ ID NO: 39569 - protein, 353 aa, Homo sapiens
  Payload ID: 7928
  Gene Symbol: IGHA1
  Gene Name: immunoglobulin heavy constant alpha 1
  Uniprot ID: P01876
  ENSP ID: ENSP00000374989
ASPTSPKVFPLSLCSTQPDGNVVIACLVQGFFPQEPLSVTWSESGQGVTARNFPPSQDASGDLYTTSSQLTLPATQCLAGKSVTCHVKHYTNPSQDVTVPCPVPSTPPTPSPSTPPTPSPSCCHPRLSLHRPALEDLLLGSEANLTCTLTGLRDASGVTFTWTPSSGKSAVQGPPERDLCGCYSVSSVLPGCAEPWNHGKTFTCTAAYPESKTPLTATLSKSGNTFRPEVHLLPPPSEELALNELVTLTCLARGFSPKDVLVRWLQGSQELPREKYLTWASRQEPSQGTTTFAVTSILRVAAEDWKKGDTFSCMVGHEALPLAFTQKTIDRLAGKPTHVNVSVVMAEVDGTCY

SEQ ID NO: 39570 - protein, 353 aa, Homo sapiens; identical to SEQ ID NO: 39569
  Payload ID: 7928
  Gene Symbol: IGHA1
  Gene Name: immunoglobulin heavy constant alpha 1
  Uniprot ID: P01876
  ENSP ID: ENSP00000488021

SEQ ID NO: 39571 - protein, 340 aa, Homo sapiens
  Payload ID: 7929
  Gene Symbol: IGHA2
  Gene Name: immunoglobulin heavy constant alpha 2 (A2m marker)
  ENSP ID: ENSP00000374981
ASPTSPKVFPLSLDSTPQDGNVVVACLVQGFFPQEPLSVTWSESGQNVTARNFPPSQDASGDLYTTSSQLTLPATQCPDGKSVTCHVKHYTNSSQDVTVPCRVPPPPPCCHPRLSLHRPALEDLLLGSEANLTCTLTGLRDASGATFTWTPSSGKSAVQGPPERDLCGCYSVSSVLPGCAQPWNHGETFTCTAAHPELKTPLTANITKSGNTFRPEVHLLPPPSEELALNELVTLTCLARGFSPKDVLVRWLQGSQELPREKYLTWASRQEPSQGTTTYAVTSILRVAAEDWKKGETFSCMVGHEALPLAFTQKTIDRMAGKPTHINVSVVMAEADGTCY

SEQ ID NO: 39572 - protein, 340 aa, Homo sapiens
  Payload ID: 7929
  Gene Symbol: IGHA2
  Gene Name: immunoglobulin heavy constant alpha 2 (A2m marker)
  ENSP ID: ENSP00000478870
ASPTSPKVFPLSLDSTPQDGNVVVACLVQGFFPQEPLSVTWSESGQNVTARNFPPSQDASGDLYTTSSQLTLPATQCPDGKSVTCHVKHYTNPSQDVTVPCPVPPPPPCCHPRLSLHRPALEDLLLGSEANLTCTLTGLRDASGATFTWTPSSGKSAVQGPPERDLCGCYSVSSVLPGCAQPWNHGETFTCTAAHPELKTPLTANITKSGNTFRPEVHLLPPPSEELALNELVTLTCLARGFSPKDVLVRWLQGSQELPREKYLTWASRQEPSQGTTTFAVTSILRVAAEDWKKGDTFSCMVGHEALPLAFTQKTIDRLAGKPTHVNVSVVMAEVDGTCY

SEQ ID NO: 39573 - protein, 430 aa, Homo sapiens
  Payload ID: 7930
  Gene Symbol: IGHD
  Gene Name: immunoglobulin heavy constant delta
  ENSP ID: ENSP00000374998
  MOD_RES (1)..(1): Any amino acid
XPTKAPDVFPIISGCRHPKDNSPVVLACLITGYHPTSVTVTWYMGTQSQPQRTFPEIQRRDSYYMTSSQLSTPLQQWRQGEYKCVVQHTASKSKKEIFRWPESPKAQASSVPTAQPQAEGSLAKATTAPATTRNTGRGGEEKKKEKEKEEQEERETKTPECPSHTQPLGVYLLTPAVQDLWLRDKATFTCFVVGSDLKDAHLTWEVAGKVPTGGVEEGLLERHSNGSQSQHSRLTLPRSLWNAGTSVTCTLNHPSLPPQRLMALREPAAQAPVKLSLNLLASSDPPEAASWLLCEVSGFSPPNILLMWLEDQREVNTSGFAPARPPPQPRSTTFWAWSVLRVPAPPSPQPATYTCVVSHEDSRTLLNASRSLEVSYLAMTPLIPQSKDENSDDYTTFDDVGSLWTTLSTFVALFILTLLYSGIVTFIKVK

SEQ ID NO: 39574 - protein, 384 aa, Homo sapiens
  Payload ID: 7930
  Gene Symbol: IGHD
  Gene Name: immunoglobulin heavy constant delta
  ENSP ID: ENSP00000478571
APTKAPDVFPIISGCRHPKDNSPVVLACLITGYHPTSVTVTWYMGTQSQPQRTFPEIQRRDSYYMTSSQLSTPLQQWRQGEYKCVVQHTASKSKKEIFRWPESPKAQASSVPTAQPQAEGSLAKATTAPATTRNTGRGGEEKKKEKEKEEQEERETKTPECPSHTQPLGVYLLTPAVQDLWLRDKATFTCFVVGSDLKDAHLTWEVAGKVPTGGVEEGLLERHSNGSQSQHSRLTLPRSLWNAGTSVTCTLNHPSLPPQRLMALREPAAQAPVKLSLNLLASSDPPEAASWLLCEVSGFSPPNILLMWLEDQREVNTSGFAPARPPPQPRSTTFWAWSVLRVPAPPSPQPATYTCVVSHEDSRTLLNASRSLEVSYVTDHGPMK

SEQ ID NO: 39575 - protein, 384 aa, Homo sapiens; identical to SEQ ID NO: 39574
  Payload ID: 7930
  Gene Symbol: IGHD
  Gene Name: immunoglobulin heavy constant delta
  ENSP ID: ENSP00000478893

SEQ ID NO: 39576 - protein, 430 aa, Homo sapiens; identical to SEQ ID NO: 39573
  Payload ID: 7930
  Gene Symbol: IGHD
  Gene Name: immunoglobulin heavy constant delta
  ENSP ID: ENSP00000488303
  MOD_RES (1)..(1): Any amino acid

SEQ ID NO: 39577 - protein, 428 aa, Homo sapiens
  Payload ID: 7931
  Gene Symbol: IGHE
  Gene Name: immunoglobulin heavy constant epsilon
  Uniprot ID: P01854
  ENSP ID: ENSP00000374983
ASTQSPSVFPLTRCCKNIPSNATSVTLGCLATGYFPEPVMVTWDTGSLNGTTMTLPATTLTLSGHYATISLLTVSGAWAKQMFTCRVAHTPSSTDWVDNKTFSVCSRDFTPPTVKILQSSCDGGGHFPPTIQLLCLVSGYTPGTINITWLEDGQVMDVDLSTASTTQEGELASTQSELTLSQKHWLSDRTYTCQVTYQGHTFEDSTKKCADSNPRGVSAYLSRPSPFDLFIRKSPTITCLVVDLAPSKGTVNLTWSRASGKPVNHSTRKEEKQRNGTLTVTSTLPVGTRDWIEGETYQCRVTHPHLPRALMRSTTKTSGPRAAPEVYAFATPEWPGSRDKRTLACLIQNFMPEDISVQWLHNEVQLPDARHSTTQPRKTKGSGFFVFSRLEVTRAEWEQKDEFICRAVHEAASPSQTVQRAVSVNPGK

SEQ ID NO: 39578 - protein, 428 aa, Homo sapiens; identical to SEQ ID NO: 39577
  Payload ID: 7931
  Gene Symbol: IGHE
  Gene Name: immunoglobulin heavy constant epsilon
  Uniprot ID: P01854
  ENSP ID: ENSP00000481089

SEQ ID NO: 39579 - protein, 295 aa, Homo sapiens
  Payload ID: 7932
  Gene Symbol: IGHG1
  Gene Name: immunoglobulin heavy constant gamma 1 (G1m marker)
  ENSP ID: ENSP00000374984
ASTKGPSVFPLAPSSKSTSGGTAALGCLVKDYFPEPVTVSWNSGALTSGVHTFPAVLQSSGLYSLSSVVTVPSSSLGTQTYICNVNHKPSNTKVDKKVEPKSCDKTHTCPPCPAPELLGGPSVFLFPPKPKDTLMISRTPEVTCVVVDVSHEDPEVKFNWYVDGVEYKCKVSNKALPAPIEKTISKAKGQPREPQVYTLPPSRDELTKNQVSLTCLVKGFYPSDIAVEWESNGQPENNYKTTPPVLDSDGSFFLYSKLTVDKSRWQQGNVFSCSVMHEALHNHYTQKSLSLSPGK

SEQ ID NO: 39580 - protein, 399 aa, Homo sapiens
  Payload ID: 7932
  Gene Symbol: IGHG1
  Gene Name: immunoglobulin heavy constant gamma 1 (G1m marker)
  ENSP ID: ENSP00000374990
ASTKGPSVFPLAPSSKSTSGGTAALGCLVKDYFPEPVTVSWNSGALTSGVHTFPAVLQSSGLYSLSSVVTVPSSSLGTQTYICNVNHKPSNTKVDKKVEPKSCDKTHTCPPCPAPELLGGPSVFLFPPKPKDTLMISRTPEVTCVVVDVSHEDPEVKFNWYVDGVEVHNAKTKPREEQYNSTYRVVSVLTVLHQDWLNGKEYKCKVSNKALPAPIEKTISKAKGQPREPQVYTLPPSRDELTKNQVSLTCLVKGFYPSDIAVEWESNGQPENNYKTTPPVLDSDGSFFLYSKLTVDKSRWQQGNVFSCSVMHEALHNHYTQKSLSLSPELQLEESCAEAQDGELDGLWTTITIFITLFLLSVCYSATVTFFKVKWIFSSVVDLKQTIIPDYRNMIGQGA

SEQ ID NO: 39581 - protein, 330 aa, Homo sapiens [sequence omitted]

SEQ ID NO: 39582 - protein, 462 aa, Homo sapiens
  Payload ID: 7932
  Gene Symbol: IGHG1
  Gene Name: immunoglobulin heavy constant gamma 1 (G1m marker)
  ENSP ID: ENSP00000478578
MKHLWFFLLLVAAPRWVLSQVQLQESGPGLVKPSGTLSLTCAVSGGSISSSNWWSWVRQPPGKGLEWIGEIYHSGSTNYNPSLKSRVTISVDKSKNQFSLKLSSVTAADTAVSQCDNWFDPWGQGTLVTVSSASTKGPSVFPLAPSSKSTSGGTAALGCLVKDYFPEPVTVSWNSGALTSGVHTFPAVLQSSGLYSLSSVVTVPSSSLGTQTYICNVNHKPSNTKVDKKVEPKSCDKTHTCPPCPAPELLGGPSVFLFPPKPKDTLMISRTPEVTCVVVDVSHEDPEVKFNWYVDGVEVHNAKTKPREEQYNSTYRVVSVLTVLHQDWLNGKEYKCKVSNKALPAPIEKTISKAKGQPREPQVYTLPPSRDELTKNQVSLTCLVKGFYPSDIAVEWESNGQPENNYKTTPPVLDSDGSFFLYSKLTVDKSRWQQGNVFSCSVMHEALHNHYTQKSLSLSPGK

SEQ ID NO: 39583 - protein, 473 aa, Homo sapiens
  Payload ID: 7932
  Gene Symbol: IGHG1
  Gene Name: immunoglobulin heavy constant gamma 1 (G1m marker)
  ENSP ID: ENSP00000478845
MEFGLSWVFLVAILKGVQCEVQLVESGGGVVRPGGSLRLSFAASGFTFDDYGMSWVRQAPGKGLEWVSGINWNGGSTDYVDSVKGRFTISRDNAKNSLYLQMNSLRAEDTAVYYCARDTVRGSQYYYYYMDVWGKGTTVTVSSASTKGPSVFPLAPSSKSTSGGTAALGCLVKDYFPEPVTVSWNSGALTSGVHTFPAVLQSSGLYSLSSVVTVPSSSLGTQTYICNVNHKPSNTKVDKKVEPKSCDKTHTCPPCPAPELLGGPSVFLFPPKPKDTLMISRTPEVTCVVVDVSHEDPEVKFNWYVDGVEVHNAKTKPREEQYNSTYRVVSVLTVLHQDWLNGKEYKCKVSNKALPAPIEKTISKAKGQPREPQVYTLPPSRDELTKNQVSLTCLVKGFYPSDIAVEWESNGQPENNYKTTPPVLDSDGSFFLYSKLTVDKSRWQQGNVFSCSVMHEALHNHYTQKSLSLSPGK

SEQ ID NO: 39584 - protein, 464 aa, Homo sapiens
  Payload ID: 7932
  Gene Symbol: IGHG1
  Gene Name: immunoglobulin heavy constant gamma 1 (G1m marker)
  ENSP ID: ENSP00000481569
MEFGLSWVFLVAILKGVQCEVQLVESGGGLVQPGGSLRLSCAASGFTFSSYWMSWVRQAPGKGLEWVPVISGSGSTMYYADSVKGRFTISRDNTKNSLYLQMNRLRAEDAAAYDCERYDYFDYWGQGTLVTVSSASTKGPSVFPLAPSSKSTSGGTAALGCLVKDYFPEPVTVSWNSGALTSGVHTFPAVLQSSGLYSLSSVVTVPSSSLGTQTYICNVNHKPSNTKVDKKVEPKSCDKTHTCPPCPAPELLGGPSVFLFPPKPKDTLMISRTPEVTCVVVDVSHEDPEVKFNWYVDGVEVHNAKTKPREEQYNSTYRVVSVLTVLHQDWLNGKEYKCKVSNKALPAPIEKTISKAKGQPREPQVYTLPPSRDELTKNQVSLTCLVKGFYPSDIAVEWESNGQPENNYKTTPPVLDSDGSFFLYSKLTVDKSRWQQGNVFSCSVMHEALHNHYTQKSLSLSPGK

SEQ ID NO: 39585 - protein, 475 aa, Homo sapiens
  Payload ID: 7932
  Gene Symbol: IGHG1
  Gene Name: immunoglobulin heavy constant gamma 1 (G1m marker)
  ENSP ID: ENSP00000483341
MDWTWRILFLVAAATGAHSQVQLVQSGAEVKKPGASVKVSCKASGYTFTGYYMHWVRQAPGQGLEWMGWINPNSGGTNYAQKFQGWVTMTRDTSISTAYMELSRLRSDDTAVYYCAREDGHSAIDYYYYYYMDVWGKGTTVTVSSASTKGPSVFPLAPSSKSTSGGTAALGCLVKDYFPEPVTVSWNSGALTSGVHTFPAVLQSSGLYSLSSVVTVPSSSLGTQTYICNVNHKPSNTKVDKKVEPKSCDKTHTCPPCPAPELLGGPSVFLFPPKPKDTLMISRTPEVTCVVVDVSHEDPEVKFNWYVDGVEVHNAKTKPREEQYNSTYRVVSVLTVLHQDWLNGKEYKCKVSNKALPAPIEKTISKAKGQPREPQVYTLPPSRDELTKNQVSLTCLVKGFYPSDIAVEWESNGQPENNYKTTPPVLDSDGSFFLYSKLTVDKSRWQQGNVFSCSVMHEALHNHYTQKSLSLSPGK

SEQ ID NO: 39586 - protein, 466 aa, Homo sapiens
  Payload ID: 7932
  Gene Symbol: IGHG1
  Gene Name: immunoglobulin heavy constant gamma 1 (G1m marker)
  ENSP ID: ENSP00000483889
MELGLSWVFLVAILEGVQCEVQLVESGGGLVQPGGSLRLSCAASGFTFSSYWMSWVRQAPGKGLEWVANIKQDGSEKYYVDSVKGRFTISRDNAKNSLYLQMNSLRAEDTAVYYCARECDNWFDPWGQGTLVTVSSASTKGPSVFPLAPSSKSTSGGTAALGCLVKDYFPEPVTVSWNSGALTSGVHTFPAVLQSSGLYSLSSVVTVPSSSLGTQTYICNVNHKPSNTKVDKKVEPKSCDKTHTCPPCPAPELLGGPSVFLFPPKPKDTLMISRTPEVTCVVVDVSHEDPEVKFNWYVDGVEVHNAKTKPREEQYNSTYRVVSVLTVLHQDWLNGKEYKCKVSNKALPAPIEKTISKAKGQPREPQVYTLPPSRDELTKNQVSLTCLVKGFYPSDIAVEWESNGQPENNYKTTPPVLDSDGSFFLYSKLTVDKSRWQQGNVFSCSVMHEALHNHYTQKSLSLSPGK

SEQ ID NO: 39587 - protein, 399 aa, Homo sapiens; identical to SEQ ID NO: 39580
  Payload ID: 7932
  Gene Symbol: IGHG1
  Gene Name: immunoglobulin heavy constant gamma 1 (G1m marker)
  ENSP ID: ENSP00000487867

SEQ ID NO: 39588 - protein, 330 aa, Homo sapiens [sequence omitted]

SEQ ID NO: 39589 - protein, 295 aa, Homo sapiens; identical to SEQ ID NO: 39579
  Payload ID: 7932
  Gene Symbol: IGHG1
  Gene Name: immunoglobulin heavy constant gamma 1 (G1m marker)
  ENSP ID: ENSP00000488811

SEQ ID NO: 39590 - protein, 326 aa, Homo sapiens
  Payload ID: 7933
  Gene Symbol: IGHG2
  Gene Name: immunoglobulin heavy constant gamma 2 (G2m marker)
  Uniprot ID: P01859
  ENSP ID: ENSP00000374987
ASTKGPSVFPLAPCSRSTSESTAALGCLVKDYFPEPVTVSWNSGALTSGVHTFPAVLQSSGLYSLSSVVTVPSSNFGTQTYTCNVDHKPSNTKVDKTVERKCCVECPPCPAPPVAGPSVFLFPPKPKDTLMISRTPEVTCVVVDVSHEDPEVQFNWYVDGVEVHNAKTKPREEQFNSTFRVVSVLTVVHQDWLNGKEYKCKVSNKGLPAPIEKTISKTKGQPREPQVYTLPPSREEMTKNQVSLTCLVKGFYPSDISVEWESNGQPENNYKTTPPMLDSDGSFFLYSKLTVDKSRWQQGNVFSCSVMHEALHNHYTQKSLSLSPGK

SEQ ID NO: 39591 - protein, 326 aa, Homo sapiens; identical to SEQ ID NO: 39590
  Payload ID: 7933
  Gene Symbol: IGHG2
  Gene Name: immunoglobulin heavy constant gamma 2 (G2m marker)
  Uniprot ID: P01859
  ENSP ID: ENSP00000480351

SEQ ID NO: 39592 - protein, 377 aa, Homo sapiens
  Payload ID: 7934
  Gene Symbol: IGHG3
  Gene Name: immunoglobulin heavy constant gamma 3 (G3m marker)
  ENSP ID: ENSP00000374993
  MOD_RES (1)..(1): Any amino acid
XSTKGPSVFPLAPCSRSTSGGTAALGCLVKDYFPEPVTVSWNSGALTSGVHTFPAVLQSSGLYSLSSVVTVPSSSLGTQTYTCNVNHKPSNTKVDKRVELKTPLGDTTHTCPRCPEPKSCDTPPPCPRCPEPKSCDTPPPCPRCPEPKSCDTPPPCPRCPAPELLGGPSVFLFPPKPKDTLMISRTPEVTCVVVDVSHEDPEVQFKWYVDGVEVHNAKTKPREEQYNSTFRVVSVLTVLHQDWLNGKEYKCKVSNKALPAPIEKTISKTKGQPREPQVYTLPPSREEMTKNQVSLTCLVKGFYPSDIAVEWESSGQPENNYNTTPPMLDSDGSFFLYSKLTVDKSRWQQGNIFSCSVMHEALHNRFTQKSLSLSPGK

SEQ ID NO: 39593 - protein, 521 aa, Homo sapiens
  Payload ID: 7934
  Gene Symbol: IGHG3
  Gene Name: immunoglobulin heavy constant gamma 3 (G3m marker)
  ENSP ID: ENSP00000479626
MDTLCSTLLLLTIPSWVLSQITLKESGPTLVKPTQTLTLTCTFSGFSLSTSGVGVGWIRQPPGKALEWLALIYWDDDKRYSPSLKSRLTITKDTSKNQVVLTMTNMDPVDTATYYCAHRPQRHSGTSSWLNTSWGQGTLVTVSSASTKGPSVFPLAPCSRSTSGGTAALGCLVKDYFPEPVTVSWNSGALTSGVHTFPAVLQSSGLYSLSSVVTVPSSSLGTQTYTCNVNHKPSNTKVDKRVELKTPLGDTTHTCPRCPEPKSCDTPPPCPRCPEPKSCDTPPPCPRCPEPKSCDTPPPCPRCPAPELLGGPSVFLFPPKPKDTLMISRTPEVTCVVVDVSHEDPEVQFKWYVDGVEVHNAKTKPREEQYNSTFRVVSVLTVLHQDWLNGKEYKCKVSNKALPAPIEKTISKTKGQPREPQVYTLPPSREEMTKNQVSLTCLVKGFYPSDIAVEWESSGQPENNYNTTPPMLDSDGSFFLYSKLTVDKSRWQQGNIFSCSVMHEALHNRFTQKSLSLSPGK

SEQ ID NO: 39594 - protein, 517 aa, Homo sapiens
  Payload ID: 7934
  Gene Symbol: IGHG3
  Gene Name: immunoglobulin heavy constant gamma 3 (G3m marker)
  ENSP ID: ENSP00000483967
MDWTWRILFLVAAATGAHSQVQLVQSGAEVKKPGASVKVSCKASGYTFTSYAMHWVRQAPGQRLEWMGWINAGNGNTKYSQKFQGRVTITRDTSASTAYMELSSLRSEDTAVYYCARHSVKTHCDYFDYWGQGTLVTVSSASTKGPSVFPLAPCSRSTSGGTAALGCLVKDYFPEPVTVSWNSGALTSGVHTFPAVLQSSGLYSLSSVVTVPSSSLGTQTYTCNVNHKPSNTKVDKRVELKTPLGDTTHTCPRCPEPKSCDTPPPCPRCPEPKSCDTPPPCPRCPEPKSCDTPPPCPRCPAPELLGGPSVFLFPPKPKDTLMISRTPEVTCVVVDVSHEDPEVQFKWYVDGVEVHNAKTKPREEQYNSTFRVVSVLTVLHQDWLNGKEYKCKVSNKALPAPIEKTISKTKGQPREPQVYTLPPSREEMTKNQVSLTCLVKGFYPSDIAVEWESSGQPENNYNTTPPMLDSDGSFFLYSKLTVDKSRWQQGNIFSCSVMHEALHNRFTQKSLSLSPGK

SEQ ID NO: 39595 - protein, 377 aa, Homo sapiens; identical to SEQ ID NO: 39592
  Payload ID: 7934
  Gene Symbol: IGHG3
  Gene Name: immunoglobulin heavy constant gamma 3 (G3m marker)
  ENSP ID: ENSP00000487823
  MOD_RES (1)..(1): Any amino acid

SEQ ID NO: 39596 - protein, 327 aa, Homo sapiens
  Payload ID: 7935
  Gene Symbol: IGHG4
  Gene Name: immunoglobulin heavy constant gamma 4 (G4m marker)
  Uniprot ID: P01861
  ENSP ID: ENSP00000374985
ASTKGPSVFPLAPCSRSTSESTAALGCLVKDYFPEPVTVSWNSGALTSGVHTFPAVLQSSGLYSLSSVVTVPSSSLGTKTYTCNVDHKPSNTKVDKRVESKYGPPCPSCPAPEFLGGPSVFLFPPKPKDTLMISRTPEVTCVVVDVSQEDPEVQFNWYVDGVEVHNAKTKPREEQFNSTYRVVSVLTVLHQDWLNGKEYKCKVSNKGLPSSIEKTISKAKGQPREPQVYTLPPSQEEMTKNQVSLTCLVKGFYPSDIAVEWESNGQPENNYKTTPPVLDSDGSFFLYSRLTVDKSRWQEGNVFSCSVMHEALHNHYTQKSLSLSLGK

SEQ ID NO: 39597 - protein, 327 aa, Homo sapiens; identical to SEQ ID NO: 39596
  Payload ID: 7935
  Gene Symbol: IGHG4
  Gene Name: immunoglobulin heavy constant gamma 4 (G4m marker)
  Uniprot ID: P01861
  ENSP ID: ENSP00000483393

SEQ ID NO: 39598 - protein, 453 aa, Homo sapiens
  Payload ID: 7936
  Gene Symbol: IGHM
  Gene Name: immunoglobulin heavy constant mu
  ENSP ID: ENSP00000375001
GSASAPTLFPLVSCENSPSDTSSVAVGCLAQDFLPDSITFSWKYKNNSDISSTRGFPSVLRGGKYAATSQVLLPSKDVMQGTDEHVVCKVQHPNGNKEKNVPLPVIAELPPKVSVFVPPRDGFFGNPRKSKLICQATGFSPRQIQVSWLREGKQVGSGVTTDQVQAEAKESGPTTYKVTSTLTIKESDWLGQSMFTCRVDHRGLTFQQNASSMCVPDQDTAIRVFAIPPSFASIFLTKSTKLTCLVTDLTTYDSVTISWTRQNGEAVKTHTNISESHPNATFSAVGEASICEDDWNSGERFTCTVTHTDLPSPLKQTISRPKGVALHRPDVYLLPPAREQLNLRESATITCLVTGFSPADVFVQWMQRGQPLSPEKYVTSAPMPEPQAPGRYFAHSILTVSEEEWNTGETYTCVVAHEALPNRVTERTVDKSTGKPTLYNVSLVMSDTAGTCY

SEQ ID NO: 39599 - protein, 599 aa, Homo sapiens
  Payload ID: 7936
  Gene Symbol: IGHM
  Gene Name: immunoglobulin heavy constant mu
  ENSP ID: ENSP00000477756
MSVSFLIFLPVLGLPWGVLSQVQLQQSGPGLVKPSQTLSLTCAISGDSVSSNSAAWNWIRQSPSRGLEWLGRTYYRSKWYNDYAVSVKSRITINPDTSKNQFSLQLNSVTPEDTAVYYCAREYYYGSGSDNWFDPWGQGTLVTVSSGSASAPTLFPLVSCENSPSDTSSVAVGCLAQDFLPDSITFSWKYKNNSDISSTRGFPSVLRGGKYAATSQVLLPSKDVMQGTDEHVVCKVQHPNGNKEKNVPLPVIAELPPKVSVFVPPRDGFFGNPRKSKLICQATGFSPRQIQVSWLREGKQVGSGVTTDQVQAEAKESGPTTYKVTSTLTIKESDWLGQSMFTCRVDHRGLTFQQNASSMCVPDQDTAIRVFAIPPSFASIFLTKSTKLTCLVTDLTTYDSVTISWTRQNGEAVKTHTNISESHPNATFSAVGEASICEDDWNSGERFTCTVTHTDLPSPLKQTISRPKGVALHRPDVYLLPPAREQLNLRESATITCLVTGFSPADVFVQWMQRGQPLSPEKYVTSAPMPEPQAPGRYFAHSILTVSEEEWNTGETYTCVVAHEALPNRVTERTVDKSTGKPTLYNVSLVMSDTAGTCY

SEQ ID NO: 39600 - protein, 588 aa, Homo sapiens
  Payload ID: 7936
  Gene Symbol: IGHM
  Gene Name: immunoglobulin heavy constant mu
  ENSP ID: ENSP00000479328
MELGLRWVFLVAILEGVQCEVQLVESGGGLVKPGGSLRLSCAASGFTFSSYSMNWVRQAPGKGLEWVSYISSSSSYTNYADSVKGRFTISRDNAKNSLYLQMNSLRAEDTAVYYCARDTVRGGQWGQGTLVTVSSGSASAPTLFPLVSCENSPSDTSSVAVGCLAQDFLPDSITFSWKYKNNSDISSTRGFPSVLRGGKYAATSQVLLPSKDVMQGTDEHVVCKVQHPNGNKEKNVPLPVIAELPPKVSVFVPPRDGFFGNPRKSKLICQATGFSPRQIQVSWLREGKQVGSGVTTDQVQAEAKESGPTTYKVTSTLTIKESDWLGQSMFTCRVDHRGLTFQQNASSMCVPDQDTAIRVFAIPPSFASIFLTKSTKLTCLVTDLTTYDSVTISWTRQNGEAVKTHTNISESHPNATFSAVGEASICEDDWNSGERFTCTVTHTDLPSPLKQTISRPKGVALHRPDVYLLPPAREQLNLRESATITCLVTGFSPADVFVQWMQRGQPLSPEKYVTSAPMPEPQAPGRYFAHSILTVSEEEWNTGETYTCVVAHEALPNRVTERTVDKSTGKPTLYNVSLVMSDTAGTCY

SEQ ID NO: 39601 - protein, 453 aa, Homo sapiens; identical to SEQ ID NO: 39598
  Payload ID: 7936
  Gene Symbol: IGHM
  Gene Name: immunoglobulin heavy constant mu
  ENSP ID: ENSP00000485962

SEQ ID NO: 39602 - protein, 5 aa, Homo sapiens
  Payload ID: 7937
  Gene Symbol: IGHD1OR15-1A
  Gene Name: immunoglobulin heavy diversity 1/OR15-1A (non-functional)
  ENSP ID: ENSP00000473787
GITGT

SEQ ID NO: 39603 - protein, 5 aa, Homo sapiens
  Payload ID: 7938
  Gene Symbol: IGHD1OR15-1B
  Gene Name: immunoglobulin heavy diversity 1/OR15-1B (non-functional)
  ENSP ID: ENSP00000474222
GITGT

SEQ ID NO: 39604 - protein, 5 aa, Homo sapiens
  Payload ID: 7939
  Gene Symbol: IGHD1-1
  Gene Name: immunoglobulin heavy diversity 1-1
  ENSP ID: ENSP00000418625
GTTGT

SEQ ID NO: 39605 - protein, 5 aa, Homo sapiens
  Payload ID: 7939
  Gene Symbol: IGHD1-1
  Gene Name: immunoglobulin heavy diversity 1-1
  ENSP ID: ENSP00000488840
GTTGT

SEQ ID NO: 39606 - protein, 5 aa, Homo sapiens
  Payload ID: 7940
  Gene Symbol: IGHD1-14
  Gene Name: immunoglobulin heavy diversity 1-14 (non-functional)
  ENSP ID: ENSP00000418765
GITGT

SEQ ID NO: 39607 - protein, 5 aa, Homo sapiens
  Payload ID: 7940
  Gene Symbol: IGHD1-14
  Gene Name: immunoglobulin heavy diversity 1-14 (non-functional)
  ENSP ID: ENSP00000488522
GITGT

SEQ ID NO: 39608 - protein, 5 aa, Homo sapiens
  Payload ID: 7941
  Gene Symbol: IGHD1-20
  Gene Name: immunoglobulin heavy diversity 1-20
  ENSP ID: ENSP00000420556
GITGT

SEQ ID NO: 39609 - protein, 5 aa, Homo sapiens
  Payload ID: 7941
  Gene Symbol: IGHD1-20
  Gene Name: immunoglobulin heavy diversity 1-20
  ENSP ID: ENSP00000487812
GITGT

SEQ ID NO: 39610 - protein, 6 aa, Homo sapiens
  Payload ID: 7942
  Gene Symbol: IGHD1-26
  Gene Name: immunoglobulin heavy diversity 1-26
  ENSP ID: ENSP00000420733
GIVGAT

SEQ ID NO: 39611 - protein, 6 aa, Homo sapiens
  Payload ID: 7942
  Gene Symbol: IGHD1-26
  Gene Name: immunoglobulin heavy diversity 1-26
  ENSP ID: ENSP00000488000
GIVGAT

SEQ ID NO: 39612 - protein, 5 aa, Homo sapiens
  Payload ID: 7943
  Gene Symbol: IGHD1-7
  Gene Name: immunoglobulin heavy diversity 1-7
  ENSP ID: ENSP00000420794
GITGT

SEQ ID NO: 39613 - protein, 5 aa, Homo sapiens
  Payload ID: 7943
  Gene Symbol: IGHD1-7
  Gene Name: immunoglobulin heavy diversity 1-7
  ENSP ID: ENSP00000488720
GITGT

SEQ ID NO: 39614 - protein, 8 aa, Homo sapiens
  Payload ID: 7944
  Gene Symbol: IGHD2OR15-2A
  Gene Name: immunoglobulin heavy diversity 2/OR15-2A (non-functional)
  ENSP ID: ENSP00000474065
RILYYFLC

SEQ ID NO: 39615 - protein, 8 aa, Homo sapiens
  Payload ID: 7945
  Gene Symbol: IGHD2OR15-2B
  Gene Name: immunoglobulin heavy diversity 2/OR15-2B (non-functional)
  ENSP ID: ENSP00000474017
RILYYFLC

SEQ ID NO: 39616 - protein, 8 aa, Homo sapiens
  Payload ID: 7946
  Gene Symbol: IGHD2-15
  Gene Name: immunoglobulin heavy diversity 2-15
  ENSP ID: ENSP00000427969
RILWWLLL

SEQ ID NO: 39617 - protein, 8 aa, Homo sapiens
  Payload ID: 7946
  Gene Symbol: IGHD2-15
  Gene Name: immunoglobulin heavy diversity 2-15
  ENSP ID: ENSP00000487993
RILWWLLL

SEQ ID NO: 39618 - protein, 8 aa, Homo sapiens
  Payload ID: 7947
  Gene Symbol: IGHD2-2
  Gene Name: immunoglobulin heavy diversity 2-2
  ENSP ID: ENSP00000430788
RILYQLLC

SEQ ID NO: 39619 - protein, 8 aa, Homo sapiens
  Payload ID: 7947
  Gene Symbol: IGHD2-2
  Gene Name: immunoglobulin heavy diversity 2-2
  ENSP ID: ENSP00000487604
RILYQLLC

SEQ ID NO: 39620 - protein, 8 aa, Homo sapiens
  Payload ID: 7948
  Gene Symbol: IGHD2-21
  Gene Name: immunoglobulin heavy diversity 2-21
  ENSP ID: ENSP00000429324
SILWWLLF

SEQ ID NO: 39621 - protein, 8 aa, Homo sapiens
  Payload ID: 7948
  Gene Symbol: IGHD2-21
  Gene Name: immunoglobulin heavy diversity 2-21
  ENSP ID: ENSP00000487599
SILWWLLF

SEQ ID NO: 39622 - protein, 9 aa, Homo sapiens
  Payload ID: 7949
  Gene Symbol: IGHD2-8
  Gene Name: immunoglobulin heavy diversity 2-8
  ENSP ID: ENSP00000428616
RILYWCMLY

SEQ ID NO: 39623 - protein, 9 aa, Homo sapiens
  Payload ID: 7949
  Gene Symbol: IGHD2-8
  Gene Name: immunoglobulin heavy diversity 2-8
  ENSP ID: ENSP00000488083
RILYWCMLY

SEQ ID NO: 39624 - protein, 9 aa, Homo sapiens
  Payload ID: 7950
  Gene Symbol: IGHD3OR15-3A
  Gene Name: immunoglobulin heavy diversity 3/OR15-3A (non-functional)
  ENSP ID: ENSP00000474133
VLFLDWLLY

SEQ ID NO: 39625 - protein, 9 aa, Homo sapiens
  Payload ID: 7951
  Gene Symbol: IGHD3OR15-3B
  Gene Name: immunoglobulin heavy diversity 3/OR15-3B (non-functional)
  ENSP ID: ENSP00000474573
VLFLDWLLY

SEQ ID NO: 39626 - protein, 9 aa, Homo sapiens
  Payload ID: 7952
  Gene Symbol: IGHD3-10
  Gene Name: immunoglobulin heavy diversity 3-10
  ENSP ID: ENSP00000419773
VLLWFGELL

SEQ ID NO: 39627 - protein, 9 aa, Homo sapiens
  Payload ID: 7952
  Gene Symbol: IGHD3-10
  Gene Name: immunoglobulin heavy diversity 3-10
  ENSP ID: ENSP00000488475
VLLWFGELL

SEQ ID NO: 39628 - protein, 11 aa, Homo sapiens
  Payload ID: 7953
  Gene Symbol: IGHD3-16
  Gene Name: immunoglobulin heavy diversity 3-16
  ENSP ID: ENSP00000428366
VLLRLGELSLY

SEQ ID NO: 39629 - protein, 11 aa, Homo sapiens
  Payload ID: 7953
  Gene Symbol: IGHD3-16
  Gene Name: immunoglobulin heavy diversity 3-16
  ENSP ID: ENSP00000487787
VLLRLGELSLY

SEQ ID NO: 39630 - protein, 7 aa, Homo sapiens
  Payload ID: 7954
  Gene Symbol: IGHD3-22
  Gene Name: immunoglobulin heavy diversity 3-22
  ENSP ID: ENSP00000429952
VLLWLLL

SEQ ID NO: 39631 - protein, 7 aa, Homo sapiens
  Payload ID: 7954
  Gene Symbol: IGHD3-22
  Gene Name: immunoglobulin heavy diversity 3-22
  ENSP ID: ENSP00000488711
VLLWLLL

SEQ ID NO: 39632 - protein, 10 aa, Homo sapiens
  Payload ID: 7955
  Gene Symbol: IGHD3-3
  Gene Name: immunoglobulin heavy diversity 3-3
  ENSP ID: ENSP00000420442
VLRFLEWLLY

SEQ ID NO: 39633 - protein, 10 aa, Homo sapiens
  Payload ID: 7955
  Gene Symbol: IGHD3-3
  Gene Name: immunoglobulin heavy diversity 3-3
  ENSP ID: ENSP00000487903
VLRFLEWLLY

SEQ ID NO: 39634 - protein, 9 aa, Homo sapiens
  Payload ID: 7956
  Gene Symbol: IGHD3-9
  Gene Name: immunoglobulin heavy diversity 3-9
  ENSP ID: ENSP00000419583
VLRYFDWLL

SEQ ID NO: 39635 - protein, 9 aa, Homo sapiens
  Payload ID: 7956
  Gene Symbol: IGHD3-9
  Gene Name: immunoglobulin heavy diversity 3-9
  ENSP ID: ENSP00000487775
VLRYFDWLL

SEQ ID NO: 39636 - protein, 4 aa, Homo sapiens
  Payload ID: 7957
  Gene Symbol: IGHD4OR15-4A
  Gene Name: immunoglobulin heavy diversity 4/OR15-4A (non-functional)
  ENSP ID: ENSP00000474693
LWCL

SEQ ID NO: 39637 - protein, 4 aa, Homo sapiens
  Payload ID: 7958
  Gene Symbol: IGHD4OR15-4B
  Gene Name: immunoglobulin heavy diversity 4/OR15-4B (non-functional)
  ENSP ID: ENSP00000475053
LWCL

SEQ ID NO: 39638 - protein, 3 aa, Homo sapiens
  Payload ID: 7959
  Gene Symbol: IGHD4-11
  Gene Name: immunoglobulin heavy diversity 4-11 (non-functional)
  ENSP ID: ENSP00000430034
LQL

SEQ ID NO: 39639 - protein, 3 aa, Homo sapiens
  Payload ID: 7959
  Gene Symbol: IGHD4-11
  Gene Name: immunoglobulin heavy diversity 4-11 (non-functional)
  ENSP ID: ENSP00000488735
LQL

SEQ ID NO: 39640 - protein, 3 aa, Homo sapiens
  Payload ID: 7960
  Gene Symbol: IGHD4-17
  Gene Name: immunoglobulin heavy diversity 4-17
  ENSP ID: ENSP00000431089
LRL

SEQ ID NO: 39641 - protein, 3 aa, Homo sapiens
  Payload ID: 7960
  Gene Symbol: IGHD4-17
  Gene Name: immunoglobulin heavy diversity 4-17
  ENSP ID: ENSP00000488261
LRL

SEQ ID NO: 39642 - protein, 4 aa, Homo sapiens
  Payload ID: 7961
  Gene Symbol: IGHD4-23
  Gene Name: immunoglobulin heavy diversity 4-23 (non-functional)
  ENSP ID: ENSP00000430248
LRWL

SEQ ID NO: 39643 - protein, 4 aa, Homo sapiens
  Payload ID: 7961
  Gene Symbol: IGHD4-23
  Gene Name: immunoglobulin heavy diversity 4-23 (non-functional)
  ENSP ID: ENSP00000488168
LRWL

SEQ ID NO: 39644 - protein, 3 aa, Homo sapiens
  Payload ID: 7962
  Gene Symbol: IGHD4-4
  Gene Name: immunoglobulin heavy diversity 4-4
  ENSP ID: ENSP00000428393
LQL

SEQ ID NO: 39645 - protein, 3 aa, Homo sapiens
  Payload ID: 7962
  Gene Symbol: IGHD4-4
  Gene Name: immunoglobulin heavy diversity 4-4
  ENSP ID: ENSP00000488889
LQL

SEQ ID NO: 39646 - protein, 7 aa, Homo sapiens
  Payload ID: 7963
  Gene Symbol: IGHD5OR15-5A
  Gene Name: immunoglobulin heavy diversity 5/OR15-5A (non-functional)
  ENSP ID: ENSP00000473849
VDIVSTI

SEQ ID NO: 39647 - protein, 7 aa, Homo sapiens
  Payload ID: 7964
  Gene Symbol: IGHD5OR15-5B
  Gene Name: immunoglobulin heavy diversity 5/OR15-5B (non-functional)
  ENSP ID: ENSP00000473700
VDIVSTI

SEQ ID NO: 39648 - protein, 7 aa, Homo sapiens
  Payload ID: 7965
  Gene Symbol: IGHD5-12
  Gene Name: immunoglobulin heavy diversity 5-12
  ENSP ID: ENSP00000419283
VDIVATI

SEQ ID NO: 39649 - protein, 7 aa, Homo sapiens
  Payload ID: 7965
  Gene Symbol: IGHD5-12
  Gene Name: immunoglobulin heavy diversity 5-12
  ENSP ID: ENSP00000487922
VDIVATI

SEQ ID NO: 39650 - protein, 6 aa, Homo sapiens
  Payload ID: 7966
  Gene Symbol: IGHD5-18
  Gene Name: immunoglobulin heavy diversity 5-18
  ENSP ID: ENSP00000417555
VDTAMV

SEQ ID NO: 39651 - protein, 6 aa, Homo sapiens
  Payload ID: 7966
  Gene Symbol: IGHD5-18
  Gene Name: immunoglobulin heavy diversity 5-18
  ENSP ID: ENSP00000488201
VDTAMV

SEQ ID NO: 39652 - protein, 6 aa, Homo sapiens
  Payload ID: 7967
  Gene Symbol: IGHD5-24
  Gene Name: immunoglobulin heavy diversity 5-24 (non-functional)
  ENSP ID: ENSP00000419139
VEMATI

SEQ ID NO: 39653 - protein, 6 aa, Homo sapiens
  Payload ID: 7967
  Gene Symbol: IGHD5-24
  Gene Name: immunoglobulin heavy diversity 5-24 (non-functional)
  ENSP ID: ENSP00000488113
VEMATI

SEQ ID NO: 39654 - protein, 6 aa, Homo sapiens
  Payload ID: 7968
  Gene Symbol: IGHD5-5
  Gene Name: immunoglobulin heavy diversity 5-5
  ENSP ID: ENSP00000417892
VDTAMV

SEQ ID NO: 39655 - protein, 6 aa, Homo sapiens
  Payload ID: 7968
  Gene Symbol: IGHD5-5
  Gene Name: immunoglobulin heavy diversity 5-5
  ENSP ID: ENSP00000487937
VDTAMV

SEQ ID NO: 39656 - protein, 7 aa, Homo sapiens
  Payload ID: 7969
  Gene Symbol: IGHD6-13
  Gene Name: immunoglobulin heavy diversity 6-13
  ENSP ID: ENSP00000419564
GYSSSWY

SEQ ID NO: 39657 - protein, 7 aa, Homo sapiens
  Payload ID: 7969
  Gene Symbol: IGHD6-13
  Gene Name: immunoglobulin heavy diversity 6-13
  ENSP ID: ENSP00000488592
GYSSSWY

SEQ ID NO: 39658 - protein, 7 aa, Homo sapiens
  Payload ID: 7970
  Gene Symbol: IGHD6-19
  Gene Name: immunoglobulin heavy diversity 6-19
  ENSP ID: ENSP00000418010
GYSSGWY

SEQ ID NO: 39659 - protein, 7 aa, Homo sapiens
  Payload ID: 7970
  Gene Symbol: IGHD6-19
  Gene Name: immunoglobulin heavy diversity 6-19
  ENSP ID: ENSP00000487789
GYSSGWY

SEQ ID NO: 39660 - protein, 6 aa, Homo sapiens
  Payload ID: 7971
  Gene Symbol: IGHD6-25
  Gene Name: immunoglobulin heavy diversity 6-25
  ENSP ID: ENSP00000417751
GYSSGY

SEQ ID NO: 39661 - protein, 6 aa, Homo sapiens
  Payload ID: 7971
  Gene Symbol: IGHD6-25
  Gene Name: immunoglobulin heavy diversity 6-25
  ENSP ID: ENSP00000488392
GYSSGY

SEQ ID NO: 39662 - protein, 6 aa, Homo sapiens
  Payload ID: 7972
  Gene Symbol: IGHD6-6
  Gene Name: immunoglobulin heavy diversity 6-6
  ENSP ID: ENSP00000418151
EYSSSS

SEQ ID NO: 39663 - protein, 6 aa, Homo sapiens
  Payload ID: 7972
  Gene Symbol: IGHD6-6
  Gene Name: immunoglobulin heavy diversity 6-6
  ENSP ID: ENSP00000488589
EYSSSS

SEQ ID NO: 39664 - protein, 3 aa, Homo sapiens
  Payload ID: 7973
  Gene Symbol: IGHD7-27
  Gene Name: immunoglobulin heavy diversity 7-27
  ENSP ID: ENSP00000418639
LTG

SEQ ID NO: 39665 - protein, 3 aa, Homo sapiens
  Payload ID: 7973
  Gene Symbol: IGHD7-27
  Gene Name: immunoglobulin heavy diversity 7-27
  ENSP ID: ENSP00000488695
LTG

SEQ ID NO: 39666 - protein, 17 aa, Homo sapiens
  Payload ID: 7974
  Gene Symbol: IGHJ1
  Gene Name: immunoglobulin heavy joining 1
  ENSP ID: ENSP00000418050
AEYFQHWGQGTLVTVSS

SEQ ID NO: 39667 - protein, 17 aa, Homo sapiens
  Payload ID: 7974
  Gene Symbol: IGHJ1
  Gene Name: immunoglobulin heavy joining 1
  ENSP ID: ENSP00000488542
AEYFQHWGQGTLVTVSS

SEQ ID NO: 39668 - protein, 17 aa, Homo sapiens
  Payload ID: 7975
  Gene Symbol: IGHJ2
  Gene Name: immunoglobulin heavy joining 2
  ENSP ID: ENSP00000419748
YWYFDLWGRGTLVTVSS

SEQ ID NO: 39669 - protein, 18 aa, Homo sapiens
  Payload ID: 7975
  Gene Symbol: IGHJ2
  Gene Name: immunoglobulin heavy joining 2
  ENSP ID: ENSP00000488041
  MOD_RES (1)..(1): Any amino acid
XYWYFDLWGRGTLVTVSS

SEQ ID NO: 39670 - protein, 16 aa, Homo sapiens
  Payload ID: 7976
  Gene Symbol: IGHJ3
  Gene Name: immunoglobulin heavy joining 3
  ENSP ID: ENSP00000420517
DAFDIWGQGTMVTVSS

SEQ ID NO: 39671 - protein, 17 aa, Homo sapiens
  Payload ID: 7976
  Gene Symbol: IGHJ3
  Gene Name: immunoglobulin heavy joining 3
  ENSP ID: ENSP00000487765
  MOD_RES (1)..(1): Any amino acid
XDAFDIWGQGTMVTVSS

SEQ ID NO: 39672 - protein, 15 aa, Homo sapiens
  Payload ID: 7977
  Gene Symbol: IGHJ4
  Gene Name: immunoglobulin heavy joining 4
  ENSP ID: ENSP00000419074
YFDYWGQGTLVTVSS

SEQ ID NO: 39673 - protein, 16 aa, Homo sapiens
  Payload ID: 7977
  Gene Symbol: IGHJ4
  Gene Name: immunoglobulin heavy joining 4
  ENSP ID: ENSP00000487646
  MOD_RES (1)..(1): Any amino acid
XYFDYWGQGTLVTVSS

SEQ ID NO: 39674 - protein, 16 aa, Homo sapiens
  Payload ID: 7978
  Gene Symbol: IGHJ5
  Gene Name: immunoglobulin heavy joining 5
  ENSP ID: ENSP00000418164
NWFDPWGQGTLVTVSS

SEQ ID NO: 39675 - protein, 17 aa, Homo sapiens
  Payload ID: 7978
  Gene Symbol: IGHJ5
  Gene Name: immunoglobulin heavy joining 5
  ENSP ID: ENSP00000487618
  MOD_RES (1)..(1): Any amino acid
XNWFDPWGQGTLVTVSS

SEQ ID NO: 39676 - protein, 20 aa, Homo sapiens
  Payload ID: 7979
  Gene Symbol: IGHJ6
  Gene Name: immunoglobulin heavy joining 6
  ENSP ID: ENSP00000419223
YYYYYYMDVWGKGTTVTVSS

SEQ ID NO: 39677 - protein, 21 aa, Homo sapiens
  Payload ID: 7979
  Gene Symbol: IGHJ6
  Gene Name: immunoglobulin heavy joining 6
  ENSP ID: ENSP00000487609
  MOD_RES (1)..(1): Any amino acid
XYYYYYYMDVWGKGTTVTVSS

SEQ ID NO: 39678 - protein, 117 aa, Homo sapiens
  Payload ID: 7980
  Gene Symbol: IGHV1OR15-1
  Gene Name: immunoglobulin heavy variable 1/OR15-1 (non-functional)
  ENSP ID: ENSP00000474284
MDWTWRILFLVAAATGAHSQVQLVQSGAEVKKPGASVKVSCKASGYIFTDYYMHWVRQAPGQELGWMGRINPNSGGTNYAQKFQGRVTMTRDTSISTAYTELSSLRSEDTATYYCAR

SEQ ID NO: 39679 - protein, 117 aa, Homo sapiens
  Payload ID: 7981
  Gene Symbol: IGHV1OR15-9
  Gene Name: immunoglobulin heavy variable 1/OR15-9 (non-functional)
  ENSP ID: ENSP00000474639
MGWTWRILFLVVIAAGAQSQVQLMQSGAEVKKPGASVRISCKASGYTFTSYCMHWVCQAHAQGLEWMGLVCPSDGSTSYAQKFQGRVTITRDTSMGTAYMELSSLRSEDTAMYYCVR

SEQ ID NO: 39680 - protein, 117 aa, Homo sapiens
  Payload ID: 7982
  Gene Symbol: IGHV1OR21-1
  Gene Name: immunoglobulin heavy variable 1/OR21-1 (non-functional)
  ENSP ID: ENSP00000481738
MDWNWRILFLVVIAAGAQSQVQLVQSGAEVKKPGASVKVSCKASGYTITSYCMHWVHQVHAQGLEWMGLVCPSDGSTSYAQKFQARVTITRDTSMSTAYMELSSLRSEDTAMYYCVR

SEQ ID NO: 39681 - protein, 117 aa, Homo sapiens
  Payload ID: 7983
  Gene Symbol: IGHV1-18
  Gene Name: immunoglobulin heavy variable 1-18
  ENSP ID: ENSP00000375014
MDWTWSILFLVAAATGAHSQVQLVQSGAEVKKPGASVKVSCKASGYTFTSYGISWVRQAPGQGLEWMGWISAYNGNTNYAQKLQGRVTMTTDTSTSTAYMELRSLRSDDTAVYYCAR

SEQ ID NO: 39682 - protein, 117 aa, Homo sapiens; identical to SEQ ID NO: 39681
  Payload ID: 7983
  Gene Symbol: IGHV1-18
  Gene Name: immunoglobulin heavy variable 1-18
  ENSP ID: ENSP00000488395

SEQ ID NO: 39683 - protein, 117 aa, Homo sapiens
  Payload ID: 7984
  Gene Symbol: IGHV1-2
  Gene Name: immunoglobulin heavy variable 1-2
  ENSP ID: ENSP00000375003
MDWTWRILFLVAAATGAHSQVQLVQSGAEVKKPGASVKVSCKASGYTFTGYYMHWVRQAPGQGLEWMGWINPNSGGTNYAQKFQGWVTMTRDTSISTAYMELSRLRSDDTAVYYCAR

SEQ ID NO: 39684 - protein, 117 aa, Homo sapiens; identical to SEQ ID NO: 39683
  Payload ID: 7984
  Gene Symbol: IGHV1-2
  Gene Name: immunoglobulin heavy variable 1-2
  ENSP ID: ENSP00000488290

SEQ ID NO: 39685 - protein, 117 aa, Homo sapiens
  Payload ID: 7985
  Gene Symbol: IGHV1-24
  Gene Name: immunoglobulin heavy variable 1-24
  ENSP ID: ENSP00000375019
MDCTWRILFLVAAATGTHAQVQLVQSGAEVKKPGASVKVSCKVSGYTLTELSMHWVRQAPGKGLEWMGGFDPEDGETIYAQKFQGRVTMTEDTSTDTAYMELSSLRSEDTAVYYCAT

SEQ ID NO: 39686 - protein, 117 aa, Homo sapiens; identical to SEQ ID NO: 39685
  Payload ID: 7985
  Gene Symbol: IGHV1-24
  Gene Name: immunoglobulin heavy variable 1-24
  ENSP ID: ENSP00000488412

SEQ ID NO: 39687 - protein, 117 aa, Homo sapiens
  Payload ID: 7986
  Gene Symbol: IGHV1-3
  Gene Name: immunoglobulin heavy variable 1-3
  ENSP ID: ENSP00000375004
MDWTWRILFLVAAATGAHSQVQLVQSGAEVKKPGASVKVSCKASGYTFTSYAMHWVRQAPGQRLEWMGWINAGNGNTKYSQKFQGRVTITRDTSASTAYMELSSLRSEDTAVYYCAR

SEQ ID NO: 39688 - protein, 117 aa, Homo sapiens; identical to SEQ ID NO: 39687
  Payload ID: 7986
  Gene Symbol: IGHV1-3
  Gene Name: immunoglobulin heavy variable 1-3
  ENSP ID: ENSP00000487722

SEQ ID NO: 39689 - protein, 117 aa, Homo sapiens
  Payload ID: 7987
  Gene Symbol: IGHV1-45
  Gene Name: immunoglobulin heavy variable 1-45
  ENSP ID: ENSP00000375030
MDWTWRILFLVAAVTDAYSQMQLVQSGAEVKKTGSSVKVSCKASGYTFTYRYLHWVRQAPGQALEWMGWITPFNGNTNYAQKFQDRVTITRDRSMSTAYMELSSLRSEDTAMYYCAR

SEQ ID NO: 39690 - protein, 117 aa, Homo sapiens; identical to SEQ ID NO: 39689
  Payload ID: 7987
  Gene Symbol: IGHV1-45
  Gene Name: immunoglobulin heavy variable 1-45
  ENSP ID: ENSP00000488436

SEQ ID NO: 39691 - protein, 117 aa, Homo sapiens
  Payload ID: 7988
  Gene Symbol: IGHV1-46
  Gene Name: immunoglobulin heavy variable 1-46
  ENSP ID: ENSP00000375031
MDWTWRVFCLLAVAPGAHSQVQLVQSGAEVKKPGASVKVSCKASGYTFTSYYMHWVRQAPGQGLEWMGIINPSGGSTSYAQKFQGRVTMTRDTSTSTVYMELSSLRSEDTAVYYCAR

SEQ ID NO: 39692 - protein, 117 aa, Homo sapiens; identical to SEQ ID NO: 39691
  Payload ID: 7988
  Gene Symbol: IGHV1-46
  Gene Name: immunoglobulin heavy variable 1-46
  ENSP ID: ENSP00000488713

SEQ ID NO: 39693 - protein, 117 aa, Homo sapiens
  Payload ID: 7989
  Gene Symbol: IGHV1-58
  Gene Name: immunoglobulin heavy variable 1-58
  ENSP ID: ENSP00000375037
MDWIWRILFLVGAATGAHSQMQLVQSGPEVKKPGTSVKVSCKASGFTFTSSAVQWVRQARGQRLEWIGWIVVGSGNTNYAQKFQERVTITRDMSTSTAYMELSSLRSEDTAVYYCAA

SEQ ID NO: 39694 - protein, 117 aa, Homo sapiens; identical to SEQ ID NO: 39693
  Payload ID: 7989
  Gene Symbol: IGHV1-58
  Gene Name: immunoglobulin heavy variable 1-58
  ENSP ID: ENSP00000488516

SEQ ID NO: 39695 - protein, 117 aa, Homo sapiens
  Payload ID: 7990
  Gene Symbol: IGHV1-69
  Gene Name: immunoglobulin heavy variable 1-69
  ENSP ID: ENSP00000375042
MDWTWRFLFVVAAATGVQSQVQLVQSGAEVKKPGSSVKVSCKASGGTFSSYAISWVRQAPGQGLEWMGGIIPIFGTANYAQKFQGRVTITADKSTSTAYMELSSLRSEDTAVYYCAR

SEQ ID NO: 39696 - protein, 117 aa, Homo sapiens; identical to SEQ ID NO: 39695
  Payload ID: 7990
  Gene Symbol: IGHV1-69
  Gene Name: immunoglobulin heavy variable 1-69
  ENSP ID: ENSP00000488090

SEQ ID NO: 39697 - protein, 117 aa, Homo sapiens
  Payload ID: 7991
  Gene Symbol: IGHV1-69-2
  Gene Name: immunoglobulin heavy variable 1-69-2
  ENSP ID: ENSP00000485152
MDWTWRFLFVVAAATGVQSQVQLVQSGAEVKKPGSSVKVSCKASGGTFSSYAISWVRQAPGQGLEWMGGIIPIFGTANYAQKFQGRVTITADESTSTAYMELSSLRSEDTAVYYCAR

SEQ ID NO: 39698 - protein, 117 aa, Homo sapiens; identical to SEQ ID NO: 39697
  Payload ID: 7991
  Gene Symbol: IGHV1-69-2
  Gene Name: immunoglobulin heavy variable 1-69-2
  ENSP ID: ENSP00000488097

SEQ ID NO: 39699 - protein, 119 aa, Homo sapiens
  Payload ID: 7992
  Gene Symbol: IGHV2OR16-5
  Gene Name: immunoglobulin heavy variable 2/OR16-5 (non-functional)
  ENSP ID: ENSP00000474384
MDTFCSTLLLLTTPSWVLSQVTLKESGPALVKPTETLTLTCTLSGFSLSTSGMGMSWIRQPPGKALEWLAHIFLNDKKSYSTSLKNRLIISKDTSKSQVVLTMTNMDPVDTATYYCAWR

SEQ ID NO: 39700 - protein, 119 aa, Homo sapiens
  Payload ID: 7993
  Gene Symbol: IGHV2-26
  Gene Name: immunoglobulin heavy variable 2-26
  ENSP ID: ENSP00000375020
MDTLCYTLLLLTTPSWVLSQVTLKESGPVLVKPTETLTLTCTVSGFSLSNARMGVSWIRQPPGKALEWLAHIFSNDEKSYSTSLKSRLTISKDTSKSQVVLTMTNMDPVDTATYYCARI

SEQ ID NO: 39701 - protein, 119 aa, Homo sapiens; identical to SEQ ID NO: 39700
  Payload ID: 7993
  Gene Symbol: IGHV2-26
  Gene Name: immunoglobulin heavy variable 2-26
  ENSP ID: ENSP00000487857

SEQ ID NO: 39702 - protein, 119 aa, Homo sapiens
  Payload ID: 7994
  Gene Symbol: IGHV2-5
  Gene Name: immunoglobulin heavy variable 2-5
  ENSP ID: ENSP00000375006
MDTLCSTLLLLTIPSWVLSQITLKESGPTLVKPTQTLTLTCTFSGFSLSTSGVGVGWIRQPPGKALEWLALIYWDDDKRYSPSLKSRLTITKDTSKNQVVLTMTNMDPVDTATYYCAHR

SEQ ID NO: 39703 - protein, 119 aa, Homo sapiens; identical to SEQ ID NO: 39702
  Payload ID: 7994
  Gene Symbol: IGHV2-5
  Gene Name: immunoglobulin heavy variable 2-5
  ENSP ID: ENSP00000473889

SEQ ID NO: 39704 - protein, 119 aa, Homo sapiens
  Payload ID: 7995
  Gene Symbol: IGHV2-70
  Gene Name: immunoglobulin heavy variable 2-70
  ENSP ID: ENSP00000485200
MDILCSTLLLLTVPSWVLSQVTLRESGPALVKPTQTLTLTCTFSGFSLSTSGMCVSWIRQPPGKALEWLALIDWDDDKYYSTSLKTRLTISKDTSKNQVVLTMTNMDPVDTATYYCARI

SEQ ID NO: 39705 - protein, 119 aa, Homo sapiens
  Payload ID: 7995
  Gene Symbol: IGHV2-70
  Gene Name: immunoglobulin heavy variable 2-70
  ENSP ID: ENSP00000487677
MDMLCSMLLLLTVPSWVLSQVTLKESGPALVKPTQTLTLTCTFSGFSLSTTGMRVSWIRRPPGKALEWLARIDWDDDKYCSTSLKTRLTISKDTSKNQVVLTMTNMDPVDTATYYCARI

SEQ ID NO: 39706 - protein, 119 aa, Homo sapiens
  Payload ID: 7996
  Gene Symbol: IGHV3OR15-7
  Gene Name: immunoglobulin heavy variable 3/OR15-7 (pseudogene)
  ENSP ID: ENSP00000474509
MEFGLSWVFLVAILKGVQCEVQLVESGGGLVQPGGSLRLSCAASGFTFSDHYMSWVRQAQGKGLELVGLIRNKANSYTTEYAASVKGRLTISREDSKNTLYLQMSNLKTEDLAVYYCAR

SEQ ID NO: 39707 - protein, 116 aa, Homo sapiens
  Payload ID: 7997
  Gene Symbol: IGHV3OR16-10
  Gene Name: immunoglobulin heavy variable 3/OR16-10 (non-functional)
  ENSP ID: ENSP00000474941
MEFVLSWVFLVAILKGVQCEVQLVQSGGGLVHPGGSLRLSCAGSGFTFSSYAMHWVRQAPGKGLEWVSAIGTGGGTYYADSVKGRFTISRDNAKNSLYLQMNSLRAEDMAVYYCAR

SEQ ID NO: 39708 - protein, 117 aa, Homo sapiens
  Payload ID: 7998
  Gene Symbol: IGHV3OR16-12
  Gene Name: immunoglobulin heavy variable 3/OR16-12 (non-functional)
  ENSP ID: ENSP00000474013
MEFELSWVFLVAILQGVHCEVQLVESGRGLAQPGGYLKLSGAASGFTVGSWYMSWIHQAPGKGLEWVSYISSSGCSTNYADSVKGRFTISTDNSKNTLYLQMNSLRVEDTAVYYCAR

SEQ ID NO: 39709 - protein, 117 aa, Homo sapiens
  Payload ID: 7999
  Gene Symbol: IGHV3OR16-13
  Gene Name: immunoglobulin heavy variable 3/OR16-13 (non-functional)
  ENSP ID: ENSP00000474814
MEFGLSWVFLVAILKGVQCEVQLVESGGGLVQPGGSLRLSCAASGFTFSSYWMHWVRQAPGKGLVWVSRINSDGSSTSYADSMKGQFTISRDNAKNTLYLQMNSLRAEDMAVYYCTR

SEQ ID NO: 39710 - protein, 116 aa, Homo sapiens
  Payload ID: 8000
  Gene Symbol: IGHV3OR16-8
  Gene Name: immunoglobulin heavy variable 3/OR16-8 (non-functional)
  ENSP ID: ENSP00000474964
MEFGLNWVFLVAIIKGAQCEVQLVESGGGLVQPGGSLRLSCPASGFTFSNHYMSWVRQAPGKGLEWVSYISGDSGYTNYADSVKGRFTISRDNANNSPYLQMNSLRAEDTAVYYCV

SEQ ID NO: 39711 - protein, 98 aa, Homo sapiens
  Payload ID: 8001
  Gene Symbol: IGHV3OR16-9
  Gene Name: immunoglobulin heavy variable 3/OR16-9 (non-functional)
  ENSP ID: ENSP00000474363
EVQLVESGGGLVQPGGSLRLSCAASGFTFSNHYTSWVRQAPGKGLEWVSYSSGNSGYTNYADSVKGRFTISRDNAKNSLYLQMNSLRAEDTAVYYCVK

SEQ ID NO: 39712 - protein, 96 aa, Homo sapiens
  Payload ID: 8001
  Gene Symbol: IGHV3OR16-9
  Gene Name: immunoglobulin heavy variable 3/OR16-9 (non-functional)
  ENSP ID: ENSP00000475107
EVQLVESGGGLVQPGGSLRLSCAASGFTFSNHYTSWVRQAPGKGLEWVSYSSGNSGYTNYADSVKGRFTISRDNAKNSLYLQMNSLRAEDTAVYYC

SEQ ID NO: 39713 - protein, 117 aa, Homo sapiens
  Payload ID: 8002
  Gene Symbol: IGHV3-11
  Gene Name: immunoglobulin heavy variable 3-11 (gene/pseudogene)
  ENSP ID: ENSP00000375010
MEFGLSWVFLVAIIKGVQCQVQLVESGGGLVKPGGSLRLSCAASGFTFSDYYMSWIRQAPGKGLEWVSYISSSSSYTNYADSVKGRFTISRDNAKNSLYLQMNSLRAEDTAVYYCAR

SEQ ID NO: 39714 - protein, 117 aa, Homo sapiens; identical to SEQ ID NO: 39713
  Payload ID: 8002
  Gene Symbol: IGHV3-11
  Gene Name: immunoglobulin heavy variable 3-11 (gene/pseudogene)
  ENSP ID: ENSP00000488236

SEQ ID NO: 39715 - protein, 116 aa, Homo sapiens
  Payload ID: 8003
  Gene Symbol: IGHV3-13
  Gene Name: immunoglobulin heavy variable 3-13
  ENSP ID: ENSP00000375011
MELGLSWVFLVAILEGVQCEVQLVESGGGLVQPGGSLRLSCAASGFTFSSYDMHWVRQATGKGLEWVSAIGTAGDPYYPGSVKGRFTISRENAKNSLYLQMNSLRAGDTAVYYCAR

SEQ ID NO: 39716 - protein, 116 aa, Homo sapiens; identical to SEQ ID NO: 39715
  Payload ID: 8003
  Gene Symbol: IGHV3-13
  Gene Name: immunoglobulin heavy variable 3-13
  ENSP ID: ENSP00000488851

SEQ ID NO: 39717 - protein, 119 aa, Homo sapiens
  Payload ID: 8004
  Gene Symbol: IGHV3-15
  Gene Name: immunoglobulin heavy variable 3-15
  ENSP ID: ENSP00000375012
MEFGLSWIFLAAILKGVQCEVQLVESGGGLVKPGGSLRLSCAASGFTFSNAWMSWVRQAPGKGLEWVGRIKSKTDGGTTDYAAPVKGRFTISRDDSKNTLYLQMNSLKTEDTAVYYCTT

SEQ ID NO: 39718 - protein, 119 aa, Homo sapiens; identical to SEQ ID NO: 39717
  Payload ID: 8004
  Gene Symbol: IGHV3-15
  Gene Name: immunoglobulin heavy variable 3-15
  ENSP ID: ENSP00000488894

SEQ ID NO: 39719 - protein, 117 aa, Homo sapiens
  Payload ID: 8005
  Gene Symbol: IGHV3-16
  Gene Name: immunoglobulin heavy variable 3-16 (non-functional)
  ENSP ID: ENSP00000375013
MEFGLSWVFLAGILKGVQCEVQLVESGGGLVQPGGSLRLSCAASGFTFSNSDMNWARKAPGKGLEWVSGVSWNGSRTHYVDSVKRRFIISRDNSRNSLYLQKNRRRAEDMAVYYCVR

SEQ ID NO: 39720 - protein, 117 aa, Homo sapiens; identical to SEQ ID NO: 39719
  Payload ID: 8005
  Gene Symbol: IGHV3-16
  Gene Name: immunoglobulin heavy variable 3-16 (non-functional)
  ENSP ID: ENSP00000487809

SEQ ID NO: 39721 - protein, 117 aa, Homo sapiens
  Payload ID: 8006
  Gene Symbol: IGHV3-20
  Gene Name: immunoglobulin heavy variable 3-20
  ENSP ID: ENSP00000375015
MEFGLSWVFLVAILKGVQCEVQLVESGGGVVRPGGSLRLSFAASGFTFDDYGMSWVRQAPGKGLEWVSGINWNGGSTGYADSVKGRFTISRDNAKNSLYLQMNSLRAEDTALYHCAR

SEQ ID NO: 39722 - protein, 117 aa, Homo sapiens; identical to SEQ ID NO: 39721
  Payload ID: 8006
  Gene Symbol: IGHV3-20
  Gene Name: immunoglobulin heavy variable 3-20
  ENSP ID: ENSP00000488747

SEQ ID NO: 39723 - protein, 117 aa, Homo sapiens
  Payload ID: 8007
  Gene Symbol: IGHV3-21
  Gene Name: immunoglobulin heavy variable 3-21
  ENSP ID: ENSP00000375016
MELGLRWVFLVAILEGVQCEVQLVESGGGLVKPGGSLRLSCAASGFTFSSYSMNWVRQAPGKGLEWVSSISSSSSYIYYADSVKGRFTISRDNAKNSLYLQMNSLRAEDTAVYYCAR

SEQ ID NO: 39724 - protein, 117 aa, Homo sapiens; identical to SEQ ID NO: 39723
  Payload ID: 8007
  Gene Symbol: IGHV3-21
  Gene Name: immunoglobulin heavy variable 3-21
  ENSP ID: ENSP00000487805

SEQ ID NO: 39725 - protein, 117 aa, Homo sapiens
  Payload ID: 8008
  Gene Symbol: IGHV3-23
  Gene Name: immunoglobulin heavy variable 3-23
  Uniprot ID: P01764
  ENSP ID: ENSP00000375018
MEFGLSWLFLVAILKGVQCEVQLVESGGGLVQPGGSLRLSCAASGFTFSSYAMSWVRQAPGKGLEWVSAISGSGGSTYYADSVKGRFTISRDNSKNTLYLQMNSLRAEDTAVYYCAK

SEQ ID NO: 39726 - protein, 117 aa, Homo sapiens; identical to SEQ ID NO: 39725
  Payload ID: 8008
  Gene Symbol: IGHV3-23
  Gene Name: immunoglobulin heavy variable 3-23
  Uniprot ID: P01764
  ENSP ID: ENSP00000487761

SEQ ID NO: 39727 - protein, 117 aa, Homo sapiens
  Payload ID: 8009
  Gene Symbol: IGHV3-30
  Gene Name: immunoglobulin heavy variable 3-30
  ENSP ID: ENSP00000474524
MEFGLSWVFLVALLRGVQCQVQLVESGGGVVQPGRSLRLSCAASGFTFSSYGMHWVRQAPGKGLEWVAVISYDGSNKYYADSVKGRFTISRDNSKNTLYLQMNSLRAEDTAVYYCAK

SEQ ID NO: 39728 - protein, 117 aa, Homo sapiens; identical to SEQ ID NO: 39727
  Payload ID: 8009
  Gene Symbol: IGHV3-30
  Gene Name: immunoglobulin heavy variable 3-30
  ENSP ID: ENSP00000488205

SEQ ID NO: 39729 - protein, 117 aa, Homo sapiens
  Payload ID: 8010
  Gene Symbol: IGHV3-33
  Gene Name: immunoglobulin heavy variable 3-33
  ENSP ID: ENSP00000375024
MEFGLSWVFLVALLRGVQCQVQLVESGGGVVQPGRSLRLSCAASGFTFSSYGMHWVRQAPGKGLEWVAVIWYDGSNKYYADSVKGRFTISRDNSKNTLYLQMNSLRAEDTAVYYCAR

SEQ ID NO: 39730 - protein, 117 aa, Homo sapiens
  Payload ID: 8010
  Gene Symbol: IGHV3-33
  Gene Name: immunoglobulin heavy variable 3-33
  ENSP ID: ENSP00000487655
MEFGLSWVFLVALLRGVQCQVQLVESGGGVVQPGRSLRLSCAASGFTFSSYAMHWVRQAPGKGLEWVAVISYDGSNKYYADSVKGRFTISRDNSKNTLYLQMNSLRAEDTAVYYCAR

SEQ ID NO: 39731 - protein, 117 aa, Homo sapiens
  Payload ID: 8011
  Gene Symbol: IGHV3-35
  Gene Name: immunoglobulin heavy variable 3-35 (non-functional)
  ENSP ID: ENSP00000375026
MEFGLSWVFLAAILKGVQCEVQLVESGGGLVQPGGSLRLSCAASGFTFSNSDMNWVHQAPGKGLEWVSGVSWNGSRTHYADSVKGRFIISRDNSRNTLYLQTNSLRAEDTAVYYCVR

SEQ ID NO: 39732 - protein, 117 aa, Homo sapiens; identical to SEQ ID NO: 39731
  Payload ID: 8011
  Gene Symbol: IGHV3-35
  Gene Name: immunoglobulin heavy variable 3-35 (non-functional)
  ENSP ID: ENSP00000488667

SEQ ID NO: 39733 - protein, 116 aa, Homo sapiens
  Payload ID: 8012
  Gene Symbol: IGHV3-38
  Gene Name: immunoglobulin heavy variable 3-38 (non-functional)
  ENSP ID: ENSP00000375027
MQFVLSWVFLVGILKGVQCEVQLVESGGGLVQPRGSLRLSCAASGFTVSSNEMSWIRQAPGKGLEWVSSISGGSTYYADSRKGRFTISRDNSKNTLYLQMNNLRAEGTAVYYCARY

SEQ ID NO: 39734 - protein, 116 aa, Homo sapiens; identical to SEQ ID NO: 39733
  Payload ID: 8012
  Gene Symbol: IGHV3-38
  Gene Name: immunoglobulin heavy variable 3-38 (non-functional)
  ENSP ID: ENSP00000487804

SEQ ID NO: 39735 - protein, 118 aa, Homo sapiens
  Payload ID: 8013
  Gene Symbol: IGHV3-43
  Gene Name: immunoglobulin heavy variable 3-43
  ENSP ID: ENSP00000399826
MEFGLSWVFLVAILKGVQCEVQLVESGGVVVQPGGSLRLSCAASGFTFDDYTMHWVRQAPGKGLEWVSLISWDGGSTYYADSVKGRFTISRDNSKNSLYLQMNSLRTEDTALYYCAKD

SEQ ID NO: 39736 - protein, 118 aa, Homo sapiens; identical to SEQ ID NO: 39735
  Payload ID: 8013
  Gene Symbol: IGHV3-43
  Gene Name: immunoglobulin heavy variable 3-43
  ENSP ID: ENSP00000487611

SEQ ID NO: 39737 - protein, 117 aa, Homo sapiens
  Payload ID: 8014
  Gene Symbol: IGHV3-48
  Gene Name: immunoglobulin heavy variable 3-48
  ENSP ID: ENSP00000375033
MELGLCWVFLVAILEGVQCEVQLVESGGGLVQPGGSLRLSCAASGFTFSSYEMNWVRQAPGKGLEWVSYISSSGSTIYYADSVKGRFTISRDNAKNSLYLQMNSLRAEDTAVYYCAR

SEQ ID NO: 39738 - protein, 117 aa, Homo sapiens; identical to SEQ ID NO: 39737
  Payload ID: 8014
  Gene Symbol: IGHV3-48
  Gene Name: immunoglobulin heavy variable 3-48
  ENSP ID: ENSP00000487990

SEQ ID NO: 39739 - protein, 119 aa, Homo sapiens
  Payload ID: 8015
  Gene Symbol: IGHV3-49
  Gene Name: immunoglobulin heavy variable 3-49
  ENSP ID: ENSP00000375034
MEFGLSWVFLVAILKGVQCEVQLVESGGGLVQPGRSLRLSCTASGFTFGDYAMSWVRQAPGKGLEWVGFIRSKAYGGTTEYAASVKGRFTISRDDSKSIAYLQMNSLKTEDTAVYYCTR

SEQ ID NO: 39740 - protein, 114 aa, Homo sapiens
  Payload ID: 8015
  Gene Symbol: IGHV3-49
  Gene Name: immunoglobulin heavy variable 3-49
  ENSP ID: ENSP00000478467
AILKGVQCEVQLVESGGGLVQPGRSLRLSCTASGFTFGDYAMSWVRQAPGKGLEWVGFIRSKAYGGTTEYAASVKGRFTISRDDSKSIAYLQMNSLKTEDTAVYYCTRDTVRGG

SEQ ID NO: 39741 - protein, 114 aa, Homo sapiens; identical to SEQ ID NO: 39740
  Payload ID: 8015
  Gene Symbol: IGHV3-49
  Gene Name: immunoglobulin heavy variable 3-49
  ENSP ID: ENSP00000484690

SEQ ID NO: 39742 - protein, 119 aa, Homo sapiens; identical to SEQ ID NO: 39739
  Payload ID: 8015
  Gene Symbol: IGHV3-49
  Gene Name: immunoglobulin heavy variable 3-49
  ENSP ID: ENSP00000488069

SEQ ID NO: 39743 - protein, 116 aa, Homo sapiens
  Payload ID: 8016
  Gene Symbol: IGHV3-53
  Gene Name: immunoglobulin heavy variable 3-53
  ENSP ID: ENSP00000375036
MEFWLSWVFLVAISKGVQCEVQLVETGGGLIQPGGSLRLSCAASGFTVSSNYMSWVRQAPGKGLEWVSVIYSGGSTYYADSVKGRFTISRDNSKNTLYLQMNSLRAEDTAVYYCAR

SEQ ID NO: 39744 - protein, 116 aa, Homo sapiens; identical to SEQ ID NO: 39743
  Payload ID: 8016
  Gene Symbol: IGHV3-53
  Gene Name: immunoglobulin heavy variable 3-53
  ENSP ID: ENSP00000488526

SEQ ID NO: 39745 - protein, 118 aa, Homo sapiens
  Payload ID: 8017
  Gene Symbol: IGHV3-64
  Gene Name: immunoglobulin heavy variable 3-64
  ENSP ID: ENSP00000401707
MMEFGLSWVFLVAIFKGVQCEVQLVESGEGLVQPGGSLRLSCAASGFTFSSYAMHWVRQAPGKGLEYVSAISSNGGSTYYADSVKGRFTISRDNSKNTLYLQMGSLRAEDMAVYYCAR

SEQ ID NO: 39746 - protein, 75 aa, Homo sapiens
  Payload ID: 8017
  Gene Symbol: IGHV3-64
  Gene Name: immunoglobulin heavy variable 3-64
  ENSP ID: ENSP00000480175
ASGFTFSSYAMHWVRQAPGKGLEYVSAISSNGGSTYYADSVKGRFTISRDNAQNSLYLQMNSLRADDMAVYYCVK

SEQ ID NO: 39747 - protein, 75 aa, Homo sapiens; identical to SEQ ID NO: 39746
  Payload ID: 8017
  Gene Symbol: IGHV3-64
  Gene Name: immunoglobulin heavy variable 3-64
  ENSP ID: ENSP00000483769

SEQ ID NO: 39748 - protein, 118 aa, Homo sapiens; identical to SEQ ID NO: 39745
  Payload ID: 8017
  Gene Symbol: IGHV3-64
  Gene Name: immunoglobulin heavy variable 3-64
  ENSP ID: ENSP00000488676

SEQ ID NO: 39749 - protein, 116 aa, Homo sapiens
  Payload ID: 8018
  Gene Symbol: IGHV3-66
  Gene Name: immunoglobulin heavy variable 3-66
  ENSP ID: ENSP00000375041
MEFGLSWVFLVAILKGVQCEVQLVESGGGLIQPGGSLRLSCAASGFTVSSNYMSWVRQAPGKGLEWVSVIYSCGSTYYADSVKGRFTISRDNSKNTLYLQMNSLRAEDTAVYYCAR

SEQ ID NO: 39750 - protein, 116 aa, Homo sapiens; identical to SEQ ID NO: 39749
  Payload ID: 8018
  Gene Symbol: IGHV3-66
  Gene Name: immunoglobulin heavy variable 3-66
  ENSP ID: ENSP00000487902

SEQ ID NO: 39751 - protein, 117 aa, Homo sapiens
  Payload ID: 8019
  Gene Symbol: IGHV3-7
  Gene Name: immunoglobulin heavy variable 3-7
  ENSP ID: ENSP00000375007
MELGLSWVFLVAILEGVQCEVQLVESGGGLVQPGGSLRLSCAASGFTFSSYWMSWVRQAPGKGLEWVANIKQDGSEKYYVDSVKGRFTISRDNAKNSLYLQMNSLRAEDTAVYYCAR

SEQ ID NO: 39752 - protein, 117 aa, Homo sapiens; identical to SEQ ID NO: 39751
  Payload ID: 8019
  Gene Symbol: IGHV3-7
  Gene Name: immunoglobulin heavy variable 3-7
  ENSP ID: ENSP00000487659

SEQ ID NO: 39753 - protein, 119 aa, Homo sapiens
  Payload ID: 8020
  Gene Symbol: IGHV3-72
  Gene Name: immunoglobulin heavy variable 3-72
  ENSP ID: ENSP00000416201
MEFGLSWVFLVVILQGVQCEVQLVESGGGLVQPGGSLRLSCAASGFTFSDHYMDWVRQAPGKGLEWVGRTRNKANSYTTEYAASVKGRFTISRDDSKNSLYLQMNSLKTEDTAVYYCAR

SEQ ID NO: 39754 - protein, 101 aa, Homo sapiens
  Payload ID: 8020
  Gene Symbol: IGHV3-72
  Gene Name: immunoglobulin heavy variable 3-72
  ENSP ID: ENSP00000480035
EVQLVESGGGLVQPGGSLRLSCAASGFTFSDHYMDWVRQAPGKGLEWVGRTRNKANSYTTEYAASVKGRFTISRDDSKNSLYLQMNSLKTEDTAVYYCARD

SEQ ID NO: 39755 - protein, 101 aa, Homo sapiens; identical to SEQ ID NO: 39754
  Payload ID: 8020
  Gene Symbol: IGHV3-72
  Gene Name: immunoglobulin heavy variable 3-72
  ENSP ID: ENSP00000480183

SEQ ID NO: 39756 - protein, 119 aa, Homo sapiens; identical to SEQ ID NO: 39753
  Payload ID: 8020
  Gene Symbol: IGHV3-72
  Gene Name: immunoglobulin heavy variable 3-72
  ENSP ID: ENSP00000488019

SEQ ID NO: 39757 - protein, 119 aa, Homo sapiens
  Payload ID: 8021
  Gene Symbol: IGHV3-73
  Gene Name: immunoglobulin heavy variable 3-73
  ENSP ID: ENSP00000375045
MEFGLSWVFLVAILKGVQCEVQLVESGGGLVQPGGSLKLSCAASGFTFSGSAMHWVRQASGKGLEWVGRIRSKANSYATAYAASVKGRFTISRDDSKNTAYLQMNSLKTEDTAVYYCTR

SEQ ID NO: 39758 - protein, 83 aa, Homo sapiens
  Payload ID: 8021
  Gene Symbol: IGHV3-73
  Gene Name: immunoglobulin heavy variable 3-73
  ENSP ID: ENSP00000480695
SLRLSCAASGFTFSSYWMHWVRQAPGKGLEWVGRIRSKANSYATAYAASVKGRFTISRDDSKNTAYLQMNSLKTEDTAVYYCT

SEQ ID NO: 39759 - protein, 119 aa, Homo sapiens; identical to SEQ ID NO: 39757
  Payload ID: 8021
  Gene Symbol: IGHV3-73
  Gene Name: immunoglobulin heavy variable 3-73
  ENSP ID: ENSP00000488432

SEQ ID NO: 39760 - protein, 117 aa, Homo sapiens
  Payload ID: 8022
  Gene Symbol: IGHV3-74
  Gene Name: immunoglobulin heavy variable 3-74
  ENSP ID: ENSP00000394447
MEFGLSWVFLVAILKGVQCEVQLVESGGGLVQPGGSLRLSCAASGFTFSSYWMHWVRQAPGKGLVWVSRINSDGSSTSYADSVKGRFTISRDNAKNTLYLQMNSLRAEDTAVYYCAR

SEQ ID NO: 39761 - protein, 117 aa, Homo sapiens; identical to SEQ ID NO: 39760
  Payload ID: 8022
  Gene Symbol: IGHV3-74
  Gene Name: immunoglobulin heavy variable 3-74
  ENSP ID: ENSP00000488600

SEQ ID NO: 39762 - protein, 117 aa, Homo sapiens
  Payload ID: 8023
  Gene Symbol: IGHV4OR15-8
  Gene Name: immunoglobulin heavy variable 4/OR15-8 (non-functional)
  ENSP ID: ENSP00000473987
MKHLWFFLLLVAAPRWVLSQVQLQESGPGLVKPSETLSLTCVVSGGSISSSNWWSWVRQPPGKGLEWIGEIYHSGSPNYNPSLKSRVTISVDKSKNQFSLKLSSVTAADRAVYYCAR

SEQ ID NO: 39763 - protein, 117 aa, Homo sapiens
  Payload ID: 8024
  Gene Symbol: IGHV4-28
  Gene Name: immunoglobulin heavy variable 4-28
  ENSP ID: ENSP00000375021
MKHLWFFLLLVAAPRWVLSQVQLQESGPGLVKPSDTLSLTCAVSGYSISSSNWWGWIRQPPGKGLEWIGYIYYSGSTYYNPSLKSRVTMSVDTSKNQFSLKLSSVTAVDTAVYYCAR

SEQ ID NO: 39764 - protein, 117 aa, Homo sapiens; identical to SEQ ID NO: 39763
  Payload ID: 8024
  Gene Symbol: IGHV4-28
  Gene Name: immunoglobulin heavy variable 4-28
  ENSP ID: ENSP00000488402

SEQ ID NO: 39765 - protein, 118 aa, Homo sapiens
  Payload ID: 8025
  Gene Symbol: IGHV4-31
  Gene Name: immunoglobulin heavy variable 4-31
  ENSP ID: ENSP00000395656
MKHLWFFLLLVAAPRWVLSQLQLQESGSGLVKPSQTLSLTCAVSGGSISSGGYSWSWIRQPPGKGLEWIGYIYHSGSTYYNPSLKSRVTISVDRSKNQFSLKLSSVTAADTAVYYCAR

SEQ ID NO: 39766 - protein, 118 aa, Homo sapiens; identical to SEQ ID NO: 39765
  Payload ID: 8025
  Gene Symbol: IGHV4-31
  Gene Name: immunoglobulin heavy variable 4-31
  ENSP ID: ENSP00000487658

SEQ ID NO: 39767 - protein, 123 aa, Homo sapiens
  Payload ID: 8026
  Gene Symbol: IGHV4-34
  Gene Name: immunoglobulin heavy variable 4-34
  ENSP ID: ENSP00000375025
MDLLHKNMKHLWFFLLLVAAPRWVLSQVQLQQWGAGLLKPSETLSLTCAVYGGSFSGYYWSWIRQPPGKGLEWIGEINHSGSTNYNPSLKSRVTISVDTSKNQFSLKLSSVTAADTAVYYCAR

SEQ ID NO: 39768 - protein, 123 aa, Homo sapiens; identical to SEQ ID NO: 39767
  Payload ID: 8026
  Gene Symbol: IGHV4-34
  Gene Name: immunoglobulin heavy variable 4-34
  ENSP ID: ENSP00000482820

SEQ ID NO: 39769 - protein, 125 aa, Homo sapiens
  Payload ID: 8027
  Gene Symbol: IGHV4-39
  Gene Name: immunoglobulin heavy variable 4-39
  ENSP ID: ENSP00000375028
MDLMCKKMKHLWFFLLLVAAPRWVLSQLQLQESGPGLVKPSETLSLTCTVSGGSISSSSYYWGWIRQPPGKGLEWIGSIYYSGSTYYNPSLKSRVTISVDTSKNQFSLKLSSVTAADTAVYYCAR

SEQ ID NO: 39770 - protein, 125 aa, Homo sapiens; identical to SEQ ID NO: 39769
  Payload ID: 8027
  Gene Symbol: IGHV4-39
  Gene Name: immunoglobulin heavy variable 4-39
  ENSP ID: ENSP00000488798

SEQ ID NO: 39771 - protein, 117 aa, Homo sapiens
  Payload ID: 8028
  Gene Symbol: IGHV4-4
  Gene Name: immunoglobulin heavy variable 4-4
  ENSP ID: ENSP00000410711
MKHLWFFLLLVAAPRWVLSQVQLQESGPGLVKPSGTLSLTCAVSGGSISSSNWWSWVRQPPGKGLEWIGEIYHSGSTNYNPSLKSRVTISVDKSKNQFSLKLSSVTAADTAVYYCAR

SEQ ID NO: 39772 - protein, 117 aa, Homo sapiens; identical to SEQ ID NO: 39771
  Payload ID: 8028
  Gene Symbol: IGHV4-4
  Gene Name: immunoglobulin heavy variable 4-4
  ENSP ID: ENSP00000487977

SEQ ID NO: 39773 - protein, 116 aa, Homo sapiens
  Payload ID: 8029
  Gene Symbol: IGHV4-59
  Gene Name: immunoglobulin heavy variable 4-59
  ENSP ID: ENSP00000375038
MKHLWFFLLLVAAPRWVLSQVQLQESGPGLVKPSETLSLTCTVSGGSISSYYWSWIRQPPGKGLEWIGYIYYSGSTNYNPSLKSRVTISVDTSKNQFSLKLSSVTAADTAVYYCAR

SEQ ID NO: 39774 - protein, 116 aa, Homo sapiens; identical to SEQ ID NO: 39773
  Payload ID: 8029
  Gene Symbol: IGHV4-59
  Gene Name: immunoglobulin heavy variable 4-59
  ENSP ID: ENSP00000484250

SEQ ID NO: 39775 - protein, 118 aa, Homo sapiens
  Payload ID: 8030
  Gene Symbol: IGHV4-61
  Gene Name: immunoglobulin heavy variable 4-61
  ENSP ID: ENSP00000375039
MKHLWFFLLLVAAPRWVLSQVQLQESGPGLVKPSETLSLTCTVSGGSVSSGSYYWSWIRQPPGKGLEWIGYIYYSGSTNYNPSLKSRVTISVDTSKNQFSLKLSSVTAADTAVYYCAR

SEQ ID NO: 39776 - protein, 118 aa, Homo sapiens; identical to SEQ ID NO: 39775
  Payload ID: 8030
  Gene Symbol: IGHV4-61
  Gene Name: immunoglobulin heavy variable 4-61
  ENSP ID: ENSP00000487694

SEQ ID NO: 39777 - protein, 117 aa, Homo sapiens
  Payload ID: 8031
  Gene Symbol: IGHV5-51
  Gene Name: immunoglobulin heavy variable 5-51
  ENSP ID: ENSP00000375035
MGSTAILALLLAVLQGVCAEVQLVQSGAEVKKPGESLKISCKGSGYSFTSYWIGWVRQMPGKGLEWMGIIYPGDSDTRYSPSFQGQVTISADKSISTAYLQWSSLKASDTAMYYCAR

SEQ ID NO: 39778 - protein, 117 aa, Homo sapiens; identical to SEQ ID NO: 39777
  Payload ID: 8031
  Gene Symbol: IGHV5-51
  Gene Name: immunoglobulin heavy variable 5-51
  ENSP ID: ENSP00000483207

SEQ ID NO: 39779 - protein, 121 aa, Homo sapiens
  Payload ID: 8032
  Gene Symbol: IGHV6-1
  Gene Name: immunoglobulin heavy variable 6-1
  ENSP ID: ENSP00000375002
MSVSFLIFLPVLGLPWGVLSQVQLQQSGPGLVKPSQTLSLTCAISGDSVSSNSAAWNWIRQSPSRGLEWLGRTYYRSKWYNDYAVSVKSRITINPDTSKNQFSLQLNSVTPEDTAVYYCAR

SEQ ID NO: 39780 - protein, 121 aa, Homo sapiens; identical to SEQ ID NO: 39779
  Payload ID: 8032
  Gene Symbol: IGHV6-1
  Gene Name: immunoglobulin heavy variable 6-1
  ENSP ID: ENSP00000488134

SEQ ID NO: 39781 - protein, 117 aa, Homo sapiens
  Payload ID: 8033
  Gene Symbol: IGHV7-81
  Gene Name: immunoglobulin heavy variable 7-81 (non-functional)
  ENSP ID: ENSP00000375048
MDWTWSILFLVAAATGTYSQVQLVQSGHEVKQPGASVKVSCKASGYSFTTYGMNWVPQAPGQGLEWMGWFNTYTGNPTYAQGFTGRFVFSMDTSASTAYLQISSLKAEDMAMYYCAR

SEQ ID NO: 39782 - protein, 107 aa, Homo sapiens
  Payload ID: 8034
  Gene Symbol: IGKC
  Gene Name: immunoglobulin kappa constant
  ENSP ID: ENSP00000374777
  MOD_RES (1)..(1): Any amino acid
XTVAAPSVFIFPPSDEQLKSGTASVVCLLNNFYPREAKVQWKVDNALQSGNSQESVTEQDSKDSTYSLSSTLTLSKADYEKHKVYACEVTHQGLSSPVTKSFNRGEC

SEQ ID NO: 39783 - protein, 239 aa, Homo sapiens
  Payload ID: 8034
  Gene Symbol: IGKC
  Gene Name: immunoglobulin kappa constant
  ENSP ID: ENSP00000478196
VRLPAQLLGLLMLWVPGSSGDIVMTQHLLSLPIPLGEPASISCRSSQSLLHSDGNTYLDWYLQKPGQSPQLLIYTISNKFYGVPNKFSGSRSGTGFTLKFSKVEAEDVGVYCCEQGLQAPSIFGQGTKLEIKRTVAAPSVFIFPPSDEQLKSGTASVVCLLNNFYPREAKVQWKVDNALQSGNSQESVTEQDSKDSTYSLSSTLTLSKADYEKHKVYACEVTHQGLSSPVTKSFNRGEC

SEQ ID NO: 39784 - protein, 119 aa, Homo sapiens
  Payload ID: 8034
  Gene Symbol: IGKC
  Gene Name: immunoglobulin kappa constant
  ENSP ID: ENSP00000481923
LTFGGGTKVEIKRTVAAPSVFIFPPSDEQLKSGTASVVCLLNNFYPREAKVQWKVDNALQSGNSQESVTEQDSKDSTYSLSSTLTLSKADYEKHKVYACEVTHQGLSSPVTKSFNRGEC

SEQ ID NO: 39785 - protein, 119 aa, Homo sapiens; identical to SEQ ID NO: 39784
  Payload ID: 8034
  Gene Symbol: IGKC
  Gene Name: immunoglobulin kappa constant
  ENSP ID: ENSP00000482934

SEQ ID NO: 39786 - protein, 107 aa, Homo sapiens; identical to SEQ ID NO: 39782
  Payload ID: 8034
  Gene Symbol: IGKC
  Gene Name: immunoglobulin kappa constant
  ENSP ID: ENSP00000483856
  MOD_RES (1)..(1): Any amino acid

SEQ ID NO: 39787 - protein, 239 aa, Homo sapiens; identical to SEQ ID NO: 39783
  Payload ID: 8034
  Gene Symbol: IGKC
  Gene Name: immunoglobulin kappa constant
  ENSP ID: ENSP00000484499

SEQ ID NO: 39788 - protein, 13 aa, Homo sapiens
  Payload ID: 8035
  Gene Symbol: IGKJ1
  Gene Name: immunoglobulin kappa joining 1
  ENSP ID: ENSP00000419111
  MOD_RES (1)..(1): Any amino acid
XWTFGQGTKVEIK

SEQ ID NO: 39789 - protein, 13 aa, Homo sapiens
  Payload ID: 8036
  Gene Symbol: IGKJ2
  Gene Name: immunoglobulin kappa joining 2
  ENSP ID: ENSP00000418768
  MOD_RES (1)..(1): Any amino acid
XCSFGQGTKLEIK

SEQ ID NO: 39790 - protein, 13 aa, Homo sapiens
  Payload ID: 8037
  Gene Symbol: IGKJ3
  Gene Name: immunoglobulin kappa joining 3
  ENSP ID: ENSP00000419518
  MOD_RES (1)..(1): Any amino acid
XFTFGPGTKVDIK

SEQ ID NO: 39791 - protein, 12 aa, Homo sapiens
  Payload ID: 8038
  Gene Symbol: IGKJ4
  Gene Name: immunoglobulin kappa joining 4
  ENSP ID: ENSP00000417097
LTFGGGTKVEIK

SEQ ID NO: 39792 - protein, 13 aa, Homo sapiens
  Payload ID: 8039
  Gene Symbol: IGKJ5
  Gene Name: immunoglobulin kappa joining 5
  ENSP ID: ENSP00000420166
  MOD_RES (1)..(1): Any amino acid
XITFGQGTRLEIK

SEQ ID NO: 39793 - protein, 117 aa, Homo sapiens
  Payload ID: 8040
  Gene Symbol: IGKV1OR2-108
  Gene Name: immunoglobulin kappa variable 1/OR2-108 (non-functional)
  ENSP ID: ENSP00000474395
MEMRVPAQLLGLLLLWLRGARCDIQVTQSPSSLSASVGDRVTITCRASQGISNGLSWYQQKPGQAPTLLIYAASSLQSGVPSRFSGSGSGTDFTLTISSLQPEDVATYYCLQDYTTP

SEQ ID NO: 39794 - protein, 117 aa, Homo sapiens
  Payload ID: 8041
  Gene Symbol: IGKV1-12
  Gene Name: immunoglobulin kappa variable 1-12
  ENSP ID: ENSP00000420576
MDMRVPAQLLGLLLLWFPGSRCDIQMTQSPSSVSASVGDRVTITCRASQGISSWLAWYQQKPGKAPKLLIYAASSLQSGVPSRFSGSGSGTDFTLTISSLQPEDFATYYCQQANSFP

SEQ ID NO: 39795 - protein, 185 aa, Homo sapiens
  Payload ID: 8041
  Gene Symbol: IGKV1-12
  Gene Name: immunoglobulin kappa variable 1-12
  ENSP ID: ENSP00000480537
MDMRVPAQLLGLLLLWFPGSRCDIQMTQSPSSVSASVGDRVTITCRASQGISSWLAWYQQKPGKAPKLLIYAASSLQSGVPSRFSGSGSGTDFTLTISSLQPEDFATYYCQQVESSHCTFGQGTKVEIKRTVAAPSVFIFPPSDEQLKSGTASVVCLLNNFYPREAKVQWKVDNALQSGNSQESV

SEQ ID NO: 39796 - protein, 117 aa, Homo sapiens; identical to SEQ ID NO: 39794
  Payload ID: 8041
  Gene Symbol: IGKV1-12
  Gene Name: immunoglobulin kappa variable 1-12
  ENSP ID: ENSP00000488148

SEQ ID NO: 39797 - protein, 185 aa, Homo sapiens; identical to SEQ ID NO: 39795
  Payload ID: 8041
  Gene Symbol: IGKV1-12
  Gene Name: immunoglobulin kappa variable 1-12
  ENSP ID: ENSP00000489568

SEQ ID NO: 39798 - protein, 117 aa, Homo sapiens
  Payload ID: 8042
  Gene Symbol: IGKV1-16
  Gene Name: immunoglobulin kappa variable 1-16
  ENSP ID: ENSP00000417344
MDMRVLAQLLGLLLLCFPGARCDIQMTQSPSSLSASVGDRVTITCRASQGISNYLAWFQQKPGKAPKSLIYAASSLQSGVPSKFSGSGSGTDFTLTISSLQPEDFATYYCQQYNSYP

SEQ ID NO: 39799 - protein, 117 aa, Homo sapiens; identical to SEQ ID NO: 39798
  Payload ID: 8042
  Gene Symbol: IGKV1-16
  Gene Name: immunoglobulin kappa variable 1-16
  ENSP ID: ENSP00000488377

SEQ ID NO: 39800 - protein, 117 aa, Homo sapiens
  Payload ID: 8043
  Gene Symbol: IGKV1-17
  Gene Name: immunoglobulin kappa variable 1-17
  ENSP ID: ENSP00000418357
MDMRVPAQLLGLLLLWFPGARCDIQMTQSPSSLSASVGDRVTITCRASQGIRNDLGWYQQKPGKAPKRLIYAASSLQSGVPSRFSGSGSGTEFTLTISSLQPEDFATYYCLQHNSYP

SEQ ID NO: 39801 - protein, 117 aa, Homo sapiens; identical to SEQ ID NO: 39800
  Payload ID: 8043
  Gene Symbol: IGKV1-17
  Gene Name: immunoglobulin kappa variable 1-17
  ENSP ID: ENSP00000488092

SEQ ID NO: 39802 - protein, 117 aa, Homo sapiens
  Payload ID: 8044
  Gene Symbol: IGKV1-27
  Gene Name: immunoglobulin kappa variable 1-27
  ENSP ID: ENSP00000418903
MDMRVPAQLLGLLLLWLPDTRCDIQMTQSPSSLSASVGDRVTITCRASQGISNYLAWYQQKPGKVPKLLIYAASTLQSGVPSRFSGSGSGTDFTLTISSLQPEDVATYYCQKYNSAP

SEQ ID NO: 39803 - protein, 117 aa, Homo sapiens; identical to SEQ ID NO: 39802
  Payload ID: 8044
  Gene Symbol: IGKV1-27
  Gene Name: immunoglobulin kappa variable 1-27
  ENSP ID: ENSP00000488456

SEQ ID NO: 39804 - protein, 117 aa, Homo sapiens
  Payload ID: 8045
  Gene Symbol: IGKV1-33
  Gene Name: immunoglobulin kappa variable 1-33
  ENSP ID: ENSP00000420020
MDMRVPAQLLGLLLLWLSGARCDIQMTQSPSSLSASVGDRVTITCQASQDISNYLNWYQQKPGKAPKLLIYDASNLETGVPSRFSGSGSGTDFTFTISSLQPEDIATYYCQQYDNLP

SEQ ID NO: 39805 - protein, 108 aa, Homo sapiens
  Payload ID: 8045
  Gene Symbol: IGKV1-33
  Gene Name: immunoglobulin kappa variable 1-33
  ENSP ID: ENSP00000479032
DIQMTQSPSSLSASVGDRVTITCQASQDISNYLNWYQQKPGKAPKLLIYDASNLETGVPSRFSGSGSGTDFTFTISSLQPEDIATYYCQQYDNLPPTVGKGHEQTLKR

SEQ ID NO: 39806 - protein, 117 aa, Homo sapiens; identical to SEQ ID NO: 39804
  Payload ID: 8045
  Gene Symbol: IGKV1-33
  Gene Name: immunoglobulin kappa variable 1-33
  ENSP ID: ENSP00000487732

SEQ ID NO: 39807 - protein, 108 aa, Homo sapiens; identical to SEQ ID NO: 39805
  Payload ID: 8045
  Gene Symbol: IGKV1-33
  Gene Name: immunoglobulin kappa variable 1-33
  ENSP ID: ENSP00000488818

SEQ ID NO: 39808 - protein, 117 aa, Homo sapiens
  Payload ID: 8046
  Gene Symbol: IGKV1-37
  Gene Name: immunoglobulin kappa variable 1-37 (non-functional)
  ENSP ID: ENSP00000417427
MDMRVPAQLLGLLLLWVPGARCDIQLTQSPSSLSASVGDRVTITCRVSQGISSYLNWYRQKPGKVPKLLIYSASNLQSGVPSRFSGSGSGTDFTLTISSLQPEDVATYYGQRTYNAP

SEQ ID NO: 39809 - protein, 117 aa, Homo sapiens; identical to SEQ ID NO: 39808
  Payload ID: 8046
  Gene Symbol: IGKV1-37
  Gene Name: immunoglobulin kappa variable 1-37 (non-functional)
  ENSP ID: ENSP00000487793

SEQ ID NO: 39810 - protein, 117 aa, Homo sapiens
  Payload ID: 8047
  Gene Symbol: IGKV1-39
  Gene Name: immunoglobulin kappa variable 1-39 (gene/pseudogene)
  ENSP ID: ENSP00000419058
MDMRVPAQLLGLLLLWLRGARCDIQMTQSPSSLSASVGDRVTITCRASQSISSYLNWYQQKPGKAPKLLIYAASSLQSGVPSRFSGSGSGTDFTLTISSLQPEDFATYYCQQSYSTP

SEQ ID NO: 39811 - protein, 117 aa, Homo sapiens; identical to SEQ ID NO: 39810
  Payload ID: 8047
  Gene Symbol: IGKV1-39
  Gene Name: immunoglobulin kappa variable 1-39 (gene/pseudogene)
  ENSP ID: ENSP00000488680

SEQ ID NO: 39812 - protein, 117 aa, Homo sapiens
  Payload ID: 8048
  Gene Symbol: IGKV1-5
  Gene Name: immunoglobulin kappa variable 1-5
  Uniprot ID: P01602
  ENSP ID: ENSP00000420436
MDMRVPAQLLGLLLLWLPGAKCDIQMTQSPSTLSASVGDRVTITCRASQSISSWLAWYQQKPGKAPKLLIYKASSLESGVPSRFSGSGSGTEFTLTISSLQPDDFATYYCQQYNSYS

SEQ ID NO: 39813 - protein, 117 aa, Homo sapiens; identical to SEQ ID NO: 39812
  Payload ID: 8048
  Gene Symbol: IGKV1-5
  Gene Name: immunoglobulin kappa variable 1-5
  Uniprot ID: P01602
  ENSP ID: ENSP00000488639

SEQ ID NO: 39814 - protein, 117 aa, Homo sapiens
  Payload ID: 8049
  Gene Symbol: IGKV1-6
  Gene Name: immunoglobulin kappa variable 1-6
  ENSP ID: ENSP00000420361
MDMRVPAQLLGLLLLWLPGARCAIQMTQSPSSLSASVGDRVTITCRASQGIRNDLGWYQQKPGKAPKLLIYAASSLQSGVPSRFSGSGSGTDFTLTISSLQPEDFATYYCLQDYNYP

SEQ ID NO: 39815 - protein, 117 aa, Homo sapiens; identical to SEQ ID NO: 39814
  Payload ID: 8049
  Gene Symbol: IGKV1-6
  Gene Name: immunoglobulin kappa variable 1-6
  ENSP ID: ENSP00000488804

SEQ ID NO: 39816 - protein, 115 aa, Homo sapiens
  Payload ID: 8050
  Gene Symbol: IGKV1-8
  Gene Name: immunoglobulin kappa variable 1-8
  ENSP ID: ENSP00000419211
MRVPAQLLGLLLLWLPGARCAIRMTQSPSSFSASTGDRVTITCRASQGISSYLAWYQQKPGKAPKLLIYAASTLQSGVPSRFSGSGSGTDFTLTISCLQSEDFATYYCQQYYSYP

SEQ ID NO: 39817 - protein, 115 aa, Homo sapiens; identical to SEQ ID NO: 39816
  Payload ID: 8050
  Gene Symbol: IGKV1-8
  Gene Name: immunoglobulin kappa variable 1-8
  ENSP ID: ENSP00000488413

SEQ ID NO: 39818 - protein, 183 aa, Homo sapiens
  Payload ID: 8050
  Gene Symbol: IGKV1-8
  Gene Name: immunoglobulin kappa variable 1-8
  ENSP ID: ENSP00000488963
MRVPAQLLGLLLLWLPGARCDIQLTQSPSFLSASVGDRVTITCRASQGISSYLAWYQQKPGKAPKLLIYAASTLQSGVPSRFSGSGSGTDFTLTISCLQSEDFATYYCQQYYSYPPTFGQGTKLEIKRTVAAPSVFIFPPSDEQLKSGTASVVCLLNNFYPREAKVQWKVDNALQSGNSQESV

SEQ ID NO: 39819 - protein, 183 aa, Homo sapiens; identical to SEQ ID NO: 39818
  Payload ID: 8050
  Gene Symbol: IGKV1-8
  Gene Name: immunoglobulin kappa variable 1-8
  ENSP ID: ENSP00000489500

SEQ ID NO: 39820 - protein, 117 aa, Homo sapiens
  Payload ID: 8051
  Gene Symbol: IGKV1-9
  Gene Name: immunoglobulin kappa variable 1-9
  ENSP ID: ENSP00000419598
MDMRVPAQLLGLLLLWLPGARCDIQLTQSPSFLSASVGDRVTITCRASQGISSYLAWYQQKPGKAPKLLIYAASTLQSGVPSRFSGSGSGTEFTLTISSLQPEDFATYYCQQLNSYP

SEQ ID NO: 39821 - protein, 117 aa, Homo sapiens; identical to SEQ ID NO: 39820
  Payload ID: 8051
  Gene Symbol: IGKV1-9
  Gene Name: immunoglobulin kappa variable 1-9
  ENSP ID: ENSP00000488384

SEQ ID NO: 39822 - protein, 117 aa, Homo sapiens
  Payload ID: 8052
  Gene Symbol: IGKV1D-12
  Gene Name: immunoglobulin kappa variable 1D-12
  ENSP ID: ENSP00000482464
MDMMVPAQLLGLLLLWFPGSRCDIQMTQSPSSVSASVGDRVTITCRASQGISSWLAWYQQKPGKAPKLLIYAASSLQSGVPSRFSGSGSGTDFTLTISSLQPEDFATYYCQQANSFP

SEQ ID NO: 39823 - protein, 117 aa, Homo sapiens
  Payload ID: 8053
  Gene Symbol: IGKV1D-13
  Gene Name: immunoglobulin kappa variable 1D-13
  ENSP ID: ENSP00000480959
MDMRVPAQLLGLLLLWLPGARCAIQLTQSPSSLSASVGDRVTITCRASQGISSALAWYQQKPGKAPKLLIYDASSLESGVPSRFSGSGSGTDFTLTISSLQPEDFATYYCQQFNSYP

SEQ ID NO: 39824 - protein, 117 aa, Homo sapiens
  Payload ID: 8054
  Gene Symbol: IGKV1D-16
  Gene Name: immunoglobulin kappa variable 1D-16
  Uniprot ID: P01601
  ENSP ID: ENSP00000418200
MDMRVLAQLLGLLLLCFPGARCDIQMTQSPSSLSASVGDRVTITCRASQGISSWLAWYQQKPEKAPKSLIYAASSLQSGVPSRFSGSGSGTDFTLTISSLQPEDFATYYCQQYNSYP

SEQ ID NO: 39825 - protein, 117 aa, Homo sapiens
  Payload ID: 8055
  Gene Symbol: IGKV1D-17
  Gene Name: immunoglobulin kappa variable 1D-17
  ENSP ID: ENSP00000418292
MDMRVPAQLLGLLLLWFPGARCNIQMTQSPSAMSASVGDRVTITCRARQGISNYLAWFQQKPGKVPKHLIYAASSLQSGVPSRFSGSGSGTEFTLTISSLQPEDFATYYCLQHNSYP

SEQ ID NO: 39826 - protein, 117 aa, Homo sapiens; identical to SEQ ID NO: 39804
  Payload ID: 8056
  Gene Symbol: IGKV1D-33
  Gene Name: immunoglobulin kappa variable 1D-33
  ENSP ID: ENSP00000374800

SEQ ID NO: 39827 - protein, 108 aa, Homo sapiens; identical to SEQ ID NO: 39805
  Payload ID: 8056
  Gene Symbol: IGKV1D-33
  Gene Name: immunoglobulin kappa variable 1D-33
  ENSP ID: ENSP00000482678

SEQ ID NO: 39828 - protein, 117 aa, Homo sapiens; identical to SEQ ID NO: 39808
  Payload ID: 8057
  Gene Symbol: IGKV1D-37
  Gene Name: immunoglobulin kappa variable 1D-37 (non-functional)
  ENSP ID: ENSP00000425962

SEQ ID NO: 39829 - protein, 117 aa, Homo sapiens; identical to SEQ ID NO: 39810
  Payload ID: 8058
  Gene Symbol: IGKV1D-39
  Gene Name: immunoglobulin kappa variable 1D-39
  ENSP ID: ENSP00000406382

SEQ ID NO: 39830 - protein, 117 aa, Homo sapiens
  Payload ID: 8059
  Gene Symbol: IGKV1D-42
  Gene Name: immunoglobulin kappa variable 1D-42 (non-functional)
  ENSP ID: ENSP00000374813
MDMRVPAQLLGLLLLWLPGVRFDIQMTQSPSFLSASVGDRVSIICWASEGISSNLAWYLQKPGKSPKLFLYDAKDLHPGVSSRFSGRGSGTDFTLTIISLKPEDFAAYYCKQDFSYP

SEQ ID NO: 39831 - protein, 117 aa, Homo sapiens
  Payload ID: 8060
  Gene Symbol: IGKV1D-43
  Gene Name: immunoglobulin kappa variable 1D-43
  ENSP ID: ENSP00000417961
MDMRVPAQRLGLLLLWFPGARCAIRMTQSPFSLSASVGDRVTITCWASQGISSYLAWYQQKPAKAPKLFIYYASSLQSGVPSRFSGSGSGTDYTLTISSLQPEDFATYYCQQYYSTP

SEQ ID NO: 39832 - protein, 117 aa, Homo sapiens
  Payload ID: 8061
  Gene Symbol: IGKV1D-8
  Gene Name: immunoglobulin kappa variable 1D-8
  ENSP ID: ENSP00000420285
MDMRVPAQLLGLLLLWLPGARCAIWMTQSPSLLSASTGDRVTISCRMSQGISSYLAWYQQKPGKAPELLIYAASTLQSGVPSRFSGSGSGTDFTLTISCLQSEDFATYYCQQYYSFP

SEQ ID NO: 39833 - protein, 117 aa, Homo sapiens
  Payload ID: 8061
  Gene Symbol: IGKV1D-8
  Gene Name: immunoglobulin kappa variable 1D-8
  ENSP ID: ENSP00000485892
MDMRVPAQLLGLLLLWLPGARCVIWMTQSPSLLSASTGDRVTISCRMSQGISSYLAWYQQKPGKAPELLIYAASTLQSGVPSRFSGSGSGTDFTLTISCLQSEDFATYYCQQYYSFP

SEQ ID NO: 39834 - protein, 120 aa, Homo sapiens
  Payload ID: 8062
  Gene Symbol: IGKV2-24
  Gene Name: immunoglobulin kappa variable 2-24
  ENSP ID: ENSP00000419300
MRLLAQLLGLLMLWVPGSSGDIVMTQTPLSSPVTLGQPASISCRSSQSLVHSDGNTYLSWLQQRPGQPPRLLIYKISNRFSGVPDRFSGSGAGTDFTLKISRVEAEDVGVYYCMQATQFP

SEQ ID NO: 39835 - protein, 120 aa, Homo sapiens; identical to SEQ ID NO: 39834
  Payload ID: 8062
  Gene Symbol: IGKV2-24
  Gene Name: immunoglobulin kappa variable 2-24
  ENSP ID: ENSP00000488087

SEQ ID NO: 39836 - protein, 120 aa, Homo sapiens
  Payload ID: 8063
  Gene Symbol: IGKV2-28
  Gene Name: immunoglobulin kappa variable 2-28
  ENSP ID: ENSP00000419353
MRLPAQLLGLLMLWVSGSSGDIVMTQSPLSLPVTPGEPASISCRSSQSLLHSNGYNYLDWYLQKPGQSPQLLIYLGSNRASGVPDRFSGSGSGTDFTLKISRVEAEDVGVYYCMQALQTP

SEQ ID NO: 39837 - protein, 120 aa, Homo sapiens; identical to SEQ ID NO: 39836
  Payload ID: 8063
  Gene Symbol: IGKV2-28
  Gene Name: immunoglobulin kappa variable 2-28
  ENSP ID: ENSP00000487690

SEQ ID NO: 39838 - protein, 120 aa, Homo sapiens
  Payload ID: 8064
  Gene Symbol: IGKV2-30
  Gene Name: immunoglobulin kappa variable 2-30
  ENSP ID: ENSP00000418138
MRLPAQLLGLLMLWVPGSSGDVVMTQSPLSLPVTLGQPASISCRSSQSLVYSDGNTYLNWFQQRPGQSPRRLIYKVSNRDSGVPDRFSGSGSGTDFTLKISRVEAEDVGVYYCMQGTHWP

SEQ ID NO: 39839 - protein, 120 aa, Homo sapiens; identical to SEQ ID NO: 39838
  Payload ID: 8064
  Gene Symbol: IGKV2-30
  Gene Name: immunoglobulin kappa variable 2-30
  ENSP ID: ENSP00000488685

SEQ ID NO: 39840 - protein, 105 aa, Homo sapiens
  Payload ID: 8065
  Gene Symbol: IGKV2-40
  Gene Name: immunoglobulin kappa variable 2-40
  ENSP ID: ENSP00000480029
  MOD_RES (1)..(1): Any amino acid
XSSEDIVMTQTPLSLPVTPGEPASISCRSSQSLLDSDDGNTYLDWYLQKPGQSPQLLIYTLSYRASGVPDRFSGSGSGTDFTLKISRVEAEDVGVYYCMQRIEFP

SEQ ID NO: 39841 - protein, 104 aa, Homo sapiens
  Payload ID: 8065
  Gene Symbol: IGKV2-40
  Gene Name: immunoglobulin kappa variable 2-40
  ENSP ID: ENSP00000483585
EDIVMTQTPLSLPVTPGEPASISCRSSQSLLDSDDGNTYLDWYLQKPGQSPQLLIYTLSYRASGVPDRFSGSGSGTDFTLKISRVEAEDVGVYYCMQRIEFPST

SEQ ID NO: 39842 - protein, 105 aa, Homo sapiens; identical to SEQ ID NO: 39840
  Payload ID: 8065
  Gene Symbol: IGKV2-40
  Gene Name: immunoglobulin kappa variable 2-40
  ENSP ID: ENSP00000487928
  MOD_RES (1)..(1): Any amino acid

SEQ ID NO: 39843 - protein, 104 aa, Homo sapiens; identical to SEQ ID NO: 39841
  Payload ID: 8065
  Gene Symbol: IGKV2-40
  Gene Name: immunoglobulin kappa variable 2-40
  ENSP ID: ENSP00000488763

SEQ ID NO: 39844 - protein, 120 aa, Homo sapiens
  Payload ID: 8066
  Gene Symbol: IGKV2D-24
  Gene Name: immunoglobulin kappa variable 2D-24 (non-functional)
  ENSP ID: ENSP00000417136
MRLLAQLLGLLMLWVPGSSGDIVMTQTPLSSPVTLGQPASISFRSSQSLVHSDGNTYLSWLQQRPGQPPRLLIYKVSNRFSGVPDRFSGSGAGTDFTLKISRVEAEDVGVYYCTQATQFP

SEQ ID NO: 39845 - protein, 120 aa, Homo sapiens
  Payload ID: 8067
  Gene Symbol: IGKV2D-26
  Gene Name: immunoglobulin kappa variable 2D-26
  ENSP ID: ENSP00000374803
MRLPAQLLGLLMLWVPGSSAEIVMTQTPLSLSITPGEQASMSCRSSQSLLHSDGYTYLYWFLQKARPVSTLLIYEVSNRFSGVPDRFSGSGSGTDFTLKISRVEAEDFGVYYCMQDAQDP

SEQ ID NO: 39846 - protein, 120 aa, Homo sapiens; identical to SEQ ID NO: 39836
  Payload ID: 8068
  Gene Symbol: IGKV2D-28
  Gene Name: immunoglobulin kappa variable 2D-28
  ENSP ID: ENSP00000393492

SEQ ID NO: 39847 - protein, 102 aa, Homo sapiens
  Payload ID: 8068
  Gene Symbol: IGKV2D-28
  Gene Name: immunoglobulin kappa variable 2D-28
  ENSP ID: ENSP00000452662
DIVMTQSPLSLPVTPGEPASISCRSSQSLLHSNGYNYLDWYLQKPGQSPQLLIYLGSNRASGVPDRFSGSGSGTDFTLKISRVEAEDVGVYYCMQALQTPPT

SEQ ID NO: 39848 - protein, 120 aa, Homo sapiens
  Payload ID: 8069
  Gene Symbol: IGKV2D-29
  Gene Name: immunoglobulin kappa variable 2D-29
  ENSP ID: ENSP00000417637
MRLPAQLLGLLMLWIPGSSADIVMTQTPLSLSVTPGQPASISCKSSQSLLHSDGKTYLYWYLQKPGQPPQLLIYEVSNRFSGVPDRFSGSGSGTDFTLKISRVEAEDVGVYYCMQSIQLP

SEQ ID NO: 39849 - protein, 102 aa, Homo sapiens
  Payload ID: 8069
  Gene Symbol: IGKV2D-29
  Gene Name: immunoglobulin kappa variable 2D-29
  ENSP ID: ENSP00000483567
DIVMTQTPLSLSVTPGQPASISCKSSQSLLHSDGKTYLYWYLQKPGQPPQLLIYEVSNRFSGVPDRFSGSGSGTDFTLKISRVEAEDVGVYYCMQSIQLPPT

SEQ ID NO: 39850 - protein, 120 aa, Homo sapiens
  Payload ID: 8070
  Gene Symbol: IGKV2D-30
  Gene Name: immunoglobulin kappa variable 2D-30
  ENSP ID: ENSP00000418948
MRLPAQLLGLLMLWVPGSSGDVVMTQSPLSLPVTLGQPASISCRSSQSLVYSDGNTYLNWFQQRPGQSPRRLIYKVSNWDSGVPDRFSGSGSGTDFTLKISRVEAEDVGVYYCMQGTHWP

SEQ ID NO: 39851 - protein, 110 aa, Homo sapiens
  Payload ID: 8071
  Gene Symbol: IGKV2D-40
  Gene Name: immunoglobulin kappa variable 2D-40
  ENSP ID: ENSP00000409413
MLWVPGSSEDIVMTQTPLSLPVTPGEPASISCRSSQSLLDSDDGNTYLDWYLQKPGQSPQLLIYTLSYRASGVPDRFSGSGSGTDFTLKISRVEAEDVGVYYCMQRIEFP

SEQ ID NO: 39852 - protein, 104 aa, Homo sapiens; identical to SEQ ID NO: 39841
  Payload ID: 8071
  Gene Symbol: IGKV2D-40
  Gene Name: immunoglobulin kappa variable 2D-40
  ENSP ID: ENSP00000452747

SEQ ID NO: 39853 - protein, 116 aa, Homo sapiens
  Payload ID: 8072
  Gene Symbol: IGKV3OR2-268
  Gene Name: immunoglobulin kappa variable 3/OR2-268 (non-functional)
  ENSP ID: ENSP00000474297
MEAPAQLLFLLLLWLPDTTGEIVMTQSPATLSLSPGERATLSCRASQSVSSSYLSWYQQKPGQAPRLLIYGASTRATGIPARFSGSGSGTDFTLTISSLQPEDFAVYYCQQDYNLP

SEQ ID NO: 39854 - protein, 115 aa, Homo sapiens
  Payload ID: 8073
  Gene Symbol: IGKV3-11
  Gene Name: immunoglobulin kappa variable 3-11
  Uniprot ID: P04433
  ENSP ID: ENSP00000420118
MEAPAQLLFLLLLWLPDTTGEIVLTQSPATLSLSPGERATLSCRASQSVSSYLAWYQQKPGQAPRLLIYDASNRATGIPARFSGSGSGTDFTLTISSLEPEDFAVYYCQQRSNWP

SEQ ID NO: 39855 - protein, 115 aa, Homo sapiens; identical to SEQ ID NO: 39854
  Payload ID: 8073
  Gene Symbol: IGKV3-11
  Gene Name: immunoglobulin kappa variable 3-11
  Uniprot ID: P04433
  ENSP ID: ENSP00000487987

SEQ ID NO: 39856 - protein, 115 aa, Homo sapiens
  Payload ID: 8074
  Gene Symbol: IGKV3-15
  Gene Name: immunoglobulin kappa variable 3-15
  ENSP ID: ENSP00000374787
MEAPAQLLFLLLLWLPDTTGEIVMTQSPATLSVSPGERATLSCRASQSVSSNLAWYQQKPGQAPRLLIYGASTRATGIPARFSGSGSGTEFTLTISSLQSEDFAVYYCQQYNNWP

SEQ ID NO: 39857 - protein, 115 aa, Homo sapiens; identical to SEQ ID NO: 39856
  Payload ID: 8074
  Gene Symbol: IGKV3-15
  Gene Name: immunoglobulin kappa variable 3-15
  ENSP ID: ENSP00000488086

SEQ ID NO: 39858 - protein, 116 aa, Homo sapiens
  Payload ID: 8075
  Gene Symbol: IGKV3-20
  Gene Name: immunoglobulin kappa variable 3-20
  ENSP ID: ENSP00000418649
METPAQLLFLLLLWLPDTTGEIVLTQSPGTLSLSPGERATLSCRASQSVSSSYLAWYQQKPGQAPRLLIYGASSRATGIPDRFSGSGSGTDFTLTISRLEPEDFAVYYCQQYGSSP

SEQ ID NO: 39859 - protein, 116 aa, Homo sapiens; identical to SEQ ID NO: 39858
  Payload ID: 8075
  Gene Symbol: IGKV3-20
  Gene Name: immunoglobulin kappa variable 3-20
  ENSP ID: ENSP00000487628

SEQ ID NO: 39860 - protein, 116 aa, Homo sapiens
  Payload ID: 8076
  Gene Symbol: IGKV3-7
  Gene Name: immunoglobulin kappa variable 3-7 (non-functional)
  ENSP ID: ENSP00000374782
MEAPAQLLFLLLLWLPDTTREIVMTQSPPTLSLSPGERVTLSCRASQSVSSSYLTWYQQKPGQAPRLLIYGASTRATSIPARFSGSGSGTDFTLTISSLQPEDFAVYYCQQDYNLP

SEQ ID NO: 39861 - protein, 116 aa, Homo sapiens; identical to SEQ ID NO: 39860
  Payload ID: 8076
  Gene Symbol: IGKV3-7
  Gene Name: immunoglobulin kappa variable 3-7 (non-functional)
  ENSP ID: ENSP00000487957

SEQ ID NO: 39862 - protein, 115 aa, Homo sapiens
  Payload ID: 8077
  Gene Symbol: IGKV3D-11
  Gene Name: immunoglobulin kappa variable 3D-11
  ENSP ID: ENSP00000374812
MEAPAQLLFLLLLWLPDTTGEIVLTQSPATLSLSPGERATLSCRASQSVSSYLAWYQQKPGQAPRLLIYDASNRATGIPARFSGSGPGTDFTLTISSLEPEDFAVYYCQQRSNWH

SEQ ID NO: 39863 - protein, 108 aa, Homo sapiens
  Payload ID: 8077
  Gene Symbol: IGKV3D-11
  Gene Name: immunoglobulin kappa variable 3D-11
  ENSP ID: ENSP00000478879
QLLFLLLLWLPDTTGEIVLTQSPATLSLSPGERATLSCRASQSVSSYLAWYQQKPGQAPRLLIYDASNRATGIPARFSGSGPGTDFTLTISSLEPEDFAVYYCQQRSN

SEQ ID NO: 39864 - protein, 115 aa, Homo sapiens
  Payload ID: 8078
  Gene Symbol: IGKV3D-15
  Gene Name: immunoglobulin kappa variable 3D-15 (gene/pseudogene)
  ENSP ID: ENSP00000403672
MEAPAQLLFLLLLWLPDTTGEIVMTQSPATLSVSPGERATLSCRASQSVSSNLAWYQQKPGQAPRLLIYGASIRATGIPARFSGSGSGTEFTLTISILQSEDFAVYYCQQYNNWP

SEQ ID NO: 39865 - protein, 116 aa, Homo sapiens
  Payload ID: 8079
  Gene Symbol: IGKV3D-20
  Gene Name: immunoglobulin kappa variable 3D-20
  ENSP ID: ENSP00000374805
METPAQLLFLLLLWLPDTTGEIVLTQSPATLSLSPGERATLSCGASQSVSSSYLAWYQQKPGLAPRLLIYDASSRATGIPDRFSGSGSGTDFTLTISRLEPEDFAVYYCQQYGSSP

SEQ ID NO: 39866 - protein, 119 aa, Homo sapiens
  Payload ID: 8080
  Gene Symbol: IGKV3D-7
  Gene Name: immunoglobulin kappa variable 3D-7
  ENSP ID: ENSP00000402914
MEPWKPQHSFFFLLLLWLPDTTGEIVMTQSPATLSLSPGERATLSCRASQSVSSSYLSWYQQKPGQAPRLLIYGASTRATGIPARFSGSGSGTDFTLTISSLQPEDFAVYYCQQDYNLP

SEQ ID NO: 39867 - protein, 111 aa, Homo sapiens
  Payload ID: 8080
  Gene Symbol: IGKV3D-7
  Gene Name: immunoglobulin kappa variable 3D-7
  ENSP ID: ENSP00000480023
QLLFLLLLWLPDTTGEIVMTQSPATLSLSPGERATLSCRASQSVSSSYLSWYQQKPGQAPRLLIYGASTRATGIPARFSGSGSGTDFTLTISSLQPEDFAVYYCQQDYNLP

SEQ ID NO: 39868 - protein, 119 aa, Homo sapiens; identical to SEQ ID NO: 39866
  Payload ID: 8080
  Gene Symbol: IGKV3D-7
  Gene Name: immunoglobulin kappa variable 3D-7
  ENSP ID: ENSP00000487088

SEQ ID NO: 39869 - protein, 121 aa, Homo sapiens
  Payload ID: 8081
  Gene Symbol: IGKV4-1
  Gene Name: immunoglobulin kappa variable 4-1
  Uniprot ID: P06312
  ENSP ID: ENSP00000374778
MVLQTQVFISLLLWISGAYGDIVMTQSPDSLAVSLGERATINCKSSQSVLYSSNNKNYLAWYQQKPGQPPKLLIYWASTRESGVPDRFSGSGSGTDFTLTISSLQAEDVAVYYCQQYYSTP

SEQ ID NO: 39870 - protein, 115 aa, Homo sapiens
  Payload ID: 8082
  Gene Symbol: IGKV5-2
  Gene Name: immunoglobulin kappa variable 5-2
  Uniprot ID: P06315
  ENSP ID: ENSP00000374779
MGSQVHLLSFLLLWISDTRAETTLTQSPAFMSATPGDKVNISCKASQDIDDDMNWYQQKPGEAAIFIIQEATTLVPGIPPRFSGSGYGTDFTLTINNIESEDAAYYFCLQHDNFP

SEQ ID NO: 39871 - protein, 115 aa, Homo sapiens; identical to SEQ ID NO: 39870
  Payload ID: 8082
  Gene Symbol: IGKV5-2
  Gene Name: immunoglobulin kappa variable 5-2
  Uniprot ID: P06315
  ENSP ID: ENSP00000487796

SEQ ID NO: 39872 - protein, 114 aa, Homo sapiens
  Payload ID: 8083
  Gene Symbol: IGKV6-21
  Gene Name: immunoglobulin kappa variable 6-21 (non-functional)
  ENSP ID: ENSP00000374791
MLPSQLIGFLLLWVPASRGEIVLTQSPDFQSVTPKEKVTITCRASQSIGSSLHWYQQKPDQSPKLLIKYASQSFSGVPSRFSGSGSGTDFTLTINSLEAEDAATYYCHQSSSLP

SEQ ID NO: 39873 - protein, 114 aa, Homo sapiens; identical to SEQ ID NO: 39872
  Payload ID: 8083
  Gene Symbol: IGKV6-21
  Gene Name: immunoglobulin kappa variable 6-21 (non-functional)
  ENSP ID: ENSP00000488349

SEQ ID NO: 39874 - protein, 114 aa, Homo sapiens
  Payload ID: 8084
  Gene Symbol: IGKV6D-21
  Gene Name: immunoglobulin kappa variable 6D-21 (non-functional)
  ENSP ID: ENSP00000413304
MSPSQLIGFLLLWVPASRGEIVLTQSPDFQSVTPKEKVTITCRASQSIGSSLHWYQQKPDQSPKLLIKYASQSISGVPSRFSGSGSGTDFTLTINSLEAEDAAAYYCHQSSSLP

SEQ ID NO: 39875 - protein, 115 aa, Homo sapiens
  Payload ID: 8085
  Gene Symbol: IGKV6D-41
  Gene Name: immunoglobulin kappa variable 6D-41 (non-functional)
  ENSP ID: ENSP00000374806
MVSPLQFLRLLLLWVPASRGDVVMTQSPAFLSVTPGEKVTITCQASEGIGNYLYWYQQKPDQAPKLLIKYASQSISGVPSRFSGSGSGTDFTFTISSLEAEDAATYYCQQGNKHP

SEQ ID NO: 39876 - protein, 106 aa, Homo sapiens
  Payload ID: 8086
  Gene Symbol: IGLC1
  Gene Name: immunoglobulin lambda constant 1 (Mcg marker)
  ENSP ID: ENSP00000374855
  MOD_RES (1)..(1): Any amino acid
XQPKANPTVTLFPPSSEELQANKATLVCLISDFYPGAVTVAWKADGSPVKAGVETTKPSKQSNNKYAASSYLSLTPEQWKSHRSYSCQVTHEGSTVEKTVAPTECS

SEQ ID NO: 39877 - protein, 106 aa, Homo sapiens
  Payload ID: 8087
  Gene Symbol: IGLC2
  Gene Name: immunoglobulin lambda constant 2 (Kern-Oz- marker)
  ENSP ID: ENSP00000374856
  MOD_RES (1)..(1): Any amino acid
XQPKAAPSVTLFPPSSEELQANKATLVCLISDFYPGAVTVAWKADSSPVKAGVETTTPSKQSNNKYAASSYLSLTPEQWKSHRSYSCQVTHEGSTVEKTVAPTECS

SEQ ID NO: 39878 - protein, 106 aa, Homo sapiens
  Payload ID: 8088
  Gene Symbol: IGLC3
  Gene Name: immunoglobulin lambda constant 3 (Kern-Oz+ marker)
  ENSP ID: ENSP00000374857
  MOD_RES (1)..(1): Any amino acid
XQPKAAPSVTLFPPSSEELQANKATLVCLISDFYPGAVTVAWKADSSPVKAGVETTTPSKQSNNKYAASSYLSLTPEQWKSHKSYSCQVTHEGSTVEKTVAPTECS

SEQ ID NO: 39879 - protein, 106 aa, Homo sapiens
  Payload ID: 8089
  Gene Symbol: IGLC7
  Gene Name: immunoglobulin lambda constant 7
  ENSP ID: ENSP00000374859
  MOD_RES (1)..(1): Any amino acid
XQPKAAPSVTLFPPSSEELQANKATLVCLVSDFNPGAVTVAWKADGSPVKVGVETTKPSKQSNNKYAASSYLSLTPEQWKSHRSYSCRVTHEGSTVEKTVAPAECS

SEQ ID NO: 39880 - protein, 42 aa, Homo sapiens
  Payload ID: 8090
  Gene Symbol: IGLJ1
  Gene Name: immunoglobulin lambda joining 1
  ENSP ID: ENSP00000417505
PSRLLLQPSPQRADPRCWPRGFWSEPQSLCYVFGTGTKVTVL

SEQ ID NO: 39881 - protein, 47 aa, Homo sapiens
  Payload ID: 8091
  Gene Symbol: IGLJ2
  Gene Name: immunoglobulin lambda joining 2
  ENSP ID: ENSP00000418274
MPPGPLAPASSFTAAVGAGAGASQGGFLYEPVSQCVVFGGGTKLTVL

SEQ ID NO: 39882 - protein, 50 aa, Homo sapiens
  Payload ID: 8092
  Gene Symbol: IGLJ3
  Gene Name: immunoglobulin lambda joining 3
  ENSP ID: ENSP00000419781
MSRCHQDHWSQLPPSQLQWGLGLGASQGGFLYEPVSQCWVFGGGTKLTVL

SEQ ID NO: 39883 - protein, 11 aa, Homo sapiens
  Payload ID: 8093
  Gene Symbol: IGLJ4
  Gene Name: immunoglobulin lambda joining 4 (non-functional)
  ENSP ID: ENSP00000419997
VFGGGTQLIIL

SEQ ID NO: 39884 - protein, 24 aa, Homo sapiens
  Payload ID: 8094
  Gene Symbol: IGLJ5
  Gene Name: immunoglobulin lambda joining 5 (non-functional)
  ENSP ID: ENSP00000418818
QRGFLYEPVSQHWVFGEGTELTVL

SEQ ID NO: 39885 - protein, 23 aa, Homo sapiens
  Payload ID: 8095
  Gene Symbol: IGLJ6
  Gene Name: immunoglobulin lambda joining 6
  ENSP ID: ENSP00000419267
GGFVCRVISQCNVFGSGTKVTVL

SEQ ID NO: 39886 - protein, 15 aa, Homo sapiens
  Payload ID: 8096
  Gene Symbol: IGLJ7
  Gene Name: immunoglobulin lambda joining 7
  ENSP ID: ENSP00000419233
SLCAVFGGGTQLTVL

SEQ ID NO: 39887 - protein, 117 aa, Homo sapiens
  Payload ID: 8097
  Gene Symbol: IGLV10-54
  Gene Name: immunoglobulin lambda variable 10-54
  ENSP ID: ENSP00000374822
MPWALLLLTLLTHSAVSVVQAGLTQPPSVSKGLRQTATLTCTGNSNIVGNQGAAWLQQHQGHPPKLLSYRNNNRPSGISERFSASRSGNTASLTITGLQPEDEADYYCSALDSSLSA

SEQ ID NO: 39888 - protein, 137 aa, Homo sapiens
  Payload ID: 8098
  Gene Symbol: IGLV11-55
  Gene Name: immunoglobulin lambda variable 11-55 (non-functional)
  ENSP ID: ENSP00000374821
MALTPLLLLLLSHCTGSLSRPVLTQPPSLSASPGATARLPCTLSSDLSVGGKNMFWYQQKLGSSPRLFLYHYSDSDKQLGPGVPSRVSGSKETSSNTAFLLISGLQPEDEADYYCQVYESSANHSETDEEVGQKPRF

SEQ ID NO: 39889 - protein, 117 aa, Homo sapiens
  Payload ID: 8099
  Gene Symbol: IGLV1-36
  Gene Name: immunoglobulin lambda variable 1-36
  ENSP ID: ENSP00000374836
MAWSPLFLTLITHCAGSWAQSVLTQPPSVSEAPRQRVTISCSGSSSNIGNNAVNWYQQLPGKAPKLLIYYDDLLPSGVSDRFSGSKSGTSASLAISGLQSEDEADYYCAAWDDSLNG

SEQ ID NO: 39890 - protein, 117 aa, Homo sapiens
  Payload ID: 8099
  Gene Symbol: IGLV1-36
  Gene Name: immunoglobulin lambda variable 1-36
  ENSP ID: ENSP00000477718
MTCSPLLLTLLIHCTGSWAQSVLTQPPSVSEAPRQRVTISCSGSSSNIGNNAVNWYQQLPGKAPKLLIYYDDLLPSGVSDRFSGSKSGTSASLAISGLQSEDEADYYCAAWDDSLNG

SEQ ID NO: 39891 - protein, 117 aa, Homo sapiens; identical to SEQ ID NO: 39889
  Payload ID: 8099
  Gene Symbol: IGLV1-36
  Gene Name: immunoglobulin lambda variable 1-36
  ENSP ID: ENSP00000479309

SEQ ID NO: 39892 - protein, 118 aa, Homo sapiens
  Payload ID: 8100
  Gene Symbol: IGLV1-40
  Gene Name: immunoglobulin lambda variable 1-40
  ENSP ID: ENSP00000374834
MAWSPLLLTLLAHCTGSWAQSVLTQPPSVSGAPGQRVTISCTGSSSNIGAGYDVHWYQQLPGTAPKLLIYGNSNRPSGVPDRFSGSKSGTSASLAITGLQAEDEADYYCQSYDSSLSG

SEQ ID NO: 39893 - protein, 118 aa, Homo sapiens; identical to SEQ ID NO: 39892
  Payload ID: 8100
  Gene Symbol: IGLV1-40
  Gene Name: immunoglobulin lambda variable 1-40
  ENSP ID: ENSP00000479659

SEQ ID NO: 39894 - protein, 117 aa, Homo sapiens
  Payload ID: 8101
  Gene Symbol: IGLV1-44
  Gene Name: immunoglobulin lambda variable 1-44
  ENSP ID: ENSP00000374832
MASFPLLLTLLTHCAGSWAQSVLTQPPSASGTPGQRVTISCSGSSSNIGSNTVNWYQQLPGTAPKLLIYSNNQRPSGVPDRFSGSKSGTSASLAISGLQSEDEADYYCAAWDDSLNG

SEQ ID NO: 39895 - protein, 117 aa, Homo sapiens; identical to SEQ ID NO: 39894
  Payload ID: 8101
  Gene Symbol: IGLV1-44
  Gene Name: immunoglobulin lambda variable 1-44
  ENSP ID: ENSP00000485735

SEQ ID NO: 39896 - protein, 117 aa, Homo sapiens
  Payload ID: 8102
  Gene Symbol: IGLV1-47
  Gene Name: immunoglobulin lambda variable 1-47
  ENSP ID: ENSP00000374829
MAGFPLLLTLLTHCAGSWAQSVLTQPPSASGTPGQRVTISCSGSSSNIGSNYVYWYQQLPGTAPKLLIYSNNQRPSGVPDRFSGSKSGTSASLAISGLRSEDEADYYCAAWDDSLSG

SEQ ID NO: 39897 - protein, 118 aa, Homo sapiens
  Payload ID: 8103
  Gene Symbol: IGLV1-50
  Gene Name: immunoglobulin lambda variable 1-50 (non-functional)
  ENSP ID: ENSP00000374826
MAWSSLLLTLLAHCTGSWAQSVLTQPPSVSGAPGQRVTISCTGSSSNIGAGYVVHWYQQLPGTAPKLLIYGNSNRPSGVPDQFSGSKSGTSASLAITGLQSEDEADYYCKAWDNSLNA

SEQ ID NO: 39898 - protein, 121 aa, Homo sapiens
  Payload ID: 8104
  Gene Symbol: IGLV1-51
  Gene Name: immunoglobulin lambda variable 1-51
  ENSP ID: ENSP00000374825
MTCSPLLLTLLIHCTGSWAQSVLTQPPSVSAAPGQKVTISCSGSSSNIGNNYVSWYQQLPGTAPKLLIYDNNKRPSGIPDRFSGSKSGTSATLGITGLQTGDEADYYCGTWDSSLSAGTVL

SEQ ID NO: 39899 - protein, 119 aa, Homo sapiens
  Payload ID: 8105
  Gene Symbol: IGLV2-11
  Gene Name: immunoglobulin lambda variable 2-11
  ENSP ID: ENSP00000374849
MAWALLLLSLLTQGTGSWAQSALTQPRSVSGSPGQSVTISCTGTSSDVGGYNYVSWYQQHPGKAPKLMIYDVSKRPSGVPDRFSGSKSGNTASLTISGLQAEDEADYYCCSYAGSYTFH

SEQ ID NO: 39900 - protein, 120 aa, Homo sapiens
  Payload ID: 8106
  Gene Symbol: IGLV2-14
  Gene Name: immunoglobulin lambda variable 2-14
  ENSP ID: ENSP00000374847
MAWALLLLTLLTQGTGSWAQSALTQPASVSGSPGQSITISCTGTSSDVGGYNYVSWYQQHPGKAPKLMIYEVSNRPSGVSNRFSGSKSGNTASLTISGLQAEDEADYYCSSYTSSSTLHS

SEQ ID NO: 39901 - protein, 120 aa, Homo sapiens [sequence omitted]

SEQ ID NO: 39902 - protein, 113 aa, Homo sapiens
  Payload ID: 8108
  Gene Symbol: IGLV2-23
  Gene Name: immunoglobulin lambda variable 2-23
  ENSP ID: ENSP00000374841
MAWALLLLTLLTQDTGSWAQSALTQPASVSGSPGQSITISCTGTSSDVGSYNLVSWYQQHPGKAPKLMIYEGSKRPSGVSNRFSGSKSGNTASLTISGLQAEDEADYYCCSYA

SEQ ID NO: 39903 - protein, 118 aa, Homo sapiens
  Payload ID: 8109
  Gene Symbol: IGLV2-33
  Gene Name: immunoglobulin lambda variable 2-33 (non-functional)
  ENSP ID: ENSP00000374837
MAWALLLLTLLTQGTGSWAQSALTQPPFVSGAPGQSVTISCTGTSSDVGDYDHVFWYQKRLSTTSRLLIYNVNTRPSGISDLFSGSKSGNMASLTISGLKSEVEANYHCSLYSSSYTF

SEQ ID NO: 39904 - protein, 118 aa, Homo sapiens; identical to SEQ ID NO: 39903
  Payload ID: 8109
  Gene Symbol: IGLV2-33
  Gene Name: immunoglobulin lambda variable 2-33 (non-functional)
  ENSP ID: ENSP00000486583

SEQ ID NO: 39905 - protein, 157 aa, Homo sapiens
  Payload ID: 8110
  Gene Symbol: IGLV2-8
  Gene Name: immunoglobulin lambda variable 2-8
  ENSP ID: ENSP00000482937
MQICMEVPPFSEAEGIRQGWGQAQCWGLRRQRSQDVTTMAWALLLLTLLTQGTGSWAQSALTQPPSASGSPGQSVTISCTGTSSDVGGYNYVSWYQQHPGKAPKLMIYEVSKRPSGVPDRFSGSKSGNTASLTVSGLQAEDEADYYCSSYAGSNNFH

SEQ ID NO: 39906 - protein, 115 aa, Homo sapiens
  Payload ID: 8111
  Gene Symbol: IGLV3-1
  Gene Name: immunoglobulin lambda variable 3-1
  ENSP ID: ENSP00000374854
MAWIPLFLGVLAYCTGSVASYELTQPPSVSVSPGQTASITCSGDKLGDKYACWYQQKPGQSPVLVIYQDSKRPSGIPERFSGSNSGNTATLTISGTQAMDEADYYCQAWDSSTAH

SEQ ID NO: 39907 - protein, 117 aa, Homo sapiens [sequence omitted]

SEQ ID NO: 39908 - protein, 117 aa, Homo sapiens [sequence omitted]

SEQ ID NO: 39909 - protein, 112 aa, Homo sapiens
  Payload ID: 8114
  Gene Symbol: IGLV3-16
  Gene Name: immunoglobulin lambda variable 3-16
  ENSP ID: ENSP00000374846
MAWIPLLLPLLTLCTGSEASYELTQPPSVSVSLGQMARITCSGEALPKKYAYWYQQKPGQFPVLVIYKDSERPSGIPERFSGSSSGTIVTLTISGVQAEDEADYYCLSADSS

SEQ ID NO: 39910 - protein, 112 aa, Homo sapiens
  Payload ID: 8115
  Gene Symbol: IGLV3-19
  Gene Name: immunoglobulin lambda variable 3-19
  ENSP ID: ENSP00000374844
MAWTPLWLTLLTLCIGSVVSSELTQDPAVSVALGQTVRITCQGDSLRSYYASWYQQKPGQAPVLVIYGKNNRPSGIPDRFSGSSSGNTASLTITGAQAEDEADYYCNSRDSS

SEQ ID NO: 39911 - protein, 117 aa, Homo sapiens
  Payload ID: 8116
  Gene Symbol: IGLV3-21
  Gene Name: immunoglobulin lambda variable 3-21
  ENSP ID: ENSP00000374843
MAWTVLLLGLLSHCTGSVTSYVLTQPPSVSVAPGQTARITCGGNNIGSKSVHWYQQKPGQAPVLVVYDDSDRPSGIPERFSGSNSGNTATLTISRVEAGDEADYYCQVWDSSSDHPT

SEQ ID NO: 39912 - protein, 115 aa, Homo sapiens
  Payload ID: 8117
  Gene Symbol: IGLV3-22
  Gene Name: immunoglobulin lambda variable 3-22 (gene/pseudogene)
  ENSP ID: ENSP00000374842
MAWATLLLPLLNLYTGSVASYELTQLPSVSVSPGQTARITCSGDVLGENYADWYQQKPGQAPELVIYEDSERYPGIPERFSGSTSGNTTTLTISRVLTEDEADYYCLSGDEDNPS

SEQ ID NO: 39913 - protein, 112 aa, Homo sapiens
  Payload ID: 8118
  Gene Symbol: IGLV3-25
  Gene Name: immunoglobulin lambda variable 3-25
  ENSP ID: ENSP00000374840
MAWIPLLLPLLTLCTGSEASYELTQPPSVSVSPGQTARITCSGDALPKQYAYWYQQKPGQAPVLVIYKDSERPSGIPERFSGSSSGTTVTLTISGVQAEDEADYYCQSADSS

SEQ ID NO: 39914 - protein, 113 aa, Homo sapiens
  Payload ID: 8119
  Gene Symbol: IGLV3-27
  Gene Name: immunoglobulin lambda variable 3-27
  ENSP ID: ENSP00000374839
MAWIPLLLPLLILCTVSVASYELTQPSSVSVSPGQTARITCSGDVLAKKYARWFQQKPGQAPVLVIYKDSERPSGIPERFSGSSSGTTVTLTISGAQVEDEADYYCYSAADNN

SEQ ID NO: 39915 - protein, 114 aa, Homo sapiens
  Payload ID: 8120
  Gene Symbol: IGLV3-32
  Gene Name: immunoglobulin lambda variable 3-32 (non-functional)
  ENSP ID: ENSP00000374838
MAWTPPLLVLTLCTGSVISSGPTQVPAVSVALGQMARITCQGDSMEGSYEHWYQQKPGQAPVLVIYDSSDRPSRIPERFSGSKSGNTTTLTITGAQAEDEADYYYQLIDNHATQ

SEQ ID NO: 39916 - protein, 114 aa, Homo sapiens; identical to SEQ ID NO: 39915
  Payload ID: 8120
  Gene Symbol: IGLV3-32
  Gene Name: immunoglobulin lambda variable 3-32 (non-functional)
  ENSP ID: ENSP00000485820

SEQ ID NO: 39917 - protein, 115 aa, Homo sapiens
  Payload ID: 8121
  Gene Symbol: IGLV3-9
  Gene Name: immunoglobulin lambda variable 3-9 (gene/pseudogene)
  ENSP ID: ENSP00000374851
MAWTALLLSLLAHFTGSVASYELTQPLSVSVALGQTARITCGGNNIGSKNVHWYQQKPGQAPVLVIYRDSNRPSGIPERFSGSNSGNTATLTISRAQAGDEADYYCQVWDSSTAH

SEQ ID NO: 39918 - protein, 122 aa, Homo sapiens
  Payload ID: 8122
  Gene Symbol: IGLV4-3
  Gene Name: immunoglobulin lambda variable 4-3
  ENSP ID: ENSP00000374853
MAWVSFYLLPFIFSTGLCALPVLTQPPSASALLGASIKLTCTLSSEHSTYTIEWYQQRPGRSPQYIMKVKSDGSHSKGDGIPDRFMGSSSGADRYLTFSNLQSDDEAEYHCGESHTIDGQVG

SEQ ID NO: 39919 - protein, 120 aa, Homo sapiens
  Payload ID: 8123
  Gene Symbol: IGLV4-60
  Gene Name: immunoglobulin lambda variable 4-60
  ENSP ID: ENSP00000374819
MAWTPLLLLFPLLLHCTGSLSQPVLTQSSSASASLGSSVKLTCTLSSGHSSYIIAWHQQQPGKAPRYLMKLEGSGSYNKGSGVPDRFSGSSSGADRYLTISNLQFEDEADYYCETWDSNT

SEQ ID NO: 39920 - protein, 119 aa, Homo sapiens
  Payload ID: 8124
  Gene Symbol: IGLV4-69
  Gene Name: immunoglobulin lambda variable 4-69
  ENSP ID: ENSP00000374817
MAWTPLLFLTLLLHCTGSLSQLVLTQSPSASASLGASVKLTCTLSSGHSSYAIAWHQQQPEKGPRYLMKLNSDGSHSKGDGIPDRFSGSSSGAERYLTISSLQSEDEADYYCQTWGTGI

SEQ ID NO: 39921 - protein, 123 aa, Homo sapiens
  Payload ID: 8125
  Gene Symbol: IGLV5-37
  Gene Name: immunoglobulin lambda variable 5-37
  ENSP ID: ENSP00000374835
MAWTPLLLLLLSHCTGSLSQPVLTQPPSSSASPGESARLTCTLPSDINVGSYNIYWYQQKPGSPPRYLLYYYSDSDKGQGSGVPSRFSGSKDASANTGILLISGLQSEDEADYYCMIWPSNAS

SEQ ID NO: 39922 - protein, 123 aa, Homo sapiens; identical to SEQ ID NO: 39921
  Payload ID: 8125
  Gene Symbol: IGLV5-37
  Gene Name: immunoglobulin lambda variable 5-37
  ENSP ID: ENSP00000487591

SEQ ID NO: 39923 - protein, 123 aa, Homo sapiens
  Payload ID: 8126
  Gene Symbol: IGLV5-45
  Gene Name: immunoglobulin lambda variable 5-45
  ENSP ID: ENSP00000374831
MAWTPLLLLFLSHCTGSLSQAVLTQPSSLSASPGASASLTCTLCSGINVGTYRIYWYQQKPGSPPQYLLRYKSDSDKQQGSGVPSRFSGSKDASANAGILLISGLQSEDEADYYCMIWHSSAS

SEQ ID NO: 39924 - protein, 123 aa, Homo sapiens
  Payload ID: 8126
  Gene Symbol: IGLV5-45
  Gene Name: immunoglobulin lambda variable 5-45
  ENSP ID: ENSP00000487513
MAWTPLLLLFLSHCTGSLSQAVLTQPSSLSASPGASASLTCTLRSGINVGTYRIYWYQQKPGSPPQYLLRYKSDSDKQQGSGVPSRFSGSKDASANAGILLISGLQSEDEADYYCMIWHSSAS

SEQ ID NO: 39925 - protein, 105 aa, Homo sapiens
  Payload ID: 8127
  Gene Symbol: IGLV5-48
  Gene Name: immunoglobulin lambda variable 5-48 (non-functional)
  ENSP ID: ENSP00000374828
MAWTPLLLLFLSHCTGSLSQAVLTQPTSLSASPGASARLTCTLRSGISVGSYRIYWYQQKPGSPPRYLLNYYSDSDKHQGSGVPSRFSGSKDASTNAGILFISGL

SEQ ID NO: 39926 - protein, 124 aa, Homo sapiens
  Payload ID: 8128
  Gene Symbol: IGLV5-52
  Gene Name: immunoglobulin lambda variable 5-52
  ENSP ID: ENSP00000374824
MAWTLLLLVLLSHCTGSLSQPVLTQPSSHSASSGASVRLTCMLSSGFSVGDFWIRWYQQKPGNPPRYLLYYHSDSNKGQGSGVPSRFSGSNDASANAGILRISGLQPEDEADYYCGTWHSNSKT

SEQ ID NO: 39927 - protein, 148 aa, Homo sapiens
  Payload ID: 8129
  Gene Symbol: IGLV6-57
  Gene Name: immunoglobulin lambda variable 6-57
  ENSP ID: ENSP00000374820
MAWAPLLLTLLAHCTGSWANFMLTQPHSVSESPGKTVTISCTGSSGSIASNYVQWYQQRPGSAPTTVIYEDNQRPSGVPDRFSGSIDSSSNSASLTISGLKTEDEADYYCQSYDSSNHTVLQTHGEVRQKLPRASLPGPVSACLHRRG

SEQ ID NO: 39928 - protein, 117 aa, Homo sapiens
  Payload ID: 8130
  Gene Symbol: IGLV7-43
  Gene Name: immunoglobulin lambda variable 7-43
  ENSP ID: ENSP00000374833
MAWTPLFLFLLTCCPGSNSQTVVTQEPSLTVSPGGTVTLTCASSTGAVTSGYYPNWFQQKPGQAPRALIYSTSNKHSWTPARFSGSLLGGKAALTLSGVQPEDEAEYYCLLYYGGAQ

SEQ ID NO: 39929 - protein, 117 aa, Homo sapiens; identical to SEQ ID NO: 39928
  Payload ID: 8130
  Gene Symbol: IGLV7-43
  Gene Name: immunoglobulin lambda variable 7-43
  ENSP ID: ENSP00000480490

SEQ ID NO: 39930 - protein, 117 aa, Homo sapiens
  Payload ID: 8131
  Gene Symbol: IGLV7-46
  Gene Name: immunoglobulin lambda variable 7-46 (gene/pseudogene)
  ENSP ID: ENSP00000374830
MAWTPLFLFLLTCCPGSNSQAVVTQEPSLTVSPGGTVTLTCGSSTGAVTSGHYPYWFQQKPGQAPRTLIYDTSNKHSWTPARFSGSLLGGKAALTLLGAQPEDEAEYYCLLSYSGAR

SEQ ID NO: 39931 - protein, 122 aa, Homo sapiens
  Payload ID: 8132
  Gene Symbol: IGLV8-61
  Gene Name: immunoglobulin lambda variable 8-61
  ENSP ID: ENSP00000374818
MSVPTMAWMMLLLGLLAYGSGVDSQTVVTQEPSFSVSPGGTVTLTCGLSSGSVSTSYYPSWYQQTPGQAPRTLIYSTNTRSSGVPDRFSGSILGNKAALTITGAQADDESDYYCVLYMGSGI

SEQ ID NO: 39932 - protein, 123 aa, Homo sapiens
  Payload ID: 8133
  Gene Symbol: IGLV9-49
  Gene Name: immunoglobulin lambda variable 9-49
  ENSP ID: ENSP00000414456
MAWAPLLLTLLSLLTGSLSQPVLTQPPSASASLGASVTLTCTLSSGYSNYKVDWYQQRPGKGPRFVMRVGTGGIVGSKGDGIPDRFSVLGSGLNRYLTIKNIQEEDESDYHCGADHGSGSNFV

SEQ ID NO: 39933 - protein, 84 aa, Homo sapiens
  Payload ID: 8134
  Gene Symbol: IGLL1
  Gene Name: immunoglobulin lambda-like polypeptide 1
  Uniprot ID: P15814
  ENSP ID: ENSP00000249053
MRPGTGQGGLEAPGEPGPNLRQRWPLLLLGLAVVTHGLLRPTAASQSRALGPGAPGGSSRSSLRSRWGRSAQGHPLGHSVPAVL

SEQ ID NO: 39934 - protein, 213 aa, Homo sapiens
  Payload ID: 8134
  Gene Symbol: IGLL1
  Gene Name: immunoglobulin lambda-like polypeptide 1
  Uniprot ID: P15814
  ENSP ID: ENSP00000329312
MRPGTGQGGLEAPGEPGPNLRQRWPLLLLGLAVVTHGLLRPTAASQSRALGPGAPGGSSRSSLRSRWGRFLLQRGSWTGPRCWPRGFQSKHNSVTHVFGSGTQLTVLSQPKATPSVTLFPPSSEELQANKATLVCLMNDFYPGILTVTWKADGTPITQGVEMTTPSKQSNNKYAASSYLSLTPEQWRSRRSYSCQVMHEGSTVEKTVAPAECS

SEQ ID NO: 39935 - protein, 180 aa, Homo sapiens
  Payload ID: 8134
  Gene Symbol: IGLL1
  Gene Name: immunoglobulin lambda-like polypeptide 1
  ENSP ID: ENSP00000403391
MRPGTGQGGLEAPGEPGPNLRQRWPLLLLGLAVVTHGLLRPTAASQSRALGPGAPGGSSRSSLRSRWGSRFLLQRGSWTGPRCWPRGFQSKHNSVTHVFGSGTQLTVLSQPKATPSVTLFPPSSEELQANKATLVCLMNDFYPGILTVTWKADGTPITQGVEMTTPSKQSNNKYAASSYL

SEQ ID NO: 39936 - protein, 214 aa, Homo sapiens
  Payload ID: 8135
  Gene Symbol: IGLL5
  Gene Name: immunoglobulin lambda-like polypeptide 5
  Uniprot ID: B9A064
  ENSP ID: ENSP00000431254
MRPKTGQVGCETPEELGPGPRQRWPLLLLGLAMVAHGLLRPMVAPQSGDPDPGASVGSSRSSLRSLWGRLLLQPSPQRADPRCWPRGFWSEPQSLCYVFGTGTKVTVLGQPKANPTVTLFPPSSEELQANKATLVCLISDFYPGAVTVAWKADGSPVKAGVETTKPSKQSNNKYAASSYLSLTPEQWKSHRSYSCQVTHEGSTVEKTVAPTECS

SEQ ID NO: 39937 - protein, 84 aa, Homo sapiens
  Payload ID: 8135
  Gene Symbol: IGLL5
  Gene Name: immunoglobulin lambda-like polypeptide 5
  Uniprot ID: B9A064
  ENSP ID: ENSP00000434368
MRPKTGQVGCETPEELGPGPRQRWPLLLLGLAMVAHGLLRPMVAPQSGDPDPGASVGSSRSSLRSLWGRSAQGQPHCHSVPALL

SEQ ID NO: 39938 - protein, 215 aa, Homo sapiens
  Payload ID: 8135
  Gene Symbol: IGLL5
  Gene Name: immunoglobulin lambda-like polypeptide 5
  ENSP ID: ENSP00000436353
MRPKTGQVGCETPEELGPGPRQRWPLLLLGLAMVAHGLLRPMVAPQSGDPDPGASVGSSRSSLRSLWGSRLLLQPSPQRADPRCWPRGFWSEPQSLCYVFGTGTKVTVLGQPKANPTVTLFPPSSEELQANKATLVCLISDFYPGAVTVAWKADGSPVKAGVETTKPSKQSNNKYAASSYLSLTPEQWKSHRSYSCQVTHEGSTVEKTVAPTECS

SEQ ID NO: 39939 - protein, 993 aa, Homo sapiens
  Payload ID: 8136
  Gene Symbol: IGHMBP2
  Gene Name: immunoglobulin mu binding protein 2
  Uniprot ID: P38935
  ENSP ID: ENSP00000255078
MASAAVESFVTKQLDLLELERDAEVEERRSWQENISLKELQSRGVCLLKLQVSSQRTGLYGRLLVTFEPRRYGSAAALPSNSFTSGDIVGLYDAANEGSQLATGILTRVTQKSVTVAFDESHDFQLSLDRENSYRLLKLANDVTYRRLKKALIALKKYHSGPASSLIEVLFGRSAPSPASEIHPLTFFNTCLDTSQKEAVLFALSQKELAIIHGPPGTGKTTTVVEIILQAVKQGLKVLCCAPSNIAVDNLVERLALCKQRILRLGHPARLLESIQQHSLDAVLARSDSAQIVADIRKDIDQVFVKNKKTQDKREKSNFRNEIKLLRKELKEREEAAMLESLTSANVVLATNTGASADGPLKLLPESYFDVVVIDECAQALEASCWIPLLKARKCILAGDHKQLPPTTVSHKAALAGLSLSLMERLAEEYGARVVRTLTVQYRMHQAIMRWASDTMYLGQLTAHSSVARHLLRDLPGVAATEETGVPLLLVDTAGCGLFELEEEDEQSKGNPGEVRLVSLHIQALVDAGVPARDIAVVSPYNLQVDLLRQSLVHRHPELEIKSVDGFQGREKEAVILSFVRSNRKGEVGFLAEDRRINVAVTRARRHVAVICDSRTVNNHAFLKTLVEYFTQHGEVRTAFEYLDDIVPENYSHENSQGSSHAATKPQGPATSTRTGSQRQEGGQEAAAPARQGRKKPAGKSLASEAPSQPSLNGGSPEGVESQDGVDHFRAMIVEFMASKKMQLEFPPSLNSHDRLRVHQIAEEHGLRHDSSGEGKRRFITVSKRAPRPRAALGPPAGTGGPAPLQPVPPTPAQTEQPPREQRGPDQPDLRTLHLERLQRVRSAQGQPASKEQQASGQQKLPEKKKKKAKGHPATDLPTEEDFEALVSAAVKADNTCGFAKCTAGVTTLGQFCQLCSRRYCLSHHLPEIHGCGERARAHARQRISREGVLYAGSGTKNGSLDPAKRAQLQRRLDKKLSELSNQRTSRRKERGT

SEQ ID NO: 39940 - protein, 192 aa, Homo sapiens
  Payload ID: 8136
  Gene Symbol: IGHMBP2
  Gene Name: immunoglobulin mu binding protein 2
  ENSP ID: ENSP00000440465
MASAAVESFVTKQLDLLELERDAEVEERRSWQENISLKELQSRGVCLLKLQVSSQRTGLYGRLLVTFEPRRYGSAAALPSNSFTSGDIVGLYDAANEGSQLATGILTRVTQKSVTVAFDESHDFQLSLDRENSYRLLKLANDVTYRRLKKPADILQHLPGHLPERSGFICAVSERTCHHPWTSWHWENHDCG

SEQ ID NO: 39941 - protein, 29 aa, Homo sapiens
  Payload ID: 8136
  Gene Symbol: IGHMBP2
  Gene Name: immunoglobulin mu binding protein 2
  ENSP ID: ENSP00000443343
MASAAVESFVTKQLDLLELERDAEVEERR

SEQ ID NO: 39942 - protein, 91 aa, Homo sapiens
  Payload ID: 8136
  Gene Symbol: IGHMBP2
  Gene Name: immunoglobulin mu binding protein 2
  ENSP ID: ENSP00000456366
MASAAVESFVTKQLDLLELERDAEVEERRSWQENISLKELQSRGVCLLKLQVSSQRTGLYGRLLVTFEPRRYGSAAALPSNSFTSGVCVLT

SEQ ID NO: 39943 - protein, 428 aa, Homo sapiens
  Payload ID: 8137
  Gene Symbol: ISLR
  Gene Name: immunoglobulin superfamily containing leucine-rich repeat
  Uniprot ID: O14498
  ENSP ID: ENSP00000249842
MQELHLLWWALLLGLAQACPEPCDCGEKYGFQIADCAYRDLESVPPGFPANVTTLSLSANRLPGLPEGAFREVPLLQSLWLAHNEIRTVAAGALASLSHLKSLDLSHNLISDFAWSDLHNLSALQLLKMDSNELTFIPRDAFRSLRALRSLQLNHNRLHTLAEGTFTPLTALSHLQINENPFDCTCGIVWLKTWALTTAVSIPEQDNIACTSPHVLKGTPLSRLPPLPCSAPSVQLSYQPSQDGAELRPGFVLALHCDVDGQPAPQLHWHIQIPSGIVEITSPNVGTDGRALPGTPVASSQPRFQAFANGSLLIPDFGKLEEGTYSCLATNELGSAESSVDVALATPGEGGEDTLGRRFHGKAVEGKGCYTVDNEVQPSGPEDNVVIIYLSRAGNPEAAVAEGVPGQLPPGLLLLGQSLLLFFFLTSF

SEQ ID NO: 39944 - protein, 428 aa, Homo sapiens; identical to SEQ ID NO: 39943
  Payload ID: 8137
  Gene Symbol: ISLR
  Gene Name: immunoglobulin superfamily containing leucine-rich repeat
  Uniprot ID: O14498
  ENSP ID: ENSP00000378550

SEQ ID NO: 39945 - protein, 183 aa, Homo sapiens
  Payload ID: 8137
  Gene Symbol: ISLR
  Gene Name: immunoglobulin superfamily containing leucine-rich repeat
  ENSP ID: ENSP00000453105
MQELHLLWWALLLGLAQACPEPCDCGEKYGFQIADCAYRDLESVPPGFPANVTTLSLSANRLPGLPEGAFREVPLLQSLWLAHNEIRTVAAGALASLSHLKSLDLSHNLISDFAWSDLHNLSALQLLKMDSNELTFIPRDAFRSLRALRSLQLNHNRLHTLAEGTFTPLTALSHLQINENPFD

SEQ ID NO: 39946 - protein, 147 aa, Homo sapiens
  Payload ID: 8137
  Gene Symbol: ISLR
  Gene Name: immunoglobulin superfamily containing leucine-rich repeat
  ENSP ID: ENSP00000453884
MQELHLLWWALLLGLAQACPEPCDCGEKYGFQIADCAYRDLESVPPGFPANVTTLSLSANRLPGLPEGAFREVPLLQSLWLAHNEIRTVAAGALASLSHLKSLDLSHNLISDFAWSDLHNLSALQLLKMDSNELTFIPRDAFRSLRA

SEQ ID NO: 39947 - protein, 745 aa, Homo sapiens
  Payload ID: 8138
  Gene Symbol: ISLR2
  Gene Name: immunoglobulin superfamily containing leucine-rich repeat 2
  Uniprot ID: Q6UXK2
  ENSP ID: ENSP00000355402
MFPLRALWLVWALLGVAGSCPEPCACVDKYAHQFADCAYKELREVPEGLPANVTTLSLSANKITVLRRGAFADVTQVTSLWLAHNEVRTVEPGALAVLSQLKNLDLSHNFISSFPWSDLRNLSALQLLKMNHNRLGSLPRDALGALPDLRSLRINNNRLRTLAPGTFDALSALSHLQLYHNPFHCGCGLVWLQAWAASTRVSLPEPDSIACASPPALQGVPVYRLPALPCAPPSVHLSAEPPLEAPGTPLRAGLAFVLHCIADGHPTPRLQWQLQIPGGTVVLEPPVLSGEDDGVGAEEGEGEGDGDLLTQTQAQTPTPAPAWPAPPATPRFLALANGSLLVPLLSAKEAGVYTCRAHNELGANSTSIRVAVAATGPPKHAPGAGGEPDGQAPTSERKSTAKGRGNSVLPSKPEGKIKGQGLAKVSILGETETEPEEDTSEGEEAEDQILADPAEEQRCGNGDPSRYVSNHAFNQSAELKPHVFELGVIALDVAEREARVQLTPLAARWGPGPGGAGGAPRPGRRPLRLLYLCPAGGGAAVQWSRVEEGVNAYWFRGLRPGTNYSVCLALAGEACHVQVVFSTKKELPSLLVIVAVSVFLLVLATVPLLGAACCHLLAKHPGKPYRLILRPQAPDPMEKRIAADFDPRASYLESEKSYPAGGEAGGEEPEDVQGEGLDEDAEQGDPSGDLQREESLAACSLVESQSKANQEEFEAGSEYSDRLPLGAEAVNIAQEINGNYRQTAG

SEQ ID NO: 39948 - protein, 334 aa, Homo sapiens
  Payload ID: 8138
  Gene Symbol: ISLR2
  Gene Name: immunoglobulin superfamily containing leucine-rich repeat 2
  ENSP ID: ENSP00000408872
MFPLRALWLVWALLGVAGSCPEPCACVDKYAHQFADCAYKELREVPEGLPANVTTLSLSANKITVLRRGAFADVTQVTSLWLAHNEVRTVEPGALAVLSQLKNLDLSHNFISSFPWSDLRNLSALQLLKMNHNRLGSLPRDALGALPDLRSLRINNNRLAGEACHVQVVFSTKKELPSLLVIVAVSVFLLVLATVPLLGAACCHLLAKHPGKPYRLILRPQAPDPMEKRIAADFDPRASYLESEKSYPAGGEAGGEEPEDVQGEGLDEDAEQGDPSGDLQREESLAACSLVESQSKANQEEFEAGSEYSDRLPLGAEAVNIAQEINGNYRQTAG

SEQ ID NO: 39949 - protein, 745 aa, Homo sapiens; identical to SEQ ID NO: 39947
  Payload ID: 8138
  Gene Symbol: ISLR2
  Gene Name: immunoglobulin superfamily containing leucine-rich repeat 2
  Uniprot ID: Q6UXK2
  ENSP ID: ENSP00000411443

SEQ ID NO: 39950 - protein, 745 aa, Homo sapiens; identical to SEQ ID NO: 39947
  Payload ID: 8138
  Gene Symbol: ISLR2
  Gene Name: immunoglobulin superfamily containing leucine-rich repeat 2
  Uniprot ID: Q6UXK2
  ENSP ID: ENSP00000411834

SEQ ID NO: 39951 - protein, 114 aa, Homo sapiens
  Payload ID: 8138
  Gene Symbol: ISLR2
  Gene Name: immunoglobulin superfamily containing leucine-rich repeat 2
  ENSP ID: ENSP00000454259
MFPLRALWLVWALLGVAGSCPEPCACVDKYAHQFADCAYKELREVPEGLPANVTTLSLSANKITVLRRGAFADVTQVTSLWLAHNEVRTVEPGALAVLSQLKNLDLSHNFISSF

SEQ ID NO: 39952 - protein, 89 aa, Homo sapiens
  Payload ID: 8138
  Gene Symbol: ISLR2
  Gene Name: immunoglobulin superfamily containing leucine-rich repeat 2
  ENSP ID: ENSP00000454287
MFPLRALWLVWALLGVAGSCPEPCACVDKYAHQFADCAYKELREVPEGLPANVTTLSLSANKITVLRRGAFADVTQVTSLWLAHNEVRT

SEQ ID NO: 39953 - protein, 5 aa, Homo sapiens
  Payload ID: 8138
  Gene Symbol: ISLR2
  Gene Name: immunoglobulin superfamily containing leucine-rich repeat 2
  ENSP ID: ENSP00000454859
MFPLR

SEQ ID NO: 39954 - protein, 138 aa, Homo sapiens
  Payload ID: 8138
  Gene Symbol: ISLR2
  Gene Name: immunoglobulin superfamily containing leucine-rich repeat 2
  ENSP ID: ENSP00000455076
MFPLRALWLVWALLGVAGSCPEPCACVDKYAHQFADCAYKELREVPEGLPANVTTLSLSANKITVLRRGAFADVTQVTSLWLAHNEVRTVEPGALAVLSQLKNLDLSHNFISSFPWSDLRNLSALQLLKMNHNRLGSL

SEQ ID NO: 39955 - protein, 745 aa, Homo sapiens; identical to SEQ ID NO: 39947
  Payload ID: 8138
  Gene Symbol: ISLR2
  Gene Name: immunoglobulin superfamily containing leucine-rich repeat 2
  Uniprot ID: Q6UXK2
  ENSP ID: ENSP00000455531

SEQ ID NO: 39956 - protein, 745 aa, Homo sapiens; identical to SEQ ID NO: 39947
  Payload ID: 8138
  Gene Symbol: ISLR2
  Gene Name: immunoglobulin superfamily containing leucine-rich repeat 2
  Uniprot ID: Q6UXK2
  ENSP ID: ENSP00000458080

SEQ ID NO: 39957 - protein, 814 aa, Homo sapiens
  Payload ID: 8139
  Gene Symbol: IGDCC3
  Gene Name: immunoglobulin superfamily, DCC subclass, member 3
  Uniprot ID: Q8IVU1
  ENSP ID: ENSP00000332773
MAVQRAASPRRPPAPLWPRLLLPLLLLLLPAPSEGLGHSAELAFAVEPSDDVAVPGQPIVLDCRVEGTPPVRITWRKNGVELPESTHSTLLANGSLMIRHFRLEPGGSPSDEGDYECVAQNRFGLVVSRKARIQAATMSDFHVHPQATVGEEGGVARFQCQIHGLPKPLITWEKNRVPIDTDNERYTLLPKGVLQITGLRAEDGGIFHCVASNIASIRISHGARLTVSGSGSGAYKEPAILVGPENLTLTVHQTAVLECVATGNPRPIVSWSRLDGRPIGVEGIQVLGTGNLIISDVTVQHSGVYVCAANRPGTRVRRTAQGRLVVQAPAEFVQHPQSISRPAGTTAMFTCQAQGEPPPHVTWLKNGQVLGPGGHVRLKNNNSTLTISGIGPEDEAIYQCVAENSAGSSQASARLTVLWAEGLPGPPRNVRAVSVSSTEVRVSWSEPLANTKEIIGYVLHIRKAADPPELEYQEAVSKSTFQHLVSDLEPSTAYSFYIKAYTPRGASSASVPTLASTLGEAPAPPPLSVRVLGSSSLQLLWEPWPRLAQHEGGFKLFYRPASKTSFTGPILLPGTVSSYNLSQLDPTAVYEVKLLAYNQHGDGNATVRFVSLRGASERTALSPPCDCRKEEAANQTSTTGIVIGIHIGVTCIIFCVLFLLFGQRGRVLLCKDVENQLSPPQGPRSQRDPGILALNGARRGQRGQLGRDEKRVDMKELEQLFPPASAAGQPDPRPTQDPAAPAPCEETQLSVLPLQGCGLMEGKTTEAKTTEATAPCAGLAAAPPPPDGGPGLLSEGQASRPAAARVTQPAHSEQ

SEQ ID NO: 39958 - protein, 137 aa, Homo sapiens
  Payload ID: 8139
  Gene Symbol: IGDCC3
  Gene Name: immunoglobulin superfamily, DCC subclass, member 3
  ENSP ID: ENSP00000452838
MPDSLIHPRWCERAMSDFHVHPQATVGEEGGVARFQCQIHGLPKPLITWEKNRVPIDTDNERYTLLPKGVLQITGLRAEDGGIFHCVASNIASIRISHGARLTVSGSGSGAYKEPAILVGPENLTLTVHQTAVLECV

SEQ ID NO: 39959 - protein, 535 aa, Homo sapiens
  Payload ID: 8139
  Gene Symbol: IGDCC3
  Gene Name: immunoglobulin superfamily, DCC subclass, member 3
  ENSP ID: ENSP00000454105
MSDFHVHPQATVGEEGGVARFQCQIHGLPKPLITWEKNRVPIDTDNERYTLLPKGVLQITGLRAEDGGIFHCVASNIASIRISHGARLTVSGSGSGAYKEPAILVGPENLTLTVHQTAVLECVATGNPRPIVSWSRLDGRPIGVEGIQVLGTGNLIISDVTVQHSGVYVCAANRPGTRVRRTAQGRLVVQAPAEFVQHPQSISRPAGTTAMFTCQAQGEPPPHVTWLKNGQVLGPGGHVRLKNNNSTLTISGIGPEDEAIYQCVAENSAGSSQASARLTVLWAEGLPGPPRNVRAVSVSSTEVRVSWSEPLANTKEIIGYVLHIRKAADPPELEYQEAVSKSTFQHLVSDLEPSTAYSFYIKAYTPRGASSASVPTLASTLGEAPAPPPLSVRVLGSSSLQLLWEPWPRLAQHEGGFKLFYRPASKTSFTGPILLPGTVSSYNLSQLDPTAVYEVKLLAYNQHGDGNATVRFVSLRGASERTALSPPCDCRKEEAANQTSTTGIVIGIHIGVTCIIFCVLFLLFGQRGRVLLCKD

SEQ ID NO: 39960 - protein, 1250 aa, Homo sapiens
  Payload ID: 8140
  Gene Symbol: IGDCC4
  Gene Name: immunoglobulin superfamily, DCC subclass, member 4
  Uniprot ID: Q8TDY8
  ENSP ID: ENSP00000319623
MARGDAGRGRGLLALTFCLLAARGELLLPQETTVELSCGVGPLQVILGPEQAAVLNCSLGAAAAGPPTRVTWSKDGDTLLEHDHLHLLPNGSLWLSQPLAPNGSDESVPEAVGVIEGNYSCLAHGPLGVLASQTAVVKLATLADFSLHPESQTVEENGTARFECHIEGLPAPIITWEKDQVTLPEEPRLIVLPNGVLQILDVQESDAGPYRCVATNSARQHFSQEALLSVAHRGSLASTRGQDVVIVAAPENTTVVSGQSVVMECVASADPTPFVSWVRQDGKPISTDVIVLGRTNLLIANAQPWHSGVYVCRANKPRTRDFATAAAELRVLAAPAITQAPEALSRTRASTARFVCRASGEPRPALRWLHNGAPLRPNGRVKVQGGGGSLVITQIGLQDAGYYQCVAENSAGMACAAASLAVVVREGLPSAPTRVTATPLSSSAVLVAWERPEMHSEQIIGFSLHYQKARGMDNVEYQFAVNNDTTELQVRDLEPNTDYEFYVVAYSQLGASRTSTPALVHTLDDVPSAAPQLSLSSPNPSDIRVAWLPLPPSLSNGQVVKYKIEYGLGKEDQIFSTEVRGNETQLMLNSLQPNKVYRVRISAGTAAGFGAPSQWMHHRTPSMHNQSHVPFAPAELKVQAKMESLVVSWQPPPHPTQISGYKLYWREVGAEEEANGDRLPGGRGDQAWDVGPVRLKKKVKQYELTQLVPGRLYEVKLVAFNKHEDGYAAVWKGKTEKAPAPDMPIQRGPPLPPAHVHAESNSSTSIWLRWKKPDFTTVKIVNYTVRFSPWGLRNASLVTYYTSSGEDILIGGLKPFTKYEFAVQSHGVDMDGPFGSVVERSTLPDRPSTPPSDLRLSPLTPSTVRLHWCPPTEPNGEIVEYLILYSSNHTQPEHQWTLLTTQGNIFSAEVHGLESDTRYFFKMGARTEVGPGPFSRLQDVITLQEKLSDSLDMHSVTGIIVGVCLGLLCLLACMCAGLRRSPHRESLPGLSSTATPGNPALYSRARLGPPSPPAAHELESLVHPHPQDWSPPPSDVEDRAEVHSLMGGGVSEGRSHSKRKISWAQPSGLSWAGSWAGCELPQAGPRPALTRALLPPAGTGQTLLLQALVYDAIKGNGRKKSPPACRNQVEAEVIVHSDFSASNGNPDLHLQDLEPEDPLPPEAPDLISGVGDPGQGAAWLDRELGGCELAAPGPDRLTCLPEAASASCSYPDLQPGEVLEETPGDSCQLKSPCPLGASPGLPRSPVSSSA

SEQ ID NO: 39961 - protein, 1336 aa, Homo sapiens
  Payload ID: 8141
  Gene Symbol: IGSF1
  Gene Name: immunoglobulin superfamily, member 1
  Uniprot ID: Q8N6C5
  ENSP ID: ENSP00000355010
MTLDRPGEGATMLKTFTVLLFCIRMSLGMTSIVMDPQPELWIESNYPQAPWENITLWCRSPSRISSKFLLLKDKTQMTWIRPSHKTFQVSFLIGALTESNAGLYRCCYWKETGWSKPSKVLELEAPGQLPKPIFWIQAETPALPGCNVNILCHGWLQDLVFMLFKEGYAEPVDYQVPTGTMAIFSIDNLTPEDEGVYICRTHIQMLPTLWSEPSNPLKLVVAGLYPKPTLTAHPGPIMAPGESLNLRCQGPIYGMTFALMRVEDLEKSFYHKKTIKNEANFFFQSLKIQDTGHYLCFYYDASYRGSLLSDVLKIWVTDTFPKTWLLARPSAVVQMGQNVSLRCRGPVDGVGLALYKKGEDKPLQFLDATSIDDNTSFFLNNVTYSDTGIYSCHYLLTWKTSIRMPSHNTVELMVVDKPPKPSLSAWPSTVFKLGKAITLQCRVSHPVLEFSLEWEERETFQKFSVNGDFIISNVDGKGTGTYSCSYRVETHPNIWSHRSEPLKLMGPAGYLTWNYVLNEAIRLSLIMQLVALLLVVLWIRWKCRRLRIREAWLLGTAQGVTMLFIVTALLCCGLCNGVLIEETEIVMPTPKPELWAETNFPLAPWKNLTLWCRSPSGSTKEFVLLKDGTGWIATRPASEQVRAAFPLGALTQSHTGSYHCHSWEEMAVSEPSEALELVGTDILPKPVISASPTIRGQELQLRCKGWLAGMGFALYKEGEQEPVQQLGAVGREAFFTIQRMEDKDEGNYSCRTHTEKRPFKWSEPSEPLELVIKEMYPKPFFKTWASPVVTPGARVTFNCSTPHQHMSFILYKDGSEIASSDRSWASPGASAAHFLIISVGIGDGGNYSCRYYDFSIWSEPSDPVELVVTEFYPKPTLLAQPGPVVFPGKSVILRCQGTFQGMRFALLQEGAHVPLQFRSVSGNSADFLLHTVGAEDSGNYSCIYYETTMSNRGSYLSMPLMIWVTDTFPKPWLFAEPSSVVPMGQNVTLWCRGPVHGVGYILHKEGEATSMQLWGSTSNDGAFPITNISGTSMGRYSCCYHPDWTSSIKIQPSNTLELLVTGLLPKPSLLAQPGPMVAPGENMTLQCQGELPDSTFVLLKEGAQEPLEQQRPSGYRADFWMPAVRGEDSGIYSCVYYLDSTPFAASNHSDSLEIWVTDKPPKPSLSAWPSTMFKLGKDITLQCRGPLPGVEFVLEHDGEEAPQQFSEDGDFVINNVEGKGIGNYSCSYRLQAYPDIWSEPSDPLELVGAAGPVAQECTVGNIVRSSLIVVVVVALGVVLAIEWKKWPRLRTRGSETDGRDQTIALEECNQEGEPGTPANSPSSTSQRISVELPVPI

SEQ ID NO: 39962 - protein, 242 aa, Homo sapiens
  Payload ID: 8141
  Gene Symbol: IGSF1
  Gene Name: immunoglobulin superfamily, member 1
  Uniprot ID: Q8N6C5
  ENSP ID: ENSP00000359937
MTLDRPGEGATMLKTFTVLLFCIRMSLGMTSIVMDPQPELWIESNYPQAPWENITLWCRSPSRISSKFLLLKDKTQMTWIRPSHKTFQVSFLIGALTESNAGLYRCCYWKETGWSKPSKVLELEAPGQLPKPIFWIQAETPALPGCNVNILCHGWLQDLVFMLFKEGYAEPVDYQVPTGTMAIFSIDNLTPEDEGVYICRTHIQMLPTLWSEPSNPLKLVVAGGCGYGCWHLAIVVPGIMAG

SEQ ID NO: 39963 - protein, 242 aa, Homo sapiens; identical to SEQ ID NO: 39962
  Payload ID: 8141
  Gene Symbol: IGSF1
  Gene Name: immunoglobulin superfamily, member 1
  Uniprot ID: Q8N6C5
  ENSP ID: ENSP00000359938

SEQ ID NO: 39964 - protein, 1341 aa, Homo sapiens
  Payload ID: 8141
  Gene Symbol: IGSF1
  Gene Name: immunoglobulin superfamily, member 1
  Uniprot ID: Q8N6C5
  ENSP ID: ENSP00000359940
MTLDRPGEGATMLKTFTVLLFCIRMSLGMTSIVMDPQPELWIESNYPQAPWENITLWCRSPSRISSKFLLLKDKTQMTWIRPSHKTFQVSFLIGALTESNAGLYRCCYWKETGWSKPSKVLELEAPGQLPKPIFWIQAETPALPGCNVNILCHGWLQDLVFMLFKEGYAEPVDYQVPTGTMAIFSIDNLTPEDEGVYICRTHIQMLPTLWSEPSNPLKLVVAGLYPKPTLTAHPGPIMAPGESLNLRCQGPIYGMTFALMRVEDLEKSFYHKKTIKNEANFFFQSLKIQDTGHYLCFYYDASYRGSLLSDVLKIWVTDTFPKTWLLARPSAVVQMGQNVSLRCRGPVDGVGLALYKKGEDKPLQFLDATSIDDNTSFFLNNVTYSDTGIYSCHYLLTWKTSIRMPSHNTVELMVVDKPPKPSLSAWPSTVFKLGKAITLQCRVSHPVLEFSLEWEERETFQKFSVNGDFIISNVDGKGTGTYSCSYRVETHPNIWSHRSEPLKLMGPAGYLTWNYVLNEAIRLSLIMQLVALLLVVLWIRWKCRRLRIREAWLLGTAQGVTMLFIVTALLCCAISFAGLCNGVLIEETEIVMPTPKPELWAETNFPLAPWKNLTLWCRSPSGSTKEFVLLKDGTGWIATRPASEQVRAAFPLGALTQSHTGSYHCHSWEEMAVSEPSEALELVGTDILPKPVISASPTIRGQELQLRCKGWLAGMGFALYKEGEQEPVQQLGAVGREAFFTIQRMEDKDEGNYSCRTHTEKRPFKWSEPSEPLELVIKEMYPKPFFKTWASPVVTPGARVTFNCSTPHQHMSFILYKDGSEIASSDRSWASPGASAAHFLIISVGIGDGGNYSCRYYDFSIWSEPSDPVELVVTEFYPKPTLLAQPGPVVFPGKSVILRCQGTFQGMRFALLQEGAHVPLQFRSVSGNSADFLLHTVGAEDSGNYSCIYYETTMSNRGSYLSMPLMIWVTDTFPKPWLFAEPSSVVPMGQNVTLWCRGPVHGVGYILHKEGEATSMQLWGSTSNDGAFPITNISGTSMGRYSCCYHPDWTSSIKIQPSNTLELLVTGLLPKPSLLAQPGPMVAPGENMTLQCQGELPDSTFVLLKEGAQEPLEQQRPSGYRADFWMPAVRGEDSGIYSCVYYLDSTPFAASNHSDSLEIWVTDKPPKPSLSAWPSTMFKLGKDITLQCRGPLPGVEFVLEHDGEEAPQQFSEDGDFVINNVEGKGIGNYSCSYRLQAYPDIWSEPSDPLELVGAAGPVAQECTVGNIVRSSLIVVVVVALGVVLAIEWKKWPRLRTRGSETDGRDQTIALEECNQEGEPGTPANSPSSTSQRISVELPVPI

SEQ ID NO: 39965 - protein, 1327 aa, Homo sapiens
  Payload ID: 8141
  Gene Symbol: IGSF1
  Gene Name: immunoglobulin superfamily, member 1
  Uniprot ID: Q8N6C5
  ENSP ID: ENSP00000359941
MTLDRPGEGATMLKTFTVLLFCILMDPQPELWIESNYPQAPWENITLWCRSPSRISSKFLLLKDKTQMTWIRPSHKTFQVSFLIGALTESNAGLYRCCYWKETGWSKPSKVLELEAPGQLPKPIFWIQAETPALPGCNVNILCHGWLQDLVFMLFKEGYAEPVDYQVPTGTMAIFSIDNLTPEDEGVYICRTHIQMLPTLWSEPSNPLKLVVAGLYPKPTLTAHPGPIMAPGESLNLRCQGPIYGMTFALMRVEDLEKSFYHKKTIKNEANFFFQSLKIQDTGHYLCFYYDASYRGSLLSDVLKIWVTDTFPKTWLLARPSAVVQMGQNVSLRCRGPVDGVGLALYKKGEDKPLQFLDATSIDDNTSFFLNNVTYSDTGIYSCHYLLTWKTSIRMPSHNTVELMVVDKPPKPSLSAWPSTVFKLGKAITLQCRVSHPVLEFSLEWEERETFQKFSVNGDFIISNVDGKGTGTYSCSYRVETHPNIWSHRSEPLKLMGPAGYLTWNYVLNEAIRLSLIMQLVALLLVVLWIRWKCRRLRIREAWLLGTAQGVTMLFIVTALLCCGLCNGVLIEETEIVMPTPKPELWAETNFPLAPWKNLTLWCRSPSGSTKEFVLLKDGTGWIATRPASEQVRAAFPLGALTQSHTGSYHCHSWEEMAVSEPSEALELVGTDILPKPVISASPTIRGQELQLRCKGWLAGMGFALYKEGEQEPVQQLGAVGREAFFTIQRMEDKDEGNYSCRTHTEKRPFKWSEPSEPLELVIKEMYPKPFFKTWASPVVTPGARVTFNCSTPHQHMSFILYKDGSEIASSDRSWASPGASAAHFLIISVGIGDGGNYSCRYYDFSIWSEPSDPVELVVTEFYPKPTLLAQPGPVVFPGKSVILRCQGTFQGMRFALLQEGAHVPLQFRSVSGNSADFLLHTVGAEDSGNYSCIYYETTMSNRGSYLSMPLMIWVTDTFPKPWLFAEPSSVVPMGQNVTLWCRGPVHGVGYILHKEGEATSMQLWGSTSNDGAFPITNISGTSMGRYSCCYHPDWTSSIKIQPSNTLELLVTGLLPKPSLLAQPGPMVAPGENMTLQCQGELPDSTFVLLKEGAQEPLEQQRPSGYRADFWMPAVRGEDSGIYSCVYYLDSTPFAASNHSDSLEIWVTDKPPKPSLSAWPSTMFKLGKDITLQCRGPLPGVEFVLEHDGEEAPQQFSEDGDFVINNVEGKGIGNYSCSYRLQAYPDIWSEPSDPLELVGAAGPVAQECTVGNIVRSSLIVVVVVALGVVLAIEWKKWPRLRTRGSETDGRDQTIALEECNQEGEPGTPANSPSSTSQRISVELPVPI

SEQ ID NO: 39966 - protein, 1327 aa, Homo sapiens; identical to SEQ ID NO: 39965
  Payload ID: 8141
  Gene Symbol: IGSF1
  Gene Name: immunoglobulin superfamily, member 1
  Uniprot ID: Q8N6C5
  ENSP ID: ENSP00000359947

SEQ ID NO: 39967 - protein, 2623 aa, Homo sapiens
  Payload ID: 8142
  Gene Symbol: IGSF10
  Gene Name: immunoglobulin superfamily, member 10
  Uniprot ID: Q6WRI0
  ENSP ID: ENSP00000282466
MKVKGRGITCLLVSFAVICLVATPGGKACPRRCACYMPTEVHCTFRYLTSIPDSIPPNVERINLGYNSLVRLMETDFSGLTKLELLMLHSNGIHTIPDKTFSDLQALQVLKMSYNKVRKLQKDTFYGLRSLTRLHMDHNNIEFINPEVFYGLNFLRLVHLEGNQLTKLHPDTFVSLSYLQIFKISFIKFLYLSDNFLTSLPQEMVSYMPDLDSLYLHGNPWTCDCHLKWLSDWIQEKPDVIKCKKDRSPSSAQQCPLCMNPRTSKGKPLAMVSAAAFQCAKPTIDSSLKSKSLTILEDSSSAFISPQGFMAPFGSLTLNMTDQSGNEANMVCSIQKPSRTSPIAFTEENDYIVLNTSFSTFLVCNIDYGHIQPVWQILALYSDSPLILERSHLLSETPQLYYKYKQVAPKPEDIFTNIEADLRADPSWLMQDQISLQLNRTATTFSTLQIQYSSDAQITLPRAEMRPVKHKWTMISRDNNTKLEHTVLVGGTVGLNCPGQGDPTPHVDWLLADGSKVRAPYVSEDGRILIDKSGKLELQMADSFDTGVYHCISSNYDDADILTYRITVVEPLVEAYQENGIHHTVFIGETLDLPCHSTGIPDASISWVIPGNNVLYQSSRDKKVLNNGTLRILQVTPKDQGYYRCVAANPSGVDFLIFQVSVKMKGQRPLEHDGETEGSGLDESNPIAHLKEPPGAQLRTSALMEAEVGKHTSSTSKRHNYRELTLQRRGDSTHRRFRENRRHFPPSARRIDPQHWAALLEKAKKNAMPDKRENTTVSPPPVVTQLPNIPGEEDDSSGMLALHEEFMVPATKALNLPARTVTADSRTISDSPMTNINYGTEFSPVVNSQILPPEEPTDFKLSTAIKTTAMSKNINPTMSSQIQGTTNQHSSTVFPLLLGATEFQDSDQMGRGREHFQSRPPITVRTMIKDVNVKMLSSTTNKLLLESVNTTNSHQTSVREVSEPRHNHFYSHTTQILSTSTFPSDPHTAAHSQFPIPRNSTVNIPLFRRFGRQRKIGGRGRIISPYRTPVLRRHRYSIFRSTTRGSSEKSTTAFSATVLNVTCLSCLPRERLTTATAALSFPSAAPITFPKADIARVPSEESTTLVQNPLLLLENKPSVEKTTPTIKYFRTEISQVTPTGAVMTYAPTSIPMEKTHKVNASYPRVSSTNEAKRDSVITSSLSGAITKPPMTIIAITRFSRRKIPWQQNFVNNHNPKGRLRNQHKVSLQKSTAVMLPKTSPALPRDKVSPFHFTTLSTSVMQIPSNTLTTAHHTTTKTHNPGSLPTKKELPFPPLNPMLPSIISKDSSTKSIISTQTAIPATTPTFPASVITYETQTERSRAQTIQREQEPQKKNRTDPNISPDQSSGFTTPTAMTPPVLTTAETSVKPSVSAFTHSPPENTTGISSTISFHSRTLNLTDVIEELAQASTQTLKSTIASETTLSSKSHQSTTTRKAIIRHSTIPPFLSSSATLMPVPISPPFTQRAVTDNVATPISGLMTNTVVKLHESSRHNAKPQQLVAEVATSPKVHPNAKFTIGTTHFIYSNLLHSTPMPALTTVKSQNSKLTPSPWAENQFWHKPYSEIAEKGKKPEVSMLATTGLSEATTLVSDWDGQKNTKKSDFDKKPVQEATTSKLLPFDSLSRYIFEKPRIVGGKAASFTIPANSDAFLPCEAVGNPLPTIHWTRVPSGLDLSKRKQNSRVQVLPNGTLSIQRVEIQDRGQYLCSASNLFGTDHLHVTLSVVSYPPRILERRTKEITVHSGSTVELKCRAEGRPSPTVTWILANQTVVSESSQGSRQAVVTVDGTLVLHNLSIYDRGFYKCVASNPGGQDSLLVKIQVIAAPPVILEQRRQVIVGTWGESLKLPCTAKGTPQPSVYWVLSDGTEVKPLQFTNSKLFLFSNGTLYIRNLASSDRGTYECIATSSTGSERRVVMLTMEERVTSPRIEAASQKRTEVNFGDKLLLNCSATGEPKPQIMWRLPSKAVVDQQHRVGSWIHVYPNGSLFIGSVTEKDSGVYLCVARNKMGDDLILMHVSLRLKPAKIDHKQYFRKQVLHGKDFQVDCKASGSPVPEISWSLPDGTMINNAMQADDSGHRTRRYTLFNNGTLYFNKVGVAEEGDYTCYAQNTLGKDEMKVHLTVITAAPRIRQSNKTNKRIKAGDTAVLDCEVTGDPKPKIFWLLPSNDMISFSIDRYTFHANGSLTINKVKLLDSGEYVCVARNPSGDDTKMYKLDVVSKPPLINGLYTNRTVIKATAVRHSKKHFDCRAEGTPSPEVMWIMPDNIFLTAPYYGSRITVHKNGTLEIRNVRLSDSADFICVARNEGGESVLVVQLEVLEMLRRPTFRNPFNEKIVAQLGKSTALNCSVDGNPPPEIIWILPNGTRFSNGPQSYQYLIASNGSFIISKTTREDAGKYRCAARNKVGYIEKLVILEIGQKPVILTYAPGTVKGISGESLSLHCVSDGIPKPNIKWTMPSGYVVDRPQINGKYILHDNGTLVIKEATAYDRGNYICKAQNSVGHTLITVPVMIVAYPPRITNRPPRSIVTRTGAAFQLHCVALGVPKPEITWEMPDHSLLSTASKERTHGSEQLHLQGTLVIQNPQTSDSGIYKCTAKNPLGSDYAATYIQVI

SEQ ID NO: 39968 - protein, 86 aa, Homo sapiens
  Payload ID: 8142
  Gene Symbol: IGSF10
  Gene Name: immunoglobulin superfamily, member 10
  ENSP ID: ENSP00000417627
TMEERVTSPRIEAASQKRTEVNFGDKLLLNCSATGEPKPQIMWRLPSKAVVDQQHRILDFYFSEAEAMPCSCCNHKTEYPAYYCQV

SEQ ID NO: 39969 - protein, 430 aa, Homo sapiens
  Payload ID: 8143
  Gene Symbol: IGSF11
  Gene Name: immunoglobulin superfamily, member 11
  Uniprot ID: Q5DX21
  ENSP ID: ENSP00000346700
MSLVELLLWWNCFSRTGVAASLEVSESPGSIQVARGQPAVLPCTFTTSAALINLNVIWMVTPLSNANQPEQVILYQGGQMFDGAPRFHGRVGFTGTMPATNVSIFINNTQLSDTGTYQCLVNNLPDIGGRNIGVTGLTVLVPPSAPHCQIQGSQDIGSDVILLCSSEEGIPRPTYLWEKLDNTLKLPPTATQDQVQGTVTIRNISALSSGLYQCVASNAIGTSTCLLDLQVISPQPRNIGLIAGAIGTGAVIIIFCIALILGAFFYWRSKNKEEEEEEIPNEIREDDLPPKCSSAKAFHTEISSSDNNTLTSSNAYNSRYWSNNPKVHRNTESVSHFSDLGQSFSFHSGNANIPSIYANGTHLVPGQHKTLVVTANRGSSPQVMSRSNGSVSRKPRPPHTHSYTISHATLERIGAVPVMVPAQSRAGSLV

SEQ ID NO: 39970 - protein, 431 aa, Homo sapiens
  Payload ID: 8143
  Gene Symbol: IGSF11
  Gene Name: immunoglobulin superfamily, member 11
  Uniprot ID: Q5DX21
  ENSP ID: ENSP00000377370
MTSQRSPLAPLLLLSLHGVAASLEVSESPGSIQVARGQPAVLPCTFTTSAALINLNVIWMVTPLSNANQPEQVILYQGGQMFDGAPRFHGRVGFTGTMPATNVSIFINNTQLSDTGTYQCLVNNLPDIGGRNIGVTGLTVLVPPSAPHCQIQGSQDIGSDVILLCSSEEGIPRPTYLWEKLDNTLKLPPTATQDQVQGTVTIRNISALSSGLYQCVASNAIGTSTCLLDLQVISPQPRNIGLIAGAIGTGAVIIIFCIALILGAFFYWRSKNKEEEEEEIPNEIREDDLPPKCSSAKAFHTEISSSDNNTLTSSNAYNSRYWSNNPKVHRNTESVSHFSDLGQSFSFHSGNANIPSIYANGTHLVPGQHKTLVVTANRGSSPQVMSRSNGSVSRKPRPPHTHSYTISHATLERIGAVPVMVPAQSRAGSLV

SEQ ID NO: 39971 - protein, 406 aa, Homo sapiens
  Payload ID: 8143
  Gene Symbol: IGSF11
  Gene Name: immunoglobulin superfamily, member 11
  Uniprot ID: Q5DX21
  ENSP ID: ENSP00000401240
MSLVELLLWWNCFSRTGVAASLEVSESPGSIQVARGQPAVLPCTFTTSAALINLNVIWMVTPLSNANQPEQVILYQGGQMFDGAPRFHGRVGFTGTMPATNVSIFINNTQLSDTGTYQCLVNNLPDIGGRNIGVTGLTVLVPPSAPHCQIQGSQDIGSDVILLCSSEEGIPRPTYLWEKLDNTLKLPPTATQDQVQGTVTIRNISALSSAQPRNIGLIAGAIGTGAVIIIFCIALILGAFFYWRSKNKEEEEEEIPNEIREDDLPPKCSSAKAFHTEISSSDNNTLTSSNAYNSRYWSNNPKVHRNTESVSHFSDLGQSFSFHSGNANIPSIYANGTHLVPGQHKTLVVTANRGSSPQVMSRSNGSVSRKPRPPHTHSYTISHATLERIGAVPVMVPAQSRAGSLV

SEQ ID NO: 39972 - protein, 430 aa, Homo sapiens; identical to SEQ ID NO: 39969
  Payload ID: 8143
  Gene Symbol: IGSF11
  Gene Name: immunoglobulin superfamily, member 11
  Uniprot ID: Q5DX21
  ENSP ID: ENSP00000406092

SEQ ID NO: 39973 - protein, 403 aa, Homo sapiens
  Payload ID: 8143
  Gene Symbol: IGSF11
  Gene Name: immunoglobulin superfamily, member 11
  ENSP ID: ENSP00000417413
MTSQRSPLAPLLLLSLHGVAASLEVSESPGSIQVARGQPAVLPCTFTTSAALINLNVIWMVTPLSNANQPEQVILYQGGQMFDGAPRFHGRVGFTGTMPATNVSIFINNTQLSDTGTYQCLVNNLPDIGGRNIGVTGLTVLVPPSAPHCQIQGSQDIGSDVILLCSSEEGIPRPTYLWEKLDNTLKLPPTATQDQVQGTVTIRNISALSSGLYQCVASNAIGTSTCLLDLQVISRAFFYWRSKNKEEEEEEIPNEIREDDLPPKCSSAKAFHTEISSSDNNTLTSSNAYNSRYWSNNPKVHRNTESVSHFSDLGQSFSFHSGNANIPSIYANGTHLVPGQHKTLVVTANRGSSPQVMSRSNGSVSRKPRPPHTHSYTISHATLERIGAVPVMVPAQSRAGSLV

SEQ ID NO: 39974 - protein, 32 aa, Homo sapiens
  Payload ID: 8143
  Gene Symbol: IGSF11
  Gene Name: immunoglobulin superfamily, member 11
  ENSP ID: ENSP00000418047
MVTPLSNANQPEQVILYQGGQMFDGAPRFHGR

SEQ ID NO: 39975 - protein, 59 aa, Homo sapiens
  Payload ID: 8143
  Gene Symbol: IGSF11
  Gene Name: immunoglobulin superfamily, member 11
  ENSP ID: ENSP00000418976
MVTPLSNANQPEQVILYQGGQMFDGAPRFHGRVGFTGTMPATNVSIFINNTQLSDTGTY

SEQ ID NO: 39976 - protein, 407 aa, Homo sapiens
  Payload ID: 8143
  Gene Symbol: IGSF11
  Gene Name: immunoglobulin superfamily, member 11
  ENSP ID: ENSP00000420486
MTSQRSPLAPLLLLSLHGVAASLEVSESPGSIQVARGQPAVLPCTFTTSAALINLNVIWMVTPLSNANQPEQVILYQGGQMFDGAPRFHGRVGFTGTMPATNVSIFINNTQLSDTGTYQCLVNNLPDIGGRNIGVTGLTVLVPPSAPHCQIQGSQDIGSDVILLCSSEEGIPRPTYLWEKLDNTLKLPPTATQDQVQGTVTIRNISALSSAQPRNIGLIAGAIGTGAVIIIFCIALILGAFFYWRSKNKEEEEEEIPNEIREDDLPPKCSSAKAFHTEISSSDNNTLTSSNAYNSRYWSNNPKVHRNTESVSHFSDLGQSFSFHSGNANIPSIYANGTHLVPGQHKTLVVTANRGSSPQVMSRSNGSVSRKPRPPHTHSYTISHATLERIGAVPVMVPAQSRAGSLV

SEQ ID NO: 39977 - protein, 903 aa, Homo sapiens
  Payload ID: 8144
  Gene Symbol: IGSF22
  Gene Name: immunoglobulin superfamily, member 22
  Uniprot ID: Q8N9C0
  ENSP ID: ENSP00000322422
MTTIHSRQMLQEHVSMEFSSSTTHVQTFSQTTKIVGEEVVRRKSSSIVEFFSLVTRSSNIPAGDSVPEFVEKPQPVTAPEGDKAVFRARVQGNAKPHISWKRESGIPIKESAKIFYDSINKEHVLKLEPLTSDDSDNYKCIASNDHADAIYTVSLLVTEGQEKMDFKKMLKKRAPPAPKKKQKKVANEKEMLEILSKVPKKDFEKVCMEYGFTDFRGLLRKLKEMKKKVEVEAIRILKPLEDKETKVDTTVVFDCIMELKDPNVKMIWIKGTEPLRIQYSLGKYDVKQMGTKYMLVISNVNMNDAGIYSLSVGDKRMSAELTVLDEPLKFLGEMKPVKVTERQTAVFEIRLSKKEPNFVWKFNGKELKRDDKYEITVSEDGLTHTLKIKDARLSDSGEFSAEAGNLVQKAQLTVDRIPIKFVSNLKNVRVKERSRACLECELTSKDVTLRWKKDGQLLMHGTKYSMNHEGKRAELIIEDAQLSDGGEYTVVAMQDGDPTEYYSTAIVTVEERLATVKSGMSDVHAATGSPAELCVVLNDEKVEGVWLKDGKEITDLPGMQIVKQGAVHKLIFPSMGPEHEGKYTFRAKGTESEASVFIADPPTIDPSVLEALAAHAITVKVGHTAHIKVPFRGKPLPKVTWYKDGMEVTEEERVSMERGEDQALLTISNCVREDSGLILLKLKNDHGSATATLHLSVLEPPGFASQPQVTDVTKEAVTITWNAPTQDGGAPVLGYIVERRKKGSNLWVPVNKDPIQGTKCTVDGLLEDTEYEFRVIAVNKAGPGQPSVPSSSVVAKDPVKPPGLVQDLHVSDSSNSSISLAWREPAEGDPPSGYILEMRAEDTKEWSKCTKIPISGTCYTVGGLIERQKYFFRIRAVNEAGVGEPVELDKGVRAMPPPGLTTT

SEQ ID NO: 39978 - protein, 1326 aa, Homo sapiens
  Payload ID: 8144
  Gene Symbol: IGSF22
  Gene Name: immunoglobulin superfamily, member 22
  Uniprot ID: Q8N9C0
  ENSP ID: ENSP00000421191
MTTIHSRQMLQEHVSMEFSSSTTHVQTFSQTTKIVGEEVVRRKSSSIVEFFSLVTRSSNIPAGDSVPEFVEKPQPVTAPEGDKAVFRARVQGNAKPHISWKRESGIPIKESAKIFYDSINKEHVLKLEPLTSDDSDNYKCIASNDHADAIYTVSLLVTEGQEKMDFKKMLKKRAPPAPKKKQKKVANEKEMLEILSKVPKKDFEKVCMEYGFTDFRGLLRKLKEMKKKVEVEAIRILKPLEDKETKVDTTVVFDCIMELKDPNVKMIWIKGTEPLRIQYSLGKYDVKQMGTKYMLVISNVNMNDAGIYSLSVGDKRMSAELTVLDEPLKFLGEMKPVKVTERQTAVFEIRLSKKEPNFVWKFNGKELKRDDKYEITVSEDGLTHTLKIKDARLSDSGEFSAEAGNLVQKAQLTVDRIPIKFVSNLKNVRVKERSRACLECELTSKDVTLRWKKDGQLLMHGTKYSMNHEGKRAELIIEDAQLSDGGEYTVVAMQDGDPTEYYSTAIVTVEERLATVKSGMSDVHAATGSPAELCVVLNDEKVEGVWLKDGKEITDLPGMQIVKQGAVHKLIFPSMGPEHEGKYTFRAKGTESEASVFIADPPTIDPSVLEALAAHAITVKVGHTAHIKVPFRGKPLPKVTWYKDGMEVTEEERVSMERGEDQALLTISNCVREDSGLILLKLKNDHGSATATLHLSVLDRPKPPQGRVEFLELSGSCVHMKWKAPKDNGGRPVTQFIVERRAVGKKSWIKIGEVDGKVTNFSTNKVEEGKAYQFRILAVNSEGVSDPLETEEVFAGNPIEPPGFASQPQVTDVTKEAVTITWNAPTQDGGAPVLGYIVERRKKGSNLWVPVNKDPIQGTKCTVDGLLEDTEYEFRVIAVNKAGPGQPSVPSSSVVAKDPVKPPGLVQDLHVSDSSNSSISLAWREPAEGDPPSGYILEMRAEDTKEWSKCTKIPISGTCYTVGGLIERQKYFFRIRAVNEAGVGEPVELDKGVRAMPPPAAPKFDLSARLKSHMVVRAGTALCIHAAFSGSPPPDVIWQKDGVPTKGRETITKSKNHSQFLINSTKRSDSGVYRILLQNEFGEARYDIHVRVADFPRPPTNLRLFEEVPNTVTLTWNHSPDVQEDGEAHYIIMKRDASTATWYTAAERVFSNKYTVTGLLPGRKYYFRVVARNEIGDSEPLDSRDTWLINKDQIQDLSAKLKPYEKKDWRHAPRFVTPLKPHTVLRGQDCTMTCAFLGNPRPTVTLYKGDVNITANSKFWYNSTSGVCTLVIPTCTLKDSGDYSVLVENELGKDRSSCTLTVYDKDDKSVVASITESLQKKSKHLM

SEQ ID NO: 39979 - protein, 192 aa, Homo sapiens
  Payload ID: 8145
  Gene Symbol: IGSF23
  Gene Name: immunoglobulin superfamily, member 23
  Uniprot ID: A1L1A6
  ENSP ID: ENSP00000385592
MRAKPQSPLPRNPVPAWSPPTTTTDPMLEKDAAGGDFPANLVLQLMPLKTFPAAIRGVIQSELNYSVILQWVVTMDPEPVLSWTFSGVPCGMGEKLFIRRLSCEQLGTYMCIATNSKKQLVSEPVTISLPKPIMQPTEAEPMEPDPTLSLSGGSAIGLLAAGILGAGALIAGMCFIIIQSLRTDRQRIGICS

SEQ ID NO: 39980 - protein, 138 aa, Homo sapiens
  Payload ID: 8145
  Gene Symbol: IGSF23
  Gene Name: immunoglobulin superfamily, member 23
  ENSP ID: ENSP00000407344
  MOD_RES (1)..(1): Any amino acid
XRGVIQSELNYSVILQWVVTMDPEPVLSWTFSGVPCGMGEKLFIRRLSCEQLGTYMCIATNSKKQLVSEPVTISLPKPIMQPTEAEPMEPDPTLSLSGGSAIGLLAAGILGAGALIAGMCFIIIQSLRTDRQRIGICS

SEQ ID NO: 39981 - protein, 212 aa, Homo sapiens
  Payload ID: 8145
  Gene Symbol: IGSF23
  Gene Name: immunoglobulin superfamily, member 23
  ENSP ID: ENSP00000410629
  MOD_RES (1)..(1): Any amino acid
XRGPLDVSSSHTPTWRKLLLTGALLTSCTCSAFSELPFSAQLNTLTEGASVHLPVPGRLEDSLQLMPLKTFPAAIRGVIQSELNYSVILQWVVTMDPEPVLSWTFSGVPCGMGEKLFIRRLSCEQLGTYMCIATNSKKQLVSEPVTISLPKPIMQPTEAEPMEPDPTLSLSGGSAIGLLAAGILGAGALIAGMCFIIIQSLRTDRQRIGICS

SEQ ID NO: 39982 - protein, 66 aa, Homo sapiens
  Payload ID: 8145
  Gene Symbol: IGSF23
  Gene Name: immunoglobulin superfamily, member 23
  ENSP ID: ENSP00000465887
MKTPCVMRRPSLHSPWTEHEMRGPLDVSSSHTPTWRKLLLTDSLQLMPLKTFPAAIRGVIQSELNY

SEQ ID NO: 39983 - protein, 1214 aa, Homo sapiens
  Payload ID: 8146
  Gene Symbol: IGSF3
  Gene Name: immunoglobulin superfamily, member 3
  Uniprot ID: O75054
  ENSP ID: ENSP00000321184
MKCFFPVLSCLAVLGVVSAQRQVTVQEGPLYRTEGSHITIWCNVSGYQGPSEQNFQWSIYLPSSPEREVQIVSTMDSSFPYAIYTQRVRGGKIFIERVQGNSTLLHITDLQARDAGEYECHTPSTDKQYFGSYSAKMNLVVIPDSLQTTAMPQTLHRVEQDPLELTCEVASETIQHSHLSVAWLRQKVGEKPVEVISLSRDFMLHSSSEYAQRQSLGEVRLDKLGRTTFRLTIFHLQPSDQGEFYCEAAEWIQDPDGSWYAMTRKRSEGAVVNVQPTDKEFTVRLETEKRLHTVGEPVEFRCILEAQNVPDRYFAVSWAFNSSLIATMGPNAVPVLNSEFAHREARGQLKVAKESDSVFVLKIYHLRQEDSGKYNCRVTEREKTVTGEFIDKESKRPKNIPIIVLPLTDNWVVKVPQHHQLLSQGHLESSISVEVASNASVILEGEDLRFSCSVRTAGRPQGRFSVIWQLVDRQNRRSNIMWLDRDGTVQPGSSYWERSSFGGVQMEQVQPNSFSLGIFNSRKEDEGQYECHVTEWVRAVDGEWQIVGERRASTPISITALEMGFAVTAISRTPGVTYSDSFDLQCIIKPHYPAWVPVSVTWRFQPVGTVEFHDLVTFTRDGGVQWGDRSSSFRTRTAIEKAESSNNVRLSISRASDTEAGKYQCVAELWRKNYNNTWTRLAERTSNLLEIRVLQPVTKLQVSKSKRTLTLVENKPIQLNCSVKSQTSQNSHFAVLWYVHKPSDADGKLILKTTHNSAFEYGTYAEEEGLRARLQFERHVSGGLFSLTVQRAEVSDSGSYYCHVEEWLLSPNYAWYKLAEEVSGRTEVTVKQPDSRLRLSQAQGNLSVLETRQVQLECVVLNRTSITSQLMVEWFVWKPNHPERETVARLSRDATFHYGEQAAKNNLKGRLHLESPSPGVYRLFIQNVAVQDSGTYSCHVEEWLPSPSGMWYKRAEDTAGQTALTVMRPDASLQVDTVVPNATVSEKAAFQLDCSIVSRSSQDSRFAVAWYSLRTKAGGKRSSPGLEEQEEEREEEEEEDDDDDDDPTERTALLSVGPDAVFGPEGSPWEGRLRFQRLSPVLYRLTVLQASPQDTGNYSCHVEEWLPSPQKEWYRLTEEESAPIGIRVLDTSPTLQSIICSNDALFYFVFFYPFPIFGILIITILLVRFKSRNSSKNSDGKNGVPLLWIKEPHLNYSPTCLEPPVLSIHPGAID

SEQ ID NO: 39984 - protein, 1214 aa, Homo sapiens; identical to SEQ ID NO: 39983
  Payload ID: 8146
  Gene Symbol: IGSF3
  Gene Name: immunoglobulin superfamily, member 3
  Uniprot ID: O75054
  ENSP ID: ENSP00000358495

SEQ ID NO: 39985 - protein, 1194 aa, Homo sapiens
  Payload ID: 8146
  Gene Symbol: IGSF3
  Gene Name: immunoglobulin superfamily, member 3
  Uniprot ID: O75054
  ENSP ID: ENSP00000358498
MKCFFPVLSCLAVLGVVSAQRQVTVQEGPLYRTEGSHITIWCNVSGYQGPSEQNFQWSIYLPSSPEREVQIVSTMDSSFPYAIYTQRVRGGKIFIERVQGNSTLLHITDLQARDAGEYECHTPSTDKQYFGSYSAKMNLVVIPDSLQTTAMPQTLHRVEQDPLELTCEVASETIQHSHLSVAWLRQKVGEKPVEVISLSRDFMLHSSSEYAQRQSLGEVRLDKLGRTTFRLTIFHLQPSDQGEFYCEAAEWIQDPDGSWYAMTRKRSEGAVVNVQPTDKEFTVRLETEKRLHTVGEPVEFRCILEAQNVPDRYFAVSWAFNSSLIATMGPNAVPVLNSEFAHREARGQLKVAKESDSVFVLKIYHLRQEDSGKYNCRVTEREKTVTGEFIDKESKRPKNIPIIVLPLKSSISVEVASNASVILEGEDLRFSCSVRTAGRPQGRFSVIWQLVDRQNRRSNIMWLDRDGTVQPGSSYWERSSFGGVQMEQVQPNSFSLGIFNSRKEDEGQYECHVTEWVRAVDGEWQIVGERRASTPISITALEMGFAVTAISRTPGVTYSDSFDLQCIIKPHYPAWVPVSVTWRFQPVGTVEFHDLVTFTRDGGVQWGDRSSSFRTRTAIEKAESSNNVRLSISRASDTEAGKYQCVAELWRKNYNNTWTRLAERTSNLLEIRVLQPVTKLQVSKSKRTLTLVENKPIQLNCSVKSQTSQNSHFAVLWYVHKPSDADGKLILKTTHNSAFEYGTYAEEEGLRARLQFERHVSGGLFSLTVQRAEVSDSGSYYCHVEEWLLSPNYAWYKLAEEVSGRTEVTVKQPDSRLRLSQAQGNLSVLETRQVQLECVVLNRTSITSQLMVEWFVWKPNHPERETVARLSRDATFHYGEQAAKNNLKGRLHLESPSPGVYRLFIQNVAVQDSGTYSCHVEEWLPSPSGMWYKRAEDTAGQTALTVMRPDASLQVDTVVPNATVSEKAAFQLDCSIVSRSSQDSRFAVAWYSLRTKAGGKRSSPGLEEQEEEREEEEEEDDDDDDDPTERTALLSVGPDAVFGPEGSPWEGRLRFQRLSPVLYRLTVLQASPQDTGNYSCHVEEWLPSPQKEWYRLTEEESAPIGIRVLDTSPTLQSIICSNDALFYFVFFYPFPIFGILIITILLVRFKSRNSSKNSDGKNGVPLLWIKEPHLNYSPTCLEPPVLSIHPGAID

SEQ ID NO: 39986 - protein, 5 aa, Homo sapiens
  Payload ID: 8146
  Gene Symbol: IGSF3
  Gene Name: immunoglobulin superfamily, member 3
  ENSP ID: ENSP00000474657
MDSSF

SEQ ID NO: 39987 - protein, 407 aa, Homo sapiens
  Payload ID: 8147
  Gene Symbol: IGSF5
  Gene Name: immunoglobulin superfamily, member 5
  Uniprot ID: Q9NSI5
  ENSP ID: ENSP00000369962
MGQKERSTADTLPDLEEWKSAAGLRWWQTAVVDGSGSGNEVIEGPQNARVLKGSQARFNCTVSQGWKLIMWALSDMVVLSVRPMEPIITNDRFTSQRYDQGGNFTSEMIIHNVEPSDSGNIRCSLQNSRLHGSAYLTVQVMGELFIPSVNLVVAENEPCEVTCLPSHWTRLPDISWELGLLVSHSSYYFVPEPSDLQSAVSILALTPQSNGTLTCVATWKSLKARKSATVNLTVIRCPQDTGGGINIPGVLSSLPSLGFSLPTWGKVGLGLAGTMLLTPTCTLTIRCCCCRRRCCGCNCCCRCCFCCRRKRGFRIQFQKKSEKEKTNKETETESGNENSGYNSDEQKTTDTASLPPKSCESSDPEQRNSSCGPPHQRADQRPPRPASHPQASFNLASPEKVSNTTVV

SEQ ID NO: 39988 - protein, 241 aa, Homo sapiens
  Payload ID: 8148
  Gene Symbol: IGSF6
  Gene Name: immunoglobulin superfamily, member 6
  Uniprot ID: O95976
  ENSP ID: ENSP00000268389
MGTASRSNIARHLQTNLILFCVGAVGACTLSVTQPWYLEVDYTHEAVTIKCTFSATGCPSEQPTCLWFRYGAHQPENLCLDGCKSEADKFTVREALKENQVSLTVNRVTSNDSAIYICGIAFPSVPEARAKQTGGGTTLVVREIKLLSKELRSFLTALVSLLSVYVTGVCVAFILLSKSKSNPLRNKEIKEDSQKKKSARRIFQEIAQELYHKRHVETNQQSEKDNNTYENRRVLSNYERP

SEQ ID NO: 39989 - protein, 120 aa, Homo sapiens
  Payload ID: 8148
  Gene Symbol: IGSF6
  Gene Name: immunoglobulin superfamily, member 6
  ENSP ID: ENSP00000454916
MGTASRSNIARHLQTNLILFCVGAVGACTLSVTQPWYLEVDYTHEAVTIKCTFSATGCPSEQPTCLWFRYGAHQPENLCLDGCKKIKLLSKELRSFLTALVSLLSVYVTGVCVAFILLSK

SEQ ID NO: 39990 - protein, 613 aa, Homo sapiens
  Payload ID: 8149
  Gene Symbol: IGSF8
  Gene Name: immunoglobulin superfamily, member 8
  Uniprot ID: Q969P0
  ENSP ID: ENSP00000316664
MGALRPTLLPPSLPLLLLLMLGMGCWAREVLVPEGPLYRVAGTAVSISCNVTGYEGPAQQNFEWFLYRPEAPDTALGIVSTKDTQFSYAVFKSRVVAGEVQVQRLQGDAVVLKIARLQAQDAGIYECHTPSTDTRYLGSYSGKVELRVLPDVLQVSAAPPGPRGRQAPTSPPRMTVHEGQELALGCLARTSTQKHTHLAVSFGRSVPEAPVGRSTLQEVVGIRSDLAVEAGAPYAERLAAGELRLGKEGTDRYRMVVGGAQAGDAGTYHCTAAEWIQDPDGSWAQIAEKRAVLAHVDVQTLSSQLAVTVGPGERRIGPGEPLELLCNVSGALPPAGRHAAYSVGWEMAPAGAPGPGRLVAQLDTEGVGSLGPGYEGRHIAMEKVASRTYRLRLEAARPGDAGTYRCLAKAYVRGSGTRLREAASARSRPLPVHVREEGVVLEAVAWLAGGTVYRGETASLLCNISVRGGPPGLRLAASWWVERPEDGELSSVPAQLVGGVGQDGVAELGVRPGGGPVSVELVGPRSHRLRLHSLGPEDEGVYHCAPSAWVQHADYSWYQAGSARSGPVTVYPYMHALDTLFVPLLVGTGVALVTGATVLGTITCCFMKRLRKR

SEQ ID NO: 39991 - protein, 613 aa, Homo sapiens; identical to SEQ ID NO: 39990
  Payload ID: 8149
  Gene Symbol: IGSF8
  Gene Name: immunoglobulin superfamily, member 8
  Uniprot ID: Q969P0
  ENSP ID: ENSP00000357065

SEQ ID NO: 39992 - protein, 301 aa, Homo sapiens
  Payload ID: 8149
  Gene Symbol: IGSF8
  Gene Name: immunoglobulin superfamily, member 8
  ENSP ID: ENSP00000397464
MGALRPTLLPPSLPLLLLLMLGMGCWAREVLVPEGPLYRVAGTAVSISCNVTGYEGPAQQNFEWFLYRPEAPDTALGIVSTKDTQFSYAVFKSRVVAGEVQVQRLQGDAVVLKIARLQAQDAGIYECHTPSTDTRYLGSYSGKVELRVLPDVLQVSAAPPGPRGRQAPTSPPRMTVHEGQELALGCLARTSTQKHTHLAVSFGRSVPEAPVGRSTLQEVVGIRSDLAVEAGAPYAERLAAGELRLGKEGTDRYRMVVGGAQAGDAGTYHCTAAEWIQDPDGSWAQIAEKRAVLAHVDVQTL

SEQ ID NO: 39993 - protein, 613 aa, Homo sapiens; identical to SEQ ID NO: 39990
  Payload ID: 8149
  Gene Symbol: IGSF8
  Gene Name: immunoglobulin superfamily, member 8
  Uniprot ID: Q969P0
  ENSP ID: ENSP00000477565

SEQ ID NO: 39994 - protein, 1163 aa, Homo sapiens
  Payload ID: 8150
  Gene Symbol: IGSF9
  Gene Name: immunoglobulin superfamily, member 9
  Uniprot ID: Q9P2J2
  ENSP ID: ENSP00000355049
MVWCLGLAVLSLVISQGADGRGKPEVVSVVGRAGESVVLGCDLLPPAGRPPLHVIEWLRFGFLLPIFIQFGLYSPRIDPDYVGRVRLQKGASLQIEGLRVEDQGWYECRVFFLDQHIPEDDFANGSWVHLTVNSPPQFQETPPAVLEVQELEPVTLRCVARGSPLPHVTWKLRGKDLGQGQGQVQVQNGTLRIRRVERGSSGVYTCQASSTEGSATHATQLLVLGPPVIVVPPKNSTVNASQDVSLACHAEAYPANLTYSWFQDNINVFHISRLQPRVRILVDGSLRLLATQPDDAGCYTCVPSNGLLHPPSASAYLTVLCMPGVIRCPVRANPPLLFVSWTKDGKALQLDKFPGWSQGTEGSLIIALGNEDALGEYSCTPYNSLGTAGPSPVTRVLLKAPPAFIERPKEEYFQEVGRELLIPCSAQGDPPPVVSWTKVGRGLQGQAQVDSNSSLILRPLTKEAHGHWECSASNAVARVATSTNVYVLGTSPHVVTNVSVVALPKGANVSWEPGFDGGYLQRFSVWYTPLAKRPDRMHHDWVSLAVPVGAAHLLVPGLQPHTQYQFSVLAQNKLGSGPFSEIVLSAPEGLPTTPAAPGLPPTEIPPPLSPPRGLVAVRTPRGVLLHWDPPELVPKRLDGYVLEGRQGSQGWEVLDPAVAGTETELLVPGLIKDVLYEFRLVAFAGSFVSDPSNTANVSTSGLEVYPSRTQLPGLLPQPVLAGVVGGVCFLGVAVLVSILAGCLLNRRRAARRRRKRLRQDPPLIFSPTGKSAAPSALGSGSPDSVAKLKLQGSPVPSLRQSLLWGDPAGTPSPHPDPPSSRGPLPLEPICRGPDGRFVMGPTVAAPQERSGREQAEPRTPAQRLARSFDCSSSSPSGAPQPLCIEDISPVAPPPAAPPSPLPGPGPLLQYLSLPFFREMNVDGDWPPLEEPSPAAPPDYMDTRRCPTSSFLRSPETPPVSPRESLPGAVVGAGATAEPPYTALADWTLRERLLPGLLPAAPRGSLTSQSSGRGSASFLRPPSTAPSAGGSYLSPAPGDTSSWASGPERWPRREHVVTVSKRRNTSVDENYEWDSEFPGDMELLETLHLGLASSRLRPEAEPELGVKTPEEGCLLNTAHVTGPEARCAALREEFLAFRRRRDATRARLPAYRQPVPHPEQATLL

SEQ ID NO: 39995 - protein, 1179 aa, Homo sapiens
  Payload ID: 8150
  Gene Symbol: IGSF9
  Gene Name: immunoglobulin superfamily, member 9
  Uniprot ID: Q9P2J2
  ENSP ID: ENSP00000357073
MVWCLGLAVLSLVISQGADGRGKPEVVSVVGRAGESVVLGCDLLPPAGRPPLHVIEWLRFGFLLPIFIQFGLYSPRIDPDYVGRVRLQKGASLQIEGLRVEDQGWYECRVFFLDQHIPEDDFANGSWVHLTVNSPPQFQETPPAVLEVQELEPVTLRCVARGSPLPHVTWKLRGKDLGQGQGQVQVQNGTLRIRRVERGSSGVYTCQASSTEGSATHATQLLVLGPPVIVVPPKNSTVNASQDVSLACHAEAYPANLTYSWFQDNINVFHISRLQPRVRILVDGSLRLLATQPDDAGCYTCVPSNGLLHPPSASAYLTVLYPAQVTAMPPETPLPIGMPGVIRCPVRANPPLLFVSWTKDGKALQLDKFPGWSQGTEGSLIIALGNEDALGEYSCTPYNSLGTAGPSPVTRVLLKAPPAFIERPKEEYFQEVGRELLIPCSAQGDPPPVVSWTKVGRGLQGQAQVDSNSSLILRPLTKEAHGHWECSASNAVARVATSTNVYVLGTSPHVVTNVSVVALPKGANVSWEPGFDGGYLQRFSVWYTPLAKRPDRMHHDWVSLAVPVGAAHLLVPGLQPHTQYQFSVLAQNKLGSGPFSEIVLSAPEGLPTTPAAPGLPPTEIPPPLSPPRGLVAVRTPRGVLLHWDPPELVPKRLDGYVLEGRQGSQGWEVLDPAVAGTETELLVPGLIKDVLYEFRLVAFAGSFVSDPSNTANVSTSGLEVYPSRTQLPGLLPQPVLAGVVGGVCFLGVAVLVSILAGCLLNRRRAARRRRKRLRQDPPLIFSPTGKSAAPSALGSGSPDSVAKLKLQGSPVPSLRQSLLWGDPAGTPSPHPDPPSSRGPLPLEPICRGPDGRFVMGPTVAAPQERSGREQAEPRTPAQRLARSFDCSSSSPSGAPQPLCIEDISPVAPPPAAPPSPLPGPGPLLQYLSLPFFREMNVDGDWPPLEEPSPAAPPDYMDTRRCPTSSFLRSPETPPVSPRESLPGAVVGAGATAEPPYTALADWTLRERLLPGLLPAAPRGSLTSQSSGRGSASFLRPPSTAPSAGGSYLSPAPGDTSSWASGPERWPRREHVVTVSKRRNTSVDENYEWDSEFPGDMELLETLHLGLASSRLRPEAEPELGVKTPEEGCLLNTAHVTGPEARCAALREEFLAFRRRRDATRARLPAYRQPVPHPEQATLL

SEQ ID NO: 39996 - protein, 717 aa, Homo sapiens
  Payload ID: 8150
  Gene Symbol: IGSF9
  Gene Name: immunoglobulin superfamily, member 9
  ENSP ID: ENSP00000483854
MVWCLGLAVLSLVISQGADGRGKPEVVSVVGRAGESVVLGCDLLPPAGRPPLHVIEWLRFGFLLPIFIQFGLYSPRIDPDYVGRVRLQKGASLQIEGLRVEDQGWYECRVFFLDQHIPEDDFANGSWVHLTVNSPPQFQETPPAVLEVQELEPVTLRCVARGSPLPHVTWKLRGKDLGQGQGQVQVQNGTLRIRRVERGSSGVYTCQASSTEGSATHATQLLVLGPPVIVVPPKNSTVNASQDVSLACHAEAYPANLTYSWFQDNINVFHISRLQPRVRILVDGSLRLLATQPDDAGCYTCVPSNGLLHPPSASAYLTVLYPAQVTAMPPETPLPIGMPGVIRCPVRANPPLLFVSWTKDGKALQLDKFPGWSQGTEGSLIIALGNEDALGEYSCTPYNSLGTAGPSPVTRVLLKAPPAFIERPKEEYFQEVGRELLIPCSAQGDPPPAAPPSPLPGPGPLLQYLSLPFFREMNVDGDWPPLEEPSPAAPPDYMDTRRCPTSSFLRSPETPPVSPRESLPGAVVGAGATAEPPYTALADWTLRERLLPGLLPAAPRGSLTSQSSGRGSASFLRPPSTAPSAGGSYLSPAPGDTSSWASGPERWPRREHVVTVSKRRNTSVDENYEWDSEFPGDMELLETLHLGLASSRLRPEAEPELGVKTPEEGCLLNTAHVTGPEARCAALREEFLAFRRRRDATRARLPAYRQPVPHPEQATLL

SEQ ID NO: 39997 - protein, 1349 aa, Homo sapiens
  Payload ID: 8151
  Gene Symbol: IGSF9B
  Gene Name: immunoglobulin superfamily, member 9B
  Uniprot ID: Q9UPX0
  ENSP ID: ENSP00000317980
MIWYVATFIASVIGTRGLAAEGAHGLREEPEFVTARAGESVVLRCDVIHPVTGQPPPYVVEWFKFGVPIPIFIKFGYYPPHVDPEYAGRASLHDKASLRLEQVRSEDQGWYECKVLMLDQQYDTFHNGSWVHLTINAPPTFTETPPQYIEAKEGGSITMTCTAFGNPKPIVTWLKEGTLLGASGKYQVSDGSLTVTSVSREDRGAYTCRAYSIQGEAVHTTHLLVQGPPFIVSPPENITVNISQDALLTCRAEAYPGNLTYTWYWQDENVYFQNDLKLRVRILIDGTLIIFRVKPEDSGKYTCVPSNSLGRSPSASAYLTVQYPARVLNMPPVIYVPVGIHGYIRCPVDAEPPATVVKWNKDGRPLQVEKNLGWTLMEDGSIRIEEATEEALGTYTCVPYNTLGTMGQSAPARLVLKDPPYFTVLPGWEYRQEAGRELLIPCAAAGDPFPVITWRKVGKPSRSKHSALPSGSLQFRALSKEDHGEWECVATNVVTSITASTHLTVIGTSPHAPGSVRVQVSMTTANVSWEPGYDGGYEQTFSVWMKRAQFGPHDWLSLPVPPGPSWLLVDTLEPETAYQFSVLAQNKLGTSAFSEVVTVNTLAFPITTPEPLVLVTPPRCLIANRTQQGVLLSWLPPANHSFPIDRYIMEFRVAERWELLDDGIPGTEGEFFAKDLSQDTWYEFRVLAVMQDLISEPSNIAGVSSTDIFPQPDLTEDGLARPVLAGIVATICFLAAAILFSTLAACFVNKQRKRKLKRKKDPPLSITHCRKSLESPLSSGKVSPESIRTLRAPSESSDDQGQPAAKRMLSPTREKELSLYKKTKRAISSKKYSVAKAEAEAEATTPIELISRGPDGRFVMDPAEMEPSLKSRRIEGFPFAEETDMYPEFRQSDEENEDPLVPTSVAALKSQLTPLSSSQESYLPPPAYSPRFQPRGLEGPGGLEGRLQATGQARPPAPRPFHHGQYYGYLSSSSPGEVEPPPFYVPEVGSPLSSVMSSPPLPTEGPFGHPTIPEENGENASNSTLPLTQTPTGGRSPEPWGRPEFPFGGLETPAMMFPHQLPPCDVPESLQPKAGLPRGLPPTSLQVPAAYPGILSLEAPKGWAGKSPGRGPVPAPPAAKWQDRPMQPLVSQGQLRHTSQGMGIPVLPYPEPAEPGAHGGPSTFGLDTRWYEPQPRPRPSPRQARRAEPSLHQVVLQPSRLSPLTQSPLSSRTGSPELAARARPRPGLLQQAEMSEITLQPPAAVSFSRKSTPSTGSPSQSSRSGSPSYRPAMGFTTLATGYPSPPPGPAPAGPGDSLDVFGQTPSPRRTGEELLRPETPPPTLPTSGKLQRDRPAPATSPPERALSKL

SEQ ID NO: 39998 - protein, 206 aa, Homo sapiens
  Payload ID: 8151
  Gene Symbol: IGSF9B
  Gene Name: immunoglobulin superfamily, member 9B
  ENSP ID: ENSP00000434026
SFLCPTWPSPSGAHGLREEPEFVTARAGESVVLRCDVIHPVTGQPPPYVVEWFKFGVPIPIFIKFGYYPPHVDPEYAGRASLHDKASLRLEQVRSEDQGWYECKVLMLDQQYDTFHNGSWVHLTINAPPTFTETPPQYIEAKEGGSITMTCTAFGNPKPIVTWLKEGTLLGASGKYQVSDGSLTVTSVSREDRGAYTCRAYSIQGE

SEQ ID NO: 39999 - protein, 162 aa, Homo sapiens
  Payload ID: 8151
  Gene Symbol: IGSF9B
  Gene Name: immunoglobulin superfamily, member 9B
  ENSP ID: ENSP00000435989
MGPPRGLWRKSPSAPELGGVSAGLTVLSEKVPLSLAFCPLWPLASLLVVCAPEMERGPVTCTQAQTVRGAHGLREEPEFVTARAGESVVLRCDVIHPVTGQPPPYVVEWFKFGVPIPIFIKFGYYPPHVDPEYAGRASLHDKASLRLEQVRSEDQGWYECKV

SEQ ID NO: 40000 - protein, 1437 aa, Homo sapiens
  Payload ID: 8151
  Gene Symbol: IGSF9B
  Gene Name: immunoglobulin superfamily, member 9B
  Uniprot ID: Q9UPX0
  ENSP ID: ENSP00000436552
MIWYVATFIASVIGTRGLAAEGAHGLREEPEFVTARAGESVVLRCDVIHPVTGQPPPYVVEWFKFGVPIPIFIKFGYYPPHVDPEYAGRASLHDKASLRLEQVRSEDQGWYECKVLMLDQQYDTFHNGSWVHLTINAPPTFTETPPQYIEAKEGGSITMTCTAFGNPKPIVTWLKEGTLLGASGKYQVSDGSLTVTSVSREDRGAYTCRAYSIQGEAVHTTHLLVQGPPFIVSPPENITVNISQDALLTCRAEAYPGNLTYTWYWQDENVYFQNDLKLRVRILIDGTLIIFRVKPEDSGKYTCVPSNSLGRSPSASAYLTVQYPARVLNMPPVIYVPVGIHGYIRCPVDAEPPATVVKWNKDGRPLQVEKNLGWTLMEDGSIRIEEATEEALGTYTCVPYNTLGTMGQSAPARLVLKDPPYFTVLPGWEYRQEAGRELLIPCAAAGDPFPVITWRKVGKPSRSKHSALPSGSLQFRALSKEDHGEWECVATNVVTSITASTHLTVIGTSPHAPGSVRVQVSMTTANVSWEPGYDGGYEQTFSVWMKRAQFGPHDWLSLPVPPGPSWLLVDTLEPETAYQFSVLAQNKLGTSAFSEVVTVNTLAFPITTPEPLVLVTPPRCLIANRTQQGVLLSWLPPANHSFPIDRYIMEFRVAERWELLDDGIPGTEGEFFAKDLSQDTWYEFRVLAVMQDLISEPSNIAGVSSTDIFPQPDLTEDGLARPVLAGIVATICFLAAAILFSTLAACFVNKQRKRKLKRKKDPPLSITHCRKSLESPLSSGKVSPESIRTLRAPSESSDDQGQPAAKRMLSPTREKELSLYKKTKRAISSKKYSVAKAEAEAEATTPIELISRGPDGRFVMDPAEMEPSLKSRRIEGFPFAEETDMYPEFRQSDEENEDPLVPTSVAALKSQLTPLSSSQESYLPPPAYSPRFQPRGLEGPGGLEGRLQATGQARPPAPRPFHHGQYYGYLSSSSPGEVEPPPFYVPEVGSPLSSVMSSPPLPTEGPFGHPTIPEENGENASNSTLPLTQTPTGGRSPEPWGRPEFPFGGLETPAMMFPHQLPPCDVPESLQPKAGLPRGLPPTSLQVPAAYPGILSLEAPKGWAGKSPGRGPVPAPPAAKWQDRPMQPLVSQGQLRHTSQGMGIPVLPYPEPAEPGAHGGPSTFGLDTRWYEPQPRPRPSPRQARRAEPSLHQVVLQPSRLSPLTQSPLSSRTGSPELAARARPRPGLLQQAEMSEITLQPPAAVSFSRKSTPSTGSPSQSSRSGSPSYRPAMGFTTLATGYPSPPPGPAPAGPGDSLDVFGQTPSPRRTGEELLRPETPPPTLPTSGTLPPAPGNAAAPERLEALKYQRIKKPKKSSKGSSKSKKRSDDSASQTQQLPNSQVLWPDEAVCLRKKKRHSRPDPFARLSDLCHRQLPEDQTAILNSVDHDDPGHATLL

SEQ ID NO: 40001 - protein, 1251 aa, Homo sapiens
  Payload ID: 8152
  Gene Symbol: IGFN1
  Gene Name: immunoglobulin-like and fibronectin type III domain containing 1
  Uniprot ID: Q86VF2
  ENSP ID: ENSP00000295591
MAGKLRKSHIPGVSIWQLVEEIPEGCSTPDFEQKPVTSALPEGKNAVFRAVVCGEPRPEVRWQNSKGDLSDSSKYKISSSPGSKEHVLQINKLTGEDTDLYRCTAVNAYGEAACSVRLTVIEVGFRKNRKRHREPQEDLRKELMDFRKLLKKRAPPAPKKKMDLEQIWQLLMTADRKDYEKICLKYGIVDYRGMLRRLQEMKKEQEDKMAQYINTISSLRHIRVTKDGNAKFDLELDLKDSQSKIYLYKDGEMIPYGFNNQTKHCLRRLGKRYEFQIQDLRPEDSGIYQVKVEDAVVFSTELEASAIPPRVVVPLAETHCEEQGDAVFECTLSSPCPSAAWHFRHRLLHPSDKYEVYVSPDGLTHRLVVRGARFSDMGPYSLGTGLYTSSAWLVVEAGKDKDLQSTSADHKLQSRRSGKDGRLDIYGERRDATRSSTSRYKPGTGSFSKDAQGPMGHFSQGLADMEVQPGEAATLSCTLTSDLGPGTWFKDGVKLTTQDGVIFKQDGLVHSLFITHVQGTQAGRYTFVAGDQQSEATLTVQDSPTIAPDVTEKLREPLVVKAGKPVIVKIPFQSHLPIQAAWRKDGAEVVGSSDREAQVDLGDGYTRLCLPSAGRKDCGQYSVTLRSEGGSVQAELTLQVIDKPDPPQGPMEVQDCHRAGVCLRWRPPRDNGGRTVECYVVERRQAGRSTWLKVGEAPADSTTFTDAHVEPGRKYTFRVRAVTSEGAGEALESEEILVAPEALPKAPSAPAILSASSQGITLTWTAPRGPGSAHILGYLIERRKKGSNTWTAVNDQPVPERRWTVADVRQGCQYEFRVTAVAPSGPGEPGPPSDAVFARDPMRPPGLVRNLQVTDRSNTSITLSWAGPDTQEGDEAQGYVVELCSSDSLQWLPCHVGTVPVTTYTAKGLRPGEGYFVRVTAVNEGGQSQPSALDTLVQAMPVTVCPKFLVDSSTKDLLTVKVGDTVRVPVSFEAMPMPEVTWLKDGLPLPKRSVTVTKDGLTQLLIPVAGLSDSGLYTVVLRTLQGKEVAHSFRIRVAACPQAPGPIHLQENVPGTVTAEWEPSPDEAQDVPLHYAVFTRSSAHGPWHEAADRIHTNRFTLLGILPGHEYHFRVVAKNELGASKPSDTSQPWCIPRQRDRFTVKAPCYREPDLSQKPRFLVGLRSHLLPQGCECCMSCAVQGSPRPHVTWFKNDRSLEGNPAVYSTDLLGVCSLTIPSVSPKDSGEYKAVAENTLGQAVSTATLIVIEPST

SEQ ID NO: 40002 - protein, 3708 aa, Homo sapiens
  Payload ID: 8152
  Gene Symbol: IGFN1
  Gene Name: immunoglobulin-like and fibronectin type III domain containing 1
  Uniprot ID: Q86VF2
  ENSP ID: ENSP00000334714
MAGKLRKSHIPGVSIWQLVEEIPEGCSTPDFEQKPVTSALPEGKNAVFRAVVCGEPRPEVRWQNSKGDLSDSSKYKISSSPGSKEHVLQINKLTGEDTDLYRCTAVNAYGEAACSVRLTVIEVGFRKNRKRHREPQEDLRKELMDFRKLLKKRAPPAPKKKMDLEQIWQLLMTADRKDYEKICLKYGIVDYRGMLRRLQEMKKEQEDKMAQYINTISSLRHIRVTKDGNAKFDLELDLKDSQSKIYLYKDGEMIPYGFNNQTKHCLRRLGKRYEFQIQDLRPEDSGIYQVKVEDAVVFSTELEASAIPPRVVVPLAETHCEEQGDAVFECTLSSPCPSAAWHFRHRLLHPSDKYEVYVSPDGLTHRLVVRGARFSDMGPYSLGTGLYTSSAWLVVEAGKDKDLQSTSADHKLQRQGAQASGAEESGSIESQGEKSREQGPRGGSLEGAGPASGLQHIASPDRDGLGRHGYSLMGDKGTADSAWGPGQEGEGFPVAEGSRATLPRENQSHREGGWARSLAERPHLQGESSESGLGLPEKQQQDRGRDSNSDECWRKAGGWEAGSSRLQAGGLGSSREGKEHRGDSGRQLDRHAPEQLWDARLGPGRGKSDLQGCQSDPVGSWPRGKQIEISQDDSLAEMDRGDAPSRERGRGIVVWGGGTGLGEAGDSNGAGGPGTLELTGGRGSGSKVGMAPESWGSQGGRDADYGEARGYWGSGELLEQIPGGKDFQEPSISGGRKFLLGDGSPEIKAEDSLQEADGICRGESVVTGSAYKTGPGGPGDPRGCEGVLQELRGRDGQETAWASGEVEYDPRSFQSSQGWTAGHRAAGGIGRIESKGTSPWDDTPSSLRKTGAHHGPGVLGPSGGQEGMGGIWVAGLTESGQGVDARSHWLSRAPGLGAQGSGGTLGDKKGLRGPGSIGSEPDFWNGSGSSRVKGPRGETGYKDGLEGPGRMESRYEGGLGYSREISSKSGAGYSYGSGVPGEMGSGHGAGCRVSPRAPAGVESEEGGGYRHGSGAPGGVWSGNEDSGPAGGGSGRVASLKNGSGGPDGAPMNDTRNWASACQAGMDPRGGHHSDGGLGSPGVTGSAGRGGLKAPGVVETVGMGCVEAEPESSGRIRPWGQTGNYGGFRASEALGAFGEGGYEDGSGGPGAMGPGSLRAGSKVGEGDGTRCPGAKASGAGAGYRDDTRHPESLAPHNGAASGSQWAYGAGNVLGYEDGSELPGPQGTGVRTAYGERSRGLGPRSTGPGGEAGFRDGSGGLQGMGSADGPGCRKGIGSSGEMGSVDKEGYKKDLGAPENMGSGSKADYRDGVGGSGAMGSMDEAGYRKDLGAPEGISSGSKADYRGGLQDSREAGSGSKADYSGGLKGSREIGSMDETDNRKDLGVPEGMGAGYRAGLRGPGEMGSLDESGHRNGIGGYGEMGSGYREDLGAPEGMGTGSKAGYRDGLRGSGEMRSMDEAGYRKNLGAPERMDSGSKAGYRGGLRGSGEMGLIEAGYRKDLGVSEGGGSGSKAGYRGGLGSGEMGSVDKAGYRKDLGASEAIGSGSKAGFTDGLGGSEEMGSVNKAGYRKDLGAPKGMGSGSKASFRDGLGGSGEMGSVNEAGYRKDLGVPEGIGSGSKAGFRDGLGGSEEMGSVNKAGYRKDLGAPKGIGSGSKAGFRDGLGSSGEMGSMDEAGYRKNLGAPEGIGSGSKAGFRDGLGSSVEMGSVNEAGYRKDLGAPEGMGSGSKAGFRDGLGGSGEMGSVNEAGYRKDLGAPKGIGSGSKADFRDALGSSGEMGSMDEAGYRKDLWAPEGIGSGSKAGFRDGLGSSVEMGSVNEAGYRKDLGAPEGMGSGSKAGFRDGLGGSGEMGSVNEAGYRKDLGAPKGIGSGSKADFRDALGSSGEMGSMDEAGYRKDLWAPEGIGSGSKAGFRDGLGSSVEMGSVNEAGYRKDLGAPEGMGSGSKEGFRDGLGGSEEMGSVNKAGYRKDLGAPKGMGSGSKEGFRDGLGGSEEMGSMDEAGYRKDLGAPEGIGSGSKAGFRDGLGGSEEMRSMDEAGYRKDLGAPERIGSGSKAGFRDGLGSSVEMGSVNEAGYRKDLGAPKGMGSGSKTGFRDGLGGSEEMESMDEAGYRKDLGAPEGIGSGSKAGFRDGLGSSTEMGSVNEAGYRKDLGAPKGMGSESKAGFRDGLGSSGEMGSMDEAGYRKDLGAPEGMGSGSKAGFRDGLGGSEEMGSVNKAGYRKDLGAPKGMGSGSKAGFRDGLGSSGEMGSMDEADYRKDLGAPEEMGSGSYTDYRNGLGSSGKISSGDEAGYKNVLGGSGRNPLGSEAGSRGSLEDSGYILSWNEAGSRQGFGGTSGMGSGSEVSYRGGSGGSGETGPEGKMGYGDGSGRLGVPGSLAGIGHEAGPRGHKAMGHRSGYWVASEGDTNSKDGPERARETRLVDGAGPGVEPGMAGMPGTAGGMAHRDSLRGTGVLGSQGGRQTLSDERGSTKDLGGYGTSGIPEASEAAGAKGKPDVKEWQDSSGTPGSSRDRGAPRVKDRSPDQAGIMGASGFLDGKGAVEGETWAGMAALGSGYERDIWKAGPGMTDRGRVAGQGGLASQGGGDSLLGGRRVGSGSSVGTGQDLDSGSMPGGRGKSTSGPADRQGTSNAWAPDWENQGFSQGSIDAGKQPAGSRASGSLQEKDAAFGGTHEGPGGFKGGEGAPGQEAAGGCRSPWSLDSKGSSPGRGSSVDAEDSGILGKGNSTEWGNALTPKPGESGPQGAWNGLDGPFGRKASRDRSGGTQDLSSQRGKGQRGGKRSLGEQGSLEAENGEVQGPGALKEDEGQGVEEAGRSGRRPGSLRSRSQAQSGAEVGGGKRRGADEAGSMGWQPMGENWGCLEEMLNEDQSREPPGHLGSRRSGKDGRLDIYGERRDATRSSTSRYKPGTGSFSKDAQGPMGHFSQGLADMEVQPGEAATLSCTLTSDLGPGTWFKDGVKLTTQDGVIFKQDGLVHSLFITHVQGTQAGRYTFVAGDQQSEATLTVQDSPTIAPDVTEKLREPLVVKAGKPVIVKIPFQSHLPIQAAWRKDGAEVVGSSDREAQVDLGDGYTRLCLPSAGRKDCGQYSVTLRSEGGSVQAELTLQVIDKPDPPQGPMEVQDCHRAGVCLRWRPPRDNGGRTVECYVVERRQAGRSTWLKVGEAPADSTTFTDAHVEPGRKYTFRVRAVTSEGAGEALESEEILVAPEALPKAPSAPAILSASSQGITLTWTAPRGPGSAHILGYLIERRKKGSNTWTAVNDQPVPERRWTVADVRQGCQYEFRVTAVAPSGPGEPGPPSDAVFARDPMRPPGLVRNLQVTDRSNTSITLSWAGPDTQEGDEAQGYVVELCSSDSLQWLPCHVGTVPVTTYTAKGLRPGEGYFVRVTAVNEGGQSQPSALDTLVQAMPVTVCPKFLVDSSTKDLLTVKVGDTVRVPVSFEAMPMPEVTWLKDGLPLPKRSVTVTKDGLTQLLIPVAGLSDSGLYTVVLRTLQGKEVAHSFRIRVAACPQAPGPIHLQENVPGTVTAEWEPSPDEAQDVPLHYAVFTRSSAHGPWHEAADRIHTNRFTLLGILPGHEYHFRVVAKNELGASKPSDTSQPWCIPRQRDRFTVKAPCYREPDLSQKPRFLVGLRSHLLPQGCECCMSCAVQGSPRPHVTWFKNDRSLEGNPAVYSTDLLGVCSLTIPSVSPKDSGEYKAVAENTLGQAVSTATLIVIEPST

SEQ ID NO: 40003 - protein, 1126 aa, Homo sapiens
  Payload ID: 8152
  Gene Symbol: IGFN1
  Gene Name: immunoglobulin-like and fibronectin type III domain containing 1
  ENSP ID: ENSP00000387975
  MOD_RES (1)..(1): Any amino acid
XGRRVGSGSSVGTGQDLDSGSMPGGRGKSTSGPADRQGTSNAWAPDWENQGFSQGSIDAGKQPAGSRASGSLQEKDAAFGGTHEGPGGFKGGEGAPGQEAAGGCRSPWSLDSKGSSPGRGSSVDAEDSGILGKGNSTEWGNALTPKPGESGPQGAWNGLDGPFGRKASRDRSGGTQDLSSQRGKGQRGGKRSLGEQGSLEAENGEVQGPGALKEDEGQGVEEAGRSGRRPGSLRSRSQAQSGAEVGGGKRRGADEAGSMGWQPMGENWGCLEEMLNEDQSREPPGHLGSRRSGKDGRLDIYGERRDATRSSTSRYKPGTGSFSKDAQGPMGHFSQGLADMEVQPGEAATLSCTLTSDLGPGTWFKDGVKLTTQDGVIFKQDGLVHSLFITHVQGTQAGRYTFVAGDQQSEATLTVQDSPTIAPDVTEKLREPLVVKAGKPVIVKIPFQSHLPIQAAWRKDGAEVVGSSDREAQVDLGDGYTRLCLPSAGRKDCGQYSVTLRSEGGSVQAELTLQVIDKPDPPQGPMEVQDCHRAGVCLRWRPPRDNGGRTVECYVVERRQAGRSTWLKVGEAPADSTTFTDAHVEPGRKYTFRVRAVTSEGAGEALESEEILVAPEALPKAPSAPAILSASSQGITLTWTAPRGPGSAHILGYLIERRKKGSNTWTAVNDQPVPERRWTVADVRQGCQYEFRVTAVAPSGPGEPGPPSDAVFARDPMRPPGLVRNLQVTDRSNTSITLSWAGPDTQEGDEAQGYVVELCSSDSLQWLPCHVGTVPVTTYTAKGLRPGEGYFVRVTAVNEGGQSQPSALDTLVQAMPVTVCPKFLVDSSTKDLLTVKVGDTVRVPVSFEAMPMPEVTWLKDGLPLPKRSVTVTKDGLTQLLIPVAGLSDSGLYTVVLRTLQGKEVAHSFRIRVAACPQAPGPIHLQENVPGTVTAEWEPSPDEAQDVPLHYAVFTRSSAHGPWHEAADRIHTNRFTLLGILPGHEYHFRVVAKNELGASKPSDTSQPWCIPRQRDRFTVKAPCYREPDLSQKPRFLVGLRSHLLPQGCECCMSCAVQGSPRPHVTWFKNDRSLEGNPAVYSTDLLGVCSLTIPSVSPKDSGEYKAVAENTLGQAVSTATLIVIEPST

SEQ ID NO: 40004 - protein, 570 aa, Homo sapiens
  Payload ID: 8152
  Gene Symbol: IGFN1
  Gene Name: immunoglobulin-like and fibronectin type III domain containing 1
  Uniprot ID: Q86VF2
  ENSP ID: ENSP00000399041
MAGKLRKSHIPGVSIWQLVEEIPEGCSTPDFEQKPVTSALPEGKNAVFRAVVCGEPRPEVRWQNSKGDLSDSSKYKISSSPGSKEHVLQINKLTGEDTDLYRCTAVNAYGEAACSVRLTVIEVGFRKNRKRHREPQEDLRKELMDFRKLLKKRAPPAPKKKMDLEQIWQLLMTADRKDYEKICLKYGIVDYRGMLRRLQEMKKEQEDKMAQYINTISSLRHIRVTKDGNAKFDLELDLKDSQSKIYLYKDGEMIPYGFNNQTKHCLRRLGKRYEFQIQDLRPEDSGIYQVKVEDAVVFSTELEASAIPPRVVVPLAETHCEEQGDAVFECTLSSPCPSAAWHFRHRLLHPSDKYEVYVSPDGLTHRLVVRGARFSDMGPYSLGTGLYTSSAWLVVEAGKDKDLQSTSADHKLQSRRSGKDGRLDIYGERRDATRSSTSRYKPGTGSFSKDAQGPMGHFSQGLADMEVQPGEAATLSCTLTSDLGPGTWFKDGVKLTTQDGVIFKQDGLVHSLFITHVQGTQAGRYTFVAGDQQSEATLTVQDSPTIAPDVTEKLREPLVVKAGKPIQTYH

SEQ ID NO: 40005 - protein, 502 aa, Homo sapiens
  Payload ID: 8153
  Gene Symbol: ILDR1
  Gene Name: immunoglobulin-like domain containing receptor 1
  Uniprot ID: Q86SU0
  ENSP ID: ENSP00000273691
MAWPKLPAPWLLLCTWLPAGCLSLLVTVQHTERYVTLFASIILKCDYTTSAQLQDVVVTWRFKSFCKDPIFDYYSASYQAALSLGQDPSNDCNDNQREVRIVAQRRGQNEPVLGVDYRQRKITIQNRADLVINEVMWWDHGVYYCTIEAPGDTSGDPDKEVKLIVLHWLTVIFIILGALLLLLLIGVCWCQCCPQYCCCYIRCPCCPAHCCCPEEDLSLPSSLPQMPMTQTTNQPPIANGVLEYLEKELRNLNLAQPLPPDLKGRFGHPCSMLSSLGSEVVERRIIHLPPLIRDLSSSRRTSDSLHQQWLTPIPSRPWDLREGRSHHHYPDFHQELQDRGPKSWALERRELDPSWSGRHRSSRLNGSPIHWSDRDSLSDVPSSSEARWRPSHPPFRSRCQERPRRPSPRESTQRHGRRRRHRSYSPPLPSGLSSWSSEEDKERQPQSWRAHRRGSHSPHWPEEKPPSYRSLDITPGKNSRKKGSVERRSEKDSSHSGRSVVI

SEQ ID NO: 40006 - protein, 546 aa, Homo sapiens
  Payload ID: 8153
  Gene Symbol: ILDR1
  Gene Name: immunoglobulin-like domain containing receptor 1
  Uniprot ID: Q86SU0
  ENSP ID: ENSP00000345667
MAWPKLPAPWLLLCTWLPAGCLSLLVTVQHTERYVTLFASIILKCDYTTSAQLQDVVVTWRFKSFCKDPIFDYYSASYQAALSLGQDPSNDCNDNQREVRIVAQRRGQNEPVLGVDYRQRKITIQNRADLVINEVMWWDHGVYYCTIEAPGDTSGDPDKEVKLIVLHWLTVIFIILGALLLLLLIGVCWCQCCPQYCCCYIRCPCCPAHCCCPEEALARHRYMKQAQALGPQMMGKPLYWGADRSSQVSSYPMHPLLQRDLSLPSSLPQMPMTQTTNQPPIANGVLEYLEKELRNLNLAQPLPPDLKGRFGHPCSMLSSLGSEVVERRIIHLPPLIRDLSSSRRTSDSLHQQWLTPIPSRPWDLREGRSHHHYPDFHQELQDRGPKSWALERRELDPSWSGRHRSSRLNGSPIHWSDRDSLSDVPSSSEARWRPSHPPFRSRCQERPRRPSPRESTQRHGRRRRHRSYSPPLPSGLSSWSSEEDKERQPQSWRAHRRGSHSPHWPEEKPPSYRSLDITPGKNSRKKGSVERRSEKDSSHSGRSVVI

SEQ ID NO: 40007 - protein, 457 aa, Homo sapiens
  Payload ID: 8153
  Gene Symbol: ILDR1
  Gene Name: immunoglobulin-like domain containing receptor 1
  Uniprot ID: Q86SU0
  ENSP ID: ENSP00000377251
MAWPKLPAPWLLLCTWLPAGCLSLLVTVQHTERYVTLFASIILKCDYTTSAQLQDVVVTWRFKSFCKDPIFDYYSASYQAALSLGQDPSNDCNDNQREVRIVAQRRGQNEPVLGVDYRQRKITIQNPLARHRYMKQAQALGPQMMGKPLYWGADRSSQVSSYPMHPLLQRDLSLPSSLPQMPMTQTTNQPPIANGVLEYLEKELRNLNLAQPLPPDLKGRFGHPCSMLSSLGSEVVERRIIHLPPLIRDLSSSRRTSDSLHQQWLTPIPSRPWDLREGRSHHHYPDFHQELQDRGPKSWALERRELDPSWSGRHRSSRLNGSPIHWSDRDSLSDVPSSSEARWRPSHPPFRSRCQERPRRPSPRESTQRHGRRRRHRSYSPPLPSGLSSWSSEEDKERQPQSWRAHRRGSHSPHWPEEKPPSYRSLDITPGKNSRKKGSVERRSEKDSSHSGRSVVI

SEQ ID NO: 40008 - protein, 514 aa, Homo sapiens
  Payload ID: 8153
  Gene Symbol: ILDR1
  Gene Name: immunoglobulin-like domain containing receptor 1
  Uniprot ID: Q86SU0
  ENSP ID: ENSP00000419414
MAGNIFCPFALFFLPMSRVGHLQHFLLLLALGCLSLLVTVQHTERYVTLFASIILKCDYTTSAQLQDVVVTWRFKSFCKDPIFDYYSASYQAALSLGQDPSNDCNDNQREVRIVAQRRGQNEPVLGVDYRQRKITIQNRADLVINEVMWWDHGVYYCTIEAPGDTSGDPDKEVKLIVLHWLTVIFIILGALLLLLLIGVCWCQCCPQYCCCYIRCPCCPAHCCCPEEDLSLPSSLPQMPMTQTTNQPPIANGVLEYLEKELRNLNLAQPLPPDLKGRFGHPCSMLSSLGSEVVERRIIHLPPLIRDLSSSRRTSDSLHQQWLTPIPSRPWDLREGRSHHHYPDFHQELQDRGPKSWALERRELDPSWSGRHRSSRLNGSPIHWSDRDSLSDVPSSSEARWRPSHPPFRSRCQERPRRPSPRESTQRHGRRRRHRSYSPPLPSGLSSWSSEEDKERQPQSWRAHRRGSHSPHWPEEKPPSYRSLDITPGKNSRKKGSVERRSEKDSSHSGRSVVI

SEQ ID NO: 40009 - protein, 639 aa, Homo sapiens
  Payload ID: 8154
  Gene Symbol: ILDR2
  Gene Name: immunoglobulin-like domain containing receptor 2
  Uniprot ID: Q71H61
  ENSP ID: ENSP00000271417
MDRVLLRWISLFWLTAMVEGLQVTVPDKKKVAMLFQPTVLRCHFSTSSHQPAVVQWKFKSYCQDRMGESLGMSSTRAQSLSKRNLEWDPYLDCLDSRRTVRVVASKQGSTVTLGDFYRGREITIVHDADLQIGKLMWGDSGLYYCIITTPDDLEGKNEDSVELLVLGRTGLLADLLPSFAVEIMPEWVFVGLVLLGVFLFFVLVGICWCQCCPHSCCCYVRCPCCPDSCCCPQALYEAGKAAKAGYPPSVSGVPGPYSIPSVPLGGAPSSGMLMDKPHPPPLAPSDSTGGSHSVRKGYRIQADKERDSMKVLYYVEKELAQFDPARRMRGRYNNTISELSSLHEEDSNFRQSFHQMRSKQFPVSGDLESNPDYWSGVMGGSSGASRGPSAMEYNKEDRESFRHSQPRSKSEMLSRKNFATGVPAVSMDELAAFADSYGQRPRRADGNSHEARGGSRFERSESRAHSGFYQDDSLEEYYGQRSRSREPLTDADRGWAFSPARRRPAEDAHLPRLVSRTPGTAPKYDHSYLGSARERQARPEGASRGGSLETPSKRSAQLGPRSASYYAWSPPGTYKAGSSQDDQEDASDDALPPYSELELTRGPSYRGRDLPYHSNSEKKRKKEPAKKTNDFPTRMSLVV

SEQ ID NO: 40010 - protein, 167 aa, Homo sapiens
  Payload ID: 8154
  Gene Symbol: ILDR2
  Gene Name: immunoglobulin-like domain containing receptor 2
  ENSP ID: ENSP00000431316
MDRVLLRWISLFWLTAMVEGLQVTVPDKKKVAMLFQPTVLRCHFSTSSHQPAVVQWKFKSYCQDRMGESLGMSSTRAQSLSKRNLEWDPYLDCLDSRRTVRVVASKQGSTVTLGDFYRGREITIVHDADLQIGKLMWGDSGLYYCIITTPDDLEGKNEDSVELLVLE

SEQ ID NO: 40011 - protein, 580 aa, Homo sapiens
  Payload ID: 8154
  Gene Symbol: ILDR2
  Gene Name: immunoglobulin-like domain containing receptor 2
  ENSP ID: ENSP00000432750
MDRVLLRWISLFWLTAMVEGLQVTVPDKKKVAMLFQPTVLRCHFSTSSHQPAVVQWKFKSYCQDRMGESLGMSSTRAQSLSKRNLEWDPYLDCLDSRRTVRVVASKQGSTVTLGDFYRGREITIVHDADLQIGKLMWGDSGLYYCIITTPDDLEGKNEDSVELLVLGRTGLLADLLPSFAVEIMPEWVFVGLVLLGVFLFFVLVGICWCQCCPHSCCCYVRCPCCPDSCCCPQAFRKGYRIQADKERDSMKVLYYVEKELAQFDPARRMRGRYNNTISELSSLHEEDSNFRQSFHQMRSKQFPVSGDLESNPDYWSGVMGGSSGASRGPSAMEYNKEDRESFRHSQPRSKSEMLSRKNFATGVPAVSMDELAAFADSYGQRPRRADGNSHEARGGSRFERSESRAHSGFYQDDSLEEYYGQRSRSREPLTDADRGWAFSPARRRPAEDAHLPRLVSRTPGTAPKYDHSYLGSARERQARPEGASRGGSLETPSKRSAQLGPRSASYYAWSPPGTYKAGSSQDDQEDASDDALPPYSELELTRGPSYRGRDLPYHSNSEKKRKKEPAKKTNDFPTRMSLVV

SEQ ID NO: 40012 - protein, 531 aa, Homo sapiens
  Payload ID: 8154
  Gene Symbol: ILDR2
  Gene Name: immunoglobulin-like domain containing receptor 2
  ENSP ID: ENSP00000434273
MDRVLLRWISLFWLTAMVEGLQVTVPDKKKVAMLFQPTVLRCHFSTSSHQPAVVQWKFKSYCQDRMGESLGMSSTRAQSLSKRNLEWDPYLDCLDSRRTVRVVASKQGSTVTLGDFYRGREITIVHDADLQIGKLMWGDSGLYYCIITTPDDLEGKNEDSVELLVLGRTGLLADLLPSFAVEIMPVRKGYRIQADKERDSMKVLYYVEKELAQFDPARRMRGRYNNTISELSSLHEEDSNFRQSFHQMRSKQFPVSGDLESNPDYWSGVMGGSSGASRGPSAMEYNKEDRESFRHSQPRSKSEMLSRKNFATGVPAVSMDELAAFADSYGQRPRRADGNSHEARGGSRFERSESRAHSGFYQDDSLEEYYGQRSRSREPLTDADRGWAFSPARRRPAEDAHLPRLVSRTPGTAPKYDHSYLGSARERQARPEGASRGGSLETPSKRSAQLGPRSASYYAWSPPGTYKAGSSQDDQEDASDDALPPYSELELTRGPSYRGRDLPYHSNSEKKRKKEPAKKTNDFPTRMSLVV

SEQ ID NO: 40013 - protein, 512 aa, Homo sapiens
  Payload ID: 8154
  Gene Symbol: ILDR2
  Gene Name: immunoglobulin-like domain containing receptor 2
  ENSP ID: ENSP00000436120
MDRVLLRWISLFWLTAMVEGLQVTVPDKKKVAMLFQPTVLRCHFSTSSHQPAVVQWKFKSYCQDRMGESLGMSSTRAQSLSKRNLEWDPYLDCLDSRRTVRVVASKQGSTVTLGDFYRGREITIVHDADLQIGKLMWGDSGLYYCIITTPDDLEGKNEDSVELLVLVRKGYRIQADKERDSMKVLYYVEKELAQFDPARRMRGRYNNTISELSSLHEEDSNFRQSFHQMRSKQFPVSGDLESNPDYWSGVMGGSSGASRGPSAMEYNKEDRESFRHSQPRSKSEMLSRKNFATGVPAVSMDELAAFADSYGQRPRRADGNSHEARGGSRFERSESRAHSGFYQDDSLEEYYGQRSRSREPLTDADRGWAFSPARRRPAEDAHLPRLVSRTPGTAPKYDHSYLGSARERQARPEGASRGGSLETPSKRSAQLGPRSASYYAWSPPGTYKAGSSQDDQEDASDDALPPYSELELTRGPSYRGRDLPYHSNSEKKRKKEPAKKTNDFPTRMSLVV

SEQ ID NO: 40014 - protein, 620 aa, Homo sapiens
  Payload ID: 8154
  Gene Symbol: ILDR2
  Gene Name: immunoglobulin-like domain containing receptor 2
  ENSP ID: ENSP00000436882
MDRVLLRWISLFWLTAMVEGLQVTVPDKKKVAMLFQPTVLRCHFSTSSHQPAVVQWKFKSYCQDRMGESLGMSSTRAQSLSKRNLEWDPYLDCLDSRRTVRVVASKQGSTVTLGDFYRGREITIVHDADLQIGKLMWGDSGLYYCIITTPDDLEGKNEDSVELLVLEWVFVGLVLLGVFLFFVLVGICWCQCCPHSCCCYVRCPCCPDSCCCPQALYEAGKAAKAGYPPSVSGVPGPYSIPSVPLGGAPSSGMLMDKPHPPPLAPSDSTGGSHSVRKGYRIQADKERDSMKVLYYVEKELAQFDPARRMRGRYNNTISELSSLHEEDSNFRQSFHQMRSKQFPVSGDLESNPDYWSGVMGGSSGASRGPSAMEYNKEDRESFRHSQPRSKSEMLSRKNFATGVPAVSMDELAAFADSYGQRPRRADGNSHEARGGSRFERSESRAHSGFYQDDSLEEYYGQRSRSREPLTDADRGWAFSPARRRPAEDAHLPRLVSRTPGTAPKYDHSYLGSARERQARPEGASRGGSLETPSKRSAQLGPRSASYYAWSPPGTYKAGSSQDDQEDASDDALPPYSELELTRGPSYRGRDLPYHSNSEKKRKKEPAKKTNDFPTRMSLVV

SEQ ID NO: 40015 - protein, 437 aa, Homo sapiens
  Payload ID: 8154
  Gene Symbol: ILDR2
  Gene Name: immunoglobulin-like domain containing receptor 2
  ENSP ID: ENSP00000437008
MDRVLLRWISLFWLTAMVEGLQVTVPDKKKVAMLFQPTVLRCHFSTSSHQPAVVQWKFKSYCQDRMGESLGMSSTRAQSLSKRNLEWDPYLDCLDSRRTVRVVASKQGSTVTLGDFYRGREITIVHDADLQIGKLMWGDSGLYYCIITTPDDLEGKNEDSVELLVLGRTGLLADLLPSFAVEIMPEWVFVGLVLLGVFLFFVLVGICWCQCCPHSCCCYVRCPCCPDSCCCPQALYEAGKAAKAGYPPSVSGVPGPYSIPSVPLGGAPSSGMLMDKPHPPPLAPSDSTGGSHSVRKGYRIQADKERDSMKVLYYVEKELAQFDPARRMRGRYNNTISELSSLHEEDSNFRQSFHQMRSKQFPVSGDLESNPDYWSGVMGGSSGASRGPSAMEYNKEDRESFRHRMTFQPGCPLWSDVVNISLDNEKSDMDYGDKTQI

SEQ ID NO: 40016 - protein, 481 aa, Homo sapiens
  Payload ID: 8155
  Gene Symbol: IRG1
  Gene Name: immunoresponsive 1 homolog (mouse)
  Uniprot ID: A6NK06
  ENSP ID: ENSP00000366682
MMLKSITESFATAIHGLKVGHLTDRVIQRSKRMILDTLGAGFLGTTTEVFHIASQYSKIYSSNISSTVWGQPDIRLPPTYAAFVNGVAIHSMDFDDTWHPATHPSGAVLPVLTALAEALPRSPKFSGLDLLLAFNVGIEVQGRLLHFAKEANDMPKRFHPPSVVGTLGSAAAASKFLGLSSTKCREALAIAVSHAGAPMANAATQTKPLHIGNAAKHGIEAAFLAMLGLQGNKQVLDLEAGFGAFYANYSPKVLPSIASYSWLLDQQDVAFKRFPAHLSTHWVADAAASVRKHLVAERALLPTDYIKRIVLRIPNVQYVNRPFPVSEHEARHSFQYVACAMLLDGGITVPSFHECQINRPQVRELLSKVELEYPPDNLPSFNILYCEISVTLKDGATFTDRSDTFYGHWRKPLSQEDLEEKFRANASKMLSWDTVESLIKIVKNLEDLEDCSVLTTLLKGPSPPEVASNSPACNNSITNLS

SEQ ID NO: 40017 - protein, 481 aa, Homo sapiens
  Payload ID: 8155
  Gene Symbol: IRG1
  Gene Name: immunoresponsive 1 homolog (mouse)
  ENSP ID: ENSP00000401584
FPLKSITESFATAIHGLKVGHLTDRVIQRSKRMILDTLGAGFLGTTTEVFHIASQYSKIYSSNISSTVWGQPDIRLPPTYAAFVNGVAIHSMDFDDTWHPATHPSGAVLPVLTALAEALPRSPKFSGLDLLLAFNVGIEVQGRLLHFAKEANDMPKRFHPPSVVGTLGSAAAASKFLGLSSTKCREALAIAVSHAGAPMANAATQTKPLHIGNAAKHGIEAAFLAMLGLQGNKQVLDLEAGFGAFYANYSPKVLPSIASYSWLLDQQDVAFKRFPAHLSTHWVADAAASVRKHLVAERALLPTDYIKRIVLRIPNVQYVNRPFPVSEHEARHSFQYVACAMLLDGGITVPSFHECQINRPQVRELLSKVELEYPPDNLPSFNILYCEISVTLKDGATFTDRSDTFYGHWRKPLSQEDLEEKFRANASKMLSWDTVESLIKIVKNLEDLEDCSVLTTLLKGPSPPEVASNSPACNNSITNLS

SEQ ID NO: 40018 - protein, 563 aa, Homo sapiens
  Payload ID: 8156
  Gene Symbol: IMPDH1
  Gene Name: IMP (inosine 5'-monophosphate) dehydrogenase 1
  Uniprot ID: P20839
  ENSP ID: ENSP00000265385
MEGPLTPPPLQGGGAAAVPEPGARQHPGHETAAQRYSARLLQAGYEPESMADYLISGGTGYVPEDGLTAQQLFASADGLTYNDFLILPGFIDFIADEVDLTSALTRKITLKTPLISSPMDTVTEADMAIAMALMGGIGFIHHNCTPEFQANEVRKVKKFEQGFITDPVVLSPSHTVGDVLEAKMRHGFSGIPITETGTMGSKLVGIVTSRDIDFLAEKDHTTLLSEVMTPRIELVVAPAGVTLKEANEILQRSKKGKLPIVNDCDELVAIIARTDLKKNRDYPLASKDSQKQLLCGAAVGTREDDKYRLDLLTQAGVDVIVLDSSQGNSVYQIAMVHYIKQKYPHLQVIGGNVVTAAQAKNLIDAGVDGLRVGMGCGSICITQEVMACGRPQGTAVYKVAEYARRFGVPIIADGGIQTVGHVVKALALGASTVMMGSLLAATTEAPGEYFFSDGVRLKKYRGMGSLDAMEKSSSSQKRYFSEGDKVKIAQGVSGSIQDKGSIQKFVPYLIAGIQHGCQDIGARSLSVLRSMMYSGELKFEKRTMSAQIEGGVHGLHSYEKRLY

SEQ ID NO: 40019 - protein, 599 aa, Homo sapiens
  Payload ID: 8156
  Gene Symbol: IMPDH1
  Gene Name: IMP (inosine 5'-monophosphate) dehydrogenase 1
  Uniprot ID: P20839
  ENSP ID: ENSP00000345096
MEGPLTPPPLQGGGAAAVPEPGARQHPGHETAAQRYSARLLQAGYEPESPRLDLATHPTTPRSELSSVVLLAGVGVQMDRLRRASMADYLISGGTGYVPEDGLTAQQLFASADGLTYNDFLILPGFIDFIADEVDLTSALTRKITLKTPLISSPMDTVTEADMAIAMALMGGIGFIHHNCTPEFQANEVRKVKKFEQGFITDPVVLSPSHTVGDVLEAKMRHGFSGIPITETGTMGSKLVGIVTSRDIDFLAEKDHTTLLSEVMTPRIELVVAPAGVTLKEANEILQRSKKGKLPIVNDCDELVAIIARTDLKKNRDYPLASKDSQKQLLCGAAVGTREDDKYRLDLLTQAGVDVIVLDSSQGNSVYQIAMVHYIKQKYPHLQVIGGNVVTAAQAKNLIDAGVDGLRVGMGCGSICITQEVMACGRPQGTAVYKVAEYARRFGVPIIADGGIQTVGHVVKALALGASTVMMGSLLAATTEAPGEYFFSDGVRLKKYRGMGSLDAMEKSSSSQKRYFSEGDKVKIAQGVSGSIQDKGSIQKFVPYLIAGIQHGCQDIGARSLSVLRSMMYSGELKFEKRTMSAQIEGGVHGLHSYEKRLY

SEQ ID NO: 40020 - protein, 589 aa, Homo sapiens
  Payload ID: 8156
  Gene Symbol: IMPDH1
  Gene Name: IMP (inosine 5'-monophosphate) dehydrogenase 1
  Uniprot ID: P20839
  ENSP ID: ENSP00000346219
MEGPLTPPPLQGGGAAAVPEPGARQHPGHETAAQRYSARLLQAGYEPESCFLLELSSVVLLAGVGVQMDRLRRASMADYLISGGTGYVPEDGLTAQQLFASADGLTYNDFLILPGFIDFIADEVDLTSALTRKITLKTPLISSPMDTVTEADMAIAMALMGGIGFIHHNCTPEFQANEVRKVKKFEQGFITDPVVLSPSHTVGDVLEAKMRHGFSGIPITETGTMGSKLVGIVTSRDIDFLAEKDHTTLLSEVMTPRIELVVAPAGVTLKEANEILQRSKKGKLPIVNDCDELVAIIARTDLKKNRDYPLASKDSQKQLLCGAAVGTREDDKYRLDLLTQAGVDVIVLDSSQGNSVYQIAMVHYIKQKYPHLQVIGGNVVTAAQAKNLIDAGVDGLRVGMGCGSICITQEVMACGRPQGTAVYKVAEYARRFGVPIIADGGIQTVGHVVKALALGASTVMMGSLLAATTEAPGEYFFSDGVRLKKYRGMGSLDAMEKSSSSQKRYFSEGDKVKIAQGVSGSIQDKGSIQKFVPYLIAGIQHGCQDIGARSLSVLRSMMYSGELKFEKRTMSAQIEGGVHGLHSYEKRLY

SEQ ID NO: 40021 - protein, 566 aa, Homo sapiens
  Payload ID: 8156
  Gene Symbol: IMPDH1
  Gene Name: IMP (inosine 5'-monophosphate) dehydrogenase 1
  Uniprot ID: P20839
  ENSP ID: ENSP00000399400
MEGPLTPPPLQGGGAAAVPEPGARQHPGHETAAQRYSARLLQAGYEPESPRLDLATHPTTPRSELSSVVLLAGVGVQMDRLRRASDFLILPGFIDFIADEVDLTSALTRKITLKTPLISSPMDTVTEADMAIAMALMGGIGFIHHNCTPEFQANEVRKVKKFEQGFITDPVVLSPSHTVGDVLEAKMRHGFSGIPITETGTMGSKLVGIVTSRDIDFLAEKDHTTLLSEVMTPRIELVVAPAGVTLKEANEILQRSKKGKLPIVNDCDELVAIIARTDLKKNRDYPLASKDSQKQLLCGAAVGTREDDKYRLDLLTQAGVDVIVLDSSQGNSVYQIAMVHYIKQKYPHLQVIGGNVVTAAQAKNLIDAGVDGLRVGMGCGSICITQEVMACGRPQGTAVYKVAEYARRFGVPIIADGGIQTVGHVVKALALGASTVMMGSLLAATTEAPGEYFFSDGVRLKKYRGMGSLDAMEKSSSSQKRYFSEGDKVKIAQGVSGSIQDKGSIQKFVPYLIAGIQHGCQDIGARSLSVLRSMMYSGELKFEKRTMSAQIEGGVHGLHSYEKRLY

SEQ ID NO: 40022 - protein, 513 aa, Homo sapiens
  Payload ID: 8156
  Gene Symbol: IMPDH1
  Gene Name: IMP (inosine 5'-monophosphate) dehydrogenase 1
  ENSP ID: ENSP00000417296
MADYLISGGTGYVPEDGLTAQQLFASADGLTYNDFLILPGFIDFIADEVDLTSALTRKITLKTPLISSPMDTVTEADMAIAMALMGGIGFIHHNCTPEFQANEVRKVKFEQGFITDPVVLSPSHTVGDVLEAKMRHGFSGIPITETGTMGSKLVGIVTSRDIDFLAEKDHTTLLSEVMTPRIELVVAPAGVTLKEANEILQRSKKGKLPIVNDCDELVAIIARTDLKKNRDYPLASKDSQKQLLCGAAVGTREDDKYRLDLLTQAGVDVIVLDSSQGNSVYQIAMVHYIKQKYPHLQVIGGNVVTAAQAKNLIDAGVDGLRVGMGCGSICITQEVMACGRPQGTAVYKVAEYARRFGVPIIADGGIQTVGHVVKALALGASTVMMGSLLAATTEAPGEYFFSDGVRLKKYRGMGSLDAMEKSSSSQKRYFSEGDKVKIAQGVSGSIQDKGSIQKFVPYLIAGIQHGCQDIGARSLSVLRSMMYSGELKFEKRTMSAQIEGGVHGLHSYEKRLY

SEQ ID NO: 40023 - protein, 184 aa, Homo sapiens
  Payload ID: 8156
  Gene Symbol: IMPDH1
  Gene Name: IMP (inosine 5'-monophosphate) dehydrogenase 1
  ENSP ID: ENSP00000418592
MEGPLTPPPLQGGGAAAVPEPGARQHPGHETAAQRYSARLLQAGYEPESDFLILPGFIDFIADEVDLTSALTRKITLKTPLISSPMDTVTEADMAIAMAKFEQGFITDPVVLSPSHTVGDVLEAKMRHGFSGIPITETGTMGSKLVGIVTSRDIDFLAEKDHTTLLSEVMTPRIELVVAPAGVT

SEQ ID NO: 40024 - protein, 226 aa, Homo sapiens
  Payload ID: 8156
  Gene Symbol: IMPDH1
  Gene Name: IMP (inosine 5'-monophosphate) dehydrogenase 1
  ENSP ID: ENSP00000418742
SPRLDLATHPTTPRSELSSVVLLAGVGVQMDRLRRASMADYLISGGTGYVPEDGLTAQQLFASADGLTYNDFLILPGFIDFIADEVDLTSALTRKITLKTPLISSPMDTVTEADMAIAMALMGGIGFIHHNCTPEFQANEVRKVKFEQGFITDPVVLSPSHTVGDVLEAKMRHGFSGIPITETGTMGSKLVGIVTSRDIDFLAEKDHTTLLSEANVPGPTGDDAKD

SEQ ID NO: 40025 - protein, 289 aa, Homo sapiens
  Payload ID: 8156
  Gene Symbol: IMPDH1
  Gene Name: IMP (inosine 5'-monophosphate) dehydrogenase 1
  ENSP ID: ENSP00000419609
MEGPLTPPPLQGGGAAAVPEPGARQHPGHETAAQRYSARLLQAGYEPESDFLILPGFIDFIADEVDLTSALTRKITLKTPLISSPMDTVTEADMAIAMALMGGIGFIHHNCTPEFQANEVRKVKKFEQGFITDPVVLSPSHTVGDVLEAKMRHGFSGIPITETGTMGSKLVGIVTSRDIDFLAEKDHTTLLSEVMTPRIELVVAPAGVTLKEANEILQRSKKGKLPIVNDCDELVAIIARTDLKKNRDYPLASKDSQKQLLCGAAVGTREDDKYRLDLLTQAGVDVIVL

SEQ ID NO: 40026 - protein, 509 aa, Homo sapiens
  Payload ID: 8156
  Gene Symbol: IMPDH1
  Gene Name: IMP (inosine 5'-monophosphate) dehydrogenase 1
  Uniprot ID: P20839
  ENSP ID: ENSP00000420185
MADYLISGGTGYVPEDGLTAQQLFASADGLTYNDFLILPGFIDFIADEVDLTSALTRKITLKTPLISSPMDTVTEADMAIAMALMGGIGFIHHNCTPEFQANEKFEQGFITDPVVLSPSHTVGDVLEAKMRHGFSGIPITETGTMGSKLVGIVTSRDIDFLAEKDHTTLLSEVMTPRIELVVAPAGVTLKEANEILQRSKKGKLPIVNDCDELVAIIARTDLKKNRDYPLASKDSQKQLLCGAAVGTREDDKYRLDLLTQAGVDVIVLDSSQGNSVYQIAMVHYIKQKYPHLQVIGGNVVTAAQAKNLIDAGVDGLRVGMGCGSICITQEVMACGRPQGTAVYKVAEYARRFGVPIIADGGIQTVGHVVKALALGASTVMMGSLLAATTEAPGEYFFSDGVRLKKYRGMGSLDAMEKSSSSQKRYFSEGDKVKIAQGVSGSIQDKGSIQKFVPYLIAGIQHGCQDIGARSLSVLRSMMYSGELKFEKRTMSAQIEGGVHGLHSYEKRLY

SEQ ID NO: 40027 - protein, 69 aa, Homo sapiens
  Payload ID: 8156
  Gene Symbol: IMPDH1
  Gene Name: IMP (inosine 5'-monophosphate) dehydrogenase 1
  ENSP ID: ENSP00000420469
MEGPLTPPPLQGGGAAAVPEPGARQHPGHETAAQRYSARLLQAGYEPERTIFSGLTGRCWCPDGSPSQG

SEQ ID NO: 40028 - protein, 190 aa, Homo sapiens
  Payload ID: 8156
  Gene Symbol: IMPDH1
  Gene Name: IMP (inosine 5'-monophosphate) dehydrogenase 1
  ENSP ID: ENSP00000420756
  MOD_RES (1)..(1): Any amino acid
XMADYLISGGTGYVPEDGLTAQQLFASADGLTYNDFLILPGFIDFIADEVDLTSALTRKITLKTPLISSPMDTVTEADMAIAMALMGGIGFIHHNCTPEFQANEVRKVKFEQGFITDPVVLSPSHTVGDVLEAKMRHGFSGIPITETGTMGSKLVGIVTSRDIDFLAEKDHTTLLSEANVPGPTGDDAKD

SEQ ID NO: 40029 - protein, 489 aa, Homo sapiens
  Payload ID: 8156
  Gene Symbol: IMPDH1
  Gene Name: IMP (inosine 5'-monophosphate) dehydrogenase 1
  Uniprot ID: P20839
  ENSP ID: ENSP00000420803
MADYLISGGTGYVPEDGLTAQQLFASADGLTYNDFLILPGFIDFIADEVDLTSALTRKITLKTPLISSPMDTVTEADMAIAMAKFEQGFITDPVVLSPSHTVGDVLEAKMRHGFSGIPITETGTMGSKLVGIVTSRDIDFLAEKDHTTLLSEVMTPRIELVVAPAGVTLKEANEILQRSKKGKLPIVNDCDELVAIIARTDLKKNRDYPLASKDSQKQLLCGAAVGTREDDKYRLDLLTQAGVDVIVLDSSQGNSVYQIAMVHYIKQKYPHLQVIGGNVVTAAQAKNLIDAGVDGLRVGMGCGSICITQEVMACGRPQGTAVYKVAEYARRFGVPIIADGGIQTVGHVVKALALGASTVMMGSLLAATTEAPGEYFFSDGVRLKKYRGMGSLDAMEKSSSSQKRYFSEGDKVKIAQGVSGSIQDKGSIQKFVPYLIAGIQHGCQDIGARSLSVLRSMMYSGELKFEKRTMSAQIEGGVHGLHSYEKRLY

SEQ ID NO: 40030 - protein, 513 aa, Homo sapiens; identical to SEQ ID NO: 40022
  Payload ID: 8156
  Gene Symbol: IMPDH1
  Gene Name: IMP (inosine 5'-monophosphate) dehydrogenase 1
  ENSP ID: ENSP00000486056

SEQ ID NO: 40031 - protein, 514 aa, Homo sapiens
  Payload ID: 8157
  Gene Symbol: IMPDH2
  Gene Name: IMP (inosine 5'-monophosphate) dehydrogenase 2
  Uniprot ID: P12268
  ENSP ID: ENSP00000321584
MADYLISGGTSYVPDDGLTAQQLFNCGDGLTYNDFLILPGYIDFTADQVDLTSALTKKITLKTPLVSSPMDTVTEAGMAIAMALTGGIGFIHHNCTPEFQANEVRKVKKYEQGFITDPVVLSPKDRVRDVFEAKARHGFCGIPITDTGRMGSRLVGIISSRDIDFLKEEEHDCFLEEIMTKREDLVVAPAGITLKEANEILQRSKKGKLPIVNEDDELVAIIARTDLKKNRDYPLASKDAKKQLLCGAAIGTHEDDKYRLDLLAQAGVDVVVLDSSQGNSIFQINMIKYIKDKYPNLQVIGGNVVTAAQAKNLIDAGVDALRVGMGSGSICITQEVLACGRPQATAVYKVSEYARRFGVPVIADGGIQNVGHIAKALALGASTVMMGSLLAATTEAPGEYFFSDGIRLKKYRGMGSLDAMDKHLSSQNRYFSEADKIKVAQGVSGAVQDKGSIHKFVPYLIAGIQHSCQDIGAKSLTQVRAMMYSGELKFEKRTSSAQVEGGVHSLHSYEKRLF

SEQ ID NO: 40032 - protein, 470 aa, Homo sapiens
  Payload ID: 8157
  Gene Symbol: IMPDH2
  Gene Name: IMP (inosine 5'-monophosphate) dehydrogenase 2
  ENSP ID: ENSP00000393525
  MOD_RES (1)..(1): Any amino acid
XMDTVTEAGMAIAMALTGGIGFIHHNCTPEFQANEVRKVKKYEQGFITDPVVLSPKDRVRDVFEAKARHGFCGIPITDTGRMGSRLVGIISSRDIDFLKEEEHDCFLEEIMTKREDLVVAPAGITLKEANEILQRSKKGKLPIVNEDDELVAIIARTDLKKNRDYPLASKDAKKQLLCGAAIGTHEDDKYRLDLLAQAGVDVVVLDSSQGNSIFQINMIKYIKDKYPNLQVIGGNVVTAAQAKNLIDAGVDALRVGMGSGSICITQEVAPKIPPDIKSHSPKCPSTVTGCYMLACGRPQATAVYKVSEYARRFGVPVIADGGIQNVGHIAKALALGASTVMMGSLLAATTEAPGEYFFSDGIRLKKYRGMGSLDAMDKHLSSQNRYFSEADKIKVAQGVSGAVQDKGSIHKFVPYLIAGIQHSCQDIGAKSLTQVRAMMYSGELKFEKRTSSAQVEGGVHSLHSYEKRLF

SEQ ID NO: 40033 - protein, 279 aa, Homo sapiens [sequence omitted]

SEQ ID NO: 40034 - protein, 184 aa, Homo sapiens
  Payload ID: 8158
  Gene Symbol: IMP3
  Gene Name: IMP3, U3 small nucleolar ribonucleoprotein
  Uniprot ID: Q9NV31
  ENSP ID: ENSP00000326981
MVRKLKFHEQKLLKQVDFLNWEVTDHNLHELRVLRRYRLQRREDYTRYNQLSRAVRELARRLRDLPERDQFRVRASAALLDKLYALGLVPTRGSLELCDFVTASSFCRRRLPTVLLKLRMAQHLQAAVAFVEQGHVRVGPDVVTDPAFLVTRSMEDFVTWVDSSKIKRHVLEYNEERDDFDLEA

SEQ ID NO: 40035 - protein, 184 aa, Homo sapiens; identical to SEQ ID NO: 40034
  Payload ID: 8158
  Gene Symbol: IMP3
  Gene Name: IMP3, U3 small nucleolar ribonucleoprotein
  Uniprot ID: Q9NV31
  ENSP ID: ENSP00000385217

SEQ ID NO: 40036 - protein, 291 aa, Homo sapiens
  Payload ID: 8159
  Gene Symbol: IMP4
  Gene Name: IMP4, U3 small nucleolar ribonucleoprotein
  Uniprot ID: Q96G21
  ENSP ID: ENSP00000259239
MLRREARLRREYLYRKAREEAQRSAQERKERLRRALEENRLIPTELRREALALQGSLEFDDAGGEGVTSHVDDEYRWAGVEDPKVMITTSRDPSSRLKMFAKELKLVFPGAQRMNRGRHEVGALVRACKANGVTDLLVVHEHRGTPVGLIVSHLPFGPTAYFTLCNVVMRHDIPDLGTMSEAKPHLITHGFSSRLGKRVSDILRYLFPVPKDDSHRVITFANQDDYISFRHHVYKKTDHRNVELTEVGPRFELKLYMIRLGTLEQEATADVEWRWHPYTNTARKRVFLSTE

SEQ ID NO: 40037 - protein, 248 aa, Homo sapiens
  Payload ID: 8159
  Gene Symbol: IMP4
  Gene Name: IMP4, U3 small nucleolar ribonucleoprotein
  ENSP ID: ENSP00000386411
MLRREARLRREYLYRKAREEAQRSAQERKERLRRALEENRLIPTELRREALALQGSLEFDDAGGEGVTSHVDDEYRWAGVEDPKVMITTSRDPSSRLKMFAKELKLVFPGAQRMNRGRHEVGALVRACKANGVTDLLVVHEHRGTPVGLIVSHLPFGPTAYFTLCNVVMRHDIPDLGTMSEAKPHLITHGFSSRLGKRVSDILRYLFPVPKDDSHRVITFANQDDYISFRHHVYKKTDHRNVELTECT

SEQ ID NO: 40038 - protein, 172 aa, Homo sapiens
  Payload ID: 8159
  Gene Symbol: IMP4
  Gene Name: IMP4, U3 small nucleolar ribonucleoprotein
  ENSP ID: ENSP00000386716
MITTSRDPSSRLKMFAKELKLVFPGAQRMNRGRHEVGALVRACKANGVTDLLVVHEHRGTPVGLIVSHLPFGPTAYFTLCNVVMRHDIPDLGTMSEAKPHLITHGFSSRLGKRVSDILRYLFPVPKDDSHRVITFANQDDYISFRHHVYKKTDHRNVELTEVGPRFELKLYM

SEQ ID NO: 40039 - protein, 236 aa, Homo sapiens
  Payload ID: 8159
  Gene Symbol: IMP4
  Gene Name: IMP4, U3 small nucleolar ribonucleoprotein
  ENSP ID: ENSP00000389701
MMLEVKVTIQGVTSHVDDEYRWAGVEDPKVMITTSRDPSSRLKMFAKELKLVFPGAQRMNRGRHEVGALVRACKANGVTDLLVVHEHRGTPVGLIVSHLPFGPTAYFTLCNVVMRHDIPDLGTMSEAKPHLITHGFSSRLGKRVSDILRYLFPVPKDDSHRVITFANQDDYISFRHHVYKKTDHRNVELTEVGPRFELKLYMIRLGTLEQEATADVEWRWHPYTNTARKRVFLSTE

SEQ ID NO: 40040 - protein, 280 aa, Homo sapiens
  Payload ID: 8159
  Gene Symbol: IMP4
  Gene Name: IMP4, U3 small nucleolar ribonucleoprotein
  ENSP ID: ENSP00000409371
  MOD_RES (1)..(1): Any amino acid
XSKCLPAVFLAHWVLLLVLRVFLPCDENRLIPTELRREALALQGSLEFDDAGGEGVTSHVDDEYRWAGVEDPKVMITTSRDPSSRLKMFAKELKLVFPGAQRMNRGRHEVGALVRACKANGVTDLLVVHEHRGTPVGLIVSHLPFGPTAYFTLCNVVMRHDIPDLGTMSEAKPHLITHGFSSRLGKRVSDILRYLFPVPKDDSHRVITFANQDDYISFRHHVYKKTDHRNVELTEVGPRFELKLYMIRLGTLEQEATADVEWRWHPYTNTARKRVFLSTE

SEQ ID NO: 40041 - protein, 76 aa, Homo sapiens
  Payload ID: 8159
  Gene Symbol: IMP4
  Gene Name: IMP4, U3 small nucleolar ribonucleoprotein
  ENSP ID: ENSP00000416756
MLRREARLRREYLYRKAREEAQRSAQERKERLRRALEENRLIPTELRREALALQGSLEFDDAGGEGNYTRCDQPRG

SEQ ID NO: 40042 - protein, 320 aa, Homo sapiens
  Payload ID: 8160
  Gene Symbol: IMPACT
  Gene Name: impact RWD domain protein
  Uniprot ID: Q9P2X3
  ENSP ID: ENSP00000284202
MAEGDAGSDQRQNEEIEAMAAIYGEEWCVIDDCAKIFCIRISDDIDDPKWTLCLQVMLPNEYPGTAPPIYQLNAPWLKGQERADLSNSLEEIYIQNIGESILYLWVEKIRDVLIQKSQMTEPGPDVKKKTEEEDVECEDDLILACQPESSLKALDFDISETRTEVEVEELPPIDHGIPITDRRSTFQAHLAPVVCPKQVKMVLSKLYENKKIASATHNIYAYRIYCEDKQTFLQDCEDDGETAAGGRLLHLMEILNVKNVMVVVSRWYGGILLGPDRFKHINNCARNILVEKNYTNSPEESSKALGKNKKVRKDKKRNEH

SEQ ID NO: 40043 - protein, 180 aa, Homo sapiens
  Payload ID: 8160
  Gene Symbol: IMPACT
  Gene Name: impact RWD domain protein
  ENSP ID: ENSP00000462769
MAAIYGEEWCVIDDCAKIFCIRISDDIDDPKWTLCLQVMLPNEYPGTAPPIYQLNAPWLKGQERADLSNSLEEIYIQNIGESILYLWVEKIRDVLIQKSQMTEPGPDVKKKTEEEDVECEDDLILACQPESSLKALDFDISETRTEVEVEELPPIDHGIPITDRRSTFQAHLAPVVCPKQ

SEQ ID NO: 40044 - protein, 18 aa, Homo sapiens
  Payload ID: 8160
  Gene Symbol: IMPACT
  Gene Name: impact RWD domain protein
  ENSP ID: ENSP00000463710
  MOD_RES (1)..(1): Any amino acid
XALGKNKKVRKDKKRNEH

SEQ ID NO: 40045 - protein, 106 aa, Homo sapiens
  Payload ID: 8160
  Gene Symbol: IMPACT
  Gene Name: impact RWD domain protein
  ENSP ID: ENSP00000463895
DGETAAGGRLLHLMEILNVKNVMVVVSRWYGGILLGPDRFKHINNCARNILVEKNYTNSPEESSKALGKNKKMGIAEAASKVCFEVYIVKQSLSEENYIKLITTKK

SEQ ID NO: 40046 - protein, 185 aa, Homo sapiens
  Payload ID: 8160
  Gene Symbol: IMPACT
  Gene Name: impact RWD domain protein
  ENSP ID: ENSP00000464363
MAEGDAGSDQRQNEEIEAMAAIYGEEWCVIDDCAKIFCIRISDDIDDPKWTLCLQVMLPNEYPGTAPPIYQLNAPWLKGQERADLSNSLEEIYIQNIGESILYLWVEKIRDVLIQKSQMTEPGPDVKKKTEEEDVECEDDLILACQPESSLKALDFDISETRTEVEELPPIDHGIPITDRRSTFQ

SEQ ID NO: 40047 - protein, 975 aa, Homo sapiens
  Payload ID: 8161
  Gene Symbol: IPO11
  Gene Name: importin 11
  Uniprot ID: Q9UI26
  ENSP ID: ENSP00000316651
MDLNSASTVVLQVLTQATSQDTAVLKPAEEQLKQWETQPGFYSVLLNIFTNHTLDINVRWLAVLYFKHGIDRYWRRVAPHALSEEEKTTLRAGLITNFNEPINQIATQIAVLIAKVARLDCPRQWPELIPTLIESVKVQDDLRQHRALLTFYHVTKTLASKRLAADRKLFYDLASGIYNFACSLWNHHTDTFLQEVSSGNEAAILSSLERTLLSLKVLRKLTVNGFVEPHKNMEVMGFLHGIFERLKQFLECSRSIGTDNVCRDRLEKTIILFTKVLLDFLDQHPFSFTPLIQRSLEFSVSYVFTEVGEGVTFERFIVQCMNLIKMIVKNYAYKPSKNFEDSSPETLEAHKIKMAFFTYPTLTEICRRLVSHYFLLTEEELTMWEEDPEGFTVEETGGDSWKYSLRPCTEVLFIDIFHEYNQTLTPVLLEMMQTLQGPTNVEDMNALLIKDAVYNAVGLAAYELFDSVDFDQWFKNQLLPELQVIHNRYKPLRRRVIWLIGQWISVKFKSDLRPMLYEAICNLLQDQDLVVRIETATTLKLTVDDFEFRTDQFLPYLETMFTLLFQLLQQVTECDTKMHVLHVLSCVIERVNMQIRPYVGCLVQYLPLLWKQSEEHNMLRCAILTTLIHLVQGLGADSKNLYPFLLPVIQLSTDVSQPPHVYLLEDGLELWLVTLENSPCITPELLRIFQNMSPLLELSSENLRTCFKIINGYIFLSSTEFLQTYAVGLCQSFCELLKEITTEGQVQVLKVVENALKVNPILGPQMFQPILPYVFKGIIEGERYPVVMSTYLGVMGRVLLQNTSFFSSLLNEMAHKFNQEMDQLLGNMIEMWVDRMDNITQPERRKLSALALLSLLPSDNSVIQDKFCGIINISVEGLHDVMTEDPETGTYKDCMLMSHLEEPKVTEDEEPPTEQDKRKKMLALKDPVHTVSLQQFIYEKLKAQQEMLGEQGFQSLMETVDTEIVTQLQEFLQGF

SEQ ID NO: 40048 - protein, 1015 aa, Homo sapiens
  Payload ID: 8161
  Gene Symbol: IPO11
  Gene Name: importin 11
  Uniprot ID: Q9UI26
  ENSP ID: ENSP00000386992
MVQPIIHLGYVVYSLLYLGYKPVQHVTALNTVSSCHKMVSMDLNSASTVVLQVLTQATSQDTAVLKPAEEQLKQWETQPGFYSVLLNIFTNHTLDINVRWLAVLYFKHGIDRYWRRVAPHALSEEEKTTLRAGLITNFNEPINQIATQIAVLIAKVARLDCPRQWPELIPTLIESVKVQDDLRQHRALLTFYHVTKTLASKRLAADRKLFYDLASGIYNFACSLWNHHTDTFLQEVSSGNEAAILSSLERTLLSLKVLRKLTVNGFVEPHKNMEVMGFLHGIFERLKQFLECSRSIGTDNVCRDRLEKTIILFTKVLLDFLDQHPFSFTPLIQRSLEFSVSYVFTEVGEGVTFERFIVQCMNLIKMIVKNYAYKPSKNFEDSSPETLEAHKIKMAFFTYPTLTEICRRLVSHYFLLTEEELTMWEEDPEGFTVEETGGDSWKYSLRPCTEVLFIDIFHEYNQTLTPVLLEMMQTLQGPTNVEDMNALLIKDAVYNAVGLAAYELFDSVDFDQWFKNQLLPELQVIHNRYKPLRRRVIWLIGQWISVKFKSDLRPMLYEAICNLLQDQDLVVRIETATTLKLTVDDFEFRTDQFLPYLETMFTLLFQLLQQVTECDTKMHVLHVLSCVIERVNMQIRPYVGCLVQYLPLLWKQSEEHNMLRCAILTTLIHLVQGLGADSKNLYPFLLPVIQLSTDVSQPPHVYLLEDGLELWLVTLENSPCITPELLRIFQNMSPLLELSSENLRTCFKIINGYIFLSSTEFLQTYAVGLCQSFCELLKEITTEGQVQVLKVVENALKVNPILGPQMFQPILPYVFKGIIEGERYPVVMSTYLGVMGRVLLQNTSFFSSLLNEMAHKFNQEMDQLLGNMIEMWVDRMDNITQPERRKLSALALLSLLPSDNSVIQDKFCGIINISVEGLHDVMTEDPETGTYKDCMLMSHLEEPKVTEDEEPPTEQDKRKKMLALKDPVHTVSLQQFIYEKLKAQQEMLGEQGFQSLMETVDTEIVTQLQEFLQGF

SEQ ID NO: 40049 - protein, 94 aa, Homo sapiens
  Payload ID: 8161
  Gene Symbol: IPO11
  Gene Name: importin 11
  ENSP ID: ENSP00000387039
MTEDPETGTYKDCMLMSHLEEPKVTEDEEPPTEQDKRKKMLALKDPVHTVSLQQFIYEKLKAQQEMLGEQGFQSLMETVDTEIVTQLQEFLQGF

SEQ ID NO: 40050 - protein, 863 aa, Homo sapiens
  Payload ID: 8161
  Gene Symbol: IPO11
  Gene Name: importin 11
  ENSP ID: ENSP00000395685
MDLNSASTVVLQVLTQATSQDTAVLKPAEEQLKQWETQPGFYSVLLNIFTNHTLDINVRWLAVLYFKHGIDRYWRRVAPHALSEEEKTTLRAGLITNFNEPINQIATQIAVLIAKVARLDCPRQWPELIPTLIESVKVQDDLRQHRALLTFYHVTKTLASKRLAADRKLFYDLASGIYNFACSLWNHHTDTFLQEVSSGNEAAILSSLERTLLSLKVLRKLTVNGFVEPHKNMEVMGFLHGIFERLKQFLECSRSIGTDNVCRDRLEKTIILFTKVLLDFLDQHPFSFTPLIQRSLEFSVSYVFTEVGEGVTFERFIVQCMNLIKMIVKNYAYKPSKNFEDSSPETLEAHKIKMAFFTYPTLTEICRRLVSHYFLLTEEELTMWEEDPEGFTVEETGGDSWKYSLRPCTEVLFIDIFHEYNQTLTPVLLEMMQTLQGPTNVEDMNALLIKDAVYNAVGLAAYELFDSVDFDQWFKNQLLPELQVIHNRYKPLRRRVIWLIGQWISVKFKSDLRPMLYEAICNLLQDQDLVVRIETATTLKLTVDDFEFRTDQFLPYLETMFTLLFQLLQQVTECDTKMHVLHVLSCVIERVNMQIRPYVGCLVQYLPLLWKQSEEHNMLRCAILTTLIHLVQGLGADSKNLYPFLLPVIQLSTDVSQPPHVYLLEDGLELWLVTLENSPCITPELLRIFQNMSPLLELSSENLRTCFKIINGYIFLSSTEFLQTYAVGLCQSFCELLKEITTEGQVQVLKVVENALKVNPILGPQMFQPILPYVFKGIIEGERYPVVMSTYLGVMGRVLLQNTSFFSSLLNEMAHKFNQEMDQLLGNMIEMWVDRMDNITQPERRKLSALALLSLLPSDNSQF

SEQ ID NO: 40051 - protein, 59 aa, Homo sapiens
  Payload ID: 8161
  Gene Symbol: IPO11
  Gene Name: importin 11
  ENSP ID: ENSP00000398230
MDQLLGNMIEMWVDRMDNITQPERRKLSALALLSLLPSDNSFLYPWQPLFYTLTVKEPM

SEQ ID NO: 40052 - protein, 160 aa, Homo sapiens
  Payload ID: 8161
  Gene Symbol: IPO11
  Gene Name: importin 11
  ENSP ID: ENSP00000421517
  MOD_RES (1)..(1): Any amino acid
XLRCAILTTLIHLVQVVENALKVNPILGPQMFQPILPYVFKGIIEGERYPVVMSTYLGVMGRVLLQNTSFFSSLLNEMAHKFNQEMDQLLGNMIEMWVDRMDNITQPERRKLSALALLSLLPSDNSVIQDKFCGIINISVEGLHDVMTEDPETGTYKDWP

SEQ ID NO: 40053 - protein, 63 aa, Homo sapiens
  Payload ID: 8161
  Gene Symbol: IPO11
  Gene Name: importin 11
  ENSP ID: ENSP00000425573
MDLNSASTVVLQVLTQATSQDTAVLKPAEEQLKQWETQPGFYSVLLNIFTNHTLDINVRWLAV

SEQ ID NO: 40054 - protein, 148 aa, Homo sapiens
  Payload ID: 8161
  Gene Symbol: IPO11
  Gene Name: importin 11
  ENSP ID: ENSP00000427129
MDLNSASTVVLQVLTQATSQDTAVLKPAEEQLKQWETQPGFYSVLLNIFTNHTLDINVRWLAVLYFKHGIDRYWRRVAPHALSEEEKTTLRAGLITNFNEPINQIATQIAVLIAKVARLDCPRQWPELIPTLIESVKVQDDLRQHRAL

SEQ ID NO: 40055 - protein, 162 aa, Homo sapiens
  Payload ID: 8161
  Gene Symbol: IPO11
  Gene Name: importin 11
  ENSP ID: ENSP00000427274
MDLNSASTVVLQVLTQATSQDTAVLKPAEEQLKQWETQPGFYSVLLNIFTNHTLDINVRWLAVLYFKHGIDRYWRRVAPHALSEEEKTTLRAGLITNFNEPINQIATQIAVLIAKVARLDCPRQWPELIPTLIESVKVQDDLRQHRALLTFYHVTKTLASKR

SEQ ID NO: 40056 - protein, 181 aa, Homo sapiens
  Payload ID: 8162
  Gene Symbol: IPO13
  Gene Name: importin 13
  ENSP ID: ENSP00000361414
MVLGAGWGWAYQLHLLQALKRKPDLFLCERLDVKAVFQCAVLALKFPEAPTVKASCGFFTELLPRCGEVESVGKVVQEDGRMLLIAVLEAIGGQASRSLMDCFADILFALNKHCFSLLSMWIKEALQPPGFPSARLSPEQKDTFSQQILRERVNKRRVKEMVKEFTLLCRGLHGTDYTADY

SEQ ID NO: 40057 - protein, 963 aa, Homo sapiens
  Payload ID: 8162
  Gene Symbol: IPO13
  Gene Name: importin 13
  Uniprot ID: O94829
  ENSP ID: ENSP00000361418
MERREEQPGAAGAGAAPALDFTVENVEKALHQLYYDPNIENKNLAQKWLMQAQVSPQAWHFSWQLLQPDKVPEIQYFGASALHIKISRYWSDIPTDQYESLKAQLFTQITRFASGSKIVLTRLCVALASLALSMMPDAWPCAVADMVRLFQAEDSPVDGQGRCLALLELLTVLPEEFQTSRLPQYRKGLVRTSLAVECGAVFPLLEQLLQQPSSPSCVRQKVLKCFSSWVQLEVPLQDCEALIQAAFAALQDSELFDSSVEAIVNAISQPDAQRYVNTLLKLIPLVLGLQEQLRQAVQNGDMETSHGICRIAVALGENHSRALLDQVEHWQSFLALVNMIMFCTGIPGHYPVNETTSSLTLTFWYTLQDDILSFEAEKQAVYQQVYRPVYFQLVDVLLHKAQFPSDEEYGFWSSDEKEQFRIYRVDISDTLMYVYEMLGAELLSNLYDKLGRLLTSSEEPYSWQHTEALLYGFQSIAETIDVNYSDVVPGLIGLIPRISISNVQLADTVMFTIGALSEWLADHPVMINSVLPLVLHALGNPELSVSSVSTLKKICRECKYDLPPYAANIVAVSQDVLMKQIHKTSQCMWLMQALGFLLSALQVEEILKNLHSLISPYIQQLEKLAEEIPNPSNKLAIVHILGLLSNLFTTLDISHHEDDHEGPELRKLPVPQGPNPVVVVLQQVFQLIQKVLSKWLNDAQVVEAVCAIFEKSVKTLLDDFAPMVPQLCEMLGRMYSTIPQASALDLTRQLVHIFAHEPAHFPPIEALFLLVTSVTLTLFQQGPRDHPDIVDSFMQLLAQALKRKPDLFLCERLDVKAVFQCAVLALKFPEAPTVKASCGFFTELLPRCGEVESVGKVVQEDGRMLLIAVLEAIGGQASRSLMDCFADILFALNKHCFSLLSMWIKEALQPPGFPSARLSPEQKDTFSQQILRERVNKRRVKEMVKEFTLLCRGLHGTDYTADY

SEQ ID NO: 40058 - protein, 1081 aa, Homo sapiens
  Payload ID: 8163
  Gene Symbol: IPO4
  Gene Name: importin 4
  Uniprot ID: Q8TEX9
  ENSP ID: ENSP00000346453
MESAGLEQLLRELLLPDTERIRRATEQLQIVLRAPAALPALCDLLASAADPQIRQFAAVLTRRRLNTRWRRLAAEQRESLKSLILTALQRETEHCVSLSLAQLSATIFRKEGLEAWPQLLQLLQHSTHSPHSPEREMGLLLLSVVVTSRPEAFQPHHRELLRLLNETLGEVGSPGLLFYSLRTLTTMAPYLSTEDVPLARMLVPKLIMAMQTLIPIDEAKACEALEALDELLESEVPVITPYLSEVLTFCLEVARNVALGNAIRIRILCCLTFLVKVKSKALLKNRLLPPLLHTLFPIVAAEPPPGQLDPEDQDSEEEELEIELMGETPKHFAVQVVDMLALHLPPEKLCPQLMPMLEEALRSESPYQRKAGLLVLAVLSDGAGDHIRQRLLPPLLQIVCKGLEDPSQVVRNAALFALGQFSENLQPHISSYSREVMPLLLAYLKSVPLGHTHHLAKACYALENFVENLGPKVQPYLPELMECMLQLLRNPSSPRAKELAVSALGAIATAAQASLLPYFPAIMEHLREFLLTGREDLQPVQIQSLETLGVLARAVGEPMRPLAEECCQLGLGLCDQVDDPDLRRCTYSLFAALSGLMGEGLAPHLEQITTLMLLSLRSTEGIVPQYDGSSSFLLFDDESDGEEEEELMDEDVEEEDDSEISGYSVENAFFDEKEDTCAAVGEISVNTSVAFLPYMESVFEEVFKLLECPHLNVRKAAHEALGQFCCALHKACQSCPSEPNTAALQAALARVVPSYMQAVNRERERQVVMAVLEALTGVLRSCGTLTLKPPGRLAELCGVLKAVLQRKTACQDTDEEEEEEDDDQAEYDAMLLEHAGEAIPALAAAAGGDSFAPFFAGFLPLLVCKTKQGCTVAEKSFAVGTLAETIQGLGAASAQFVSRLLPVLLSTAQEADPEVRSNAIFGMGVLAEHGGHPAQEHFPKLLGLLFPLLARERHDRVRDNICGALARLLMASPTRKPEPQVLAALLHALPLKEDLEEWVTIGRLFSFLYQSSPDQVIDVAPELLRICSLILADNKIPPDTKAALLLLLTFLAKQHTDSFQAALGSLPVDKAQELQAVLGLS

SEQ ID NO: 40059 - protein, 48 aa, Homo sapiens
  Payload ID: 8163
  Gene Symbol: IPO4
  Gene Name: importin 4
  ENSP ID: ENSP00000452710
MESAGLEQLLRELLLPDTERIRRLPPRPRNSSRSFFGPPPLCRLSATC

SEQ ID NO: 40060 - protein, 154 aa, Homo sapiens
  Payload ID: 8163
  Gene Symbol: IPO4
  Gene Name: importin 4
  ENSP ID: ENSP00000452798
MESAGLEQLLRELLLPDTERIRRATEQLQIVLRAPAALPALCDLLASAADPQTTEHPLATAGGGATGEPQVPDPDGPAERNRALCEPQPGPALSHHFSKGRLGGLATAFAAASAQYPQPPQPRERDGAFAAKCGGDLPARGLPTPPPGASSASE

SEQ ID NO: 40061 - protein, 101 aa, Homo sapiens
  Payload ID: 8163
  Gene Symbol: IPO4
  Gene Name: importin 4
  ENSP ID: ENSP00000453108
MESAGLEQLLRELLLPDTERIRRATEQLQIVLRAPAALPALCDLLASAADPQIRQFAAVLTRRRLNTRWRRLAAEQRESLKSLILTALQRETESLLFAGTV

SEQ ID NO: 40062 - protein, 98 aa, Homo sapiens
  Payload ID: 8163
  Gene Symbol: IPO4
  Gene Name: importin 4
  ENSP ID: ENSP00000453349
MESAGLEQLLRELLLPDTERIRRATEQLQIVLRAPAALPALCDLLASAADPQIRQFAAVLTRRRLNTRWRRLAAEQRESLKSLILTALQRETEWGFCC

SEQ ID NO: 40063 - protein, 547 aa, Homo sapiens
  Payload ID: 8163
  Gene Symbol: IPO4
  Gene Name: importin 4
  ENSP ID: ENSP00000453708
  MOD_RES (1)..(1): Any amino acid
XQPVQIQSLETLGVLARAVGEPMRPLAEECCQLGLGLCDQVDDPDLRRCTYSLFAALSGLMGEGLAPHLEQITTLMLLSLRSTEGIVPQYDGSSSFLLFDDESDGEEEEELMDEDVEEEDDSEISGYSVENAFFDEKEDTCAAVGEISVNTSVAFLPYMESVFEEVFKLLECPHLNVRKAAHEALGQFCCALHKACQSCPSEPNTAALQAALARVVPSYMQAVNRERERQVVMAVLEALTGVLRSCGTLTLKPPGRLAELCGVLKAVLQRKTACQDTDEEEEEEDDDQAEYDAMLLEHAGEAIPALAAAAGGDSFAPFFAGFLPLLVCKTKQGCTVAEKSFAVGTLAETIQGLGAASAQFVSRLLPVLLSTAQEADPEVRSNAIFGMGVLAEHGGHPAQEHFPKLLGLLFPLLARERHDRVRDNICGALARLLMASPTRKPEPQVLAALLHALPLKEDLEEWVTIGRLFSFLYQSSPDQVIDVAPELLRICSLILADNKIPPGEDTKAALLLLLTFLAKQHTDSFQAALGSLPVDKAQELQAVLGLS

SEQ ID NO: 40064 - protein, 312 aa, Homo sapiens
  Payload ID: 8163
  Gene Symbol: IPO4
  Gene Name: importin 4
  ENSP ID: ENSP00000453818
  MOD_RES (1)..(1): Any amino acid
XPSEPNTAALQAALARVVPSYMQAVNRERERQVVMAVLEALTGVLRSCGTLTLKPPGRLAELCGVLKAVLQRKTACQDTDEEEEEEDDDQAEYDAMLLEHAGEAIPALAAAAGGDSFAPFFAGFLPLLVCKTKQGCTVAEKSFAVGTLAETIQGLGAASAQFVSRLLPVLLSTAQEADPEVRSNAIFGMGVLAEHGGHPAQEHFPKLLGLLFPLLARERHDRVRDNICGALARLLMASPTRKPEPQVIDVAPELLRICSLILADNKIPPDTKAALLLLLTFLAKQHTDSFQAALGSLPVDKAQELQAVLGLS

SEQ ID NO: 40065 - protein, 911 aa, Homo sapiens
  Payload ID: 8163
  Gene Symbol: IPO4
  Gene Name: importin 4
  ENSP ID: ENSP00000453825
MESAGLEQLLRELLLPDTERIRRATEQLQIVLRAPAALPALCDLLASAADPQIRQFAAVLTRRRLNTRWRRLAAEQRESLKSLILTALQRETEHCVSLSLAQLSATIFRKEGLEAWPQLLQLLQHSTHSPHSPEREMGLLLLSVVVTSRPEAFQPHHRELLRLLNETLGEVGSPGLLFYSLRTLTTMAPYLSTEDVPLARMLVPKLIMAMQTLIPIDEAKACEALEALDELLESEVPVITPYLSEVLTFCLEVARNVALGNAIRIRILCCLTFLVKVKSKALLKNRLLPPLLHTLFPIVAAEPPPGQLDPEDQDSEEEELEIELMGETPKHFAVQVVDMLALHLPPEKLCPQLMPMLEEALRSESPYQRKAGLLVLAVLSDGAGDHIRQRLLPPLLQIVCKGLEDPSQVVRNAALFALGQFSENLQPHISSYSREVMPLLLAYLKSVPLGHTHHLAKACYALENFVENLGPKVQPYLPELMECMLQLLRNPSSPRAKELAVSALGAIATAAQASLLPYFPAIMEHLREFLLTGREDLQPVQIQSLETLGVLARAVGEPMRPLAEECCQLGLGLCDQVDDPDLRRCTYSLFAALSGLMGEGLAPHLEQITTLMLLSLRSTEGIVPQYDGSSSFLLFDDESDGEEEEELMDEDVEEEDDSEISGYSVENAFFDEKEDTCAAVGEISVNTSVAFLPYMESVFEEVFKLLECPHLNVRKAAHEALGQFCCALHKACQSCPSEPNTAALQAALARVVPSYMQAVNRERERQVVMAVLEALTGVLRSCGTLTLKPPGRLAELCGVLKAVLQRKTACQDTDEEEEEEDDDQPLTWLHRLNTTPCCWSTLERPSLPWQPRLGETPLPHSLPVSCHYWCARQNRAAQWQRSPLQWGPWQRLFRAWVLPQPSLCLGCSLCC

SEQ ID NO: 40066 - protein, 1115 aa, Homo sapiens
  Payload ID: 8164
  Gene Symbol: IPO5
  Gene Name: importin 5
  Uniprot ID: O00410
  ENSP ID: ENSP00000261574
MPEDQVGKLEATENTISAMAAAAAEQQQFYLLLGNLLSPDNVVRKQAEETYENIPGQSKITFLLQAIRNTTAAEEARQMAAVLLRRLLSSAFDEVYPALPSDVQTAIKSELLMIIQMETQSSMRKKVCDIAAELARNLIDEDGNNQWPEGLKFLFDSVSSQNVGLREAALHIFWNFPGIFGNQQQHYLDVIKRMLVQCMQDQEHPSIRTLSARATAAFILANEHNVALFKHFADLLPGFLQAVNDSCYQNDDSVLKSLVEIADTVPKYLRPHLEATLQLSLKLCGDTSLNNMQRQLALEVIVTLSETAAAMLRKHTNIVAQTIPQMLAMMVDLEEDEDWANADELEDDDFDSNAVAGESALDRMACGLGGKLVLPMIKEHIMQMLQNPDWKYRHAGLMALSAIGEGCHQQMEGILNEIVNFVLLFLQDPHPRVRYAACNAVGQMATDFAPGFQKKFHEKVIAALLQTMEDQGNQRVQAHAAAALINFTEDCPKSLLIPYLDNLVKHLHSIMVLKLQELIQKGTKLVLEQVVTSIASVADTAEEKFVPYYDLFMPSLKHIVENAVQKELRLLRGKTIECISLIGLAVGKEKFMQDASDVMQLLLKTQTDFNDMEDDDPQISYMISAWARMCKILGKEFQQYLPVVMGPLMKTASIKPEVALLDTQDMENMSDDDGWEFVNLGDQQSFGIKTAGLEEKSTACQMLVCYAKELKEGFVEYTEQVVKLMVPLLKFYFHDGVRVAAAESMPLLLECARVRGPEYLTQMWHFMCDALIKAIGTEPDSDVLSEIMHSFAKCIEVMGDGCLNNEHFEELGGILKAKLEEHFKNQELRQVKRQDEDYDEQVEESLQDEDDNDVYILTKVSDILHSIFSSYKEKVLPWFEQLLPLIVNLICPHRPWPDRQWGLCIFDDVIEHCSPASFKYAEYFLRPMLQYVCDNSPEVRQAAAYGLGVMAQYGGDNYRPFCTEALPLLVRVIQSADSKTKENVNATENCISAVGKIMKFKPDCVNVEEVLPHWLSWLPLHEDKEEAVQTFNYLCDLIESNHPIVLGPNNTNLPKIFSIIAEGEMHEAIKHEDPCAKRLANVVRQVQTSGGLWTECIAQLSPEQQAAIQELLNSA

SEQ ID NO: 40067 - protein, 1097 aa, Homo sapiens
  Payload ID: 8164
  Gene Symbol: IPO5
  Gene Name: importin 5
  Uniprot ID: O00410
  ENSP ID: ENSP00000350219
MAAAAAEQQQFYLLLGNLLSPDNVVRKQAEETYENIPGQSKITFLLQAIRNTTAAEEARQMAAVLLRRLLSSAFDEVYPALPSDVQTAIKSELLMIIQMETQSSMRKKVCDIAAELARNLIDEDGNNQWPEGLKFLFDSVSSQNVGLREAALHIFWNFPGIFGNQQQHYLDVIKRMLVQCMQDQEHPSIRTLSARATAAFILANEHNVALFKHFADLLPGFLQAVNDSCYQNDDSVLKSLVEIADTVPKYLRPHLEATLQLSLKLCGDTSLNNMQRQLALEVIVTLSETAAAMLRKHTNIVAQTIPQMLAMMVDLEEDEDWANADELEDDDFDSNAVAGESALDRMACGLGGKLVLPMIKEHIMQMLQNPDWKYRHAGLMALSAIGEGCHQQMEGILNEIVNFVLLFLQDPHPRVRYAACNAVGQMATDFAPGFQKKFHEKVIAALLQTMEDQGNQRVQAHAAAALINFTEDCPKSLLIPYLDNLVKHLHSIMVLKLQELIQKGTKLVLEQVVTSIASVADTAEEKFVPYYDLFMPSLKHIVENAVQKELRLLRGKTIECISLIGLAVGKEKFMQDASDVMQLLLKTQTDFNDMEDDDPQISYMISAWARMCKILGKEFQQYLPVVMGPLMKTASIKPEVALLDTQDMENMSDDDGWEFVNLGDQQSFGIKTAGLEEKSTACQMLVCYAKELKEGFVEYTEQVVKLMVPLLKFYFHDGVRVAAAESMPLLLECARVRGPEYLTQMWHFMCDALIKAIGTEPDSDVLSEIMHSFAKCIEVMGDGCLNNEHFEELGGILKAKLEEHFKNQELRQVKRQDEDYDEQVEESLQDEDDNDVYILTKVSDILHSIFSSYKEKVLPWFEQLLPLIVNLICPHRPWPDRQWGLCIFDDVIEHCSPASFKYAEYFLRPMLQYVCDNSPEVRQAAAYGLGVMAQYGGDNYRPFCTEALPLLVRVIQSADSKTKENVNATENCISAVGKIMKFKPDCVNVEEVLPHWLSWLPLHEDKEEAVQTFNYLCDLIESNHPIVLGPNNTNLPKIFSIIAEGEMHEAIKHEDPCAKRLANVVRQVQTSGGLWTECIAQLSPEQQAAIQELLNSA

SEQ ID NO: 40068 - protein, 182 aa, Homo sapiens
  Payload ID: 8164
  Gene Symbol: IPO5
  Gene Name: importin 5
  ENSP ID: ENSP00000385938
AAAAEQQQFYLLLGNLLSPDNVVRKQAEARQMAAVLLRRLLSSAFDEVYPALPSDVQTAIKSELLMIIQMETQSSMRKKVCDIAAELARNLIDEDGNNQWPEGLKFLFDSVSSQNVGLREAALHIFWNFPGIFGNQQQHYLDVIKRMLVQCMQDQEHPSIRTLSARATAAFILANEHNVALF

SEQ ID NO: 40069 - protein, 106 aa, Homo sapiens
  Payload ID: 8164
  Gene Symbol: IPO5
  Gene Name: importin 5
  ENSP ID: ENSP00000408885
MPEDQVGKLEATENTISAMAAAAAEQQQFYLLLGNLLSPDNVVRKQAEETYENIPGQSKITFLLQAIRNTTAAEEARQMAAVLLRRLLSSAFDEVYPALPSDVQTA

SEQ ID NO: 40070 - protein, 98 aa, Homo sapiens
  Payload ID: 8164
  Gene Symbol: IPO5
  Gene Name: importin 5
  ENSP ID: ENSP00000417162
MPEDQVGKLEATENTISAMAAAAAEQQQFYLLLGNLLSPDNVVRKQAEETYENIPGQSKITFLLQAIRNTTAAEEARQMAAVLLRRLLSSAFDEVYPA

SEQ ID NO: 40071 - protein, 126 aa, Homo sapiens
  Payload ID: 8164
  Gene Symbol: IPO5
  Gene Name: importin 5
  ENSP ID: ENSP00000417647
MAAAAAEQQQFYLLLGNLLSPDNVVRKQAEETYENIPGQSKITFLLQAIRNTTAAEEARQMAAVLLRRLLSSAFDEVYPALPSDVQTAIKSELLMIIQMETQSSMRKKVCDIAAELARNLIASSLG

SEQ ID NO: 40072 - protein, 75 aa, Homo sapiens
  Payload ID: 8164
  Gene Symbol: IPO5
  Gene Name: importin 5
  ENSP ID: ENSP00000417721
MPEDQVGKLEATENTISAMAAAAAEQQQFYLLLGNLLSPDNVVRKQAEETYENIPGQSKITFLLQAIRNTTAAEE

SEQ ID NO: 40073 - protein, 50 aa, Homo sapiens
  Payload ID: 8164
  Gene Symbol: IPO5
  Gene Name: importin 5
  ENSP ID: ENSP00000417993
MPEDQVGKLEATENTISAMAAAAAEQQQFYLLLGNLLSPDNVVRKQAEVT

SEQ ID NO: 40074 - protein, 1097 aa, Homo sapiens; identical to SEQ ID NO: 40067
  Payload ID: 8164
  Gene Symbol: IPO5
  Gene Name: importin 5
  Uniprot ID: O00410
  ENSP ID: ENSP00000418393

SEQ ID NO: 40075 - protein, 77 aa, Homo sapiens
  Payload ID: 8164
  Gene Symbol: IPO5
  Gene Name: importin 5
  ENSP ID: ENSP00000419003
MAAVLLRRLLSSAFDEVYPALPSDVQTAIKSELLMIIQMETQSSMRKKVCDIAAELARNLIDEDGNNQWPEGLKFLF

SEQ ID NO: 40076 - protein, 64 aa, Homo sapiens
  Payload ID: 8164
  Gene Symbol: IPO5
  Gene Name: importin 5
  ENSP ID: ENSP00000419166
MPEDQVGKLEATENTISAMAAAAAEQQQFYLLLGNLLSPDNVVRKQAEETYENIPGQSKITFLL

SEQ ID NO: 40077 - protein, 63 aa, Homo sapiens
  Payload ID: 8164
  Gene Symbol: IPO5
  Gene Name: importin 5
  ENSP ID: ENSP00000419398
MPEDQVGKLEATENTISAMAAAAAEQQQFYLLLGNLLSPDNVVRKQAETDMFEKFETCVALHK

SEQ ID NO: 40078 - protein, 1099 aa, Homo sapiens
  Payload ID: 8164
  Gene Symbol: IPO5
  Gene Name: importin 5
  ENSP ID: ENSP00000419764
  MOD_RES (1)..(1): Any amino acid
XFRPLLPRRLAPVTSPPPLAPTCGRSRRAPVQETYENIPGQSKITFLLQAIRNTTAAEEARQMAAVLLRRLLSSAFDEVYPALPSDVQTAIKSELLMIIQMETQSSMRKKVCDIAAELARNLIDEDGNNQWPEGLKFLFDSVSSQNVGLREAALHIFWNFPGIFGNQQQHYLDVIKRMLVQCMQDQEHPSIRTLSARATAAFILANEHNVALFKHFADLLPGFLQAVNDSCYQNDDSVLKSLVEIADTVPKYLRPHLEATLQLSLKLCGDTSLNNMQRQLALEVIVTLSETAAAMLRKHTNIVAQTIPQMLAMMVDLEEDEDWANADELEDDDFDSNAVAGESALDRMACGLGGKLVLPMIKEHIMQMLQNPDWKYRHAGLMALSAIGEGCHQQMEGILNEIVNFVLLFLQDPHPRVRYAACNAVGQMATDFAPGFQKKFHEKVIAALLQTMEDQGNQRVQAHAAAALINFTEDCPKSLLIPYLDNLVKHLHSIMVLKLQELIQKGTKLVLEQVVTSIASVADTAEEKFVPYYDLFMPSLKHIVENAVQKELRLLRGKTIECISLIGLAVGKEKFMQDASDVMQLLLKTQTDFNDMEDDDPQISYMISAWARMCKILGKEFQQYLPVVMGPLMKTASIKPEVALLDTQDMENMSDDDGWEFVNLGDQQSFGIKTAGLEEKSTACQMLVCYAKELKEGFVEYTEQVVKLMVPLLKFYFHDGVRVAAAESMPLLLECARVRGPEYLTQMWHFMCDALIKAIGTEPDSDVLSEIMHSFAKCIEVMGDGCLNNEHFEELGGILKAKLEEHFKNQELRQVKRQDEDYDEQVEESLQDEDDNDVYILTKVSDILHSIFSSYKEKVLPWFEQLLPLIVNLICPHRPWPDRQWGLCIFDDVIEHCSPASFKYAEYFLRPMLQYVCDNSPEVRQAAAYGLGVMAQYGGDNYRPFCTEALPLLVRVIQSADSKTKENVNATENCISAVGKIMKFKPDCVNVEEVLPHWLSWLPLHEDKEEAVQTFNYLCDLIESNHPIVLGPNNTNLPKIFSIIAEGEMHEAIKHEDPCAKRLANVVRQVQTSGGLWTECIAQLSPEQQAAIQELLNSA

SEQ ID NO: 40079 - protein, 119 aa, Homo sapiens
  Payload ID: 8164
  Gene Symbol: IPO5
  Gene Name: importin 5
  ENSP ID: ENSP00000419766
MPEDQVGKLEATENTISAMAAAAAEQQQFYLLLGNLLSPDNVVRKQAEETYENIPGQSKITFLLQAIRNTTAAEEARQMAAVLLRRLLSSAFDEVYPALPSDVQTAIKSELLMIIQMET

SEQ ID NO: 40080 - protein, 74 aa, Homo sapiens
  Payload ID: 8164
  Gene Symbol: IPO5
  Gene Name: importin 5
  ENSP ID: ENSP00000419797
MAAAAAEQQQFYLLLGNLLSPDNVVRKQAEETYENIPGQSKITFLLQAIRNTTAAEEARQMAAVLLRRLLSSAF

SEQ ID NO: 40081 - protein, 117 aa, Homo sapiens
  Payload ID: 8164
  Gene Symbol: IPO5
  Gene Name: importin 5
  ENSP ID: ENSP00000419860
MPEDQVGKLEATENTISAMAAAAAEQQQFYLLLGNLLSPDNVVRKQAEETYENIPGQSKITFLLQAIRNTTAAEEARQMAAVLLRRLLSSAFDEVYPALPSDVQTAIKSELLMIIQM

SEQ ID NO: 40082 - protein, 128 aa, Homo sapiens
  Payload ID: 8164
  Gene Symbol: IPO5
  Gene Name: importin 5
  ENSP ID: ENSP00000420043
MIWRTFYTKTNRGKKFLREHCSESTAACLQMPEDQVGKLEATENTISAMAAAAAEQQQFYLLLGNLLSPDNVVRKQAEETYENIPGQSKITFLLQAIRNTTAAEEARQMAAVLLRRLLSSAFDEVYPA

SEQ ID NO: 40083 - protein, 170 aa, Homo sapiens
  Payload ID: 8164
  Gene Symbol: IPO5
  Gene Name: importin 5
  ENSP ID: ENSP00000420079
MAAAAAEQQQFYLLLGNLLSPDNVVRKQAEETYENIPGQSKITFLLQAIRNTTAAEEARQMAAVLLRRLLSSAFDEVYPALPSDVQTAIKSELLMIIQMETQSSMRKKVCDIAAELARNLIDEDGNNQWPEGLKFLFDSVSSQNVGLREAALHIFWNFPGIFGNQQQHYL

SEQ ID NO: 40084 - protein, 88 aa, Homo sapiens
  Payload ID: 8164
  Gene Symbol: IPO5
  Gene Name: importin 5
  ENSP ID: ENSP00000420149
MPEDQVGKLEATENTISAMAAAAAEQQQFYLLLGNLLSPDNVVRKQAEETYENIPGQSKITFLLQAIRNTTAAEEARQMAAVLLRRLL

SEQ ID NO: 40085 - protein, 142 aa, Homo sapiens
  Payload ID: 8164
  Gene Symbol: IPO5
  Gene Name: importin 5
  ENSP ID: ENSP00000420284
MPEDQVGKLEATENTISAMAAAAAEQQQFYLLLGNLLSPDNVVRKQAEETYENIPGQSKITFLLQAIRNTTAAEEARQMAAVLLRRLLSSAFDEVYPALPSDVQTAIKSELLMIIQMETQSSMRKKVCDIAAELARNLIGVY

SEQ ID NO: 40086 - protein, 165 aa, Homo sapiens
  Payload ID: 8164
  Gene Symbol: IPO5
  Gene Name: importin 5
  ENSP ID: ENSP00000420491
MCPLFYFSSYKETYENIPGQSKITFLLQAIRNTTAAEEARQMAAVLLRRLLSSAFDEVYPALPSDVQTAIKSELLMIIQMETQSSMRKKVCDIAAELARNLIDEDGNNQWPEGLKFLFDSVSSQNVGLREAALHIFWNFPGIFGNQQQHYLDVIKRMLVQCMQDQ

SEQ ID NO: 40087 - protein, 63 aa, Homo sapiens; identical to SEQ ID NO: 40077
  Payload ID: 8164
  Gene Symbol: IPO5
  Gene Name: importin 5
  ENSP ID: ENSP00000487097

SEQ ID NO: 40088 - protein, 1038 aa, Homo sapiens
  Payload ID: 8165
  Gene Symbol: IPO7
  Gene Name: importin 7
  Uniprot ID: O95373
  ENSP ID: ENSP00000369042
MDPNTIIEALRGTMDPALREAAERQLNEAHKSLNFVSTLLQITMSEQLDLPVRQAGVIYLKNMITQYWPDRETAPGDISPYTIPEEDRHCIRENIVEAIIHSPELIRVQLTTCIHHIIKHDYPSRWTAIVDKIGFYLQSDNSACWLGILLCLYQLVKNYEYKKPEERSPLVAAMQHFLPVLKDRFIQLLSDQSDQSVLIQKQIFKIFYALVQYTLPLELINQQNLTEWIEILKTVVNRDVPNETLQVEEDDRPELPWWKCKKWALHILARLFERYGSPGNVSKEYNEFAEVFLKAFAVGVQQVLLKVLYQYKEKQYMAPRVLQQTLNYINQGVSHALTWKNLKPHIQGIIQDVIFPLMCYTDADEELWQEDPYEYIRMKFDVFEDFISPTTAAQTLLFTACSKRKEVLQKTMGFCYQILTEPNADPRKKDGALHMIGSLAEILLKKKIYKDQMEYMLQNHVFPLFSSELGYMRARACWVLHYFCEVKFKSDQNLQTALELTRRCLIDDREMPVKVEAAIALQVLISNQEKAKEYITPFIRPVMQALLHIIRETENDDLTNVIQKMICEYSEEVTPIAVEMTQHLAMTFNQVIQTGPDEEGSDDKAVTAMGILNTIDTLLSVVEDHKEITQQLEGICLQVIGTVLQQHVLEFYEEIFSLAHSLTCQQVSPQMWQLLPLVFEVFQQDGFDYFTDMMPLLHNYVTVDTDTLLSDTKYLEMIYSMCKKVLTGVAGEDAECHAAKLLEVIILQCKGRGIDQCIPLFVEAALERLTREVKTSELRTMCLQVAIAALYYNPHLLLNTLENLRFPNNVEPVTNHFITQWLNDVDCFLGLHDRKMCVLGLCALIDMEQIPQVLNQVSGQILPAFILLFNGLKRAYACHAEHENDSDDDDEAEDDDETEELGSDEDDIDEDGQEYLEILAKQAGEDGDDEDWEEDDAEETALEGYSTIIDDEDNPVDEYQIFKAIFQTIQNRNPVWYQALTHGLNEEQRKQLQDIATLADQRRAAHESKMIEKHGGYKFSAPVVPSSFNFGGPAPGMN

SEQ ID NO: 40089 - protein, 64 aa, Homo sapiens
  Payload ID: 8165
  Gene Symbol: IPO7
  Gene Name: importin 7
  ENSP ID: ENSP00000433313
MDPNTIIEALRGTMDPALREAAERQLNETEFRSCCPDWSAMAQSRLATTSASRIRAILLPQPLE

SEQ ID NO: 40090 - protein, 130 aa, Homo sapiens
  Payload ID: 8165
  Gene Symbol: IPO7
  Gene Name: importin 7
  ENSP ID: ENSP00000435235
MITQYWPDRETAPGDISPYTIPEEDRHCIRENIVEAIIHSPELIRVQLTTCIHHIIKHDYPSRWTAIVDKIGFYLQSDNSACWLGILLCLYQLVKNYEYKKPEERSPLVAAMQHFLPVLKDRFIQLLSDQ

SEQ ID NO: 40091 - protein, 64 aa, Homo sapiens; identical to SEQ ID NO: 40089
  Payload ID: 8165
  Gene Symbol: IPO7
  Gene Name: importin 7
  ENSP ID: ENSP00000486575

SEQ ID NO: 40092 - protein, 1037 aa, Homo sapiens
  Payload ID: 8166
  Gene Symbol: IPO8
  Gene Name: importin 8
  Uniprot ID: O15397
  ENSP ID: ENSP00000256079
MDLNRIIQALKGTIDPKLRIAAENELNQSYKIINFAPSLLRIIVSDHVEFPVRQAAAIYLKNMVTQYWPDREPPPGEAIFPFNIHENDRQQIRDNIVEGIIRSPDLVRVQLTMCLRAIIKHDFPGHWPGVVDKIDYYLQSQSSASWLGSLLCLYQLVKTYEYKKAEEREPLIIAMQIFLPRIQQQIVQLLPDSSYYSVLLQKQILKIFYALVQYALPLQLVNNQTMTTWMEIFRTIIDRTVPPETLHIDEDDRPELVWWKCKKWALHIVARLFERYGSPGNVTKEYFEFSEFFLKTYAVGIQQVLLKILDQYRQKEYVAPRVLQQAFNYLNQGVVHSITWKQMKPHIQNISEDVIFSVMCYKDEDEELWQEDPYEYIRMKFDIFEDYASPTTAAQTLLYTAAKKRKEVLPKMMAFCYQILTDPNFDPRKKDGALHVIGSLAEILLKKSLFKDQMELFLQNHVFPLLLSNLGYLRARSCWVLHAFSSLKFHNELNLRNAVELAKKSLIEDKEMPVKVEAALALQSLISNQIQAKEYMKPHVRPIMQELLHIVRETENDDVTNVIQKMICEYSQEVASIAVDMTQHLAEIFGKVLQSDEYEEVEDKTVMAMGILHTIDTILTVVEDHKEITQQLENICLRIIDLVLQKHVIEFYEEILSLAYSLTCHSISPQMWQLLGILYEVFQQDCFEYFTDMMPLLHNYVTIDTDTLLSNAKHLEILFTMCRKVLCGDAGEDAECHAAKLLEVIILQCKGRGIDQCIPLFVQLVLERLTRGVKTSELRTMCLQVAIAALYYNPDLLLHTLERIQLPHNPGPITVQFINQWMNDTDCFLGHHDRKMCIIGLSILLELQNRPPAVDAVVGQIVPSILFLFLGLKQVCATRQLVNREDRSKAEKADMEENEEISSDEEETNVTAQAMQSNNGRGEDEEEEDDDWDEEVLEETALEGFSTPLDLDNSVDEYQFFTQALITVQSRDAAWYQLLMAPLSEDQRTALQEVYTLAEHRRTVAEAKKKIEQQGGFTFENKGVLSAFNFGTVPSNN

SEQ ID NO: 40093 - protein, 84 aa, Homo sapiens
  Payload ID: 8166
  Gene Symbol: IPO8
  Gene Name: importin 8
  ENSP ID: ENSP00000439413
MLMLSGNTSAKYFFSFACGQSKVFLLPSSVLTAAIYLKNMVTQYWPDREPPPGEAIFPFNIHENDRQQIRDNIVEGIIRSPDLV

SEQ ID NO: 40094 - protein, 167 aa, Homo sapiens
  Payload ID: 8166
  Gene Symbol: IPO8
  Gene Name: importin 8
  ENSP ID: ENSP00000439556
MSVACSMFCTEWMWRQYPSSATHSTAEYALPLQLVNNQTMTTWMEIFRTIIDRTVPPETLHIDEDDRPELVWWKCKKWALHIVARLFERYGSPGNVTKEYFEFSEFFLKTYAVGIQQVLLKILDQYRQKEYVAPRVLQQAFNYLNQGVVHSITWKQMKPHIQNISED

SEQ ID NO: 40095 - protein, 151 aa, Homo sapiens
  Payload ID: 8166
  Gene Symbol: IPO8
  Gene Name: importin 8
  ENSP ID: ENSP00000440979
MVTQYWPDREPPPGEAIFPFNIHENDRQQIRDNIVEGIIRSPDLVRVQLTMCLRAIIKHDFPGHWPGVVDKIDYYLQSQSSASWLGSLLCLYQLVKTYEYKKAEEREPLIIAMQIFLPRIQQQIVQLLPDSSYYSVLLQKQILKIFYALVQ

SEQ ID NO: 40096 - protein, 35 aa, Homo sapiens
  Payload ID: 8166
  Gene Symbol: IPO8
  Gene Name: importin 8
  ENSP ID: ENSP00000443789
MDLNRIIQALKGTIDPKLRIAAENELNQFTSDYSL

SEQ ID NO: 40097 - protein, 33 aa, Homo sapiens
  Payload ID: 8166
  Gene Symbol: IPO8
  Gene Name: importin 8
  ENSP ID: ENSP00000444050
MVTQYWPDREPPPGEAIFPFNIHENDRQQIRDN

SEQ ID NO: 40098 - protein, 832 aa, Homo sapiens
  Payload ID: 8166
  Gene Symbol: IPO8
  Gene Name: importin 8
  Uniprot ID: O15397
  ENSP ID: ENSP00000444520
MESLTLKGYALPLQLVNNQTMTTWMEIFRTIIDRTVPPETLHIDEDDRPELVWWKCKKWALHIVARLFERYGSPGNVTKEYFEFSEFFLKTYAVGIQQVLLKILDQYRQKEYVAPRVLQQAFNYLNQGVVHSITWKQMKPHIQNISEDVIFSVMCYKDEDEELWQEDPYEYIRMKFDIFEDYASPTTAAQTLLYTAAKKRKEVLPKMMAFCYQILTDPNFDPRKKDGALHVIGSLAEILLKKSLFKDQMELFLQNHVFPLLLSNLGYLRARSCWVLHAFSSLKFHNELNLRNAVELAKKSLIEDKEMPVKVEAALALQSLISNQIQAKEYMKPHVRPIMQELLHIVRETENDDVTNVIQKMICEYSQEVASIAVDMTQHLAEIFGKVLQSDEYEEVEDKTVMAMGILHTIDTILTVVEDHKEITQQLENICLRIIDLVLQKHVIEFYEEILSLAYSLTCHSISPQMWQLLGILYEVFQQDCFEYFTDMMPLLHNYVTIDTDTLLSNAKHLEILFTMCRKVLCGDAGEDAECHAAKLLEVIILQCKGRGIDQCIPLFVQLVLERLTRGVKTSELRTMCLQVAIAALYYNPDLLLHTLERIQLPHNPGPITVQFINQWMNDTDCFLGHHDRKMCIIGLSILLELQNRPPAVDAVVGQIVPSILFLFLGLKQVCATRQLVNREDRSKAEKADMEENEEISSDEEETNVTAQAMQSNNGRGEDEEEEDDDWDEEVLEETALEGFSTPLDLDNSVDEYQFFTQALITVQSRDAAWYQLLMAPLSEDQRTALQEVYTLAEHRRTVAEAKKKIEQQGGFTFENKGVLSAFNFGTVPSNN

SEQ ID NO: 40099 - protein, 167 aa, Homo sapiens
  Payload ID: 8166
  Gene Symbol: IPO8
  Gene Name: importin 8
  ENSP ID: ENSP00000446232
  MOD_RES (1)..(1): Any amino acid
XLLELQNRPPAVDAVVGQIVPSILFLFLGLKQVCATRQLVNREDRSKAEKADMEENEEISSDEEETNVTAQAMQSNNGRGEDEEEEDDDWDEEVLEETALEGFSTPLDLDNSVDEYQFFTQALITVQSRDAAWYQLLMAPLSEDQRTALQEVYTLAEHRRTVAGQPE

SEQ ID NO: 40100 - protein, 46 aa, Homo sapiens
  Payload ID: 8166
  Gene Symbol: IPO8
  Gene Name: importin 8
  ENSP ID: ENSP00000446254
MVILLYLRHIKSYKIINFAPSLLRIIVSDHVEFPVRQAAAIYLKNM

SEQ ID NO: 40101 - protein, 142 aa, Homo sapiens
  Payload ID: 8166
  Gene Symbol: IPO8
  Gene Name: importin 8
  ENSP ID: ENSP00000481026
  MOD_RES (1)..(1): Any amino acid
XVQLTMCLRAIIKHDFPGHWPGVVDKIDYYLQSQSSASWLGSLLCLYQLVKTYEYKKAEEREPLIIAMQIFLPRIQQQIVQLLPDSSYYSVLLQKQILKIFYALVQVGFYCRKQTWSPVFLPDTWKVLNKCHLLLKIILYYP

SEQ ID NO: 40102 - protein, 1041 aa, Homo sapiens
  Payload ID: 8167
  Gene Symbol: IPO9
  Gene Name: importin 9
  Uniprot ID: Q96P70
  ENSP ID: ENSP00000354742
MAAAAAAGAASGLPGPVAQGLKEALVDTLTGILSPVQEVRAAAEEQIKVLEVTEEFGVHLAELTVDPQGALAIRQLASVILKQYVETHWCAQSEKFRPPETTERAKIVIRELLPNGLRESISKVRSSVAYAVSAIAHWDWPEAWPQLFNLLMEMLVSGDLNAVHGAMRVLTEFTREVTDTQMPLVAPVILPEMYKIFTMAEVYGIRTRSRAVEIFTTCAHMICNMEELEKGAAKVLIFPVVQQFTEAFVQALQIPDGPTSDSGFKMEVLKAVTALVKNFPKHMVSSMQQILPIVWNTLTESAAFYVRTEVNYTEEVEDPVDSDGEVLGFENLVFSIFEFVHALLENSKFKSTVKKALPELIYYIILYMQITEEQIKVWTANPQQFVEDEDDDTFSYTVRIAAQDLLLAVATDFQNESAAALAAAATRHLQEAEQTKNSGTEHWWKIHEACMLALGSVKAIITDSVKNGRIHFDMHGFLTNVILADLNLSVSPFLLGRALWAASRFTVAMSPELIQQFLQATVSGLHETQPPSVRISAVRAIWGYCDQLKVSESTHVLQPFLPSILDGLIHLAAQFSSEVLNLVMETLCIVCTVDPEFTASMESKICPFTIAIFLKYSNDPVVASLAQDIFKELSQIEACQGPMQMRLIPTLVSIMQAPADKIPAGLCATAIDILTTVVRNTKPPLSQLLICQAFPAVAQCTLHTDDNATMQNGGECLRAYVSVTLEQVAQWHDEQGHNGLWYVMQVVSQLLDPRTSEFTAAFVGRLVSTLISKAGRELGENLDQILRAILSKMQQAETLSVMQSLIMVFAHLVHTQLEPLLEFLCSLPGPTGKPALEFVMAEWTSRQHLFYGQYEGKVSSVALCKLLQHGINADDKRLQDIRVKGEEIYSMDEGIRTRSKSAKNPERWTNIPLLVKILKLIINELSNVMEANAARQATPAEWSQDDSNDMWEDQEEEEEEEEDGLAGQLLSDILATSKYEEDYYEDDEEDDPDALKDPLYQIDLQAYLTDFLCQFAQQPCYIMFSGHLNDNERRVLQTIGI

SEQ ID NO: 40103 - protein, 155 aa, Homo sapiens
  Payload ID: 8167
  Gene Symbol: IPO9
  Gene Name: importin 9
  ENSP ID: ENSP00000387761
SNVMEANAARQATPAEWSQDDSNDMWEDQEEEEEEEEDGLAGQLLSDILATSKYEEDYYEDDEEDDPDALKDPLYQIDLQATLMTMRGEFYRPSASKKGSLSTFAPSGPAANHFAALTGLEMHFLLNLKWHLDPWPLASAVTLMTIQTRLTGAVT

SEQ ID NO: 40104 - protein, 452 aa, Homo sapiens
  Payload ID: 8168
  Gene Symbol: INADL
  Gene Name: InaD-like (Drosophila)
  ENSP ID: ENSP00000307496
MVQGGFPEKIRQRYADLPGELHIIELEKDKNGLGLSLAGNKDRSRMSIFVVGINPEGPAAADGRMRIGDELLEINNQILYGRSHQNASAIIKTAPSKVKLVFIRNEDAVNQMAVTPFPVPSSSPSSIEDQSGTEPISSEEDGSVEVGIKQLPESESFKLAVSQMKQQKYPTKVSFSSQEIPLAPASSYHSTDADFTGYGGFQAPLSVDPATCPIVPGQEMIIEISKGRSGLGLSIVGGKDTPLFWRLGSPRAWSQHLVRAFMLHHPVTEVEGQNAIVIHEVYEEGAAARDGRLWAGDQILEVNGVDLRNSSHEEAITALRQTPQKVRLVVYRDEAHYRDEENLEIFPVDLQKKAGRGLGLSIVGKRNGSGVFISDIVKGGAADLDGRLIQGDQILSVNGEDMRNASQETVATILKCAQGLVQLEIGRLRAGSWTSARTTSQNSQVVDGFSSD

SEQ ID NO: 40105 - protein, 1181 aa, Homo sapiens
  Payload ID: 8168
  Gene Symbol: INADL
  Gene Name: InaD-like (Drosophila)
  Uniprot ID: Q8NI35
  ENSP ID: ENSP00000326199
MPENPATDKLQVLQVLDRLKMKLQEKGDTSQNEKLSMFYETLKSPLFNQILTLQQSIKQLKGQLNHIPSDCSANFDFSRKGLLVFTDGSITNGNVHRPSNNSTVSGLFPWTPKLGNEDFNSVIQQMAQGRQIEYIDIERPSTGGLGFSVVALRSQNLGKVDIFVKDVQPGSVADRDQRLKENDQILAINHTPLDQNISHQQAIALLQQTTGSLRLIVAREPVHTKSSTSSSLNDTTLPETVCWGHVEEVELINDGSGLGFGIVGGKTSGVVVRTIVPGGLADRDGRLQTGDHILKIGGTNVQGMTSEQVAQVLRNCGNSVRMLVARDPAGDISVTPPAPAALPVALPTVASKGPGSDSSLFETYNVELVRKDGQSLGIRIVGYVGTSHTGEASGIYVKSIIPGSAAYHNGHIQVNDKIVAVDGVNIQGFANHDVVEVLRNAGQVVHLTLVRRKTSSSTSPLEPPSDRGTVVEPLKPPALFLTGAVETETNVDGEDEEIKERIDTLKNDNIQALEKLEKVPDSPENELKSRWENLLGPDYEVMVATLDTQIADDAELQKYSKLLPIHTLRLGVEVDSFDGHHYISSIVSGGPVDTLGLLQPEDELLEVNGMQLYGKSRREAVSFLKEVPPPFTLVCCRRLFDDEASVDEPRRTETSLPETEVDHNMDVNTEEDDDGELALWSPEVKIVELVKDCKGLGFSILDYQDPLDPTRSVIVIRSLVADGVAERSGGLLPGDRLVSVNEYCLDNTSLAEAVEILKAVPPGLVHLGICKPLVEDNEEESCYILHSSSNEDKTEFSGTIHDINSSLILEAPKGFRDEPYFKEELVDEPFLDLGKSFHSQQKEIEQSKEAWEMHEFLTPRLQEMDEEREILVDEEYELYQDPSPSMELYPLSHIQEATPVPSVNELHFGTQWLHDNEPSESQEARTGRTVYSQEAQPYGYCPENVMKENFVMESLPSVPSTEGNSQQGRFDDLENLNSLAKTSLDLGMIPNDVQGPSLLIDLPVVAQRREQEDLPLYQHQATRVISKASAYTGMLSSRYATDTCELPEREEGEGEETPNFSHWGPPRIVEIFREPNVSLGISIVGGQTVIKRLKNGEELKGIFIKQVLEDSPAGKTNALKTGDKILEVSGVDLQNASHSEAVEAIKNAGNPVVFIVQSLSSTPPWTTERDSVSKKKKRKER

SEQ ID NO: 40106 - protein, 1801 aa, Homo sapiens
  Payload ID: 8168
  Gene Symbol: INADL
  Gene Name: InaD-like (Drosophila)
  Uniprot ID: Q8NI35
  ENSP ID: ENSP00000360200
MPENPATDKLQVLQVLDRLKMKLQEKGDTSQNEKLSMFYETLKSPLFNQILTLQQSIKQLKGQLNHIPSDCSANFDFSRKGLLVFTDGSITNGNVHRPSNNSTVSGLFPWTPKLGNEDFNSVIQQMAQGRQIEYIDIERPSTGGLGFSVVALRSQNLGKVDIFVKDVQPGSVADRDQRLKENDQILAINHTPLDQNISHQQAIALLQQTTGSLRLIVAREPVHTKSSTSSSLNDTTLPETVCWGHVEEVELINDGSGLGFGIVGGKTSGVVVRTIVPGGLADRDGRLQTGDHILKIGGTNVQGMTSEQVAQVLRNCGNSVRMLVARDPAGDISVTPPAPAALPVALPTVASKGPGSDSSLFETYNVELVRKDGQSLGIRIVGYVGTSHTGEASGIYVKSIIPGSAAYHNGHIQVNDKIVAVDGVNIQGFANHDVVEVLRNAGQVVHLTLVRRKTSSSTSPLEPPSDRGTVVEPLKPPALFLTGAVETETNVDGEDEEIKERIDTLKNDNIQALEKLEKVPDSPENELKSRWENLLGPDYEVMVATLDTQIADDAELQKYSKLLPIHTLRLGVEVDSFDGHHYISSIVSGGPVDTLGLLQPEDELLEVNGMQLYGKSRREAVSFLKEVPPPFTLVCCRRLFDDEASVDEPRRTETSLPETEVDHNMDVNTEEDDDGELALWSPEVKIVELVKDCKGLGFSILDYQDPLDPTRSVIVIRSLVADGVAERSGGLLPGDRLVSVNEYCLDNTSLAEAVEILKAVPPGLVHLGICKPLVEDNEEESCYILHSSSNEDKTEFSGTIHDINSSLILEAPKGFRDEPYFKEELVDEPFLDLGKSFHSQQKEIEQSKEAWEMHEFLTPRLQEMDEEREILVDEEYELYQDPSPSMELYPLSHIQEATPVPSVNELHFGTQWLHDNEPSESQEARTGRTVYSQEAQPYGYCPENVMKENFVMESLPSVPSTEGNSQQGRFDDLENLNSLAKTSLDLGMIPNDVQGPSLLIDLPVVAQRREQEDLPLYQHQATRVISKASAYTGMLSSRYATDTCELPEREEGEGEETPNFSHWGPPRIVEIFREPNVSLGISIVGGQTVIKRLKNGEELKGIFIKQVLEDSPAGKTNALKTGDKILEVSGVDLQNASHSEAVEAIKNAGNPVVFIVQSLSSTPRVIPNVHNKANKITGNQNQDTQEKKEKRQGTAPPPMKLPPPYKALTDDSDENEEEDAFTDQKIRQRYADLPGELHIIELEKDKNGLGLSLAGNKDRSRMSIFVVGINPEGPAAADGRMRIGDELLEINNQILYGRSHQNASAIIKTAPSKVKLVFIRNEDAVNQMAVTPFPVPSSSPSSIEDQSGTEPISSEEDGSVEVGIKQLPESESFKLAVSQMKQQKYPTKVSFSSQEIPLAPASSYHSTDADFTGYGGFQAPLSVDPATCPIVPGQEMIIEISKGRSGLGLSIVGGKDTPLNAIVIHEVYEEGAAARDGRLWAGDQILEVNGVDLRNSSHEEAITALRQTPQKVRLVVYRDEAHYRDEENLEIFPVDLQKKAGRGLGLSIVGKRNGSGVFISDIVKGGAADLDGRLIQGDQILSVNGEDMRNASQETVATILKCAQGLVQLEIGRLRAGSWTSARTTSQNSQGSQQSAHSSCHPSFAPVITGLQNLVGTKRVSDPSQKNSGTDMEPRTVEINRELSDALGISIAGGRGSPLGDIPVFIAMIQASGVAARTQKLKVGDRIVSINGQPLDGLSHADVVNLLKNAYGRIILQVVADTNISAIAAQLENMSTGYHLGSPTAEHHPEDTEEQLQMTAD

SEQ ID NO: 40107 - protein, 1134 aa, Homo sapiens
  Payload ID: 8168
  Gene Symbol: INADL
  Gene Name: InaD-like (Drosophila)
  Uniprot ID: Q8NI35
  ENSP ID: ENSP00000433669
MVATLDTQIADDAELQKYSKLLPIHTLRLGVEVDSFDGHHYISSIVSGGPVDTLGLLQPEDELLEVNGMQLYGKSRREAVSFLKEVPPPFTLVCCRRLFDDEASVDEPRRTETSLPETEVDHNMDVNTEEDDDGELALWSPEVKIVELVKDCKGLGFSILDYQDPLDPTRSVIVIRSLVADGVAERSGGLLPGDRLVSVNEYCLDNTSLAEAVEILKAVPPGLVHLGICKPLVEDNEEESCYILHSSSNEDKTEFSGTIHDINSSLILEAPKGFRDEPYFKEELVDEPFLDLGKSFHSQQKEIEQSKEAWEMHEFLTPRLQEMDEEREILVDEEYELYQDPSPSMELYPLSHIQEATPVPSVNELHFGTQWLHDNEPSESQEARTGRTVYSQEAQPYGYCPENVMKENFVMESLPSVPSTEGNSQQGRFDDLENLNSLAKTSLDLGMIPNDVQGPSLLIDLPVVAQRREQEDLPLYQHQATRVISKASAYTGMLSSRYATDTCELPEREEGEGEETPNFSHWGPPRIVEIFREPNVSLGISIVGGQTVIKRLKNGEELKGIFIKQVLEDSPAGKTNALKTGDKILEVSGVDLQNASHSEAVEAIKNAGNPVVFIVQSLSSTPRVIPNVHNKANKITGNQNQDTQEKKEKRQGTAPPPMKLPPPYKALTDDSDENEEEDAFTDQKIRQRYADLPGELHIIELEKDKNGLGLSLAGNKDRSRMSIFVVGINPEGPAAADGRMRIGDELLEINNQILYGRSHQNASAIIKTAPSKVKLVFIRNEDAVNQMAVTPFPVPSSSPSSIEDQSGTEPISSEEDGSVEVGIKQLPESESFKLAVSQMKQQKYPTKVSFSSQEIPLAPASSYHSTDADFTGYGGFQAPLSVDPATCPIVPGQEMIIEISKGRSGLGLSIVGGKDTPLNAIVIHEVYEEGAAARDGRLWAGDQILEVNGVDLRNSSHEEAITALRQTPQKVRLVVYRDEAHYRDEENLEIFPVDLQKKAGRGLGLSIVGKRNGSGVFISDIVKGGAADLDGRLIQGDQILSVNGEDMRNASQETVATILKCAQGLVQLEIGRLRAGSWTSARTTSQNSQSAECTQQLSSLLRSCHHWPAKPGWHKKSFRSFPEKFRHRYGTKDC

SEQ ID NO: 40108 - protein, 1182 aa, Homo sapiens
  Payload ID: 8168
  Gene Symbol: INADL
  Gene Name: InaD-like (Drosophila)
  ENSP ID: ENSP00000479041
MPENPATDKLQVLQVLDRLKMKLQEKGDTSQNEKLSMFYETLKSPLFNQILTLQQSIKQLKGQLNHIPSDCSANFDFSRKGLLVFTDGSITNGNVHRPSNNSTVSGLFPWTPKLGNEDFNSVIQQMAQGRQIEYIDIERPSTGGLGFSVVALRSQNLGKVDIFVKDVQPGSVADRDQRLKENDQILAINHTPLDQNISHQQAIALLQQTTGSLRLIVAREPVHTKSSTSSSLNDTTLPETVCWGHVEEVELINDGSGLGFGIVGGKTSGVVVRTIVPGGLADRDGRLQTGDHILKIGGTNVQGMTSEQVAQVLRNCGNSVRMLVARDPAGDISVTPPAPAALPVALPTVASKGPGSDSSLFETYNVELVRKDGQSLGIRIVGYVGTSHTGEASGIYVKSIIPGSAAYHNGHIQVNDKIVAVDGVNIQGFANHDVVEVLRNAGQVVHLTLVRRKTSSSTSPLEPPSDRGTVVEPLKPPALFLTGAVETETNVDGEDEEIKERIDTLKNDNIQALEKLEKVPDSPENELKSRWENLLGPDYEVMVATLDTQIADDAELQKYSKLLPIHTLRLGVEVDSFDGHHYISSIVSGGPVDTLGLLQPEDELLEVNGMQLYGKSRREAVSFLKEVPPPFTLVCCRRLFDDEASVDEPRRTETSLPETEVDHNMDVNTEEDDDGELALWSPEVKIVELVKDCKGLGFSILDYQDPLDPTRSVIVIRSLVADGVAERSGGLLPGDRLVSVNEYCLDNTSLAEAVEILKAVPPGLVHLGICKPLVEDNEEESCYILHSSSNEDKTEFSGTIHDINSSLILEAPKGFRDEPYFKEELVDEPFLDLGKSFHSQQKEIEQSKEAWEMHEFLTPRLQEMDEEREILVDEEYELYQDPSPSMELYPLSHIQEATPVPSVNELHFGTQWLHDNEPSESQEARTGRTVYSQEAQPYGYCPENVMKENFVMESLPSVPSTEGNSQQGRFDDLENLNSLAKTSLDLGMIPNDVQGPSLLIDLPVVAQRREQEDLPLYQHQATRVISKASAYTGMLSSRYATDTCELPEREEGEGEETPNFSHWGPPRIVEIFREPNVSLGISIVGGQTVIKRLKNGEELKGIFIKQVLEDSPAGKTNALKTGDKILEASGVDKELCNQFVSPAEGRKIATWEVCSEPSSCHSTPAWVTEQDSVSKKKKNHEG

SEQ ID NO: 40109 - protein, 139 aa, Homo sapiens
  Payload ID: 8168
  Gene Symbol: INADL
  Gene Name: InaD-like (Drosophila)
  ENSP ID: ENSP00000489130
  MOD_RES (1)..(1): Any amino acid
XAITALRQTPQKVRLVVYRDEAHYRDEENLEIFPVDLQKKAGRGLGLSIVGKRNGSGVFISDIVKGGAADLDGRLIQGDQILSVNGEDMRNASQETVATILKCAQGLVQLEIGRLRAGSWTSARTTSQNSQVVDGFSSD

SEQ ID NO: 40110 - protein, 593 aa, Homo sapiens
  Payload ID: 8168
  Gene Symbol: INADL
  Gene Name: InaD-like (Drosophila)
  ENSP ID: ENSP00000489159
MVQGGFPEKIRQRYADLPGELHIIELEKDKNGLGLSLAGNKDRSRMSIFVVGINPEGPAAADGRMRIGDELLEINNQILYGRSHQNASAIIKTAPSKVKLVFIRNEDAVNQMAVTPFPVPSSSPSSIEDQSGTEPISSEEDGSVEVGIKQLPESESFKLAVSQMKQQKYPTKVSFSSQEIPLAPASSYHSTDADFTGYGGFQAPLSVDPATCPIVPGQEMIIEISKGRSGLGLSIVGGKDTPLNAIVIHEVYEEGAAARDGRLWAGDQILEVNGVDLRNSSHEEAITALRQTPQKVRLVVYRDEAHYRDEENLEIFPVDLQKKAGRGLGLSIVGKRNGSGVFISDIVKGGAADLDGRLIQGDQILSVNGEDMRNASQETVATILKCAQGLVQLEIGRLRAGSWTSARTTSQNSQGSQQSAHSSCHPSFAPVITGLQNLVGTKRVSDPSQKNSGTDMEPRTVEINRELSDALGISIAGGRGSPLGDIPVFIAMIQASGVAARTQKLKVGDRIVSINGQPLDGLSHADVVNLLKNAYGRIILQVVADTNISAIAAQLENMSTGYHLGSPTAEHHPEDTERCCNCPMDSPCPLLLG

SEQ ID NO: 40111 - protein, 146 aa, Homo sapiens
  Payload ID: 8168
  Gene Symbol: INADL
  Gene Name: InaD-like (Drosophila)
  ENSP ID: ENSP00000489200
  MOD_RES (1)..(1): Any amino acid
XVQSLSSTPRVIPNVHNKANKITGNQNQDTQEKKEKRQGTAPPPMKLPPPYKALTDDSDENEEEDAFTDQKIRQRYADLPGELHIIELEKDKNGLGLSLAGNKDRSRMSIFVVGINPEGPAAADGRMRIGDELLETLTQNRIYSHP

SEQ ID NO: 40112 - protein, 683 aa, Homo sapiens
  Payload ID: 8168
  Gene Symbol: INADL
  Gene Name: InaD-like (Drosophila)
  ENSP ID: ENSP00000489335
MPENPATDKLQVLQVLDRLKMKLQEKGDTSQNEKLSMFYETLKSPLFNQILTLQQSIKQLKGQLNHIPSDCSANFDFSRKGLLVFTDGSITNGNVHRPSNNSTVSGLFPWTPKLGNEDFNSVIQQMAQGRQIEYIDIERPSTGGLGFSVVALRSQNLGKVDIFVKDVQPGSVADRDQRLKENDQILAINHTPLDQNISHQQAIALLQQTTGSLRLIVAREPVHTKSSTSSSLNDTTLPETVCWGHVEEVELINDGSGLGFGIVGGKTSGVVVRTIVPGGLADRDGRLQTGDHILKIGGTNVQGMTSEQVAQVLRNCGNSVRMLVARDPAGDISVTPPAPAALPVALPTVASKGPGSDSSLFETYNVELVRKDGQSLGIRIVGYVGTSHTGEASGIYVKSIIPGSAAYHNGHIQVNDKIVAVDGVNIQGFANHDVVEVLRNAGQVVHLTLVRRKTSSSTSPLEPPSDRGTVVEPLKPPALFLTGAVETETNVDGEDEEIKERIDTLKNDNIQALEKLEKVPDSPENELKSRWENLLGPDYEVMVATLDTQIADDAELQKYSKLLPIHTLRLGVEVDSFDGHHYISSIVSGGPVDTLGLLQPEDELLEVNGMQLYGKSRREAVSFLKEVPPPFTLVCCRRLFDDEASVDEPRRTETSLPETENSLKYKRLTTIWMSILKKMMMGN

SEQ ID NO: 40113 - protein, 111 aa, Homo sapiens
  Payload ID: 8168
  Gene Symbol: INADL
  Gene Name: InaD-like (Drosophila)
  ENSP ID: ENSP00000489475
QEKKEKRQGTAPPPMKLPPPYKALTDDSDENEEEDAFTDQKIRQRYADLPGELHIIELEKDKNGLGLSLAGNKDRSRMSIFVVGINPEGPAAADGRMRIGDELLEVRSMCF

SEQ ID NO: 40114 - protein, 142 aa, Homo sapiens
  Payload ID: 8169
  Gene Symbol: INAFM1
  Gene Name: InaF-motif containing 1
  Uniprot ID: C9JVW0
  ENSP ID: ENSP00000447679
MRGTSCVGGGAESPGGAGLSEGPRGRWLRLAPVCAYFLCVSLAAVLLAVYYGLIWVPTRSPAAPAGPQPSAPSPPCAARPGVPPVPAPAAASLSCLLGVPGGPRPQLQLPLSRRRRYSDPDRRPSRQTPRETPEAAEGRRPG

SEQ ID NO: 40115 - protein, 360 aa, Homo sapiens
  Payload ID: 8170
  Gene Symbol: IST1
  Gene Name: increased sodium tolerance 1 homolog (yeast)
  Uniprot ID: P53990
  ENSP ID: ENSP00000330408
MLGSGFKAERLRVNLRLVINRLKLLEKKKTELAQKARKEIADYLAAGKDERARIRVEHIIREDYLVEAMEILELYCDLLLARFGLIQSMKELDSGLAESVSTLIWAAPRLQSEVAELKIVADQLCAKYSKEYGKLCRTNQIGTVNDRLMHKLSVEAPPKILVERYLIEIAKNYNVPYEPDSVVMAEAPPGVETDLIDVGFTDDVKKGGPGRGGSGGFTAPVGGPDGTVPMPMPMPMPMPSANTPFSYPLPKGPSDFNGLPMGTYQAFPNIHPPQIPATPPSYESMTLMLIRISLLHRLLVLDPSQKPLQSFLPDLQITMTTLSYQSCHLCQTHYQLHLLVPAPQHLKTLTLMIFPGGLKS

SEQ ID NO: 40116 - protein, 335 aa, Homo sapiens
  Payload ID: 8170
  Gene Symbol: IST1
  Gene Name: increased sodium tolerance 1 homolog (yeast)
  Uniprot ID: P53990
  ENSP ID: ENSP00000368075
MLGSGFKAERLRVNLRLVINRLKLLEKKKTELAQKARKEIADYLAAGKDERARIRVEHIIREDYLVEAMEILELYCDLLLARFGLIQSMKELDSGLAESVSTLIWAAPRLQSEVAELKIVADQLCAKYSKEYGKLCRTNQIGTVNDRLMHKLSVEAPPKILVERYLIEIAKNYNVPYEPDSVVMAEAPPGVETDLIDVGFTDDVKKGGPGRGGSGGFTAPVGGPDGTVPMPMPMPMPMPSANTPFSYPLPKGPVDDINADKNISSAQIVGPGPKPEASAKLPSRPADNYDNFVLPELPSVPDTLPTASAGASTSASEDIDFDDLSRRFEELKKKT

SEQ ID NO: 40117 - protein, 366 aa, Homo sapiens
  Payload ID: 8170
  Gene Symbol: IST1
  Gene Name: increased sodium tolerance 1 homolog (yeast)
  Uniprot ID: P53990
  ENSP ID: ENSP00000368076
MLGSGFKAERLRVNLRLVINRLKLLEKKKTELAQKARKEIADYLAAGKDERARIRVEHIIREDYLVEAMEILELYCDLLLARFGLIQSMKELDSGLAESVSTLIWAAPRLQSEVAELKIVADQLCAKYSKEYGKLCRTNQIGTVNDRLMHKLSVEAPPKILVERYLIEIAKNYNVPYEPDSVVMAEAPPGVETDLIDVGFTDDVKKGGPGRGGSGGFTAPVGGPDGTVPMPMPMPMPMPSANTPFSYPLPKGPSDFNGLPMGTYQAFPNIHPPQIPATPPSYESVDDINADKNISSAQIVGPGPKPEASAKLPSRPADNYDNFVLPELPSVPDTLPTASAGASTSASEDIDFDDLSRRFEELKKKT

SEQ ID NO: 40118 - protein, 141 aa, Homo sapiens
  Payload ID: 8170
  Gene Symbol: IST1
  Gene Name: increased sodium tolerance 1 homolog (yeast)
  ENSP ID: ENSP00000398505
MLGSGFKAERLRVNLRLVINRLKLLEKKKTELAQKARKEIADYLAAGKDERARIRVEHIIREDYLVEAMEILELYCDLLLARFGLIQSMKELDSGLAESVSTLIWAAPRLQSEVAELKILCAKYSKEYGKLCRTNQIGTVN

SEQ ID NO: 40119 - protein, 41 aa, Homo sapiens
  Payload ID: 8170
  Gene Symbol: IST1
  Gene Name: increased sodium tolerance 1 homolog (yeast)
  ENSP ID: ENSP00000410081
MLGSGFKAERLRVNLRLVINRLKLLEKKKSRSSSWGRDRSY

SEQ ID NO: 40120 - protein, 289 aa, Homo sapiens
  Payload ID: 8170
  Gene Symbol: IST1
  Gene Name: increased sodium tolerance 1 homolog (yeast)
  ENSP ID: ENSP00000414942
DYLVEAMEILELYCDLLLARFGLIQSMKELDSGLAESVSTLIWAAPRLQSEVAELKIVADQLCAKYSKEYGKLCRTNQIGTVNDRLMHKLSVEAPPKILVERYLIEIAKNYNVPYEPDSVVMAEAPPGVETDLIDVGFTDDVKKGGPGRGGSGGFTAPVGGPDGTVPMPMPMPMPMPSANTPFSYPLPKGPSDFNGLPMGTYQAFPNIHPPQIPATPPSYESVSPGPKPEASAKLPSRPADNYDNFVLPELPSVPDTLPTASAGASTSASEDIDFDDLSRRFEELKKKT

SEQ ID NO: 40121 - protein, 379 aa, Homo sapiens
  Payload ID: 8170
  Gene Symbol: IST1
  Gene Name: increased sodium tolerance 1 homolog (yeast)
  Uniprot ID: P53990
  ENSP ID: ENSP00000438399
MVFKLKTKEEQHSMLGSGFKAERLRVNLRLVINRLKLLEKKKTELAQKARKEIADYLAAGKDERARIRVEHIIREDYLVEAMEILELYCDLLLARFGLIQSMKELDSGLAESVSTLIWAAPRLQSEVAELKIVADQLCAKYSKEYGKLCRTNQIGTVNDRLMHKLSVEAPPKILVERYLIEIAKNYNVPYEPDSVVMAEAPPGVETDLIDVGFTDDVKKGGPGRGGSGGFTAPVGGPDGTVPMPMPMPMPMPSANTPFSYPLPKGPSDFNGLPMGTYQAFPNIHPPQIPATPPSYESVDDINADKNISSAQIVGPGPKPEASAKLPSRPADNYDNFVLPELPSVPDTLPTASAGASTSASEDIDFDDLSRRFEELKKKT

SEQ ID NO: 40122 - protein, 206 aa, Homo sapiens
  Payload ID: 8170
  Gene Symbol: IST1
  Gene Name: increased sodium tolerance 1 homolog (yeast)
  ENSP ID: ENSP00000454541
MLGSGFKAERLRVNLRLVINRLKLLEKKKTELAQKARKEIADYLAAGKDERARIRVEHIIREDYLVEAMEILELYCDLLLARFGLIQSMKELDSGLAESVSTLIWAAPRLQSEVAELKIVADQLCAKYSKEYGKLCRTNQIGTVNDRLMHKLSVEAPPKILVERYLIEIAKNYNVPYEPDSVVMAEAPPGVETDLIDVGFTDDVKK

SEQ ID NO: 40123 - protein, 59 aa, Homo sapiens
  Payload ID: 8170
  Gene Symbol: IST1
  Gene Name: increased sodium tolerance 1 homolog (yeast)
  ENSP ID: ENSP00000455409
MLGSGFKAERLRVNLRLVINRLKLLEKKKTELAQKARKEIADYLAAGKDERARIRVEHI

SEQ ID NO: 40124 - protein, 40 aa, Homo sapiens
  Payload ID: 8170
  Gene Symbol: IST1
  Gene Name: increased sodium tolerance 1 homolog (yeast)
  ENSP ID: ENSP00000455590
MLGSGFKAERLRVNLRLVINRLKLLEKKKTELAQKARKEI

SEQ ID NO: 40125 - protein, 166 aa, Homo sapiens
  Payload ID: 8170
  Gene Symbol: IST1
  Gene Name: increased sodium tolerance 1 homolog (yeast)
  ENSP ID: ENSP00000455757
MLGSGFKAERLRVNLRLVINRLKLLEKKKTELAQKARKEIADYLAAGKDERARIRVEHIIREDYLVEAMEILELYCDLLLARFGLIQSMKELDSGLAESVSTLIWAAPRLQSEVAELKIVADQLCAKYSKEYGKLCRTNQIGTVNDRLMHKLSVEAPPKILVERYL

SEQ ID NO: 40126 - protein, 253 aa, Homo sapiens
  Payload ID: 8170
  Gene Symbol: IST1
  Gene Name: increased sodium tolerance 1 homolog (yeast)
  ENSP ID: ENSP00000455805
MLGSGFKAERLRVNLRLVINRLKLLEKKKTELAQKARKEIADYLAAGKDERARIRVEHIIREDYLVEAMEILELYCDLLLARFGLIQSMKELDSGLAESVSTLIWAAPRLQSEVAELKIVADQLCAKYSKEYGKLCRTNQIGTVNDRLMHKLSVEAPPKILVERYLIEIAKNYNVPYEPDSVVMAEAPPGVETDLIDVGFTDDVKKGGPGRGGSGGFTAPVGGPDGTVPMPMPMPMPMPSANTPFSYPLPKGP

SEQ ID NO: 40127 - protein, 366 aa, Homo sapiens; identical to SEQ ID NO: 40117
  Payload ID: 8170
  Gene Symbol: IST1
  Gene Name: increased sodium tolerance 1 homolog (yeast)
  Uniprot ID: P53990
  ENSP ID: ENSP00000455860

SEQ ID NO: 40128 - protein, 105 aa, Homo sapiens
  Payload ID: 8170
  Gene Symbol: IST1
  Gene Name: increased sodium tolerance 1 homolog (yeast)
  ENSP ID: ENSP00000456200
MLGSGFKAERLRVNLRLVINRLKLLEKKKTELAQKARKEIADYLAAGKDERARIRVEHIIREDYLVEAMEILELYCDLLLARFGLIQSMKELDSGLAESVSTLIW

SEQ ID NO: 40129 - protein, 253 aa, Homo sapiens; identical to SEQ ID NO: 40126
  Payload ID: 8170
  Gene Symbol: IST1
  Gene Name: increased sodium tolerance 1 homolog (yeast)
  ENSP ID: ENSP00000457646

SEQ ID NO: 40130 - protein, 366 aa, Homo sapiens; identical to SEQ ID NO: 40117
  Payload ID: 8170
  Gene Symbol: IST1
  Gene Name: increased sodium tolerance 1 homolog (yeast)
  Uniprot ID: P53990
  ENSP ID: ENSP00000457844

SEQ ID NO: 40131 - protein, 218 aa, Homo sapiens
  Payload ID: 8170
  Gene Symbol: IST1
  Gene Name: increased sodium tolerance 1 homolog (yeast)
  Uniprot ID: P53990
  ENSP ID: ENSP00000463711
MHKLSVEAPPKILVERYLIEIAKNYNVPYEPDSVVMAEAPPGVETDLIDVGFTDDVKKGGPGRGGSGGFTAPVGGPDGTVPMPMPMPMPMPSANTPFSYPLPKGPSDFNGLPMGTYQAFPNIHPPQIPATPPSYESVDDINADKNISSAQIVGPGPKPEASAKLPSRPADNYDNFVLPELPSVPDTLPTASAGASTSASEDIDFDDLSRRFEELKKKT

SEQ ID NO: 40132 - protein, 85 aa, Homo sapiens
  Payload ID: 8170
  Gene Symbol: IST1
  Gene Name: increased sodium tolerance 1 homolog (yeast)
  ENSP ID: ENSP00000463833
MPMPSANTPFSYPLPKGPSDFNGLPMGTYQAFPNIHPPQIPATPPSYESLMCSTLGLSFSYALVLHASHNPQPLVGMRSKIFISI

SEQ ID NO: 40133 - protein, 218 aa, Homo sapiens; identical to SEQ ID NO: 40131
  Payload ID: 8170
  Gene Symbol: IST1
  Gene Name: increased sodium tolerance 1 homolog (yeast)
  Uniprot ID: P53990
  ENSP ID: ENSP00000475853

SEQ ID NO: 40134 - protein, 41 aa, Homo sapiens; identical to SEQ ID NO: 40119
  Payload ID: 8170
  Gene Symbol: IST1
  Gene Name: increased sodium tolerance 1 homolog (yeast)
  ENSP ID: ENSP00000486751

SEQ ID NO: 40135 - protein, 411 aa, Homo sapiens
  Payload ID: 8171
  Gene Symbol: IHH
  Gene Name: indian hedgehog
  Uniprot ID: Q14623
  ENSP ID: ENSP00000295731
MSPARLRPRLHFCLVLLLLLVVPAAWGCGPGRVVGSRRRPPRKLVPLAYKQFSPNVPEKTLGASGRYEGKIARSSERFKELTPNYNPDIIFKDEENTGADRLMTQRCKDRLNSLAISVMNQWPGVKLRVTEGWDEDGHHSEESLHYEGRAVDITTSDRDRNKYGLLARLAVEAGFDWVYYESKAHVHCSVKSEHSAAAKTGGCFPAGAQVRLESGARVALSAVRPGDRVLAMGEDGSPTFSDVLIFLDREPHRLRAFQVIETQDPPRRLALTPAHLLFTADNHTEPAARFRATFASHVQPGQYVLVAGVPGLQPARVAAVSTHVALGAYAPLTKHGTLVVEDVVASCFAAVADHHLAQLAFWPLRLFHSLAWGSWTPGEGVHWYPQLLYRLGRLLLEEGSFHPLGMSGAGS

SEQ ID NO: 40136 - protein, 170 aa, Homo sapiens
  Payload ID: 8172
  Gene Symbol: IDO1
  Gene Name: indoleamine 2,3-dioxygenase 1
  ENSP ID: ENSP00000253513
MAHAMENSWTISKEYHIDEEVGFALPNPQENLPDFYNDWMFIAKHLPDLIESGQLRERVEKLNMLSIDHLTDHKSQRLARLVLGCITMAYVWGKGHGDVRKVLPRNIAVPYCQLSKKLELPPILVYADCVLANWKKKDPNKYVNRTWTFCSHFVMETAVKDSSWSLYWWK

SEQ ID NO: 40137 - protein, 180 aa, Homo sapiens
  Payload ID: 8172
  Gene Symbol: IDO1
  Gene Name: indoleamine 2,3-dioxygenase 1
  ENSP ID: ENSP00000428716
MAHAMENSWTISKEYHIDEEVGFALPNPQENLPDFYNDWMFIAKHLPDLIESGQLRERVEKLNMLSIDHLTDHKSQRLARLVLGCITMAYVWGKGHGDVRKVLPRNIAVPYCQLSKKLELPPILVYADCVLANWKKKDPNKPLTYENMDVLFSFRDGDCSKGFFLVSLLVEIAAASAIKV

SEQ ID NO: 40138 - protein, 78 aa, Homo sapiens
  Payload ID: 8172
  Gene Symbol: IDO1
  Gene Name: indoleamine 2,3-dioxygenase 1
  ENSP ID: ENSP00000429297
MAHAMENSWTISKEYHIDEEVGFALPNPQENLPDFYNDWMFIAKHLPDLIESGQLRERVEKLNMLSIDHLTDHKSQRL

SEQ ID NO: 40139 - protein, 47 aa, Homo sapiens
  Payload ID: 8172
  Gene Symbol: IDO1
  Gene Name: indoleamine 2,3-dioxygenase 1
  ENSP ID: ENSP00000429933
MAHAMENSWTISKEYHIDEEVGFALPNPQENLPDFYNDWMFIAKHLP

SEQ ID NO: 40140 - protein, 403 aa, Homo sapiens [sequence omitted]

SEQ ID NO: 40141 - protein, 403 aa, Homo sapiens [sequence omitted]

SEQ ID NO: 40142 - protein, 407 aa, Homo sapiens
  Payload ID: 8173
  Gene Symbol: IDO2
  Gene Name: indoleamine 2,3-dioxygenase 2
  Uniprot ID: Q6ZQW0
  ENSP ID: ENSP00000426447
MEPHRPNVKTAVPLSLESYHISEEYGFLLPDSLKELPDHYRPWMEIANKLPQLIDAHQLQAHVDKMPLLSCQFLKGHREQRLAHLVLSFLTMGYVWQEGEAQPAEVLPRNLALPFVEVSRNLGLPPILVHSDLVLTNWTKKDPDGFLEIGNLETIISFPGGESLHGFILVTALVEKEAVPGIKALVQATNAILQPNQEALLQALQRLRLSIQDITKTLGQMHDYVDPDIFYAGIRIFLSGWKDNPAMPAGLMYEGVSQEPLKYSGGSAAQSTVLHAFDEFLGIRHSKESGDFLYRMRDYMPPSHKAFIEDIHSAPSLRDYILSSGQDHLLTAYNQCVQALAELRSYHITMVTKYLITAAAKAKHGKPNHLPGPPQALKDRGTGGTAVMSFLKSVRDKTLESILHPRG

SEQ ID NO: 40143 - protein, 420 aa, Homo sapiens
  Payload ID: 8173
  Gene Symbol: IDO2
  Gene Name: indoleamine 2,3-dioxygenase 2
  ENSP ID: ENSP00000443432
MLHFHYYDTSNKIMEPHRPNVKTAVPLSLESYHISEEYGFLLPDSLKELPDHYRPWMEIANKLPQLIDAHQLQAHVDKMPLLSCQFLKGHREQRLAHLVLSFLTMGYVWQEGEAQPAEVLPRNLALPFVEVSRNLGLPPILVHSDLVLTNWTKKDPDGFLEIGNLETIISFPGGESLHGFILVTALVEKEAVPGIKALVQATNAILQPNQEALLQALQRLRLSIQDITKTLGQMHDYVDPDIFYAGIRIFLSGWKDNPAMPAGLMYEGVSQEPLKYSGGSAAQSTVLHAFDEFLGIRHSKESGDFLYRMRDYMPPSHKAFIEDIHSAPSLRDYILSSGQDHLLTAYNQCVQALAELRSYHITMVTKYLITAAAKAKHGKPNHLPGPPQALKDRGTGGTAVMSFLKSVRDKTLESILHPRG

SEQ ID NO: 40144 - protein, 263 aa, Homo sapiens
  Payload ID: 8174
  Gene Symbol: INMT
  Gene Name: indolethylamine N-methyltransferase
  Uniprot ID: O95050
  ENSP ID: ENSP00000013222
MKGGFTGGDEYQKHFLPRDYLATYYSFDGSPSPEAEMLKFNLECLHKTFGPGGLQGDTLIDIGSGPTIYQVLAACDSFQDITLSDFTDRNREELEKWLKKEPGAYDWTPAVKFACELEGNSGRWEEKEEKLRAAVKRVLKCDVHLGNPLAPAVLPLADCVLTLLAMECACCSLDAYRAALCNLASLLKPGGHLVTTVTLRLPSYMVGKREFSCVALEKEEVEQAVLDAGFDIEQLLHSPQSYSVTNAANNGVCFIVARKKPGP

SEQ ID NO: 40145 - protein, 262 aa, Homo sapiens
  Payload ID: 8174
  Gene Symbol: INMT
  Gene Name: indolethylamine N-methyltransferase
  Uniprot ID: O95050
  ENSP ID: ENSP00000386961
MKGGFTGGDEYQKHFLPRDYLATYYSFDGSPSPEAEMLKFNLECLHKTFGPGLQGDTLIDIGSGPTIYQVLAACDSFQDITLSDFTDRNREELEKWLKKEPGAYDWTPAVKFACELEGNSGRWEEKEEKLRAAVKRVLKCDVHLGNPLAPAVLPLADCVLTLLAMECACCSLDAYRAALCNLASLLKPGGHLVTTVTLRLPSYMVGKREFSCVALEKEEVEQAVLDAGFDIEQLLHSPQSYSVTNAANNGVCFIVARKKPGP

SEQ ID NO: 40146 - protein, 199 aa, Homo sapiens
  Payload ID: 8175
  Gene Symbol: ICOS
  Gene Name: inducible T-cell co-stimulator
  Uniprot ID: Q9Y6W8
  ENSP ID: ENSP00000319476
MKSGLWYFFLFCLRIKVLTGEINGSANYEMFIFHNGGVQILCKYPDIVQQFKMQLLKGGQILCDLTKTKGSGNTVSIKSLKFCHSQLSNNSVSFFLYNLDHSHANYYFCNLSIFDPPPFKVTLTGGYLHIYESQLCCQLKFWLPIGCAAFVVVCILGCILICWLTKKKYSSSVHDPNGEYMFMRAVNTAKKSRLTDVTL

SEQ ID NO: 40147 - protein, 168 aa, Homo sapiens
  Payload ID: 8175
  Gene Symbol: ICOS
  Gene Name: inducible T-cell co-stimulator
  Uniprot ID: Q9Y6W8
  ENSP ID: ENSP00000415951
MKSGLWYFFLFCLRIKVLTGEINGSANYEMFIFHNGGVQILCKYPDIVQQFKMQLLKGGQILCDLTKTKGSGNTVSIKSLKFCHSQLSNNSVSFFLYNLDHSHANYYFCNLSIFDPPPFKVTLTGGYLHIYESQLCCQLKFWLPIGCAAFVVVCILGCILICWLTKKM

SEQ ID NO: 40148 - protein, 309 aa, Homo sapiens; identical to SEQ ID NO: 14416
  Payload ID: 8176
  Gene Symbol: ICOSLG
  Gene Name: inducible T-cell co-stimulator ligand
  Uniprot ID: O75144
  ENSP ID: ENSP00000339477

SEQ ID NO: 40149 - protein, 185 aa, Homo sapiens; identical to SEQ ID NO: 14420
  Payload ID: 8176
  Gene Symbol: ICOSLG
  Gene Name: inducible T-cell co-stimulator ligand
  Uniprot ID: O75144
  ENSP ID: ENSP00000383228

SEQ ID NO: 40150 - protein, 473 aa, Homo sapiens
  Payload ID: 8176
  Gene Symbol: ICOSLG
  Gene Name: inducible T-cell co-stimulator ligand
  ENSP ID: ENSP00000383230
MRLGSPGLLFLLFSSLRADTQEKEVRAMVGSDVELSCACPEGSRFDLNDVYVYWQTSESKTVVTYHIPQNSSLENVDSRYRNRALMSPAGMLRGDFSLRLFNVTPQDEQKFHCLVLSQSLGFQEVLSVEVTLHVAANFSVPVVSAPHSPSQDELTFTCTSINGYPRPNVYWINKTDNSLLDQALQNDTVFLNMRGLYDVVSVLRIARTPSVNIGCCIENVLLQQNLTVGSQTGNDIGERDKITENPVSTGEKNAATWSILAVLCLLVVVAVAIGWVCRDRCLQHSYAGAWAVSPETELTGEFAVGSSRFWGAQGRLGCQLSFRVSKNFQKAKVPCLEQLLFLETQRSPRWCAWHFLQPPLGMGWHPGVHFVTLRWDFPNMHRSRETSARPPRSPVPSPDQGVQGGSRHRRPAPMGCPEWVQAPAPSPRGVSRAGPGTGAQPLWGVRSGSGHRQLLSVAATPAALVCPSVPGAT

SEQ ID NO: 40151 - protein, 302 aa, Homo sapiens; identical to SEQ ID NO: 14418
  Payload ID: 8176
  Gene Symbol: ICOSLG
  Gene Name: inducible T-cell co-stimulator ligand
  Uniprot ID: O75144
  ENSP ID: ENSP00000384432

SEQ ID NO: 40152 - protein, 135 aa, Homo sapiens
  Payload ID: 8177
  Gene Symbol: IVNS1ABP
  Gene Name: influenza virus NS1A binding protein
  ENSP ID: ENSP00000356467
MIPNGYLMFEDENFIESSVAKLNALRKSGQFCDVRLQVCGHEMLAHRAVLACCSPYLFEIFNSDSDPHGISHVKFDDLNPEAVEVLLNYAYTAQLKADKELVKDVYSAAKKLKMDRVKQHLLYFCLHSTSTSSLL

SEQ ID NO: 40153 - protein, 642 aa, Homo sapiens
  Payload ID: 8177
  Gene Symbol: IVNS1ABP
  Gene Name: influenza virus NS1A binding protein
  Uniprot ID: Q9Y6Y0
  ENSP ID: ENSP00000356468
MIPNGYLMFEDENFIESSVAKLNALRKSGQFCDVRLQVCGHEMLAHRAVLACCSPYLFEIFNSDSDPHGISHVKFDDLNPEAVEVLLNYAYTAQLKADKELVKDVYSAAKKLKMDRVKQVCGDYLLSRMDVTSCISYRNFASCMGDSRLLNKVDAYIQEHLLQISEEEEFLKLPRLKLEVMLEDNVCLPSNGKLYTKVINWVQRSIWENGDSLEELMEEVQTLYYSADHKLLDGNLLDGQAEVFGSDDDHIQFVQKKPPRENGHKQISSSSTGCLSSPNATVQSPKHEWKIVASEKTSNNTYLCLAVLDGIFCVIFLHGRNSPQSSPTSTPKLSKSLSFEMQQDELIEKPMSPMQYARSGLGTAEMNGKLIAAGGYNREECLRTVECYNPHTDHWSFLAPMRTPRARFQMAVLMGQLYVVGGSNGHSDDLSCGEMYDSNIDDWIPVPELRTNRCNAGVCALNGKLYIVGGSDPYGQKGLKNCDVFDPVTKLWTSCAPLNIRRHQSAVCELGGYLYIIGGAESWNCLNTVERYNPENNTWTLIAPMNVARRGAGVAVLNGKLFVCGGFDGSHAISCVEMYDPTRNEWKMMGNMTSPRSNAGIATVGNTIYAVGGFDGNEFLNTVEVYNLESNEWSPYTKIFQF

SEQ ID NO: 40154 - protein, 117 aa, Homo sapiens
  Payload ID: 8177
  Gene Symbol: IVNS1ABP
  Gene Name: influenza virus NS1A binding protein
  ENSP ID: ENSP00000401826
VCGDYLLSRMDVTSCISYRNFASCMGDSRLLNKVDAYIQEHLLQISEEEEFLKLPRLKLEVMLEDNVCLPSNGKLYTKVINWVQRSIWENGDSLEELMEEVSFKVNGIQPFLKIILL

SEQ ID NO: 40155 - protein, 366 aa, Homo sapiens
  Payload ID: 8178
  Gene Symbol: INHA
  Gene Name: inhibin, alpha
  Uniprot ID: P05111
  ENSP ID: ENSP00000243786
MVLHLLLFLLLTPQGGHSCQGLELARELVLAKVRALFLDALGPPAVTREGGDPGVRRLPRRHALGGFTHRGSEPEEEEDVSQAILFPATDASCEDKSAARGLAQEAEEGLFRYMFRPSQHTRSRQVTSAQLWFHTGLDRQGTAASNSSEPLLGLLALSPGGPVAVPMSLGHAPPHWAVLHLATSALSLLTHPVLVLLLRCPLCTCSARPEATPFLVAHTRTRPPSGGERARRSTPLMSWPWSPSALRLLQRPPEEPAAHANCHRVALNISFQELGWERWIVYPPSFIFHYCHGGCGLHIPPNLSLPVPGAPPTPAQPYSLLPGAQPCCAALPGTMRPLHVRTTSDGGYSFKYETVPNLLTQHCACI

SEQ ID NO: 40156 - protein, 426 aa, Homo sapiens
  Payload ID: 8179
  Gene Symbol: INHBA
  Gene Name: inhibin, beta A
  Uniprot ID: P08476
  ENSP ID: ENSP00000242208
MPLLWLRGFLLASCWIIVRSSPTPGSEGHSAAPDCPSCALAALPKDVPNSQPEMVEAVKKHILNMLHLKKRPDVTQPVPKAALLNAIRKLHVGKVGENGYVEIEDDIGRRAEMNELMEQTSEIITFAESGTARKTLHFEISKEGSDLSVVERAEVWLFLKVPKANRTRTKVTIRLFQQQKHPQGSLDTGEEAEEVGLKGERSELLLSEKVVDARKSTWHVFPVSSSIQRLLDQGKSSLDVRIACEQCQESGASLVLLGKKKKKEEEGEGKKKGGGEGGAGADEEKEQSHRPFLMLQARQSEDHPHRRRRRGLECDGKVNICCKKQFFVSFKDIGWNDWIIAPSGYHANYCEGECPSHIAGTSGSSLSFHSTVINHYRMRGHSPFANLKSCCVPTKLRPMSMLYYDDGQNIIKKDIQNMIVEECGCS

SEQ ID NO: 40157 - protein, 426 aa, Homo sapiens; identical to SEQ ID NO: 40156
  Payload ID: 8179
  Gene Symbol: INHBA
  Gene Name: inhibin, beta A
  Uniprot ID: P08476
  ENSP ID: ENSP00000397197

SEQ ID NO: 40158 - protein, 407 aa, Homo sapiens
  Payload ID: 8180
  Gene Symbol: INHBB
  Gene Name: inhibin, beta B
  Uniprot ID: P09529
  ENSP ID: ENSP00000295228
MDGLPGRALGAACLLLLAAGWLGPEAWGSPTPPPTPAAPPPPPPPGSPGGSQDTCTSCGGFRRPEELGRVDGDFLEAVKRHILSRLQMRGRPNITHAVPKAAMVTALRKLHAGKVREDGRVEIPHLDGHASPGADGQERVSEIISFAETDGLASSRVRLYFFISNEGNQNLFVVQASLWLYLKLLPYVLEKGSRRKVRVKVYFQEQGHGDRWNMVEKRVDLKRSGWHTFPLTEAIQALFERGERRLNLDVQCDSCQELAVVPVFVDPGEESHRPFVVVQARLGDSRHRIRKRGLECDGRTNLCCRQQFFIDFRLIGWNDWIIAPTGYYGNYCEGSCPAYLAGVPGSASSFHTAVVNQYRMRGLNPGTVNSCCIPTKLSTMSMLYFDDEYNIVKRDVPNMIVEECGCA

SEQ ID NO: 40159 - protein, 352 aa, Homo sapiens
  Payload ID: 8181
  Gene Symbol: INHBC
  Gene Name: inhibin, beta C
  Uniprot ID: P55103
  ENSP ID: ENSP00000308716
MTSSLLLAFLLLAPTTVATPRAGGQCPACGGPTLELESQRELLLDLAKRSILDKLHLTQRPTLNRPVSRAALRTALQHLHGVPQGALLEDNREQECEIISFAETGLSTINQTRLDFHFSSDRTAGDREVQQASLMFFVQLPSNTTWTLKVRVLVLGPHNTNLTLATQYLLEVDASGWHQLPLGPEAQAACSQGHLTLELVLEGQVAQSSVILGGAAHRPFVAARVRVGGKHQIHRRGIDCQGGSRMCCRQEFFVDFREIGWHDWIIQPEGYAMNFCIGQCPLHIAGMPGIAASFHTAVLNLLKANTAAGTTGGGSCCVPTARRPLSLLYYDRDSNIVKTDIPDMVVEACGCS

SEQ ID NO: 40160 - protein, 350 aa, Homo sapiens
  Payload ID: 8182
  Gene Symbol: INHBE
  Gene Name: inhibin, beta E
  Uniprot ID: P58166
  ENSP ID: ENSP00000266646
MRLPDVQLWLVLLWALVRAQGTGSVCPSCGGSKLAPQAERALVLELAKQQILDGLHLTSRPRITHPPPQAALTRALRRLQPGSVAPGNGEEVISFATVTDSTSAYSSLLTFHLSTPRSHHLYHARLWLHVLPTLPGTLCLRIFRWGPRRRRQGSRTLLAEHHITNLGWHTLTLPSSGLRGEKSGVLKLQLDCRPLEGNSTVTGQPRRLLDTAGHQQPFLELKIRANEPGAGRARRRTPTCEPATPLCCRRDHYVDFQELGWRDWILQPEGYQLNYCSGQCPPHLAGSPGIAASFHSAVFSLLKANNPWPASTSCCVPTARRPLSLLYLDHNGNVVKTDVPDMVVEACGCS

SEQ ID NO: 40161 - protein, 274 aa, Homo sapiens
  Payload ID: 8182
  Gene Symbol: INHBE
  Gene Name: inhibin, beta E
  ENSP ID: ENSP00000450212
METAAAVVKLERLEAALTRALRRLQPGSVAPGNGEEVISFATVTDSTSAYSSLLTFHLSTPRSHHLYHARLWLHVLPTLPGTLCLRIFRWGPRRRRQGSRTLLAEHHITNLGWHTLTLPSSGLRGEKSGVLKLQLDCRPLEGNSTVTGQPRRLLDTAGHQQPFLELKIRANEPGAGRARRRTPTCEPATPLCCRRDHYVDFQELGWRDWILQPEGYQLNYCSGQCPPHLAGSPGIAASFHSAVFSLLKANNPWPASTSCCVPTARRPLSLLYLD

SEQ ID NO: 40162 - protein, 1353 aa, Homo sapiens
  Payload ID: 8183
  Gene Symbol: IBTK
  Gene Name: inhibitor of Bruton agammaglobulinemia tyrosine kinase
  Uniprot ID: Q9P2D0
  ENSP ID: ENSP00000305721
MSSPMPDCTSKCRSLKHALDVLSVVTKGSENQIKAFLSSHCYNAATIKDVFGRNALHLVSSCGKKGVLDWLIQKGVDLLVKDKESGWTALHRSIFYGHIDCVWSLLKHGVSLYIQDKEGLSALDLVMKDRPTHVVFKNTDPTDVYTWGDNTNFTLGHGSQNSKHHPELVDLFSRSGIYIKQVVLCKFHSVFLSQKGQVYTCGHGPGGRLGHGDEQTCLVPRLVEGLNGHNCSQVAAAKDHTVVLTEDGCVYTFGLNIFHQLGIIPPPSSCNVPRQIQAKYLKGRTIIGVAAGRFHTVLWTREAVYTMGLNGGQLGCLLDPNGEKCVTAPRQVSALHHKDIALSLVAASDGATVCVTTRGDIYLLADYQCKKMASKQLNLKKVLVSGGHMEYKVDPEHLKENGGQKICILAMDGAGRVFCWRSVNSSLKQCRWAYPRQVFISDIALNRNEILFVTQDGEGFRGRWFEEKRKSSEKKEILSNLHNSSSDVSYVSDINSVYERIRLEKLTFAHRAVSVSTDPSGCNFAILQSDPKTSLYEIPAVSSSSFFEEFGKLLREADEMDSIHDVTFQVGNRLFPAHKYILAVHSDFFQKLFLSDGNTSEFTDIYQKDEDSAGCHLFVVEKVHPDMFEYLLQFIYTDTCDFLTHGFKPRIHLNKNPEEYQGTLNSHLNKVNFHEDDNQKSAFEVYKSNQAQTVSERQKSKPKSCKKGKNIREDDPVRMLQTVAKKFDFSNLSSRLDGVRFENEKINVIAKNTGNKLKLSQKKCSFLCDVTMKSVDGKEFPCHKCVLCARLEYFHSMLSSSWIEASSCAALEMPIHSDILKVILDYLYTDEAVVIKESQNVDFICSVLVVADQLLITRLKEICEVALTEKLTLKNAAMLLEFAAMYSAKQLKLSCLQFIGLNMAALLEARSLDVLSDGVLKDLSEFYRKMIPAMDRRVITPYQDGPDISYLEVEDGDIFLKEEINMEQNHSETMFKKAKTKAKKKPRKRSDSSGGYNLSDIIQSPSSTGLLKSGKTNSVESLPELLTSDSEGSYAGVGSPRDLQSPDFTTGFHSDKIEAKVKPYVNGTSPVYSREDLKPWEKSPILKISAPQPIPSNRIDTTSSASWVAGSFSPVSPPVVDLRTIMEIEESRQKCGATPKSHLGKTVSHGVKLSQKQRKMIALTTKENNSGMNSMETVLFTPSKAPKPVNAWASSLHSVSSKSFRDFLLEEKKSVTSHSSGDHVKKVSFKGIENSQAPKIVRCSTHGTPGPEGNHISDLPLLDSPNPWLSSSVTAPSMVAPVTFASIVEEELQQEAALIRSREKPLALIQIEEHAIQDLLVFYEAFGNPEEFVIVERTPQGPLAVPMWNKHGC

SEQ ID NO: 40163 - protein, 238 aa, Homo sapiens
  Payload ID: 8183
  Gene Symbol: IBTK
  Gene Name: inhibitor of Bruton agammaglobulinemia tyrosine kinase
  ENSP ID: ENSP00000422136
MSSPMPDCTSKCRSLKHALDVLSVVTKGSENQIKAFLSSHCYNAATIKDVFGRNALHLVSSCGKKGVLDWLIQKGVDLLVKDKESGWTALHRSIFYGHIDCVWSLLKHGVSLYIQDKEGLSALDLVMKDRPTHVVFKNTDPTDVYTWGDNTNFTLGHGSQNSKHHPELVDLFSRSGIYIKQVVLCKFHSVFLSQKGQVYTCGHGPGGRLGHGDEQTCLVIEMSLHYLGPSACGRTEWS

SEQ ID NO: 40164 - protein, 1152 aa, Homo sapiens
  Payload ID: 8183
  Gene Symbol: IBTK
  Gene Name: inhibitor of Bruton agammaglobulinemia tyrosine kinase
  ENSP ID: ENSP00000422762
MSSPMPDCTSKCRSLKHALDVLSVVTKGSENQIKAFLSSHCYNAATIKDVFGRNALHLVSSCGKKGVLDWLIQKGVDLLVKDKESGWTALHRSIFYGHIDCVWSLLKHGVSLYIQDKEGLSALDLVMKDRPTHVVFKNTDPTDVYTWGDNTNFTLGHGSQNSKHHPELVDLFSRSGIYIKQVVLCKFHSVFLSQKGQVYTCGHGPGGRLGHGDEQTCLVPRLVEGLNGHNCSQVAAAKDHTVVLTEDGCVYTFGLNIFHQLGIIPPPSSCNVPRQIQAKYLKGRTIIGVAAGRFHTVLWTREAVYTMGLNGGQLGCLLDPNGEKCVTAPRQVSALHHKDIALSLVAASDGATVCVTTRGDIYLLADYQCKKMASKQLNLKKVLVSGGHMEYKVDPEHLKENGGQKICILAMDGAGRVFCWRSVNSSLKQCRWAYPRQVFISDIALNRNEILFVTQDGEGFRGRWFEEKRKSSEKKEILSNLHNSSSDVSYVSDINSVYERIRLEKLTFAHRAVSVSTDPSGCNFAILQSDPKTRLDGVRFENEKINVIAKNTGNKLKLSQKKCSFLCDVTMKSVDGKEFPCHKCVLCARLEYFHSMLSSSWIEASSCAALEMPIHSDILKVILDYLYTDEAVVIKESQNVDFICSVLVVADQLLITRLKEICEVALTEKLTLKNAAMLLEFAAMYSAKQLKLSCLQFIGLNMAALLEARSLDVLSDGVLKDLSEFYRKMIPAMDRRVITPYQDGPDISYLEVEDGDIFLKEEINMEQNHSETMFKKAKTKAKKKPRKRSDSSGGYNLSDIIQSPSSTGLLKSGKTNSVESLPELLTSDSEGSYAGVGSPRDLQSPDFTTGFHSDKIEAKVKPYVNGTSPVYSREDLKPWEKSPILKISAPQPIPSNRIDTTSSASWVAGSFSPVSPPVVDLRTIMEIEESRQKCGATPKSHLGKTVSHGVKLSQKQRKMIALTTKENNSGMNSMETVLFTPSKAPKPVNAWASSLHSVSSKSFRDFLLEEKKSVTSHSSGDHVKKVSFKGIENSQAPKIVRCSTHGTPGPEGNHISDLPLLDSPNPWLSSSVTAPSMVAPVTFASIVEEELQQEAALIRSREKPLALIQIEEHAIQDLLVFYEAFGNPEEFVIVERTPQGPLAVPMWNKHGC

SEQ ID NO: 40165 - protein, 128 aa, Homo sapiens
  Payload ID: 8183
  Gene Symbol: IBTK
  Gene Name: inhibitor of Bruton agammaglobulinemia tyrosine kinase
  ENSP ID: ENSP00000424634
LRTIMEIEESRQKCGATPKSHLGKTVSHGVKLSQKQRKMIALTTKENNSGMNSMETVLFTPSKAPKPVNAWASSLHSVSSKSFRDFLLEEKKSVTSHSSGDHVKKVSFKGIENSQAPKIVSFVGGERR

SEQ ID NO: 40166 - protein, 1338 aa, Homo sapiens
  Payload ID: 8183
  Gene Symbol: IBTK
  Gene Name: inhibitor of Bruton agammaglobulinemia tyrosine kinase
  ENSP ID: ENSP00000426405
MSSPMPDCTSKCRSLKHALDVLSVVTKGSENQIKAFLSSHCYNAATIKDVFGRNALHLVSSCGKKGVLDWLIQKGVDLLVKDKESGWTALHRSIFYGHIDCVWSLLKHGVSLYIQDKEGLSALDLVMKDRPTHVVFKNTDPTDVYTWGDNTNFTLGHGSQNSKHHPELVDLFSRSGIYIKQVVLCKFHSVFLSQKGQVYTCGHGPGGRLGHGDEQTCLVPRLVEGLNGHNCSQVAAAKDHTVVLTEDGCVYTFGLNIFHQLGIIPPPSSCNVPRQIQAKYLKGRTIIGVAAGRFHTVLWTREAVYTMGLNGGQLGCLLDPNGEKCVTAPRQVSALHHKDIALSLVAASDGATVCVTTRGDIYLLADYQCKKMASKQLNLKKVLVSGGHMEYKVDPEHLKENGGQKICILAMDGAGRVFCWRSVNSSLKQCRWAYPRQVFISDIALNRNEILFVTQDGEGFRGRWFEEKRKSSEKKEILSNLHNSSSDVSYVSDINSVYERIRLEKLTFAHRAVSVSTDPSGCNFAILQSDPKTSLYEIPAVSSSSFFEEFGKLLREADEMDSIHDVTFQVGNRLFPAHKYILAVHSDFFQKLFLSDGNTSEFTDIYQKDEDSAGCHLFVVEKVHPDMFEYLLQFIYTDTCDFLTHGFKPRIHLNKNPEEYQGTLNSHLNKVNFHEDDNQKSAFEVYKSNQAQTVSERQKSKPKSCKKGKNIREDDPVRMLQTVAKKFDFSNLSSRLDGVRFENEKINVIAKNTGNKLKLSQKKCSFLCDVTMKSVDGKEFPCHKCVLCARLEYFHSMLSSSWIEASSCAALEMPIHSDILKVILDYLYTDEAVVIKESQNVDFICSVLVVADQLLITRLKEICEVALTEKLTLKNAAMLLEFAAMYSAKQLKLSCLQFIGLNMAALLEARSLDVLSDGVLKDLSEFYRKMIPAMDRRVITPYQDGPDISYLEVEDGDIFLKEEINMEQNHSETMFKKAKTKAKKKPRKRSDSSGGYNLSDIIQSPSSTELLTSDSEGSYAGVGSPRDLQSPDFTTGFHSDKIEAKVKPYVNGTSPVYSREDLKPWEKSPILKISAPQPIPSNRIDTTSSASWVAGSFSPVSPPVVDLRTIMEIEESRQKCGATPKSHLGKTVSHGVKLSQKQRKMIALTTKENNSGMNSMETVLFTPSKAPKPVNAWASSLHSVSSKSFRDFLLEEKKSVTSHSSGDHVKKVSFKGIENSQAPKIVRCSTHGTPGPEGNHISDLPLLDSPNPWLSSSVTAPSMVAPVTFASIVEEELQQEAALIRSREKPLALIQIEEHAIQDLLVFYEAFGNPEEFVIVERTPQGPLAVPMWNKHGC

SEQ ID NO: 40167 - protein, 1152 aa, Homo sapiens; identical to SEQ ID NO: 40164
  Payload ID: 8183
  Gene Symbol: IBTK
  Gene Name: inhibitor of Bruton agammaglobulinemia tyrosine kinase
  ENSP ID: ENSP00000478891

SEQ ID NO: 40168 - protein, 128 aa, Homo sapiens; identical to SEQ ID NO: 40165
  Payload ID: 8183
  Gene Symbol: IBTK
  Gene Name: inhibitor of Bruton agammaglobulinemia tyrosine kinase
  ENSP ID: ENSP00000488952

SEQ ID NO: 40169 - protein, 1152 aa, Homo sapiens; identical to SEQ ID NO: 40164
  Payload ID: 8183
  Gene Symbol: IBTK
  Gene Name: inhibitor of Bruton agammaglobulinemia tyrosine kinase
  ENSP ID: ENSP00000488965

SEQ ID NO: 40170 - protein, 238 aa, Homo sapiens; identical to SEQ ID NO: 40163
  Payload ID: 8183
  Gene Symbol: IBTK
  Gene Name: inhibitor of Bruton agammaglobulinemia tyrosine kinase
  ENSP ID: ENSP00000489043

SEQ ID NO: 40171 - protein, 1353 aa, Homo sapiens; identical to SEQ ID NO: 40162
  Payload ID: 8183
  Gene Symbol: IBTK
  Gene Name: inhibitor of Bruton agammaglobulinemia tyrosine kinase
  ENSP ID: ENSP00000489389

SEQ ID NO: 40172 - protein, 1338 aa, Homo sapiens; identical to SEQ ID NO: 40166
  Payload ID: 8183
  Gene Symbol: IBTK
  Gene Name: inhibitor of Bruton agammaglobulinemia tyrosine kinase
  ENSP ID: ENSP00000489548

SEQ ID NO: 40173 - protein, 1152 aa, Homo sapiens; identical to SEQ ID NO: 40164
  Payload ID: 8183
  Gene Symbol: IBTK
  Gene Name: inhibitor of Bruton agammaglobulinemia tyrosine kinase
  ENSP ID: ENSP00000489552

SEQ ID NO: 40174 - protein, 221 aa, Homo sapiens
  Payload ID: 8184
  Gene Symbol: INCA1
  Gene Name: inhibitor of CDK, cyclin A1 interacting protein 1
  Uniprot ID: Q0VD86
  ENSP ID: ENSP00000347129
MQVQDDGVNLIPFAKCSRVVSRSPPPRLPSQSLRPMPQRYGDVFWKNLNQRPTPTWLEEQHIPPMLLPPPEMLWRRKKRRPCLEGMQQQGLGGVPARVRAVTYHLEDLRRRQSIINELKKAQWGSSGAASEPVVLGEEGCGFPSTNEYPDLEEERATYPQEEDRFLTPGRAQLLWSPWSPLDQEEACASRQLHSLASFSTVTARRNPLHNPWGMELAASEE

SEQ ID NO: 40175 - protein, 236 aa, Homo sapiens
  Payload ID: 8184
  Gene Symbol: INCA1
  Gene Name: inhibitor of CDK, cyclin A1 interacting protein 1
  Uniprot ID: Q0VD86
  ENSP ID: ENSP00000458316
MQVQDDGVNLIPFAKCSRVVSRSPPPRLPSQSLRPMPQRYGDVFWKNLNQRPTPTWLEEQHIPPMLRATGCSQLGLYPPEQLPPPEMLWRRKKRRPCLEGMQQQGLGGVPARVRAVTYHLEDLRRRQSIINELKKAQWGSSGAASEPVVLGEEGCGFPSTNEYPDLEEERATYPQEEDRFLTPGRAQLLWSPWSPLDQEEACASRQLHSLASFSTVTARRNPLHNPWGMELAASEE

SEQ ID NO: 40176 - protein, 236 aa, Homo sapiens; identical to SEQ ID NO: 40175
  Payload ID: 8184
  Gene Symbol: INCA1
  Gene Name: inhibitor of CDK, cyclin A1 interacting protein 1
  Uniprot ID: Q0VD86
  ENSP ID: ENSP00000460673

SEQ ID NO: 40177 - protein, 221 aa, Homo sapiens; identical to SEQ ID NO: 40174
  Payload ID: 8184
  Gene Symbol: INCA1
  Gene Name: inhibitor of CDK, cyclin A1 interacting protein 1
  Uniprot ID: Q0VD86
  ENSP ID: ENSP00000461844

SEQ ID NO: 40178 - protein, 149 aa, Homo sapiens
  Payload ID: 8185
  Gene Symbol: ID1
  Gene Name: inhibitor of DNA binding 1, dominant negative helix-loop-helix protein
  Uniprot ID: P41134
  ENSP ID: ENSP00000365273
MKVASGSTATAAAGPSCALKAGKTASGAGEVVRCLSEQSVAISRCAGGAGARLPALLDEQQVNVLLYDMNGCYSRLKELVPTLPQNRKVSKVEILQHVIDYIRDLQLELNSESEVGTPGGRGLPVRAPLSTLNGEISALTAEVRSRSDH

SEQ ID NO: 40179 - protein, 155 aa, Homo sapiens
  Payload ID: 8185
  Gene Symbol: ID1
  Gene Name: inhibitor of DNA binding 1, dominant negative helix-loop-helix protein
  Uniprot ID: P41134
  ENSP ID: ENSP00000365280
MKVASGSTATAAAGPSCALKAGKTASGAGEVVRCLSEQSVAISRCAGGAGARLPALLDEQQVNVLLYDMNGCYSRLKELVPTLPQNRKVSKVEILQHVIDYIRDLQLELNSESEVGTPGGRGLPVRAPLSTLNGEISALTAEAACVPADDRILCR

SEQ ID NO: 40180 - protein, 134 aa, Homo sapiens
  Payload ID: 8186
  Gene Symbol: ID2
  Gene Name: inhibitor of DNA binding 2, dominant negative helix-loop-helix protein
  Uniprot ID: Q02363
  ENSP ID: ENSP00000234091
MKAFSPVRSVRKNSLSDHSLGISRSKTPVDDPMSLLYNMNDCYSKLKELVPSIPQNKKVSKMEILQHVIDYILDLQIALDSHPTIVSLHHQRPGQNQASRTPLTTLNTDISILSLQASEFPSELMSNDSKALCG

SEQ ID NO: 40181 - protein, 134 aa, Homo sapiens; identical to SEQ ID NO: 40180
  Payload ID: 8186
  Gene Symbol: ID2
  Gene Name: inhibitor of DNA binding 2, dominant negative helix-loop-helix protein
  Uniprot ID: Q02363
  ENSP ID: ENSP00000379585

SEQ ID NO: 40182 - protein, 134 aa, Homo sapiens; identical to SEQ ID NO: 40180
  Payload ID: 8186
  Gene Symbol: ID2
  Gene Name: inhibitor of DNA binding 2, dominant negative helix-loop-helix protein
  Uniprot ID: Q02363
  ENSP ID: ENSP00000385465

SEQ ID NO: 40183 - protein, 119 aa, Homo sapiens
  Payload ID: 8187
  Gene Symbol: ID3
  Gene Name: inhibitor of DNA binding 3, dominant negative helix-loop-helix protein
  Uniprot ID: Q02535
  ENSP ID: ENSP00000363689
MKALSPVRGCYEAVCCLSERSLAIARGRGKGPAAEEPLSLLDDMNHCYSRLRELVPGVPRGTQLSQVEILQRVIDYILDLQVVLAEPAPGPPDGPHLPIQTAELTPELVISNDKRSFCH

SEQ ID NO: 40184 - protein, 119 aa, Homo sapiens; identical to SEQ ID NO: 40183
  Payload ID: 8187
  Gene Symbol: ID3
  Gene Name: Inhibitor of DNA binding 3, dominant negative helix-loop-helix protein
  ENSP ID: ENSP00000489102

SEQ ID NO: 40185 - protein, 161 aa, Homo sapiens
  Payload ID: 8188
  Gene Symbol: ID4
  Gene Name: inhibitor of DNA binding 4, dominant negative helix-loop-helix protein
  Uniprot ID: P47928
  ENSP ID: ENSP00000367972
MKAVSPVRPSGRKAPSGCGGGELALRCLAEHGHSLGGSAAAAAAAAAARCKAAEAAADEPALCLQCDMNDCYSRLRRLVPTIPPNKKVSKVEILQHVIDYILDLQLALETHPALLRQPPPPAPPHHPAGTCPAAPPRTPLTALNTDPAGAVNKQGDSILCR

SEQ ID NO: 40186 - protein, 159 aa, Homo sapiens
  Payload ID: 8188
  Gene Symbol: ID4
  Gene Name: inhibitor of DNA binding 4, dominant negative helix-loop-helix protein
  ENSP ID: ENSP00000480976
MKAVSPVRPRAARPSGCGGGELALRCLAEHGHSLGGSQAAAAAAAARCKAAEAAADEPALCLQCDMNDCYSRLRRLVPTIPPNKKVSKVEILQHVIDYILDLQLALETHPALLRQPPPPAPPHHPAGTCPAAPPRTPLTALNTDPAGAVNKQGDSILCR

SEQ ID NO: 40187 - protein, 279 aa, Homo sapiens
  Payload ID: 8189
  Gene Symbol: ING1
  Gene Name: inhibitor of growth family, member 1
  Uniprot ID: Q9UK53
  ENSP ID: ENSP00000328436
MLSPANGEQLHLVNYVEDYLDSIESLPFDLQRNVSLMREIDAKYQEILKELDECYERFSRETDGAQKRRMLHCVQRALIRSQELGDEKIQIVSQMVELVENRTRQVDSHVELFEAQQELGDTAGNSGKAGADRPKGEAAAQADKPNSKRSRRQRNNENRENASSNHDHDDGASGTPKEKKAKTSKKKKRSKAKAEREASPADLPIDPNEPTYCLCNQVSYGEMIGCDNDECPIEWFHFSCVGLNHKPKGKWYCPKCRGENEKTMDKALEKSKKERAYNR

SEQ ID NO: 40188 - protein, 235 aa, Homo sapiens
  Payload ID: 8189
  Gene Symbol: ING1
  Gene Name: inhibitor of growth family, member 1
  Uniprot ID: Q9UK53
  ENSP ID: ENSP00000345202
MEILKELDECYERFSRETDGAQKRRMLHCVQRALIRSQELGDEKIQIVSQMVELVENRTRQVDSHVELFEAQQELGDTAGNSGKAGADRPKGEAAAQADKPNSKRSRRQRNNENRENASSNHDHDDGASGTPKEKKAKTSKKKKRSKAKAEREASPADLPIDPNEPTYCLCNQVSYGEMIGCDNDECPIEWFHFSCVGLNHKPKGKWYCPKCRGENEKTMDKALEKSKKERAYNR

SEQ ID NO: 40189 - protein, 422 aa, Homo sapiens
  Payload ID: 8189
  Gene Symbol: ING1
  Gene Name: inhibitor of growth family, member 1
  ENSP ID: ENSP00000364929
MSFVECPYHSPAERLVAEADEGGPSAITGMGLCFRCLLFSFSGRSGVEGGRVDLNVFGSLGLQPWIGSSRCWGGPCSSALRCGWFSSWPPPSKSAIPIGGGSRGAGRVSRWPPPHWLEAWRVSPRPLSPLSPATFGRGFIAVAVIPGLWARGRGCSSDRLPRPAGPARRQFQAASLLTRGWGRAWPWKQILKELDECYERFSRETDGAQKRRMLHCVQRALIRSQELGDEKIQIVSQMVELVENRTRQVDSHVELFEAQQELGDTAGNSGKAGADRPKGEAAAQADKPNSKRSRRQRNNENRENASSNHDHDDGASGTPKEKKAKTSKKKKRSKAKAEREASPADLPIDPNEPTYCLCNQVSYGEMIGCDNDECPIEWFHFSCVGLNHKPKGKWYCPKCRGENEKTMDKALEKSKKERAYNR

SEQ ID NO: 40190 - protein, 210 aa, Homo sapiens
  Payload ID: 8189
  Gene Symbol: ING1
  Gene Name: inhibitor of growth family, member 1
  Uniprot ID: Q9UK53
  ENSP ID: ENSP00000364930
MLHCVQRALIRSQELGDEKIQIVSQMVELVENRTRQVDSHVELFEAQQELGDTAGNSGKAGADRPKGEAAAQADKPNSKRSRRQRNNENRENASSNHDHDDGASGTPKEKKAKTSKKKKRSKAKAEREASPADLPIDPNEPTYCLCNQVSYGEMIGCDNDECPIEWFHFSCVGLNHKPKGKWYCPKCRGENEKTMDKALEKSKKERAYNR

SEQ ID NO: 40191 - protein, 111 aa, Homo sapiens
  Payload ID: 8189
  Gene Symbol: ING1
  Gene Name: inhibitor of growth family, member 1
  ENSP ID: ENSP00000480985
MSFVECPYHSPAERLVAEADEGGPSAITEILKELDECYERFSRETDGAQKRRMLHCVQRALIRSQELGDEKIQIVSQMVELVENRTRQVDSHVELFEAQQELGDTAGNSGK

SEQ ID NO: 40192 - protein, 280 aa, Homo sapiens
  Payload ID: 8190
  Gene Symbol: ING2
  Gene Name: inhibitor of growth family, member 2
  Uniprot ID: Q9H160
  ENSP ID: ENSP00000307183
MLGQQQQQLYSSAALLTGERSRLLTCYVQDYLECVESLPHDMQRNVSVLRELDNKYQETLKEIDDVYEKYKKEDDLNQKKRLQQLLQRALINSQELGDEKIQIVTQMLELVENRARQMELHSQCFQDPAESERASDKAKMDSSQPERSSRRPRRQRTSESRDLCHMANGIEDCDDQPPKEKKSKSAKKKKRSKAKQEREASPVEFAIDPNEPTYCLCNQVSYGEMIGCDNEQCPIEWFHFSCVSLTYKPKGKWYCPKCRGDNEKTMDKSTEKTKKDRRSR

SEQ ID NO: 40193 - protein, 138 aa, Homo sapiens
  Payload ID: 8190
  Gene Symbol: ING2
  Gene Name: inhibitor of growth family, member 2
  ENSP ID: ENSP00000410291
MDQDGDQQLGPSRILAPQTLKEIDDVYEKYKKEDDLNQKKRLQQLLQRALINSQELGDEKIQIVTQMLELVENRARQMELHSQCFQDPAESERASDKAKMDSSQPERSSRRPRRQRTSESRDLCHMANGIEDCDDQPP

SEQ ID NO: 40194 - protein, 418 aa, Homo sapiens
  Payload ID: 8191
  Gene Symbol: ING3
  Gene Name: inhibitor of growth family, member 3
  Uniprot ID: Q9NXR8
  ENSP ID: ENSP00000320566
MLYLEDYLEMIEQLPMDLRDRFTEMREMDLQVQNAMDQLEQRVSEFFMNAKKNKPEWREEQMASIKKDYYKALEDADEKVQLANQIYDLVDRHLRKLDQELAKFKMELEADNAGITEILERRSLELDTPSQPVNNHHAHSHTPVEKRKYNPTSHHTTTDHIPEKKFKSEALLSTLTSDASKENTLGCRNNNSTASSNNAYNVNSSQPLGSYNIGSLSSGTGAGAITMAAAQAVQATAQMKEGRRTSSLKASYEAFKNNDFQLGKEFSMARETVGYSSSSALMTTLTQNASSSAADSRSGRKSKNNNKSSSQQSSSSSSSSSLSSCSSSSTVVQEISQQTTVVPESDSNSQVDWTYDPNEPRYCICNQVSYGEMVGCDNQDCPIEWFHYGCVGLTEAPKGKWYCPQCTAAMKRRGSRHK

SEQ ID NO: 40195 - protein, 92 aa, Homo sapiens
  Payload ID: 8191
  Gene Symbol: ING3
  Gene Name: inhibitor of growth family, member 3
  Uniprot ID: Q9NXR8
  ENSP ID: ENSP00000341697
MLYLEDYLEMIEQLPMDLRDRFTEMREMDLQVQNAMDQLEQRVSEFFMNAKKNKPEWREEQMASIKKDYYKALEDADEKVQLANQIYDLQHF

SEQ ID NO: 40196 - protein, 403 aa, Homo sapiens
  Payload ID: 8191
  Gene Symbol: ING3
  Gene Name: inhibitor of growth family, member 3
  ENSP ID: ENSP00000388506
MDLRDRFTEMREMDLQVQNAMDQLEQRVSEFFMNAKKNKPEWREEQMASIKKDYYKALEDADEKVQLANQIYDLVDRHLRKLDQELAKFKMELEADNAGITEILERRSLELDTPSQPVNNHHAHSHTPVEKRKYNPTSHHTTTDHIPEKKFKSEALLSTLTSDASKENTLGCRNNNSTASSNNAYNVNSSQPLGSYNIGSLSSGTGAGAITMAAAQAVQATAQMKEGRRTSSLKASYEAFKNNDFQLGKEFSMARETVGYSSSSALMTTLTQNASSSAADSRSGRKSKNNNKSSSQQSSSSSSSSSLSSCSSSSTVVQEISQQTTVVPESDSNSQVDWTYDPNEPRYCICNQVSYGEMVGCDNQDCPIEWFHYGCVGLTEAPKGKWYCPQCTAAMKRRGSRHK

SEQ ID NO: 40197 - protein, 99 aa, Homo sapiens
  Payload ID: 8191
  Gene Symbol: ING3
  Gene Name: inhibitor of growth family, member 3
  ENSP ID: ENSP00000395719
MLYLEDYLEMIEQLPMDLRDRFTEMREMDLQVQNAMDQLEQRVSEFFMNAKKNKPEWREEQMASIKKDYYKALEDADEKVQLANQIYDLVSKSNVHTVP

SEQ ID NO: 40198 - protein, 93 aa, Homo sapiens
  Payload ID: 8191
  Gene Symbol: ING3
  Gene Name: inhibitor of growth family, member 3
  Uniprot ID: Q9NXR8
  ENSP ID: ENSP00000410406
MLYLEDYLEMIEQLPMDLRDRFTEMREMDLQVQNAMDQLEQRVSEFFMNAKKNKPEWREEQMASIKKDYYKALEDADEKVQLANQIYDLDLWN

SEQ ID NO: 40199 - protein, 248 aa, Homo sapiens
  Payload ID: 8192
  Gene Symbol: ING4
  Gene Name: inhibitor of growth family, member 4
  Uniprot ID: Q9UNL4
  ENSP ID: ENSP00000343396
MAAGMYLEHYLDSIENLPFELQRNFQLMRDLDQRTEDLKAEIDKLATEYMSSARSLSSEEKLALLKQIQEAYGKCKEFGDDKVQLAMQTYEMVDKHIRRLDTDLARFEADLKEKQIESSDYDSSSSKGKKSRTQKEKKAARARSKGKNSDEEAPKTAQKKLKLVRTSPEYGMPSVTFGSVHPSDVLDMPVDPNEPTYCLCHQVSYGEMIGCDNPDCSIEWFHFACVGLTTKPRGKWFCPRCSQERKKK

SEQ ID NO: 40200 - protein, 249 aa, Homo sapiens
  Payload ID: 8192
  Gene Symbol: ING4
  Gene Name: inhibitor of growth family, member 4
  Uniprot ID: Q9UNL4
  ENSP ID: ENSP00000380024
MAAGMYLEHYLDSIENLPFELQRNFQLMRDLDQRTEDLKAEIDKLATEYMSSARSLSSEEKLALLKQIQEAYGKCKEFGDDKVQLAMQTYEMVDKHIRRLDTDLARFEADLKEKQIESSDYDSSSSKGKKKGRTQKEKKAARARSKGKNSDEEAPKTAQKKLKLVRTSPEYGMPSVTFGSVHPSDVLDMPVDPNEPTYCLCHQVSYGEMIGCDNPDCSIEWFHFACVGLTTKPRGKWFCPRCSQERKKK

SEQ ID NO: 40201 - protein, 225 aa, Homo sapiens
  Payload ID: 8192
  Gene Symbol: ING4
  Gene Name: inhibitor of growth family, member 4
  Uniprot ID: Q9UNL4
  ENSP ID: ENSP00000397343
MAAGMYLEHYLDNLKAEIDKLATEYMSSARSLSSEEKLALLKQIQEAYGKCKEFGDDKVQLAMQTYEMVDKHIRRLDTDLARFEADLKEKQIESSDYDSSSSKGKKKGRTQKEKKAARARSKGKNSDEEAPKTAQKKLKLVRTSPEYGMPSVTFGSVHPSDVLDMPVDPNEPTYCLCHQVSYGEMIGCDNPDCSIEWFHFACVGLTTKPRGKWFCPRCSQERKKK

SEQ ID NO: 40202 - protein, 246 aa, Homo sapiens
  Payload ID: 8192
  Gene Symbol: ING4
  Gene Name: inhibitor of growth family, member 4
  Uniprot ID: Q9UNL4
  ENSP ID: ENSP00000412705
MAAGMYLEHYLDSIENLPFELQRNFQLMRDLDQRTEDLKAEIDKLATEYMSSARSLSSEEKLALLKQIQEAYGKCKEFGDDKVQLAMQTYEMVDKHIRRLDTDLARFEADLKEKQIESSDYDSSSSKEGRTQKEKKAARARSKGKNSDEEAPKTAQKKLKLVRTSPEYGMPSVTFGSVHPSDVLDMPVDPNEPTYCLCHQVSYGEMIGCDNPDCSIEWFHFACVGLTTKPRGKWFCPRCSQERKKK

SEQ ID NO: 40203 - protein, 179 aa, Homo sapiens
  Payload ID: 8192
  Gene Symbol: ING4
  Gene Name: inhibitor of growth family, member 4
  Uniprot ID: Q9UNL4
  ENSP ID: ENSP00000414008
MAAGMYLEHYLDSIENLPFELQRNFQLMRDLDQRTEDLKAEIDKLATEYMSSARSLSSEEKLALLKQIQEAYGKCKEFGDDKVQLAMQTYEMVDKHIRRLDTDLARFEADLKEKQIESSDYDSSSSKGKKKGRTQKEKKAARARSKGKNSDEEAPKTAQKKLKLVRTVPLSGSILPVWG

SEQ ID NO: 40204 - protein, 245 aa, Homo sapiens
  Payload ID: 8192
  Gene Symbol: ING4
  Gene Name: inhibitor of growth family, member 4
  Uniprot ID: Q9UNL4
  ENSP ID: ENSP00000415903
MAAGMYLEHYLDSIENLPFELQRNFQLMRDLDQRTEDLKAEIDKLATEYMSSARSLSSEEKLALLKQIQEAYGKCKEFGDDKVQLAMQTYEMVDKHIRRLDTDLARFEADLKEKQIESSDYDSSSSKGRTQKEKKAARARSKGKNSDEEAPKTAQKKLKLVRTSPEYGMPSVTFGSVHPSDVLDMPVDPNEPTYCLCHQVSYGEMIGCDNPDCSIEWFHFACVGLTTKPRGKWFCPRCSQERKKK

SEQ ID NO: 40205 - protein, 47 aa, Homo sapiens
  Payload ID: 8192
  Gene Symbol: ING4
  Gene Name: inhibitor of growth family, member 4
  ENSP ID: ENSP00000431892
MAAGMYLEHYLDSIENLPFELQRNFQLMRDLDQRTEEALDTISSLEH

SEQ ID NO: 40206 - protein, 51 aa, Homo sapiens
  Payload ID: 8192
  Gene Symbol: ING4
  Gene Name: inhibitor of growth family, member 4
  ENSP ID: ENSP00000433081
MAAGMYLEHYLDSIENLPFELQRNFQLMRDLDQRTEGGQTHSAAGHRPGPF

SEQ ID NO: 40207 - protein, 36 aa, Homo sapiens
  Payload ID: 8192
  Gene Symbol: ING4
  Gene Name: inhibitor of growth family, member 4
  ENSP ID: ENSP00000435867
NLPFELQRNFQLMRDLDQRTEGGQTHSAAGHRPGPF

SEQ ID NO: 40208 - protein, 47 aa, Homo sapiens; identical to SEQ ID NO: 40205
  Payload ID: 8192
  Gene Symbol: ING4
  Gene Name: inhibitor of growth family, member 4
  ENSP ID: ENSP00000436406

SEQ ID NO: 40209 - protein, 21 aa, Homo sapiens
  Payload ID: 8192
  Gene Symbol: ING4
  Gene Name: inhibitor of growth family, member 4
  ENSP ID: ENSP00000437198
MPSVTFGSVHPSDVLDMPVDP

SEQ ID NO: 40210 - protein, 51 aa, Homo sapiens
  Payload ID: 8192
  Gene Symbol: ING4
  Gene Name: inhibitor of growth family, member 4
  ENSP ID: ENSP00000473635
MPSVTFGSVHPSDVLDMPVDPNEPTYCLCHQVSYGEMIGCDNPDCSIEWFH

SEQ ID NO: 40211 - protein, 51 aa, Homo sapiens; identical to SEQ ID NO: 40206
  Payload ID: 8192
  Gene Symbol: ING4
  Gene Name: inhibitor of growth family, member 4
  ENSP ID: ENSP00000480978

SEQ ID NO: 40212 - protein, 240 aa, Homo sapiens
  Payload ID: 8193
  Gene Symbol: ING5
  Gene Name: inhibitor of growth family, member 5
  Uniprot ID: Q8WYH8
  ENSP ID: ENSP00000322142
MATAMYLEHYLDSIENLPCELQRNFQLMRELDQRTEDKKAEIDILAAEYISTVKTLSPDQRVERLQKIQNAYSKCKEYSDDKVQLAMQTYEMVDKHIRRLDADLARFEADLKDKMEGSDFESSGGRGLKKGRGQKEKRGSRGRGRRTSEEDTPKKKKHKGGSEFTDTILSVHPSDVLDMPVDPNEPTYCLCHQVSYGEMIGCDNPDCPIEWFHFACVDLTTKPKGKWFCPRCVQEKRKKK

SEQ ID NO: 40213 - protein, 226 aa, Homo sapiens
  Payload ID: 8193
  Gene Symbol: ING5
  Gene Name: inhibitor of growth family, member 5
  Uniprot ID: Q8WYH8
  ENSP ID: ENSP00000385937
MATAMYLEHYLDSIENLPCELQRNFQLMRELDQRTEDKKAEIDILAAEYISTVKTLSPDQRVERLQKIQNAYSKCKEYSDDKVQLAMQTYEMVDKHIRRLDADLARFEADLKDKMEGSDFESSGGRGLKKGRGQKEKRGSRGRGRRTSEEDTPKKKKHKGGSEFTDTILSVHPSDVLDMPVDPNEPTYCLCHQVSYGEMIGCDNPDCPIEWFHFACVDLTTKPKGK

SEQ ID NO: 40214 - protein, 142 aa, Homo sapiens
  Payload ID: 8193
  Gene Symbol: ING5
  Gene Name: inhibitor of growth family, member 5
  ENSP ID: ENSP00000416878
MATAMYLEHYLDSIENLPCELQRNFQLMRELDQRTEDKKAEIDILAAEYISTVKTLSPDQRVERLQKIQNAYSKCKEYSDDKVQLAMQTYEMVDKHIRRLDADLARFEADLKDKMEGSDFESSGGRGLKSKSVNFFSLFYYC

SEQ ID NO: 40215 - protein, 164 aa, Homo sapiens
  Payload ID: 8194
  Gene Symbol: IKBKB
  Gene Name: inhibitor of kappa light polypeptide gene enhancer in B-cells, kinase beta
  ENSP ID: ENSP00000339151
MSWSPSLTTQTCGAWEMKERLGTGGFGNVIRWHNQETGEQIAIKQCRQELSPRNRERWCLEIQIMRRLTHPNVVAARDVPEGMQNLAPNDLPLLAMEYCQGGDLRKYLNQFENCCGLREGAILTLLSDIGKSQSRNSGRVLQGECGAPPLRLDTFMKTESSIGI

SEQ ID NO: 40216 - protein, 697 aa, Homo sapiens
  Payload ID: 8194
  Gene Symbol: IKBKB
  Gene Name: inhibitor of kappa light polypeptide gene enhancer in B-cells, kinase beta
  Uniprot ID: O14920
  ENSP ID: ENSP00000404920
MSSDGTIRLTHPNVVAARDVPEGMQNLAPNDLPLLAMEYCQGGDLRKYLNQFENCCGLREGAILTLLSDIASALRYLHENRIIHRDLKPENIVLQQGEQRLIHKIIDLGYAKELDQGSLCTSFVGTLQYLAPELLEQQKYTVTVDYWSFGTLAFECITGFRPFLPNWQPVQWHSKVRQKSEVDIVVSEDLNGTVKFSSSLPYPNNLNSVLAERLEKWLQLMLMWHPRQRGTDPTYGPNGCFKALDDILNLKLVHILNMVTGTIHTYPVTEDESLQSLKARIQQDTGIPEEDQELLQEAGLALIPDKPATQCISDGKLNEGHTLDMDLVFLFDNSKITYETQISPRPQPESVSCILQEPKRNLAFFQLRKVWGQVWHSIQTLKEDCNRLQQGQRAAMMNLLRNNSCLSKMKNSMASMSQQLKAKLDFFKTSIQIDLEKYSEQTEFGITSDKLLLAWREMEQAVELCGRENEVKLLVERMMALQTDIVDLQRSPMGRKQGGTLDDLEEQARELYRRLREKPRDQRTEGDSQEMVRLLLQAIQSFEKKVRVIYTQLSKTVVCKQKALELLPKVEEVVSLMNEDEKTVVRLQEKRQKELWNLLKIACSKVRGPVSGSPDSMNASRLSQPGQLMSQPSTASNSLPEPAKKSEELVAEAHNLCTLLENAIQDTVREQDQSFTALDWSWLQTEEEEHSCLEQAS

SEQ ID NO: 40217 - protein, 76 aa, Homo sapiens
  Payload ID: 8194
  Gene Symbol: IKBKB
  Gene Name: inhibitor of kappa light polypeptide gene enhancer in B-cells, kinase beta
  ENSP ID: ENSP00000427978
MSWSPSLTTQTCGAWEMKERLGTGGFGNVIRWHNQVGPLCSLGRGGEPGPLLTASTFSDPAGPRAHLWLWSSWDSE

SEQ ID NO: 40218 - protein, 562 aa, Homo sapiens
  Payload ID: 8194
  Gene Symbol: IKBKB
  Gene Name: inhibitor of kappa light polypeptide gene enhancer in B-cells, kinase beta
  ENSP ID: ENSP00000428186
MSWSPSLTTQTCGAWEMKERLGTGGFGNVIRWHNQETGEQIAIKQCRQELSPRNRERWCLEIQIMRRLTHPNVVAARDVPEGMQNLAPNDLPLLAMEYCQGGDLRKYLNQFENCCGLREGAILTLLSDIASALRYLHENRIIHRDLKPENIVLQQGEQRLIHKIIDLGYAKELDQGSLCTSFVGTLQYLAPELLEQQKYTVTVDYWSFGTLAFECITGFRPFLPNWQPVQWHSKVRQKSEVDIVVSEDLNGTVKFSSSLPYPNNLNSVLAERLEKWLQLMLMWHPRQRGTDPTYGPNGCFKALDDILNLKLVHILNMVTGTIHTYPVTEDESLQSLKARIQQDTGIPEEDQELLQEAGLALIPDKPATQCISDGKLNEGHTLDMDLVFLFDNSKITYETQISPRPQPESVSCILQEPKRNLAFFQLRKVWGQVWHSIQTLKEDCNRLQQGQRAAMMNLLRNNSCLSKMKNSMASMSQQLKAKLDFFKTSIQIDLEKYSEQTEFGIRERSETPGRTDDGSADRHCGLTEEPHGPEAGGNAGRPRGASKGAVQETKGKTSRPAN

SEQ ID NO: 40219 - protein, 48 aa, Homo sapiens
  Payload ID: 8194
  Gene Symbol: IKBKB
  Gene Name: inhibitor of kappa light polypeptide gene enhancer in B-cells, kinase beta
  ENSP ID: ENSP00000428799
MSWSPSLTTQTCGAWEMKERLGTGGFGNVIRWHNQADPPQCGGCPRCP

SEQ ID NO: 40220 - protein, 109 aa, Homo sapiens
  Payload ID: 8194
  Gene Symbol: IKBKB
  Gene Name: inhibitor of kappa light polypeptide gene enhancer in B-cells, kinase beta
  ENSP ID: ENSP00000428892
MSWSPSLTTQTCGAWEMKERLGTGGFGNVIRWHNQDAALRGHCRRLVCTLEVLHYRGPAHIAGPTNVQGYSHGSSFLCREKSAWSTVCHTRDWTVSNSNLSGQSPSSAW

SEQ ID NO: 40221 - protein, 562 aa, Homo sapiens; identical to SEQ ID NO: 40218
  Payload ID: 8194
  Gene Symbol: IKBKB
  Gene Name: inhibitor of kappa light polypeptide gene enhancer in B-cells, kinase beta
  ENSP ID: ENSP00000428922

SEQ ID NO: 40222 - protein, 48 aa, Homo sapiens; identical to SEQ ID NO: 40219
  Payload ID: 8194
  Gene Symbol: IKBKB
  Gene Name: inhibitor of kappa light polypeptide gene enhancer in B-cells, kinase beta
  ENSP ID: ENSP00000429239

SEQ ID NO: 40223 - protein, 51 aa, Homo sapiens
  Payload ID: 8194
  Gene Symbol: IKBKB
  Gene Name: inhibitor of kappa light polypeptide gene enhancer in B-cells, kinase beta
  ENSP ID: ENSP00000429319
MSWSPSLTTQTCGAWEMKERLGTGGFGNVIRWHNQPLRLDTFMKTESSIGI

SEQ ID NO: 40224 - protein, 48 aa, Homo sapiens; identical to SEQ ID NO: 40219
  Payload ID: 8194
  Gene Symbol: IKBKB
  Gene Name: inhibitor of kappa light polypeptide gene enhancer in B-cells, kinase beta
  ENSP ID: ENSP00000429357

SEQ ID NO: 40225 - protein, 48 aa, Homo sapiens; identical to SEQ ID NO: 40219
  Payload ID: 8194
  Gene Symbol: IKBKB
  Gene Name: inhibitor of kappa light polypeptide gene enhancer in B-cells, kinase beta
  ENSP ID: ENSP00000429699

SEQ ID NO: 40226 - protein, 48 aa, Homo sapiens; identical to SEQ ID NO: 40219
  Payload ID: 8194
  Gene Symbol: IKBKB
  Gene Name: inhibitor of kappa light polypeptide gene enhancer in B-cells, kinase beta
  ENSP ID: ENSP00000429924

SEQ ID NO: 40227 - protein, 375 aa, Homo sapiens
  Payload ID: 8194
  Gene Symbol: IKBKB
  Gene Name: inhibitor of kappa light polypeptide gene enhancer in B-cells, kinase beta
  ENSP ID: ENSP00000430114
MSWSPSLTTQTCGAWEMKERLGTGGFGNVIRWHNQETGEQIAIKQCRQELSPRNRERWCLEIQIMRRLTHPNVVAARDVPEGMQNLAPNDLPLLAMEYCQGGDLRKYLNQFENCCGLREGAILTLLSDIASALRYLHENRIIHRDLKPENIVLQQGEQRLIHKIIDLGYAKELDQGSLCTSFVGTLQYLAPELLEQQKYTVTVDYWSFGTLAFECITGFRPFLPNWQPVQWHSKVRQKSEVDIVVSEDLNGTVKFSSSLPYPNNLNSVLAERLEKWLQLMLMWHPRQRGTDPTYGPNGCFKALDDILNLKLVHILNMVTGTIHTYPVTEDESLQSLKARIQQDTGIPEEDQELLQEAGLALIPDKPATQCISDGK

SEQ ID NO: 40228 - protein, 256 aa, Homo sapiens
  Payload ID: 8194
  Gene Symbol: IKBKB
  Gene Name: inhibitor of kappa light polypeptide gene enhancer in B-cells, kinase beta
  Uniprot ID: O14920
  ENSP ID: ENSP00000430483
MSWSPSLTTQTCGAWEMKERLGTGGFGNVIRWHNQETGEQIAIKQCRQELSPRNRERWCLEIQIMRRLTHPNVVAARDVPEGMQNLAPNDLPLLAMEYCQGGDLRKYLNQFENCCGLREGAILTLLSDIASALRYLHENRIIHRDLKPENIVLQQGEQRLIHKIIDLGYAKELDQGSLCTSFVGTLQYLAPELLEQQKYTVTVDYWSFGTLAFECITGFRPFLPNWQPVQCVRMWPGTVAHSCNPSTLGGRGRWIS

SEQ ID NO: 40229 - protein, 43 aa, Homo sapiens
  Payload ID: 8194
  Gene Symbol: IKBKB
  Gene Name: inhibitor of kappa light polypeptide gene enhancer in B-cells, kinase beta
  ENSP ID: ENSP00000430557
MSWSPSLTTQTCGAWEMKERLGTGGFGNVIRWHNQAFKSAAEE

SEQ ID NO: 40230 - protein, 756 aa, Homo sapiens
  Payload ID: 8194
  Gene Symbol: IKBKB
  Gene Name: inhibitor of kappa light polypeptide gene enhancer in B-cells, kinase beta
  Uniprot ID: O14920
  ENSP ID: ENSP00000430684
MSWSPSLTTQTCGAWEMKERLGTGGFGNVIRWHNQETGEQIAIKQCRQELSPRNRERWCLEIQIMRRLTHPNVVAARDVPEGMQNLAPNDLPLLAMEYCQGGDLRKYLNQFENCCGLREGAILTLLSDIASALRYLHENRIIHRDLKPENIVLQQGEQRLIHKIIDLGYAKELDQGSLCTSFVGTLQYLAPELLEQQKYTVTVDYWSFGTLAFECITGFRPFLPNWQPVQWHSKVRQKSEVDIVVSEDLNGTVKFSSSLPYPNNLNSVLAERLEKWLQLMLMWHPRQRGTDPTYGPNGCFKALDDILNLKLVHILNMVTGTIHTYPVTEDESLQSLKARIQQDTGIPEEDQELLQEAGLALIPDKPATQCISDGKLNEGHTLDMDLVFLFDNSKITYETQISPRPQPESVSCILQEPKRNLAFFQLRKVWGQVWHSIQTLKEDCNRLQQGQRAAMMNLLRNNSCLSKMKNSMASMSQQLKAKLDFFKTSIQIDLEKYSEQTEFGITSDKLLLAWREMEQAVELCGRENEVKLLVERMMALQTDIVDLQRSPMGRKQGGTLDDLEEQARELYRRLREKPRDQRTEGDSQEMVRLLLQAIQSFEKKVRVIYTQLSKTVVCKQKALELLPKVEEVVSLMNEDEKTVVRLQEKRQKELWNLLKIACSKVRGPVSGSPDSMNASRLSQPGQLMSQPSTASNSLPEPAKKSEELVAEAHNLCTLLENAIQDTVREQDQSFTALDWSWLQTEEEEHSCLEQAS

SEQ ID NO: 40231 - protein, 754 aa, Homo sapiens
  Payload ID: 8194
  Gene Symbol: IKBKB
  Gene Name: inhibitor of kappa light polypeptide gene enhancer in B-cells, kinase beta
  Uniprot ID: O14920
  ENSP ID: ENSP00000430868
MFSGGCHSPGFGRPSPAFPAPGSPPPAPRPCRQETGEQIAIKQCRQELSPRNRERWCLEIQIMRRLTHPNVVAARDVPEGMQNLAPNDLPLLAMEYCQGGDLRKYLNQFENCCGLREGAILTLLSDIASALRYLHENRIIHRDLKPENIVLQQGEQRLIHKIIDLGYAKELDQGSLCTSFVGTLQYLAPELLEQQKYTVTVDYWSFGTLAFECITGFRPFLPNWQPVQWHSKVRQKSEVDIVVSEDLNGTVKFSSSLPYPNNLNSVLAERLEKWLQLMLMWHPRQRGTDPTYGPNGCFKALDDILNLKLVHILNMVTGTIHTYPVTEDESLQSLKARIQQDTGIPEEDQELLQEAGLALIPDKPATQCISDGKLNEGHTLDMDLVFLFDNSKITYETQISPRPQPESVSCILQEPKRNLAFFQLRKVWGQVWHSIQTLKEDCNRLQQGQRAAMMNLLRNNSCLSKMKNSMASMSQQLKAKLDFFKTSIQIDLEKYSEQTEFGITSDKLLLAWREMEQAVELCGRENEVKLLVERMMALQTDIVDLQRSPMGRKQGGTLDDLEEQARELYRRLREKPRDQRTEGDSQEMVRLLLQAIQSFEKKVRVIYTQLSKTVVCKQKALELLPKVEEVVSLMNEDEKTVVRLQEKRQKELWNLLKIACSKVRGPVSGSPDSMNASRLSQPGQLMSQPSTASNSLPEPAKKSEELVAEAHNLCTLLENAIQDTVREQDQSFTALDWSWLQTEEEEHSCLEQAS

SEQ ID NO: 40232 - protein, 562 aa, Homo sapiens; identical to SEQ ID NO: 40218
  Payload ID: 8194
  Gene Symbol: IKBKB
  Gene Name: inhibitor of kappa light polypeptide gene enhancer in B-cells, kinase beta
  ENSP ID: ENSP00000486961

SEQ ID NO: 40233 - protein, 1332 aa, Homo sapiens
  Payload ID: 8195
  Gene Symbol: IKBKAP
  Gene Name: inhibitor of kappa light polypeptide gene enhancer in B-cells, kinase complex-associated protein
  Uniprot ID: O95163
  ENSP ID: ENSP00000363779
MRNLKLFRTLEFRDIQGPGNPQCFSLRTEQGTVLIGSEHGLIEVDPVSREVKNEVSLVAEGFLPEDGSGRIVGVQDLLDQESVCVATASGDVILCSLSTQQLECVGSVASGISVMSWSPDQELVLLATGQQTLIMMTKDFEPILEQQIHQDDFGESKFITVGWGRKETQFHGSEGRQAAFQMQMHESALPWDDHRPQVTWRGDGQFFAVSVVCPETGARKVRVWNREFALQSTSEPVAGLGPALAWKPSGSLIASTQDKPNQQDIVFFEKNGLLHGHFTLPFLKDEVKVNDLLWNADSSVLAVWLEDLQREESSIPKTCVQLWTVGNYHWYLKQSLSFSTCGKSKIVSLMWDPVTPYRLHVLCQGWHYLAYDWHWTTDRSVGDNSSDLSNVAVIDGNRVLVTVFRQTVVPPPMCTYQLLFPHPVNQVTFLAHPQKSNDLAVLDASNQISVYKCGDCPSADPTVKLGAVGGSGFKVCLRTPHLEKRYKIQFENNEDQDVNPLKLGLLTWIEEDVFLAVSHSEFSPRSVIHHLTAASSEMDEEHGQLNVSSSAAVDGVIISLCCNSKTKSVVLQLADGQIFKYLWESPSLAIKPWKNSGGFPVRFPYPCTQTELAMIGEEECVLGLTDRCRFFINDIEVASNITSFAVYDEFLLLTTHSHTCQCFCLRDASFKTLQAGLSSNHVSHGEVLRKVERGSRIVTVVPQDTKLVLQMPRGNLEVVHHRALVLAQIRKWLDKLMFKEAFECMRKLRINLNLIYDHNPKVFLGNVETFIKQIDSVNHINLFFTELKEEDVTKTMYPAPVTSSVYLSRDPDGNKIDLVCDAMRAVMESINPHKYCLSILTSHVKKTTPELEIVLQKVHELQGNAPSDPDAVSAEEALKYLLHLVDVNELYDHSLGTYDFDLVLMVAEKSQKDPKEYLPFLNTLKKMETNYQRFTIDKYLKRYEKAIGHLSKCGPEYFPECLNLIKDKNLYNEALKLYSPSSQQYQDISIAYGEHLMQEHMYEPAGLMFARCGAHEKALSAFLTCGNWKQALCVAAQLNFTKDQLVGLGRTLAGKLVEQRKHIDAAMVLEECAQDYEEAVLLLLEGAAWEEALRLVYKYNRLDIIETNVKPSILEAQKNYMAFLDSQTATFSRHKKRLLVVRELKEQAQQAGLDDEVPHGQESDLFSETSSVVSGSEMSGKYSHSNSRISARSSKNRRKAERKKHSLKEGSPLEDLALLEALSEVVQNTENLKDEVYHILKVLFLFEFDEQGRELQKAFEDTLQLMERSLPEIWTLTYQQNSATPVLGPNSTANSIMASYQQQKTSVPVLDAELFIPPKINRRTQWKLSLLD

SEQ ID NO: 40234 - protein, 346 aa, Homo sapiens
  Payload ID: 8195
  Gene Symbol: IKBKAP
  Gene Name: inhibitor of kappa light polypeptide gene enhancer in B-cells, kinase complex-associated protein
  ENSP ID: ENSP00000433514
  MOD_RES (1)..(1): Any amino acid
XPEYFPECLNLIKDKNLYNEALKLYSPSSQQYQDISIAYGEHLMQEHMYEPAGLMFARCGAHEKALSAFLTCGNWKQALCVAAQLNFTKDQLVGLGRTLAGKLVEQRKHIDAAMVLEECAQDYEEAVLLLLEGAAWEEALRLVYKYNRLDIIETNVKPSILEAQKNYMAFLDSQTATFSRHKKRLLVVRELKEQAQQAGLDDEVPHGQESDLFSETSSVVSGSEMSGKYSHSNSRISARSSKNRRKAERKKHSLKEGSPLEDLALLEALSEVVQNTENLKDEVYHILKVLFLFEFDEQGRELQKAFEDTLQLMERSLPEIWTLTYQQNSATPTWGEGVLLCCPSWS

SEQ ID NO: 40235 - protein, 983 aa, Homo sapiens
  Payload ID: 8195
  Gene Symbol: IKBKAP
  Gene Name: inhibitor of kappa light polypeptide gene enhancer in B-cells, kinase complex-associated protein
  ENSP ID: ENSP00000439367
MWDPVTPYRLHVLCQGWHYLAYDWHWTTDRSVGDNSSDLSNVAVIDGNRVLVTVFRQTVVPPPMCTYQLLFPHPVNQVTFLAHPQKSNDLAVLDASNQISVYKCGDCPSADPTVKLGAVGGSGFKVCLRTPHLEKRYKIQFENNEDQDVNPLKLGLLTWIEEDVFLAVSHSEFSPRSVIHHLTAASSEMDEEHGQLNVSSSAAVDGVIISLCCNSKTKSVVLQLADGQIFKYLWESPSLAIKPWKNSGGFPVRFPYPCTQTELAMIGEEECVLGLTDRCRFFINDIEVASNITSFAVYDEFLLLTTHSHTCQCFCLRDASFKTLQAGLSSNHVSHGEVLRKVERGSRIVTVVPQDTKLVLQMPRGNLEVVHHRALVLAQIRKWLDKLMFKEAFECMRKLRINLNLIYDHNPKVFLGNVETFIKQIDSVNHINLFFTELKEEDVTKTMYPAPVTSSVYLSRDPDGNKIDLVCDAMRAVMESINPHKYCLSILTSHVKKTTPELEIVLQKVHELQGNAPSDPDAVSAEEALKYLLHLVDVNELYDHSLGTYDFDLVLMVAEKSQKDPKEYLPFLNTLKKMETNYQRFTIDKYLKRYEKAIGHLSKCGPEYFPECLNLIKDKNLYNEALKLYSPSSQQYQDISIAYGEHLMQEHMYEPAGLMFARCGAHEKALSAFLTCGNWKQALCVAAQLNFTKDQLVGLGRTLAGKLVEQRKHIDAAMVLEECAQDYEEAVLLLLEGAAWEEALRLVYKYNRLDIIETNVKPSILEAQKNYMAFLDSQTATFSRHKKRLLVVRELKEQAQQAGLDDEVPHGQESDLFSETSSVVSGSEMSGKYSHSNSRISARSSKNRRKAERKKHSLKEGSPLEDLALLEALSEVVQNTENLKDEVYHILKVLFLFEFDEQGRELQKAFEDTLQLMERSLPEIWTLTYQQNSATPVLGPNSTANSIMASYQQQKTSVPVLDAELFIPPKINRRTQWKLSLLD

SEQ ID NO: 40236 - protein, 631 aa, Homo sapiens
  Payload ID: 8196
  Gene Symbol: IKBKE
  Gene Name: inhibitor of kappa light polypeptide gene enhancer in B-cells, kinase epsilon
  Uniprot ID: Q14164
  ENSP ID: ENSP00000462396
MEYCSSGSLLSVLESPENAFGLPEDEFLVVLRCVVAGMNHLRENGIVHRDIKPGNIMRLVGEEGQSIYKLTDFGAARELDDDEKFVSVYGTEEYLHPDMYERAVLRKPQQKAFGVTVDLWSIGVTLYHAATGSLPFIPFGGPRRNKEIMYRITTEKPAGAIAGAQRRENGPLEWSYTLPITCQLSLGLQSQLVPILANILEVEQAKCWGFDQFFAETSDILQRVVVHVFSLSQAVLHHIYIHAHNTIAIFQEAVHKQTSVAPRHQEYLFEGHLCVLEPSVSAQHIAHTTASSPLTLFSTAIPKGLAFRDPALDVPKFVPKVDLQADYNTAKGVLGAGYQALRLARALLDGQELMFRGLHWVMEVLQATCRRTLEVARTSLLYLSSSLGTERFSSVAGTPEIQELKAAAELRSRLRTLAEVLSRCSQNITETQESLSSLNRELVKSRDQVHEDRSIQQIQCCLDKMNFIYKQFKKSRMRPGLGYNEEQIHKLDKVNFSHLAKRLLQVFQEECVQKYQASLVTHGKRMRVVHETRNHLRLVGCSVAACNTEAQGVQESLSKLLEELSHQLLQDRAKGAQASPPPIAPYPSPTRKDLLLHMQELCEGMKLLASDLLDNNRIIERLNRVPAPPDV

SEQ ID NO: 40237 - protein, 716 aa, Homo sapiens
  Payload ID: 8196
  Gene Symbol: IKBKE
  Gene Name: inhibitor of kappa light polypeptide gene enhancer in B-cells, kinase epsilon
  Uniprot ID: Q14164
  ENSP ID: ENSP00000464030
MQSTANYLWHTDDLLGQGATASVYKARNKKSGELVAVKVFNTTSYLRPREVQVREFEVLRKLNHQNIVKLFAVEETGGSRQKVLVMEYCSSGSLLSVLESPENAFGLPEDEFLVVLRCVVAGMNHLRENGIVHRDIKPGNIMRLVGEEGQSIYKLTDFGAARELDDDEKFVSVYGTEEYLHPDMYERAVLRKPQQKAFGVTVDLWSIGVTLYHAATGSLPFIPFGGPRRNKEIMYRITTEKPAGAIAGAQRRENGPLEWSYTLPITCQLSLGLQSQLVPILANILEVEQAKCWGFDQFFAETSDILQRVVVHVFSLSQAVLHHIYIHAHNTIAIFQEAVHKQTSVAPRHQEYLFEGHLCVLEPSVSAQHIAHTTASSPLTLFSTAIPKGLAFRDPALDVPKFVPKVDLQADYNTAKGVLGAGYQALRLARALLDGQELMFRGLHWVMEVLQATCRRTLEVARTSLLYLSSSLGTERFSSVAGTPEIQELKAAAELRSRLRTLAEVLSRCSQNITETQESLSSLNRELVKSRDQVHEDRSIQQIQCCLDKMNFIYKQFKKSRMRPGLGYNEEQIHKLDKVNFSHLAKRLLQVFQEECVQKYQASLVTHGKRMRVVHETRNHLRLVGCSVAACNTEAQGVQESLSKLLEELSHQLLQDRAKGAQASPPPIAPYPSPTRKDLLLHMQELCEGMKLLASDLLDNNRIIERLNRVPAPPDV

SEQ ID NO: 40238 - protein, 657 aa, Homo sapiens
  Payload ID: 8196
  Gene Symbol: IKBKE
  Gene Name: inhibitor of kappa light polypeptide gene enhancer in B-cells, kinase epsilon
  ENSP ID: ENSP00000473833
MQSTANYLWHTDDLLGQGATASVYKARNKKSGELVAVKVFNTTSYLRPREVQVREFEVLRKLNHQNIVKLFAVEETGGSRQKVLVMEYCSSGSLLSVLESPENAFGLPEDEFLVVLRCVVAGMNHLRENGIVHRDIKPGNIMRLVGEEGQSIYKLTDFGAARELDDDEKFVSVYGTEEYLHPDMYERAVLRKPQQKAFGVTVDLWSIGVTLYHAATGSLPFIPFGGPRRNKEIMYRITTEKPAGAIAGAQRRENGPLEWSYTLPITCQLSLGLQSQLVPILANILEVEQAKCWGFDQFFAETSDILQRVVVHVFSLSQAVLHHIYIHAHNTIAIFQEAVHKQTSVAPRHQEYLFEGHLCVLEPSVSAQHIAHTTASSPLTLFSTAIPKGLAFRDPALDVPKFVPKVDLQADYNTAKGVLGAGYQALRLARALLDGQELMFRGLHWVMEVLQATCRRTLEVARTSLLYLSSSLGTERFSSVAGTPEIQELKAAAELRSRLRTLAEVLSRCSQNITETQESLSSLNRELVKSRDQVHEDRSIQQIQCCLDKMNFIYKQFKKSRMRPGLGYNEEQIHKLDKVNFSHLAKRLLQVFQEECVQKYQASLVTHGKRMRVVHETRNHLRLVGCSVAACNTEAQGVQESLSKHARALRGDEAAGI

SEQ ID NO: 40239 - protein, 146 aa, Homo sapiens
  Payload ID: 8196
  Gene Symbol: IKBKE
  Gene Name: inhibitor of kappa light polypeptide gene enhancer in B-cells, kinase epsilon
  ENSP ID: ENSP00000474229
MQSTANYLWHTDDLLGQGATASVYKARNKKSGELVAVKVFNTTSYLRPREVQVREFEVLRKLNHQNIVKLFAVEETGGSRQKVLVMEYCSSGSLLSVLESPENAFGLPEDEFLVVLRCVVAGMNHLRENGIVHRDIKPGNIMRLVG

SEQ ID NO: 40240 - protein, 153 aa, Homo sapiens
  Payload ID: 8196
  Gene Symbol: IKBKE
  Gene Name: inhibitor of kappa light polypeptide gene enhancer in B-cells, kinase epsilon
  ENSP ID: ENSP00000474422
MQSTANYLWHTDDLLGQGATASVYKARNKKSGELVAVKVFNTTSYLRPREVQVREFEVLRKLNHQNIVKLFAVEETGGSRQKVLVMEYCSSGSLLSVLESPENAFGLPEDEFLVVLRCVGEPLPVPASTLRPAAGLGQMLTGLRCLTPANHSI

SEQ ID NO: 40241 - protein, 172 aa, Homo sapiens
  Payload ID: 8197
  Gene Symbol: IKBKG
  Gene Name: inhibitor of kappa light polypeptide gene enhancer in B-cells, kinase gamma
  ENSP ID: ENSP00000390368
MNRHLWKSQLCEMVQPSGGPAADQDVLGEESPLGKPAMLHLPSEQGAPETLQRCLEENQELRDAIRQSNQILRERCEELLHFQASQREEKEFLMCKFQEARKLVERLGLEKLDLKRQKEQALREVEHLKRCQQQMAEDKASVKAQVTSLLGELQESQSRLEAATKECQALEG

SEQ ID NO: 40242 - protein, 250 aa, Homo sapiens
  Payload ID: 8197
  Gene Symbol: IKBKG
  Gene Name: inhibitor of kappa light polypeptide gene enhancer in B-cells, kinase gamma
  ENSP ID: ENSP00000394934
MNRHLWKSQLCEMVQPSGGPAADQDVLGEESPLGKPAMLHLPSEQGAPETLQRCLEENQELRDAIRQSNQILRERCEELLHFQASQREEKEFLMCKFQEARKLVERLGLEKLDLKRQKEQALREVEHLKRCQQQMAEDKASVKAQVTSLLGELQESQSRLEAATKECQALEGRARAASEQARQLESEREALQQQHSVQVDQLRMQGQSVEAALRMERQAASEEKRKLAQLQVAYHQLFQEYDNHIKSSVV

SEQ ID NO: 40243 - protein, 138 aa, Homo sapiens
  Payload ID: 8197
  Gene Symbol: IKBKG
  Gene Name: inhibitor of kappa light polypeptide gene enhancer in B-cells, kinase gamma
  ENSP ID: ENSP00000395205
MNRHLWKSQLCEMVQPSGGPAADQDVLGEESPLGKPAMLHLPSEQGAPETLQRCLEENQELRDAIRQSNQILRERCEELLHFQASQREEKEFLMCKFQEARKLVERLGLEKLDLKRQKEQALREVEHLKRCQQQMAED

SEQ ID NO: 40244 - protein, 195 aa, Homo sapiens
  Payload ID: 8197
  Gene Symbol: IKBKG
  Gene Name: inhibitor of kappa light polypeptide gene enhancer in B-cells, kinase gamma
  ENSP ID: ENSP00000398579
MVQPSGGPAADQDVLGEESPLGKPAMLHLPSEQGAPETLQRCLEENQELRDAIRQSNQILRERCEELLHFQASQREEKEFLMCKFQEARKLVERLGLEKLDLKRQKEQALREVEHLKRCQQQMAEDKASVKAQVTSLLGELQESQSRLEAATKECQALEGRARAASEQARQLESEREALQQQHSVQVDQLRMQGQ

SEQ ID NO: 40245 - protein, 419 aa, Homo sapiens
  Payload ID: 8197
  Gene Symbol: IKBKG
  Gene Name: inhibitor of kappa light polypeptide gene enhancer in B-cells, kinase gamma
  Uniprot ID: Q9Y6K9
  ENSP ID: ENSP00000471166
MNRHLWKSQLCEMVQPSGGPAADQDVLGEESPLGKPAMLHLPSEQGAPETLQRCLEENQELRDAIRQSNQILRERCEELLHFQASQREEKEFLMCKFQEARKLVERLGLEKLDLKRQKEQALREVEHLKRCQQQMAEDKASVKAQVTSLLGELQESQSRLEAATKECQALEGRARAASEQARQLESEREALQQQHSVQVDQLRMQGQSVEAALRMERQAASEEKRKLAQLQVAYHQLFQEYDNHIKSSVVGSERKRGMQLEDLKQQLQQAEEALVAKQEVIDKLKEEAEQHKIVMETVPVLKAQADIYKADFQAERQAREKLAEKKELLQEQLEQLQREYSKLKASCQESARIEDMRKRHVEVSQAPLPPAPAYLSSPLALPSQRRSPPEEPPDFCCPKCQYQAPDMDTLQIHVMECIE

SEQ ID NO: 40246 - protein, 320 aa, Homo sapiens
  Payload ID: 8197
  Gene Symbol: IKBKG
  Gene Name: inhibitor of kappa light polypeptide gene enhancer in B-cells, kinase gamma
  Uniprot ID: Q9Y6K9
  ENSP ID: ENSP00000478616
MNRHLWKSQLCEMVQPSGGPAADQDVLGEESPLGKPAMLHLPSEQGAPETLQRCLEENQELRDAIRQSNQILRERCEELLHFQASQREEKEFLMCKFQEARKLVERLGLEKLDLKRQKEQALREVEHLKRCQQQMAEDKASVKAQVTSLLGELQESQSRLEAATKECQALEGRRKLAQLQVAYHQLFQEYDNHIKSSVVGSERKRADIYKADFQAERQAREKLAEKKELLQEQLEQLQREYSKLKASCQESARIEDMRKRHVEVSQAPLPPAPAYLSSPLALPSQRRSPPEEPPDFCCPKCQYQAPDMDTLQIHVMECIE

SEQ ID NO: 40247 - protein, 412 aa, Homo sapiens
  Payload ID: 8197
  Gene Symbol: IKBKG
  Gene Name: inhibitor of kappa light polypeptide gene enhancer in B-cells, kinase gamma
  ENSP ID: ENSP00000478979
MNRHLWKSQLCEMVQPSGGPAADQDVLGEESPLGKPAMLHLPSEQGAPETLQRCLEENQELRDAIRQSNQILRERCEELLHFQASQREEKEFLMCKFQEARKLVERLGLEKLDLKRQKEQALREVEHLKRCQQQMAEDKASVKAQVTSLLGELQESQSRLEAATKECQALEGRARAASEQARQLESEREALQQQHSVQVDQLRMQGQSVEAALRMERQAASEEKRKLAQLQVAYHQLFQEYDNHIKSSVGMQLEDLKQQLQQAEEALVAKQEVIDKLKEEAEQHKIVMETVPVLKAQADIYKADFQAERQAREKLAEKKELLQEQLEQLQREYSKLKASCQESARIEDMRKRHVEVSQAPLPPAPAYLSSPLALPSQRRSPPEEPPDFCCPKCQYQAPDMDTLQIHVMECIE

SEQ ID NO: 40248 - protein, 115 aa, Homo sapiens
  Payload ID: 8197
  Gene Symbol: IKBKG
  Gene Name: inhibitor of kappa light polypeptide gene enhancer in B-cells, kinase gamma
  ENSP ID: ENSP00000479144
MAEDKASVKAQVTSLLGELQESQSRLEAATKECQALEGRARAASEQARQLESEREALQQQHSVQVDQLRMQGQSVEAALRMERQAASEEKRKLAQLQVAYHQLFQEYDNHIKSSV

SEQ ID NO: 40249 - protein, 419 aa, Homo sapiens; identical to SEQ ID NO: 40245
  Payload ID: 8197
  Gene Symbol: IKBKG
  Gene Name: inhibitor of kappa light polypeptide gene enhancer in B-cells, kinase gamma
  Uniprot ID: Q9Y6K9
  ENSP ID: ENSP00000479662

SEQ ID NO: 40250 - protein, 48 aa, Homo sapiens
  Payload ID: 8197
  Gene Symbol: IKBKG
  Gene Name: inhibitor of kappa light polypeptide gene enhancer in B-cells, kinase gamma
  ENSP ID: ENSP00000480431
MALVIQVGKLRPREVRTPQTINPSLFPSLPVKLSSIIEVPSALALLDE

SEQ ID NO: 40251 - protein, 411 aa, Homo sapiens
  Payload ID: 8197
  Gene Symbol: IKBKG
  Gene Name: inhibitor of kappa light polypeptide gene enhancer in B-cells, kinase gamma
  ENSP ID: ENSP00000483381
MNRHLWKSQLCEMVQPSGGPAADQDVLGEESPLGKPAMLHLPSEQGAPETLQRCLEENQELRDAIRQSNQILRERCEELLHFQASQREEKEFLMCKFQEARKLVERLGLEKLDLKRQKEQALREVEHLKRCQQMAEDKASVKAQVTSLLGELQESQSRLEAATKECQALEGRARAASEQARQLESEREALQQQHSVQVDQLRMQGQSVEAALRMERQAASEEKRKLAQLQVAYHQLFQEYDNHIKSSVGMQLEDLKQQLQQAEEALVAKQEVIDKLKEEAEQHKIVMETVPVLKAQADIYKADFQAERQAREKLAEKKELLQEQLEQLQREYSKLKASCQESARIEDMRKRHVEVSQAPLPPAPAYLSSPLALPSQRRSPPEEPPDFCCPKCQYQAPDMDTLQIHVMECIE

SEQ ID NO: 40252 - protein, 487 aa, Homo sapiens
  Payload ID: 8197
  Gene Symbol: IKBKG
  Gene Name: inhibitor of kappa light polypeptide gene enhancer in B-cells, kinase gamma
  Uniprot ID: Q9Y6K9
  ENSP ID: ENSP00000483825
MALVIQVGKLRPREVRTPQTINPSLFPSLPVKLSSIIEVPSGGERCCSRRTLVYKARAFWKGAPLPCWMNRHLWKSQLCEMVQPSGGPAADQDVLGEESPLGKPAMLHLPSEQGAPETLQRCLEENQELRDAIRQSNQILRERCEELLHFQASQREEKEFLMCKFQEARKLVERLGLEKLDLKRQKEQALREVEHLKRCQQQMAEDKASVKAQVTSLLGELQESQSRLEAATKECQALEGRARAASEQARQLESEREALQQQHSVQVDQLRMQGQSVEAALRMERQAASEEKRKLAQLQVAYHQLFQEYDNHIKSSVVGSERKRGMQLEDLKQQLQQAEEALVAKQEVIDKLKEEAEQHKIVMETVPVLKAQADIYKADFQAERQAREKLAEKKELLQEQLEQLQREYSKLKASCQESARIEDMRKRHVEVSQAPLPPAPAYLSSPLALPSQRRSPPEEPPDFCCPKCQYQAPDMDTLQIHVMECIE

SEQ ID NO: 40253 - protein, 418 aa, Homo sapiens
  Payload ID: 8197
  Gene Symbol: IKBKG
  Gene Name: inhibitor of kappa light polypeptide gene enhancer in B-cells, kinase gamma
  ENSP ID: ENSP00000484023
MNRHLWKSQLCEMVQPSGGPAADQDVLGEESPLGKPAMLHLPSEQGAPETLQRCLEENQELRDAIRQSNQILRERCEELLHFQASQREEKEFLMCKFQEARKLVERLGLEKLDLKRQKEQALREVEHLKRCQQMAEDKASVKAQVTSLLGELQESQSRLEAATKECQALEGRARAASEQARQLESEREALQQQHSVQVDQLRMQGQSVEAALRMERQAASEEKRKLAQLQVAYHQLFQEYDNHIKSSVVGSERKRGMQLEDLKQQLQQAEEALVAKQEVIDKLKEEAEQHKIVMETVPVLKAQADIYKADFQAERQAREKLAEKKELLQEQLEQLQREYSKLKASCQESARIEDMRKRHVEVSQAPLPPAPAYLSSPLALPSQRRSPPEEPPDFCCPKCQYQAPDMDTLQIHVMECIE

SEQ ID NO: 40254 - protein, 181 aa, Homo sapiens
  Payload ID: 8197
  Gene Symbol: IKBKG
  Gene Name: inhibitor of kappa light polypeptide gene enhancer in B-cells, kinase gamma
  ENSP ID: ENSP00000484275
ENQELRDAIRQSNQILRERCEELLHFQASQREEKEFLMCKFQEARKLVERLGLEKLDLKRQKEQALREVEHLKRCQQERTQVTVSEGSGRTGRAPGETRRELQRLLAQGSCADGTCFFRQQCGTASTESQPGSSPQPWRPGFSRGVGRVGTERLRGQPWSLGCSHQRSSCVAQGSPHKSCH

SEQ ID NO: 40255 - protein, 141 aa, Homo sapiens
  Payload ID: 8198
  Gene Symbol: INMT-FAM188B
  Gene Name: INMT-FAM188B readthrough (NMD candidate)
  ENSP ID: ENSP00000456039
MKGGFTGGDEYQKHFLPRDYLATYYSFDGSPSPEAEMLKFNLECLHKTFGPGLQGDTLIDIGSGPTIYQVLAACDSFQDITLSDFTDRNREELEKWLKKEPGAYDWTPAVKFACELEGNRDMELINNTTLVNSRHPAITGP

SEQ ID NO: 40256 - protein, 122 aa, Homo sapiens
  Payload ID: 8198
  Gene Symbol: INMT-FAM188B
  Gene Name: INMT-FAM188B readthrough (NMD candidate)
  ENSP ID: ENSP00000456833
  MOD_RES (1)..(1): Any amino acid
XKGGFTGGDEYQKHFLPRDYLATYYSFDGSPSPEAEMLKFNLECLHKTFGPGGLQGDTLIDIGSGPTIYQVLAACDSFQDITLSDFTDRNREELEKWLKKEPGAYDWTPAVKFACELEGNRA

SEQ ID NO: 40257 - protein, 914 aa, Homo sapiens
  Payload ID: 8199
  Gene Symbol: INCENP
  Gene Name: inner centromere protein antigens 135/155kDa
  Uniprot ID: Q9NQS7
  ENSP ID: ENSP00000278849
MGTTAPGPIHLLELCDQKLMEFLCNMDNKDLVWLEEIQEEAERMFTREFSKEPELMPKTPSQKNRRKKRRISYVQDENRDPIRRRLSRRKSRSSQLSSRRLRSKDSVEKLATVVGENGSVLRRVTRAAAAAAAATMALAAPSSPTPESPTMLTKKPEDNHTQCQLVPVVEIGISERQNAEQHVTQLMSTEPLPRTLSPTPASATAPTSQGIPTSDEESTPKKSKARILESITVSSLMATPQDPKGQGVGTGRSASKLRIAQVSPGPRDSPAFPDSPWRERVLAPILPDNFSTPTGSRTDSQSVRHSPIAPSSPSPQVLAQKYSLVAKQESVVRRASRRLAKKTAEEPAASGRIICHSYLERLLNVEVPQKVGSEQKEPPEEAEPVAAAEPEVPENNGNNSWPHNDTEIANSTPNPKPAASSPETPSAGQQEAKTDQADGPREPPQSARRKRSYKQAVSELDEEQHLEDEELQPPRSKTPSSPCPASKVVRPLRTFLHTVQRNQMLMTPTSAPRSVMKSFIKRNTPLRMDPKEKERQRLENLRRKEEAEQLRRQKVEEDKRRRLEEVKLKREERLRKVLQARERVEQMKEEKKKQIEQKFAQIDEKTEKAKEERLAEEKAKKKAAAKKMEEVEARRKQEEEARRLRWLQQEEEERRHQELLQKKKEEEQERLRKAAEAKRLAEQREQERREQERREQERREQERREQERREQERQLAEQERRREQERLQAERELQEREKALRLQKEQLQRELEEKKKKEEQQRLAERQLQEEQEKKAKEAAGASKALNVTVDVQSPACTSYQMTPQGHRAPPKINPDNYGMDLNSDDSTDDEAHPRKPIPTWARGTPLSQAIIHQYYHPPNLLELFGTILPLDLEDIFKKSKPRYHKRTSSAVWNSPPLQGARVPSSLAYSLKKH

SEQ ID NO: 40258 - protein, 918 aa, Homo sapiens
  Payload ID: 8199
  Gene Symbol: INCENP
  Gene Name: inner centromere protein antigens 135/155kDa
  Uniprot ID: Q9NQS7
  ENSP ID: ENSP00000378295
MGTTAPGPIHLLELCDQKLMEFLCNMDNKDLVWLEEIQEEAERMFTREFSKEPELMPKTPSQKNRRKKRRISYVQDENRDPIRRRLSRRKSRSSQLSSRRLRSKDSVEKLATVVGENGSVLRRVTRAAAAAAAATMALAAPSSPTPESPTMLTKKPEDNHTQCQLVPVVEIGISERQNAEQHVTQLMSTEPLPRTLSPTPASATAPTSQGIPTSDEESTPKKSKARILESITVSSLMATPQDPKGQGVGTGRSASKLRIAQVSPGPRDSPAFPDSPWRERVLAPILPDNFSTPTGSRTDSQSVRHSPIAPSSPSPQVLAQKYSLVAKQESVVRRASRRLAKKTAEEPAASGRIICHSYLERLLNVEVPQKVGSEQKEPPEEAEPVAAAEPEVPENNGNNSWPHNDTEIANSTPNPKPAASSPETPSAGQQEAKTDQADGPREPPQSARRKRSYKQAVSELDEEQHLEDEELQPPRSKTPSSPCPASKVVRPLRTFLHTVQRNQMLMTPTSAPRSVMKSFIKRNTPLRMDPKCSFVEKERQRLENLRRKEEAEQLRRQKVEEDKRRRLEEVKLKREERLRKVLQARERVEQMKEEKKKQIEQKFAQIDEKTEKAKEERLAEEKAKKKAAAKKMEEVEARRKQEEEARRLRWLQQEEEERRHQELLQKKKEEEQERLRKAAEAKRLAEQREQERREQERREQERREQERREQERREQERQLAEQERRREQERLQAERELQEREKALRLQKEQLQRELEEKKKKEEQQRLAERQLQEEQEKKAKEAAGASKALNVTVDVQSPACTSYQMTPQGHRAPPKINPDNYGMDLNSDDSTDDEAHPRKPIPTWARGTPLSQAIIHQYYHPPNLLELFGTILPLDLEDIFKKSKPRYHKRTSSAVWNSPPLQGARVPSSLAYSLKKH

SEQ ID NO: 40259 - protein, 167 aa, Homo sapiens
  Payload ID: 8199
  Gene Symbol: INCENP
  Gene Name: inner centromere protein antigens 135/155kDa
  ENSP ID: ENSP00000433100
MGTTAPGPIHLLELCDQKLMEFLCNMDNKDLVWLEEIQEEAERMFTREFSKEPELMPKTPSQKNRRKKRRISYVQDENRDPIRRRLSRRKSRSSQLSSRRLRSKDSVEKLATVVGENGSVLRRVTRAAAAAAAATMALAAPSSPTPESPTMLTKKPEDNHTQCQLVP

SEQ ID NO: 40260 - protein, 659 aa, Homo sapiens
  Payload ID: 8200
  Gene Symbol: IMMT
  Gene Name: inner membrane protein, mitochondrial
  ENSP ID: ENSP00000254636
MVLGPAAYNVPLPKKSIQSGPLKISSVSEVMKESKQPASQLQKQKGDTPASATAGDTLSVPAPAVQPEESLKTDHPEIGEGKPTPALSEASSSSIRERPPEEVAARLAQQEKQEQVKIESLAKSLEDALRQTASVTLQAIAAQNAAVQAVNAHSNILKAAMDNSEIAGEKKSAQWRTVEGALKERRKAVDEAADALLKAKEELEKMKSVIENAKKKEVAGAKPHITAAEGKLHNMIVDLDNVVKKVQAAQSEAKVVSQYHELVVQARDDFKRELDSITPEVLPGWKGMSVSDLADKLSTDDLNSLIAHAHRRIDQLNRELAEQKATEKQHITLALEKQKLEEKRAFDSAVAKALEHHRSEIQAEQDRKIEEVRDAMENEMRTQLRRQAAAHTDHLRDVLRVQEQELKSEFEQNLSEKLSEQELQFRRLSQEQVDNFTLDINTAYARLRGIEQAVQSHAVAEEEARKAHQLWLSVEALKYSMKTSSAETPTIPLGSAVEAIKANCSDNEFTQALTAAIPPESLTRGVYSEETLRARFYAVQKLARRVAMIDETRNSLYQYFLSYLQSLLLFPPQQLKPPPELCPEDINTFKLLSYASYCIEHGDLELAAKFVNQLKGESRRVAQDWLKEARMTLETKQIVEILTAYASAVGIGTTQVQPE

SEQ ID NO: 40261 - protein, 711 aa, Homo sapiens
  Payload ID: 8200
  Gene Symbol: IMMT
  Gene Name: inner membrane protein, mitochondrial
  ENSP ID: ENSP00000387227
MLRACQLSGVTAAAQSCLCGKFVLRPLRPCRRYSTSGSSGLTTGKIAGAGLLFVGGGIGGTILYAKWDSHFRESVEKTIPYSDKLFEMVLGPAAYNVPLPKKSIQSGPLKISSVSEVMKESKQPASQLQKQKGDTPASATEASSSSIRERPPEEVAARLAQQEKQEQVKIESLAKSLEDALRQTASVTLQAIAAQNAAVQAVNAHSNILKAAMDNSEIAGEKKSAQWRTVEGALKERRKAVDEAADALLKAKEELEKMKSVIENAKKKEVAGAKPHITAAEGKLHNMIVDLDNVVKKVQAAQSEAKVVSQYHELVVQARDDFKRELDSITPEVLPGWKGMSVSDLADKLSTDDLNSLIAHAHRRIDQLNRELAEQKATEKQHITLALEKQKLEEKRAFDSAVAKALEHHRSEIQAEQDRKIEEVRDAMENEMRTQLRRQAAAHTDHLRDVLRVQEQELKSEFEQNLSEKLSEQELQFRRLSQEQVDNFTLDINTAYARLRGIEQAVQSHAVAEEEARKAHQLWLSVEALKYSMKTSSAETPTIPLGSAVEAIKANCSDNEFTQALTAAIPPESLTRGVYSEETLRARFYAVQKLARRVAMIDETRNSLYQYFLSYLQSLLLFPPQQLKPPPELCPEDINTFKLLSYASYCIEHGDLELAAKFVNQLKGESRRVAQDWLKEARMTLETKQIVEILTAYASAVGIGTTQVQPE

SEQ ID NO: 40262 - protein, 147 aa, Homo sapiens
  Payload ID: 8200
  Gene Symbol: IMMT
  Gene Name: inner membrane protein, mitochondrial
  ENSP ID: ENSP00000387237
MLRACQLSGVTAAAQSCLCGKFVLRPLRPCRRYSTSGSSGLTTGKIAGAGLLFVGGGIGGTILYAKWDSHFRESVEKTIPYSDKLFEMVLGPAAYNVPLPKKSIQSGPLKISSVSEVMKESKQPASQLQKQKGDTPASATGKYKYHE

SEQ ID NO: 40263 - protein, 758 aa, Homo sapiens
  Payload ID: 8200
  Gene Symbol: IMMT
  Gene Name: inner membrane protein, mitochondrial
  Uniprot ID: Q16891
  ENSP ID: ENSP00000387262
MLRACQLSGVTAAAQSCLCGKFVLRPLRPCRRYSTSGSSGLTTGKIAGAGLLFVGGGIGGTILYAKWDSHFRESVEKTIPYSDKLFEMVLGPAAYNVPLPKKSIQSGPLKISSVSEVMKESKQPASQLQKQKGDTPASATAPTEAAQIISAAGDTLSVPAPAVQPEESLKTDHPEIGEGKPTPALSEEASSSSIRERPPEEVAARLAQQEKQEQVKIESLAKSLEDALRQTASVTLQAIAAQNAAVQAVNAHSNILKAAMDNSEIAGEKKSAQWRTVEGALKERRKAVDEAADALLKAKEELEKMKSVIENAKKKEVAGAKPHITAAEGKLHNMIVDLDNVVKKVQAAQSEAKVVSQYHELVVQARDDFKRELDSITPEVLPGWKGMSVSDLADKLSTDDLNSLIAHAHRRIDQLNRELAEQKATEKQHITLALEKQKLEEKRAFDSAVAKALEHHRSEIQAEQDRKIEEVRDAMENEMRTQLRRQAAAHTDHLRDVLRVQEQELKSEFEQNLSEKLSEQELQFRRLSQEQVDNFTLDINTAYARLRGIEQAVQSHAVAEEEARKAHQLWLSVEALKYSMKTSSAETPTIPLGSAVEAIKANCSDNEFTQALTAAIPPESLTRGVYSEETLRARFYAVQKLARRVAMIDETRNSLYQYFLSYLQSLLLFPPQQLKPPPELCPEDINTFKLLSYASYCIEHGDLELAAKFVNQLKGESRRVAQDWLKEARMTLETKQIVEILTAYASAVGIGTTQVQPE

SEQ ID NO: 40264 - protein, 747 aa, Homo sapiens
  Payload ID: 8200
  Gene Symbol: IMMT
  Gene Name: inner membrane protein, mitochondrial
  Uniprot ID: Q16891
  ENSP ID: ENSP00000396899
MLRACQLSGVTAAAQSCLCGKFVLRPLRPCRRYSTSGSSGLTTGKIAGAGLLFVGGGIGGTILYAKWDSHFRESVEKTIPYSDKLFEMVLGPAAYNVPLPKKSIQSGPLKISSVSEVMKESKQPASQLQKQKGDTPASATAGDTLSVPAPAVQPEESLKTDHPEIGEGKPTPALSEEASSSSIRERPPEEVAARLAQQEKQEQVKIESLAKSLEDALRQTASVTLQAIAAQNAAVQAVNAHSNILKAAMDNSEIAGEKKSAQWRTVEGALKERRKAVDEAADALLKAKEELEKMKSVIENAKKKEVAGAKPHITAAEGKLHNMIVDLDNVVKKVQAAQSEAKVVSQYHELVVQARDDFKRELDSITPEVLPGWKGMSVSDLADKLSTDDLNSLIAHAHRRIDQLNRELAEQKATEKQHITLALEKQKLEEKRAFDSAVAKALEHHRSEIQAEQDRKIEEVRDAMENEMRTQLRRQAAAHTDHLRDVLRVQEQELKSEFEQNLSEKLSEQELQFRRLSQEQVDNFTLDINTAYARLRGIEQAVQSHAVAEEEARKAHQLWLSVEALKYSMKTSSAETPTIPLGSAVEAIKANCSDNEFTQALTAAIPPESLTRGVYSEETLRARFYAVQKLARRVAMIDETRNSLYQYFLSYLQSLLLFPPQQLKPPPELCPEDINTFKLLSYASYCIEHGDLELAAKFVNQLKGESRRVAQDWLKEARMTLETKQIVEILTAYASAVGIGTTQVQPE

SEQ ID NO: 40265 - protein, 757 aa, Homo sapiens
  Payload ID: 8200
  Gene Symbol: IMMT
  Gene Name: inner membrane protein, mitochondrial
  Uniprot ID: Q16891
  ENSP ID: ENSP00000407788
MLRACQLSGVTAAAQSCLCGKFVLRPLRPCRRYSTSGSSGLTTGKIAGAGLLFVGGGIGGTILYAKWDSHFRESVEKTIPYSDKLFEMVLGPAAYNVPLPKKSIQSGPLKISSVSEVMKESKQPASQLQKQKGDTPASATAPTEAAQIISAAGDTLSVPAPAVQPEESLKTDHPEIGEGKPTPALSEASSSSIRERPPEEVAARLAQQEKQEQVKIESLAKSLEDALRQTASVTLQAIAAQNAAVQAVNAHSNILKAAMDNSEIAGEKKSAQWRTVEGALKERRKAVDEAADALLKAKEELEKMKSVIENAKKKEVAGAKPHITAAEGKLHNMIVDLDNVVKKVQAAQSEAKVVSQYHELVVQARDDFKRELDSITPEVLPGWKGMSVSDLADKLSTDDLNSLIAHAHRRIDQLNRELAEQKATEKQHITLALEKQKLEEKRAFDSAVAKALEHHRSEIQAEQDRKIEEVRDAMENEMRTQLRRQAAAHTDHLRDVLRVQEQELKSEFEQNLSEKLSEQELQFRRLSQEQVDNFTLDINTAYARLRGIEQAVQSHAVAEEEARKAHQLWLSVEALKYSMKTSSAETPTIPLGSAVEAIKANCSDNEFTQALTAAIPPESLTRGVYSEETLRARFYAVQKLARRVAMIDETRNSLYQYFLSYLQSLLLFPPQQLKPPPELCPEDINTFKLLSYASYCIEHGDLELAAKFVNQLKGESRRVAQDWLKEARMTLETKQIVEILTAYASAVGIGTTQVQPE

SEQ ID NO: 40266 - protein, 613 aa, Homo sapiens
  Payload ID: 8200
  Gene Symbol: IMMT
  Gene Name: inner membrane protein, mitochondrial
  ENSP ID: ENSP00000415762
  MOD_RES (1)..(1): Any amino acid
XIQSGPLKISSVSEVMKESKQPASQLQKQKGDTPASATAGDTLSVPAPAVQPEESLKTDHPEIGEGKPTPALSALAKSLEDALRQTASVTLQAIAAQNAAVQAVNAHSNILKAAMDNSEIAGEKKSAQWRTVEGALKERRKAVDEAADALLKAKEELEKMKSVIENAKKKEVAGAKPHITAAEGKLHNMIVDLDNVVKKVQAAQSEAKVVSQYHELVVQARDDFKRELDSITPEVLPGWKGMSVSDLADKLSTDDLNSLIAHAHRRIDQLNRELAEQKATEKQHITLALEKQKLEEKRAFDSAVAKALEHHRSEIQAEQDRKIEEVRDAMENEMRTQLRRQAAAHTDHLRDVLRVQEQELKSEFEQNLSEKLSEQELQFRRLSQEQVDNFTLDINTAYARLRGIEQAVQSHAVAEEEARKAHQLWLSVEALKYSMKTSSAETPTIPLGSAVEAIKANCSDNEFTQALTAAIPPESLTRGVYSEETLRARFYAVQKLARRVAMIDETRNSLYQYFLSYLQSLLLFPPQQLKPPPELCPEDINTFKLLSYASYCIEHGDLELAAKFVNQLKGESRRVAQDWLKEARMTLETKQIVEILTAYASAVGIGTTQVQPE

SEQ ID NO: 40267 - protein, 372 aa, Homo sapiens
  Payload ID: 8200
  Gene Symbol: IMMT
  Gene Name: inner membrane protein, mitochondrial
  ENSP ID: ENSP00000482042
MLRACQLSGVTAAAQSCLCGKFVLRPLRPCRRYSTSGSSGLTTGKIAGAGLLFVGGGIGGTILYAKWDSHFRESVEKTIPYSDKLFEMVLGPAAYNVPLPKKSIQSGPLKISSVSEVMKESKQPASQLQKQKGDTPASATAGDTLSVPAPAVQPEESLKTDHPEIGEGKPTPALSEASSSSIRERPPEEVAARLAQQEKQEQVKIESLAKSLEDALRQTASVTLQAIAAIPPESLTRGVYSEETLRARFYAVQKLARRVAMIDETRNSLYQYFLSYLQSLLLFPPQQLKPPPELCPEDINTFKLLSYASYCIEHGDLELAAKFVNQLKGESRRVAQDWLKEARMTLETKQIVEILTAYASAVGIGTTQVQPE

SEQ ID NO: 40268 - protein, 166 aa, Homo sapiens
  Payload ID: 8201
  Gene Symbol: IMMP1L
  Gene Name: inner mitochondrial membrane peptidase subunit 1
  Uniprot ID: Q96LU5
  ENSP ID: ENSP00000278200
MLRGVLGKTFRLVGYTIQYGCIAHCAFEYVGGVVMCSGPSMEPTIQNSDIVFAENLSRHFYGIQRGDIVIAKSPSDPKSNICKRVIGLEGDKILTTSPSDFFKSHSYVPMGHVWLEGDNLQNSTDSRCYGPIPYGLIRGRIFFKIWPLSDFGFLRASPNGHRFSDD

SEQ ID NO: 40269 - protein, 107 aa, Homo sapiens
  Payload ID: 8201
  Gene Symbol: IMMP1L
  Gene Name: inner mitochondrial membrane peptidase subunit 1
  ENSP ID: ENSP00000432001
MLRGVLGKTFRLVGYTIQYGCIAHCAFEYVGGVVMCSGPSMEPTIQNSDIVFAENLSRHFYGIQRGDIVIAKSPSDPKSNICKRVIGLEGDKILTTSPSDFFKSHSY

SEQ ID NO: 40270 - protein, 57 aa, Homo sapiens
  Payload ID: 8201
  Gene Symbol: IMMP1L
  Gene Name: inner mitochondrial membrane peptidase subunit 1
  ENSP ID: ENSP00000432471
MGHVWLEGDNLQNSTDSRCYGPIPYGLIRGRIFFKIWPLSDFGFLRASPNGHRFSDD

SEQ ID NO: 40271 - protein, 30 aa, Homo sapiens
  Payload ID: 8201
  Gene Symbol: IMMP1L
  Gene Name: inner mitochondrial membrane peptidase subunit 1
  ENSP ID: ENSP00000432670
  MOD_RES (1)..(1): Any amino acid
XCKRVIGLEGDKILTTSPSDFFKSHSYHFR

SEQ ID NO: 40272 - protein, 57 aa, Homo sapiens; identical to SEQ ID NO: 40270
  Payload ID: 8201
  Gene Symbol: IMMP1L
  Gene Name: inner mitochondrial membrane peptidase subunit 1
  ENSP ID: ENSP00000432673

SEQ ID NO: 40273 - protein, 96 aa, Homo sapiens
  Payload ID: 8201
  Gene Symbol: IMMP1L
  Gene Name: inner mitochondrial membrane peptidase subunit 1
  ENSP ID: ENSP00000432792
MLRGVLGKTFRLVGYTIQYGCIAHCAFEYVGGVVMCSGPSMEPTIQNSDIVFAENLSRHFYGIQRGDIVIAKSPSDPKSNICKRVIGLEGDKILTT

SEQ ID NO: 40274 - protein, 94 aa, Homo sapiens
  Payload ID: 8201
  Gene Symbol: IMMP1L
  Gene Name: inner mitochondrial membrane peptidase subunit 1
  ENSP ID: ENSP00000434280
MLRGVLGKTFRLVGYTIQYGCIAHCAFEYVGGVVMVPMGHVWLEGDNLQNSTDSRCYGPIPYGLIRGRIFFKIWPLSDFGFLRASPNGHRFSDD

SEQ ID NO: 40275 - protein, 166 aa, Homo sapiens; identical to SEQ ID NO: 40268
  Payload ID: 8201
  Gene Symbol: IMMP1L
  Gene Name: inner mitochondrial membrane peptidase subunit 1
  Uniprot ID: Q96LU5
  ENSP ID: ENSP00000435576

SEQ ID NO: 40276 - protein, 175 aa, Homo sapiens
  Payload ID: 8202
  Gene Symbol: IMMP2L
  Gene Name: inner mitochondrial membrane peptidase subunit 2
  Uniprot ID: Q96T52
  ENSP ID: ENSP00000329553
MAQSQGWVKRYIKAFCKGFFVAVPVAVTFLDRVACVARVEGASMQPSLNPGGSQSSDVVLLNHWKVRNFEVHRGDIVSLVSPKNPEQKIIKRVIALEGDIVRTIGHKNRYVKVPRGHIWVEGDHHGHSFDSNSFGPVSLGLLHAHATHILWPPERWQKLESVLPPERLPVQREEE

SEQ ID NO: 40277 - protein, 175 aa, Homo sapiens; identical to SEQ ID NO: 40276
  Payload ID: 8202
  Gene Symbol: IMMP2L
  Gene Name: inner mitochondrial membrane peptidase subunit 2
  Uniprot ID: Q96T52
  ENSP ID: ENSP00000384966

SEQ ID NO: 40278 - protein, 110 aa, Homo sapiens
  Payload ID: 8202
  Gene Symbol: IMMP2L
  Gene Name: inner mitochondrial membrane peptidase subunit 2
  Uniprot ID: Q96T52
  ENSP ID: ENSP00000388327
MAQSQGWVKRYIKAFCKGFFVAVPVAVTFLDRVACVARVEGASMQPSLNPGGSQSSDVVLLNHWKVRNFEVHRGDIVSLVSPKNPEQKIIKRVIALEGDIVRDGRKLKRI

SEQ ID NO: 40279 - protein, 80 aa, Homo sapiens
  Payload ID: 8202
  Gene Symbol: IMMP2L
  Gene Name: inner mitochondrial membrane peptidase subunit 2
  ENSP ID: ENSP00000394387
MAQSQGWVKRYIKAFCKGFFVAVPVAVTFLDRVACVARVEGASMQPSLNPGGSQSSDVVLLNHWKVRNFEVHRGDIVSLV

SEQ ID NO: 40280 - protein, 175 aa, Homo sapiens; identical to SEQ ID NO: 40276
  Payload ID: 8202
  Gene Symbol: IMMP2L
  Gene Name: inner mitochondrial membrane peptidase subunit 2
  Uniprot ID: Q96T52
  ENSP ID: ENSP00000399353

SEQ ID NO: 40281 - protein, 157 aa, Homo sapiens
  Payload ID: 8202
  Gene Symbol: IMMP2L
  Gene Name: inner mitochondrial membrane peptidase subunit 2
  ENSP ID: ENSP00000402824
MVGEDIEARRHFLNLCCQPRRVSLRLKKCISEVKDKAGSAQCHPLEQRAGIPSGEWRQLKERSPKNPEQKIIKRVIALEGDIVRTIGHKNRYVKVPRGHIWVEGDHHGHSFDSNSFGPVSLGLLHAHATHILWPPERWQKLESVLPPERLPVQREEE

SEQ ID NO: 40282 - protein, 79 aa, Homo sapiens
  Payload ID: 8202
  Gene Symbol: IMMP2L
  Gene Name: inner mitochondrial membrane peptidase subunit 2
  ENSP ID: ENSP00000407402
MAQSQGWVKRYIKAFCKGFFVAVPVAVTFLDRVACVARVEGASMQPSLNPGGSQSSDVVLLNHWKVRNFEVHRGDIVSL

SEQ ID NO: 40283 - protein, 1556 aa, Homo sapiens
  Payload ID: 8203
  Gene Symbol: INO80
  Gene Name: INO80 complex subunit
  Uniprot ID: Q9ULG1
  ENSP ID: ENSP00000355205
MASELGARDDGGCTELAKPLYLQYLERALRLDHFLRQTSAIFNRNISSDDSEDGLDDSNPLLPQSGDPLIQVKEEPPNSLLGETSGAGSSGMLNTYSLNGVLQSESKCDKGNLYNFSKLKKSRKWLKSILLSDESSEADSQSEDDDEEELNLSREELHNMLRLHKYKKLHQNKYSKDKELQQYQYYSAGLLSTYDPFYEQQRHLLGPKKKKFKEEKKLKAKLKKVKKKRRRDEELSSEESPRRHHHQTKVFAKFSHDAPPPGTKKKHLSIEQLNARRRKVWLSIVKKELPKANKQKASARNLFLTNSRKLAHQCMKEVRRAALQAQKNCKETLPRARRLTKEMLLYWKKYEKVEKEHRKRAEKEALEQRKLDEEMREAKRQQRKLNFLITQTELYAHFMSRKRDMGHDGIQEEILRKLEDSSTQRQIDIGGGVVVNITQEDYDSNHFKAQALKNAENAYHIHQARTRSFDEDAKESRAAALRAANKSGTGFGESYSLANPSIRAGEDIPQPTIFNGKLKGYQLKGMNWLANLYEQGINGILADEMGLGKTVQSIALLAHLAERENIWGPFLIISPASTLNNWHQEFTRFVPKFKVLPYWGNPHDRKVIRRFWSQKTLYTQDAPFHVVITSYQLVVQDVKYFQRVKWQYMVLDEAQALKSSSSVRWKILLQFQCRNRLLLTGTPIQNTMAELWALLHFIMPTLFDSHEEFNEWFSKDIESHAENKSAIDENQLSRLHMILKPFMLRRIKKDVENELSDKIEILMYCQLTSRQKLLYQALKNKISIEDLLQSSMGSTQQAQNTTSSLMNLVMQFRKVCNHPELFERQETWSPFHISLKPYHISKFIYRHGQIRVFNHSRDRWLRVLSPFAPDYIQRSLFHRKGINEESCFSFLRFIDISPAEMANLMLQGLLARWLALFLSLKASYRLHQLRSWGAPEGESHQRYLRNKDFLLGVNFPLSFPNLCSCPLLKSLVFSSHCKAVSGYSDQVVHQRRSATSSLRRCLLTELPSFLCVASPRVTAVPLDSYCNDRSAEYERRVLKEGGSLAAKQCLLNGAPELAADWLNRRSQFFPEPAGGLWSIRPQNGWSFIRIPGKESLITDSGKLYALDVLLTRLKSQGHRVLIYSQMTRMIDLLEEYMVYRKHTYMRLDGSSKISERRDMVADFQNRNDIFVFLLSTRAGGLGINLTAADTVIFYDSDWNPTVDQQAMDRAHRLGQTKQVTVYRLICKGTIEERILQRAKEKSEIQRMVISGGNFKPDTLKPKEVVSLLLDDEELEKKLRLRQEEKRQQEETNRVKERKRKREKYAEKKKKEDELDGKRRKEGVNLVIPFVPSADNSNLSADGDDSFISVDSAMPSPFSEISISSELHTGSIPLDESSSDMLVIVDDPASSAPQSRATNSPASITGSVSDTVNGISIQEMPAAGRGHSARSRGRPKGSGSTAKGAGKGRSRKSTAGSAAAMAGAKAGAAAASAAAYAAYGYNVSKGISASSPLQTSLVRPAGLADFGPSSASSPLSSPLSKGNNVPGNPKNLHMTSSLAPDSLVRKQGKGTNPSGGR

SEQ ID NO: 40284 - protein, 1556 aa, Homo sapiens; identical to SEQ ID NO: 40283
  Payload ID: 8203
  Gene Symbol: INO80
  Gene Name: INO80 complex subunit
  Uniprot ID: Q9ULG1
  ENSP ID: ENSP00000384686

SEQ ID NO: 40285 - protein, 27 aa, Homo sapiens
  Payload ID: 8203
  Gene Symbol: INO80
  Gene Name: INO80 complex subunit
  ENSP ID: ENSP00000452806
  MOD_RES (1)..(1): Any amino acid
XRVCDTHPTWEMFALTHDLLGYCHVKS

SEQ ID NO: 40286 - protein, 1104 aa, Homo sapiens
  Payload ID: 8203
  Gene Symbol: INO80
  Gene Name: INO80 complex subunit
  ENSP ID: ENSP00000453677
MASELGARDDGGCTELAKPLYLQYLERALRLDHFLRQTSAIFNRNISSDDSEDGLDDSNPLLPQSGDPLIQVKEEPPNSLLGETSGAGSSGMLNTYSLNGVLQSESKCDKGNLYNFSKLKKSRKWLKSILLSDESSEADSQSEDDDEEELNLSREELHNMLRLHKYKKLHQNKYSKDKELQQYQYYSAGLLSTYDPFYEQQRHLLGPKKKKFKEEKKLKAKLKKVKKKRRRDEELSSEESPRRHHHQTKVFAKFSHDAPPPGTKKKHLSIEQLNARRRKVWLSIVKKELPKANKQKASARNLFLTNSRKLAHQCMKEVRRAALQAQKNCKETLPRARRLTKEMLLYWKKYEKVEKEHRKRAEKEALEQRKLDEEMREAKRQQRKLNFLITQTELYAHFMSRKRDMGHDGIQEEILRKLEDSSTQRQIDIGGGVVVNITQEDYDSNHFKAQALKNAENAYHIHQARTRSFDEDAKESRAAALRAANKSGTGFGESYSLANPSIRAGEDIPQPTIFNGKLKGYQLKGMNWLANLYEQGINGILADEMGLGKTVQSIALLAHLAERENIWGPFLIISPASTLNNWHQEFTRFVPKFKVLPYWGNPHDRKVIRRFWSQKTLYTQDAPFHVVITSYQLVVQDVKYFQRVKWQYMVLDEAQALKSSSSVRWKILLQFQCRNRLLLTGTPIQNTMAELWALLHFIMPTLFDSHEEFNEWFSKDIESHAENKSAIDENQLSRLHMILKPFMLRRIKKDVENELSDKIEILMYCQLTSRQKLLYQALKNKISIEDLLQSSMGSTQQAQNTTSSLMNLVMQFRKVCNHPELFERQETWSPFHISLKPYHISKFIYRHGQIRVFNHSRDRWLRVLSPFAPDYIQRSLFHRKGINEESCFSFLRFIDISPAEMANLMLQGLLARWLALFLSLKASYRLHQLRSWGAPEGESHQRYLRNKDFLLGVNFPLSFPNLCSCPLLKSLVFSSHCKAVSGYSDQVVHQRRSATSSLRRCLLTELPSFLCVASPRVTAVPLDSYCNDRSAEYERRVLKEGGSLAAKQCLLNGAPELAADWLNRRSQFFPEPAGGLWSIRPQNGWSFIRIPGIHGLQEAYLHEA

SEQ ID NO: 40287 - protein, 79 aa, Homo sapiens
  Payload ID: 8203
  Gene Symbol: INO80
  Gene Name: INO80 complex subunit
  ENSP ID: ENSP00000454057
  MOD_RES (1)..(1): Any amino acid
XTLNNWHQEFTRFVPKFKVLPYWGNPHDRKVIRRFWSQCSLEDPLTVPVSESAFANRDPNSEHHGRALGSAAFHYANII

SEQ ID NO: 40288 - protein, 192 aa, Homo sapiens
  Payload ID: 8203
  Gene Symbol: INO80
  Gene Name: INO80 complex subunit
  ENSP ID: ENSP00000483661
MDRAHRLGQTKQVTVYRLICKGTIEERILQRAKEKSEIQRMVISGGNFKPDTLKPKEVVSLLLDDEELEKKLRLRQEEKRQQEETNRVKERKRKREKYAEKKKKEDELDGKRRKEGVNLVIPFVPSADNSNLSADGDDSFISVDSAMPSPFSEISISSELHTGSIPLDESSSLAPDSLVRKQGKGTNPSGGR

SEQ ID NO: 40289 - protein, 356 aa, Homo sapiens
  Payload ID: 8204
  Gene Symbol: INO80B
  Gene Name: INO80 complex subunit B
  Uniprot ID: Q9C086
  ENSP ID: ENSP00000233331
MSKLWRRGSTSGAMEAPEPGEALELSLAGAHGHGVHKKKHKKHKKKHKKKHHQEEDAGPTQPSPAKPQLKLKIKLGGQVLGTKSVPTFTVIPEGPRSPSPLMVVDNEEEPMEGVPLEQYRAWLDEDSNLSPSPLRDLSGGLGGQEEEEEQRWLDALEKGELDDNGDLKKEINERLLTARQRALLQKARSQPSPMLPLPVAEGCPPPALTEEMLLKREERARKRRLQAARRAEEHKNQTIERLTKTAATSGRGGRGGARGERRGGRAAAPAPMVRYCSGAQGSTLSFPPGVPAPTAVSQRPSPSGPPPRCSVPGCPHPRRYACSRTGQALCSLQCYRINLQMRLGGPEGPGSPLLAT

SEQ ID NO: 40290 - protein, 207 aa, Homo sapiens
  Payload ID: 8204
  Gene Symbol: INO80B
  Gene Name: INO80 complex subunit B
  ENSP ID: ENSP00000386937
MSKLWRRGSTSGAMEAPEPGFPSTGEALELSLAGAHGHGVHKKKHKKHKKKHKKKHHQEEDAGPTQPSPAKPQLKLKIKLGGQVLGTKSVPTFTVIPEGPRSPSPLMVVDNEEEPMEGVPLEQYRAWLDEDSNLSPSPLRDLSGGLGGQEEEEEQRWLDALEKGELDDNGDLKKEINERLLTARQRALLQKARSQPSPMLPLPVAEG

SEQ ID NO: 40291 - protein, 184 aa, Homo sapiens
  Payload ID: 8204
  Gene Symbol: INO80B
  Gene Name: INO80 complex subunit B
  ENSP ID: ENSP00000387267
MSKLWRRGSTSGAMEAPEPGEALELSLAGAHGHGVHKKKHKKHKKKHKKKHHQEEDAGPTQPSPAKPQLKLKIKLGGQVLGTKSVPTFTVIPEGPRSPSPLMVVDNEEEPMEGVPLEQYRAWLDEDSNLSPSPLRDLSGGLGGQEEEEEQRWLDALEKGELDDNGDLKKEINERLLTARQRRCC

SEQ ID NO: 40292 - protein, 176 aa, Homo sapiens
  Payload ID: 8204
  Gene Symbol: INO80B
  Gene Name: INO80 complex subunit B
  ENSP ID: ENSP00000389887
MSKLWRRGSTSGAMEAPEPGEALELSLAGAHGHGVHKKKHKKHKKKHKKKHHQEEDAGPTQPSPAKPQLKLKIKLGGQVLGTKSVPTFTVIPEGPRSPSPLMVVDNEEEPMEGVPLEQYRAWLGGLGGQEEEEEQRWLDALEKGELDDNGDLKKEINERLLTARQRALLQKARSQP

SEQ ID NO: 40293 - protein, 97 aa, Homo sapiens
  Payload ID: 8204
  Gene Symbol: INO80B
  Gene Name: INO80 complex subunit B
  ENSP ID: ENSP00000398740
KKHHQEEDAGPTQPSPAKPQLKLKIKLGGQVLGTKSVPTFTVIPEGPRSPSPLMVVDNEEEPMEGVPLEQYRAWLGEDLEMKTVISLPLHFGTYQEG

SEQ ID NO: 40294 - protein, 192 aa, Homo sapiens
  Payload ID: 8205
  Gene Symbol: INO80C
  Gene Name: INO80 complex subunit C
  Uniprot ID: Q6PI98
  ENSP ID: ENSP00000334473
MAAQIPIVATTSTPGIVRNSKKRPASPSHNGSSGGGYGASKKKKASASSFAQGISMEAMSENKMVPSEFSTGPVEKAAKPLPFKDPNFVHSGHGGAVAGKKNRTWKNLKQILASERALPWQLNDPNYFSIDAPPSFKPAKKYSDVSGLLANYTDPQSKLRFSTIEEFSYIRRLPSDVVTGYLALRKATSIVP

SEQ ID NO: 40295 - protein, 228 aa, Homo sapiens
  Payload ID: 8205
  Gene Symbol: INO80C
  Gene Name: INO80 complex subunit C
  Uniprot ID: Q6PI98
  ENSP ID: ENSP00000391457
MAAQIPIVATTSTPGIVRNSKKRPASPSHNGSSGGGYGASKKKKASASSFAQTCLSPSTMIVRPPQPRGTTCLLPSAMIVRPPQPRGNGISMEAMSENKMVPSEFSTGPVEKAAKPLPFKDPNFVHSGHGGAVAGKKNRTWKNLKQILASERALPWQLNDPNYFSIDAPPSFKPAKKYSDVSGLLANYTDPQSKLRFSTIEEFSYIRRLPSDVVTGYLALRKATSIVP

SEQ ID NO: 40296 - protein, 137 aa, Homo sapiens
  Payload ID: 8205
  Gene Symbol: INO80C
  Gene Name: INO80 complex subunit C
  ENSP ID: ENSP00000464948
MEAMSENKMVPSEFSTGPVEKAAKPLPFKDPNFVHSGHGGAVAGKKNRTWKNLKQILASERALPWQLNDPNYFSIDAPPSFKPAKKYSDVSGLLANYTDPQSKLRFSTIEEFSYIRRLPSDVVTGYLALRKATSIVP

SEQ ID NO: 40297 - protein, 197 aa, Homo sapiens
  Payload ID: 8205
  Gene Symbol: INO80C
  Gene Name: INO80 complex subunit C
  Uniprot ID: Q6PI98
  ENSP ID: ENSP00000465273
MAAQIPIVATTSTPGIVRNSKKRPASPSHNGSSGGGYGASKKKKASASSFAQGISMEAMSENKMVPSEFSTGPVEKAAKPLPFKDPNFVHSGHGGAVAGKKNRTWKNLKQILASERALPWQLNDPNYFSIDAPPSFKPAKKYSDVSGLLEPPNCFPQRLHQLTFPLAMDEGSNFSRCSPTLVNFGFVFIMAILVGVK

SEQ ID NO: 40298 - protein, 29 aa, Homo sapiens
  Payload ID: 8205
  Gene Symbol: INO80C
  Gene Name: INO80 complex subunit C
  ENSP ID: ENSP00000465637
MEAMSENKMVPSEFSTGPVEKAAKPLPFK

SEQ ID NO: 40299 - protein, 89 aa, Homo sapiens
  Payload ID: 8205
  Gene Symbol: INO80C
  Gene Name: INO80 complex subunit C
  ENSP ID: ENSP00000466269
MAAQIPIVATTSTPGIVRNSKKRPASPSHNGSSGGGYGASKKKKASASSFAQTCLSPSTMIVRPPQPRGTAHWWKGLALSRMRLWTVDF

SEQ ID NO: 40300 - protein, 98 aa, Homo sapiens
  Payload ID: 8205
  Gene Symbol: INO80C
  Gene Name: INO80 complex subunit C
  ENSP ID: ENSP00000467013
MAAQIPIVATTSTPGIVRNSKKRPASPSHNGSSGGGYGASKKKKASASSFAQTSVLMLLHPLSQLRSILMFQVCLPTTQTPRANCGSAPLKSFPTFGG

SEQ ID NO: 40301 - protein, 95 aa, Homo sapiens
  Payload ID: 8205
  Gene Symbol: INO80C
  Gene Name: INO80 complex subunit C
  ENSP ID: ENSP00000467708
MAAQIPIVATTSTPGIVRNSKKRPASPSHNGSSGGGYGASKKKKASASSFAQANYTDPQSKLRFSTIEEFSYIRRLPSDVVTGYLALRKATSIVP

SEQ ID NO: 40302 - protein, 136 aa, Homo sapiens
  Payload ID: 8205
  Gene Symbol: INO80C
  Gene Name: INO80 complex subunit C
  ENSP ID: ENSP00000473165
  MOD_RES (1)..(1): Any amino acid
XHSLSCLLPRKTCLLPSAMIVRPPQPRGNGISMEAMSENKMVPSEFSTGPVEKAAKPLPFKDPNFVHSGHGGAVAGKKNRTWKNLKQILASERALPWQLNDPNYFSIDAPPSFKPAKKYSDVSGLLANYTDPQSKL

SEQ ID NO: 40303 - protein, 1027 aa, Homo sapiens
  Payload ID: 8206
  Gene Symbol: INO80D
  Gene Name: INO80 complex subunit D
  Uniprot ID: Q53TQ3
  ENSP ID: ENSP00000384198
MYEGKHIHFSEVDNKPLCSYSPKLCKQRRLNGYAFCIRHVLEDKTAPFKQCEYVAKYNSQRCTNPIPKSEDRRYCNSHLQVLGFIPKKERKKKNDPIDEVKVRHQMDTMAFSLTVPTLALKMPNGLDGMSLSPPGARVPLHYLETELEDPFAFNEEDDDLKKGATVRKKLQSKLAQNRQRQRETEILKVRQEHFSPPPAPSQQQPPQQHSHLSPLSTSLKPPAPPQGSVCKSPQPQNTSLPMQGVAPTTHTIAQARQLSHKRPLPLLPSSRAPTVDPPRTDRILMKATAFSPHFSCISRLQRLVKLCTQKHQLDTDLFPHLGLDWSEESGEEPEDSEQASPYQVAWSIRETLRYQRHASDDDDAESRSSRVTQLCTYFQQKYKHLCRLERAESRQKKCRHTFRKALLQAASKEPECTGQLIQELRRAACSRTSISRTKLREVEPAACSGTVKGEQCANKALPFTRHCFQHILLNHSQQLFSSCTAKFADGQQCSVPVFDITHQTPLCEEHAKKMDNFLRGDNSRKVQHQQQRKPRKKTKPPALTKKHKKKRRRGPRRPQKPIPPAVPQGNLSMPASVSLPVEASHIRSPSTPELSADELPDDIANEITDIPHDLELNQEDFSDVLPRLPDDLQDFDFFEGKNGDLLPTTEEAEELERALQAVTSLECLSTIGVLAQSDGVPVQELSDRGIGVFSTGTGASGIQSLSREVNTDLGELLNGRIVHDNFSSLELDENLLRSATLSNPPTPLAGQIQGQFSAPANVGLTSATLISQSALGERAFPGQFHGLHDGSHASQRPHPAQLLSKADDLITSRQQYSSDHSHSSPHGSHYDSEHVPSPYSDHITSPHTTSYSGDNMAATFSAEMPIMAQHLLPTQLEVPLGGVVNPRTHWGNLPVNLGDPSPFSNLLGADGHLLSTSLSTPPTTSNSETTQPAFATVTPSSSSVLPGLPQTSFSGMGPSAELMASTSPKQQLPQFSAAFGHQLSSHSGIPKDLQPSHSSIAPPTGFTVTGATATSTNNASSPFPSPN

SEQ ID NO: 40304 - protein, 439 aa, Homo sapiens
  Payload ID: 8206
  Gene Symbol: INO80D
  Gene Name: INO80 complex subunit D
  ENSP ID: ENSP00000402369
MDTMAFSLTVPTLALKMPNGLDGMSLSPPGARVPLHYLETELEDPFAFNEEDDDLKKGATVRKKLQSKLAQNRQRQRETEILKVRQEHFSPPPAPSQQQPPQQHSHLSPLSTSLKPPAPPQGSVCKSPQPQNTSLPMQGVAPTTHTIAQARQLSHKRPLPLLPSSRAPTVDPPRTDRILMKATAFSPHFSCISRLQRLVKLCTQKHQLDTDLFPHLGLDWSEESGEEPEDSEQASPYQVAWSIRETLRYQRHASDDDDAESRSSRVTQLCTYFQQKYKHLCRLERAESRQKKCRHTFRKALLQAASKEPECTGQLIQELRRAACSRTSISRTKLREVEPAACSGTVKGEQCANKALPFTRHCFQHILLNHSQQLFSSCTAKFADGQQCSVPVFDITHQTPLCEEHAKKMDNFLRGDNSRKVQHQQQRKPRKKTKPPALT

SEQ ID NO: 40305 - protein, 37 aa, Homo sapiens
  Payload ID: 8206
  Gene Symbol: INO80D
  Gene Name: INO80 complex subunit D
  ENSP ID: ENSP00000409031
MYEGKHIHFSEVDNKPLCSYSPKLCKQRRLNGYAFCI

SEQ ID NO: 40306 - protein, 205 aa, Homo sapiens
  Payload ID: 8207
  Gene Symbol: INO80E
  Gene Name: INO80 complex subunit E
  ENSP ID: ENSP00000303977
MNGPADGEVDYKKKYRNLKRKLKFLIYEHECFQEELRKAQRKLLKVSRDKSFLLDRLLQYENVDEDSSDSDATASSDNSETEGTPKLSDTPAPKRKRSPPLGGAPSPSSLSLPPSTGFPLQASGVPSPYLSSMAVGPPDCPVGGPLTFPGRGSGAGVGTTLTPLPPPKMPPPTILSTVPRQMFSDAGSGDDALDGDDDLVIDIPE

SEQ ID NO: 40307 - protein, 137 aa, Homo sapiens
  Payload ID: 8207
  Gene Symbol: INO80E
  Gene Name: INO80 complex subunit E
  Uniprot ID: Q8NBZ0
  ENSP ID: ENSP00000454665
MNGPADGEVDYKKKYRNLKRKLKFLIYEHECFQEELRKAQRKLLKVSRDKSFLLDRLLQYENVDEDSSDSDATASSDNSETEGTPKLSDTPAPKRKRSPPLGGAPSPSSLSLPPSTGFPLQASGVPSPYLSSERGQA

SEQ ID NO: 40308 - protein, 227 aa, Homo sapiens
  Payload ID: 8207
  Gene Symbol: INO80E
  Gene Name: INO80 complex subunit E
  ENSP ID: ENSP00000454924
MNGPADGEVDYKKKYRNLKRKLKFLIYEHECFQEELRKAQRKLLKVSRDKSFLLDRLLQYENVDEDSSDSDATASSDNSETEGTPKLSDTPAPKRKRSPPLGGAPSPSSLSLPPSTGFPLQASGVPSPYLSSLPEPSPLRPKREKRPRLPRKLKMAVGPPDCPVGGPLTFPGRGSGAGVGTTLTPLPPPKMPPPTILSTVPRQMFSDAGSGDDALDGDDDLVIDIPE

SEQ ID NO: 40309 - protein, 137 aa, Homo sapiens; identical to SEQ ID NO: 40307
  Payload ID: 8207
  Gene Symbol: INO80E
  Gene Name: INO80 complex subunit E
  Uniprot ID: Q8NBZ0
  ENSP ID: ENSP00000456073

SEQ ID NO: 40310 - protein, 244 aa, Homo sapiens
  Payload ID: 8207
  Gene Symbol: INO80E
  Gene Name: INO80 complex subunit E
  Uniprot ID: Q8NBZ0
  ENSP ID: ENSP00000457016
MNGPADGEVDYKKKYRNLKRKLKFLIYEHECFQEELRKAQRKLLKVSRDKSFLLDRLLQYENVDEDSSDSDATASSDNSETEGTPKLSDTPAPKRKRSPPLGGAPSPSSLSLPPSTGFPLQASGVPSPYLSSLASSRYPPFPSDYLALQLPEPSPLRPKREKRPRLPRKLKMAVGPPDCPVGGPLTFPGRGSGAGVGTTLTPLPPPKMPPPTILSTVPRQMFSDAGSGDDALDGDDDLVIDIPE

SEQ ID NO: 40311 - protein, 85 aa, Homo sapiens
  Payload ID: 8207
  Gene Symbol: INO80E
  Gene Name: INO80 complex subunit E
  ENSP ID: ENSP00000458392
  MOD_RES (1)..(1): Any amino acid
XLSLPPSTGFPLQASGVPSPYLSSLASSRYPPFPSDYLALQLPEPSPLRPKREKRPRLPRKLKMFSDAGSGDDALDGDDDLVIDI

SEQ ID NO: 40312 - protein, 188 aa, Homo sapiens
  Payload ID: 8207
  Gene Symbol: INO80E
  Gene Name: INO80 complex subunit E
  ENSP ID: ENSP00000459432
MNGPADGEVDYKKKYRNLKRKLKFLIYEHECFQEELRKAQRKLLKVSRDKSFLLDRLLQYENVDEDSSDSDATASSDNSETEGTPKLSDTPAPKRKRSPPLGGAPSPSSLSLPPSTGFPLQASGVPSPYLSSLASSRYPPFPSDYLALQLPEPSPLRPKREKRPRLPRKLKTLVVREQTERWSELGRE

SEQ ID NO: 40313 - protein, 173 aa, Homo sapiens
  Payload ID: 8207
  Gene Symbol: INO80E
  Gene Name: INO80 complex subunit E
  ENSP ID: ENSP00000461808
MNGPADGEVDYKKKYRNLKRKLKFLIYEHECFQEELRKAQRKLLKVSRDKSFLLDRLLQYENVDEDSSDSDATASSDNSETEGTPKLSDTPAPKRKRSPPLGGAPSPSSLSLPPSTGFPLQASGVPSPYLSSLASSRYPPFPSDYLALQLPEPSPLRPKREKRPRLPRKLKVP

SEQ ID NO: 40314 - protein, 137 aa, Homo sapiens; identical to SEQ ID NO: 40307
  Payload ID: 8207
  Gene Symbol: INO80E
  Gene Name: INO80 complex subunit E
  Uniprot ID: Q8NBZ0
  ENSP ID: ENSP00000484187

SEQ ID NO: 40315 - protein, 363 aa, Homo sapiens
  Payload ID: 8208
  Gene Symbol: INO80B-WBP1
  Gene Name: INO80B-WBP1 readthrough (NMD candidate)
  ENSP ID: ENSP00000388677
MSKLWRRGSTSGAMEAPEPGEALELSLAGAHGHGVHKKKHKKHKKKHKKKHHQEEDAGPTQPSPAKPQLKLKIKLGGQVLGTKSVPTFTVIPEGPRSPSPLMVVDNEEEPMEGVPLEQYRAWLDEDSNLSPSPLRDLSGGLGGQEEEEEQRWLDALEKGELDDNGDLKKEINERLLTARQRALLQKARSQPSPMLPLPVAEGCPPPALTEEMLLKREERARKRRLQAARRAEEHKNQTIERLTKTAATSGRGGRGGARGERRGGRAAAPAPMVRYCSGAQGSTLSFPPGVPAPTAVSQRPSPSGPPPRCSVPGCPHPRRYACSRTGQALCSLQCYRINLQMRLGGPEGPGSPLLATFESCAQE

SEQ ID NO: 40316 - protein, 263 aa, Homo sapiens
  Payload ID: 8208
  Gene Symbol: INO80B-WBP1
  Gene Name: INO80B-WBP1 readthrough (NMD candidate)
  ENSP ID: ENSP00000392498
MSKLWRRGSTSGAMEAPEPGEALELSLAGAHGHGVHKKKHKKHKKKHKKKHHQEEDAGPTQPSPAKPQLKLKIKLGGQVLGTKSVPTFTVIPEGPRSPSPLMVVDNEEEPMEGVPLEQYRAWLDEDSNLSPSPLRDLSGGLGGQEEEEEQRWLDALEKGELDDNGDLKKEINERLLTARQRALLQKARSQPSPMLPLPVAEGCPPPALTEEMLLKREERARKRRLQAARRAEEHKNQTIERLTKTAATTSRAVPRSEQPALPL

SEQ ID NO: 40317 - protein, 194 aa, Homo sapiens
  Payload ID: 8209
  Gene Symbol: ITPA
  Gene Name: inosine triphosphatase (nucleoside triphosphate pyrophosphatase)
  Uniprot ID: Q9BY32
  ENSP ID: ENSP00000369456
MAASLVGKKIVFVTGNAKKLEEVVQILGDKFPCTLVAQKIDLPEYQGEPDEISIQKCQEAVRQVQGPVLVEDTCLCFNALGGLPGPYIKWFLEKLKPEGLHQLLAGFEDKSAYALCTFALSTGDPSQPVRLFRGRTSGRIVAPRGCQDFGWDPCFQPDGYEQTYAEMPKAEKNAVSHRFRALLELQEYFGSLAA

SEQ ID NO: 40318 - protein, 153 aa, Homo sapiens
  Payload ID: 8209
  Gene Symbol: ITPA
  Gene Name: inosine triphosphatase (nucleoside triphosphate pyrophosphatase)
  Uniprot ID: Q9BY32
  ENSP ID: ENSP00000382732
MAASLVGKKIVFVTGNAKKLEEVQGPVLVEDTCLCFNALGGLPGPYIKWFLEKLKPEGLHQLLAGFEDKSAYALCTFALSTGDPSQPVRLFRGRTSGRIVAPRGCQDFGWDPCFQPDGYEQTYAEMPKAEKNAVSHRFRALLELQEYFGSLAA

SEQ ID NO: 40319 - protein, 177 aa, Homo sapiens
  Payload ID: 8209
  Gene Symbol: ITPA
  Gene Name: inosine triphosphatase (nucleoside triphosphate pyrophosphatase)
  Uniprot ID: Q9BY32
  ENSP ID: ENSP00000413282
MAASLVVQILGDKFPCTLVAQKIDLPEYQGEPDEISIQKCQEAVRQVQGPVLVEDTCLCFNALGGLPGPYIKWFLEKLKPEGLHQLLAGFEDKSAYALCTFALSTGDPSQPVRLFRGRTSGRIVAPRGCQDFGWDPCFQPDGYEQTYAEMPKAEKNAVSHRFRALLELQEYFGSLAA

SEQ ID NO: 40320 - protein, 491 aa, Homo sapiens
  Payload ID: 8210
  Gene Symbol: IPPK
  Gene Name: inositol 1,3,4,5,6-pentakisphosphate 2-kinase
  Uniprot ID: Q9H8X2
  ENSP ID: ENSP00000287996
MEEGKMDENEWGYHGEGNKSLVVAHAQRCVVLRFLKFPPNRKKTSEEIFQHLQNIVDFGKNVMKEFLGENYVHYGEVVQLPLEFVKQLCLKIQSERPESRCDKDLDTLSGYAMCLPNLTRLQTYRFAEHRPILCVEIKPKCGFIPFSSDVTHEMKHKVCRYCMHQHLKVATGKWKQISKYCPLDLYSGNKQRMHFALKSLLQEAQNNLKIFKNGELIYGCKDARSPVADWSELAHHLKPFFFPSNGLASGPHCTRAVIRELVHVITRVLLSGSDKGRAGTLSPGLGPQGPRVCEASPFSRSLRCQGKNTPERSGLPKGCLLYKTLQVQMLDLLDIEGLYPLYNRVERYLEEFPEERKTLQIDGPYDEAFYQKLLDLSTEDDGTVAFALTKVQQYRVAMTAKDCSIMIALSPCLQDASSDQRPVVPSSRSRFAFSVSVLDLDLKPYESIPHQYKLDGKIVNYYSKTVRAKDNAVMSTRFKESEDCTLVLHKV

SEQ ID NO: 40321 - protein, 163 aa, Homo sapiens
  Payload ID: 8210
  Gene Symbol: IPPK
  Gene Name: inositol 1,3,4,5,6-pentakisphosphate 2-kinase
  ENSP ID: ENSP00000364672
MLDLLDIEGLYPLYNRVERYLEEFPEERKTLQIDGPYDEAFYQKLLDLSTEDDGTVAFALTKVQQYRVAMTAKDCSIMIALSPCLQDASSDQRPVVPSSRSRFAFSVSVLDLDLKPYESIPHQYKLDGKIVNYYSKTVRAKDNAVMSTRFKESEDCTLVLHKV

SEQ ID NO: 40322 - protein, 547 aa, Homo sapiens
  Payload ID: 8211
  Gene Symbol: ITPRIP
  Gene Name: inositol 1,4,5-trisphosphate receptor interacting protein
  Uniprot ID: Q8IWB1
  ENSP ID: ENSP00000278071
MAMGLFRVCLVVVTAIINHPLLFPRENATVPENEEEIIRKMQAHQEKLQLEQLRLEEEVARLAAEKEALEQVAEEGRQQNETRVAWDLWSTLCMILFLMIEVWRQDHQEGPSPECLGGEEDELPGLGGAPLQGLTLPNKATLGHFYERCIRGATADAARTREFLEGFVDDLLEALRSLCNRDTDMEVEDFIGVDSMYENWQVDRPLLCHLFVPFTPPEPYRFHPELWCSGRSVPLDRQGYGQIKVVRADGDTLSCICGKTKLGEDMLCLLHGRNSMAPPCGDMENLLCATDSLYLDTMQVMKWFQTALTRAWKGIAHKYEFDLAFGQLDSPGSLKIKFRSGKFMPFNLIPVIQCDDSDLYFVSHLPREPSEGTPASSTDWLLSFAVYERHFLRTTLKALPEGACHLSCLQIASFLLSKQSRLTGPSGLSSYHLKTALLHLLLLRQAADWKAGQLDARLHELLCFLEKSLLQKKLHHFFIGNRKVPEAMGLPEAVLRAEPLNLFRPFVLQRSLYRKTLDSFYEMLKNAPALISEYSLHVPSDQPTPKS

SEQ ID NO: 40323 - protein, 547 aa, Homo sapiens; identical to SEQ ID NO: 40322
  Payload ID: 8211
  Gene Symbol: ITPRIP
  Gene Name: inositol 1,4,5-trisphosphate receptor interacting protein
  Uniprot ID: Q8IWB1
  ENSP ID: ENSP00000337178

SEQ ID NO: 40324 - protein, 547 aa, Homo sapiens; identical to SEQ ID NO: 40322
  Payload ID: 8211
  Gene Symbol: ITPRIP
  Gene Name: inositol 1,4,5-trisphosphate receptor interacting protein
  Uniprot ID: Q8IWB1
  ENSP ID: ENSP00000350915

SEQ ID NO: 40325 - protein, 114 aa, Homo sapiens
  Payload ID: 8211
  Gene Symbol: ITPRIP
  Gene Name: inositol 1,4,5-trisphosphate receptor interacting protein
  ENSP ID: ENSP00000414141
MAMGLFRVCLVVVTAIINHPLLFPRENATVPENEEEIIRKMQAHQEKLQLEQLRLEEEVARLAAEKEALEQVAEEGRQQNETRVAWDLWSTLCMILFLMIEVWRQDHQEGPSPE

SEQ ID NO: 40326 - protein, 563 aa, Homo sapiens
  Payload ID: 8212
  Gene Symbol: ITPRIPL1
  Gene Name: inositol 1,4,5-trisphosphate receptor interacting protein-like 1
  Uniprot ID: Q6GPH6
  ENSP ID: ENSP00000355121
MTTDSYSPTSPDAEASMAVISLLFLAVMYVVHHPLMVSDRMDLDTLARSRQLEKRMSEEMRLLEMEFEERKRAAEQRQKAENFWTGDTSSDQLVLGKKDMGWPFQADGQEGPLGWMLGNLWNTGLFCLFLVFELLRQNMQHEPAFDSSSEEEEEEVRVVPVTSYNWLTDFPSQEALDSFYKHYVQNAIRDLPCTCEFVESFVDDLIEACRVLSRQEAHPQLEDCLGIGAAFEKWGTLHETQKFDILVPIVPPQGTMFVLEMRDPALGRRCGCVLVESECVCKREKLLGDVLCLVHHHRDPSAVLGKCSSSIKAALCTGFHLDVCKTVQWFRNMMGNAWALVAHKYDFKLSLPPSTTSCKLRLDYRSGRFLSIHLVLGVQREDTLVYLVSQAPDQEQLTSVDWPESFVACEHLFLKLVGRFAPENTCHLKCLQIILSLRQHQSLPHGASRPILTSYHFKTALMHLLLRLPLTDWAHNMLSQRLQDILWFLGRGLQQRSLHHFLIGNNFLPLTIPIPKTFRNAEPVNLFQHLVLNPKAHSQAVEEFQNLLTQVKTLPHAPLAAAP

SEQ ID NO: 40327 - protein, 555 aa, Homo sapiens
  Payload ID: 8212
  Gene Symbol: ITPRIPL1
  Gene Name: inositol 1,4,5-trisphosphate receptor interacting protein-like 1
  Uniprot ID: Q6GPH6
  ENSP ID: ENSP00000389308
MNVDAEASMAVISLLFLAVMYVVHHPLMVSDRMDLDTLARSRQLEKRMSEEMRLLEMEFEERKRAAEQRQKAENFWTGDTSSDQLVLGKKDMGWPFQADGQEGPLGWMLGNLWNTGLFCLFLVFELLRQNMQHEPAFDSSSEEEEEEVRVVPVTSYNWLTDFPSQEALDSFYKHYVQNAIRDLPCTCEFVESFVDDLIEACRVLSRQEAHPQLEDCLGIGAAFEKWGTLHETQKFDILVPIVPPQGTMFVLEMRDPALGRRCGCVLVESECVCKREKLLGDVLCLVHHHRDPSAVLGKCSSSIKAALCTGFHLDVCKTVQWFRNMMGNAWALVAHKYDFKLSLPPSTTSCKLRLDYRSGRFLSIHLVLGVQREDTLVYLVSQAPDQEQLTSVDWPESFVACEHLFLKLVGRFAPENTCHLKCLQIILSLRQHQSLPHGASRPILTSYHFKTALMHLLLRLPLTDWAHNMLSQRLQDILWFLGRGLQQRSLHHFLIGNNFLPLTIPIPKTFRNAEPVNLFQHLVLNPKAHSQAVEEFQNLLTQVKTLPHAPLAAAP

SEQ ID NO: 40328 - protein, 587 aa, Homo sapiens
  Payload ID: 8212
  Gene Symbol: ITPRIPL1
  Gene Name: inositol 1,4,5-trisphosphate receptor interacting protein-like 1
  ENSP ID: ENSP00000396552
  MOD_RES (1)..(1): Any amino acid
XRKGVTQAGSGLSGYKREPLGSAGHIWCPWLTEESDAEASMAVISLLFLAVMYVVHHPLMVSDRMDLDTLARSRQLEKRMSEEMRLLEMEFEERKRAAEQRQKAENFWTGDTSSDQLVLGKKDMGWPFQADGQEGPLGWMLGNLWNTGLFCLFLVFELLRQNMQHEPAFDSSSEEEEEEVRVVPVTSYNWLTDFPSQEALDSFYKHYVQNAIRDLPCTCEFVESFVDDLIEACRVLSRQEAHPQLEDCLGIGAAFEKWGTLHETQKFDILVPIVPPQGTMFVLEMRDPALGRRCGCVLVESECVCKREKLLGDVLCLVHHHRDPSAVLGKCSSSIKAALCTGFHLDVCKTVQWFRNMMGNAWALVAHKYDFKLSLPPSTTSCKLRLDYRSGRFLSIHLVLGVQREDTLVYLVSQAPDQEQLTSVDWPESFVACEHLFLKLVGRFAPENTCHLKCLQIILSLRQHQSLPHGASRPILTSYHFKTALMHLLLRLPLTDWAHNMLSQRLQDILWFLGRGLQQRSLHHFLIGNNFLPLTIPIPKTFRNAEPVNLFQHLVLNPKAHSQAVEEFQNLLTQVKTLPHAPLAAAP

SEQ ID NO: 40329 - protein, 180 aa, Homo sapiens
  Payload ID: 8212
  Gene Symbol: ITPRIPL1
  Gene Name: inositol 1,4,5-trisphosphate receptor interacting protein-like 1
  ENSP ID: ENSP00000408336
MAVISLLFLAVMYVVHHPLMVSDRMDLDTLARSRQLEKRMSEEMRLLEMEFEERKRAAEQRQKAENFWTGDTSSDQLVLGKKDMGWPFQADGQEGPLGWMLGNLWNTGLFCLFLVFELLRQNMQHEPAFDSSSEEEEEEVRVVPVTSYNWLTDFPSQEALDSFYKHYVQNAIRDLPCTCE

SEQ ID NO: 40330 - protein, 547 aa, Homo sapiens
  Payload ID: 8212
  Gene Symbol: ITPRIPL1
  Gene Name: inositol 1,4,5-trisphosphate receptor interacting protein-like 1
  Uniprot ID: Q6GPH6
  ENSP ID: ENSP00000439566
MAVISLLFLAVMYVVHHPLMVSDRMDLDTLARSRQLEKRMSEEMRLLEMEFEERKRAAEQRQKAENFWTGDTSSDQLVLGKKDMGWPFQADGQEGPLGWMLGNLWNTGLFCLFLVFELLRQNMQHEPAFDSSSEEEEEEVRVVPVTSYNWLTDFPSQEALDSFYKHYVQNAIRDLPCTCEFVESFVDDLIEACRVLSRQEAHPQLEDCLGIGAAFEKWGTLHETQKFDILVPIVPPQGTMFVLEMRDPALGRRCGCVLVESECVCKREKLLGDVLCLVHHHRDPSAVLGKCSSSIKAALCTGFHLDVCKTVQWFRNMMGNAWALVAHKYDFKLSLPPSTTSCKLRLDYRSGRFLSIHLVLGVQREDTLVYLVSQAPDQEQLTSVDWPESFVACEHLFLKLVGRFAPENTCHLKCLQIILSLRQHQSLPHGASRPILTSYHFKTALMHLLLRLPLTDWAHNMLSQRLQDILWFLGRGLQQRSLHHFLIGNNFLPLTIPIPKTFRNAEPVNLFQHLVLNPKAHSQAVEEFQNLLTQVKTLPHAPLAAAP

SEQ ID NO: 40331 - protein, 535 aa, Homo sapiens
  Payload ID: 8213
  Gene Symbol: ITPRIPL2
  Gene Name: inositol 1,4,5-trisphosphate receptor interacting protein-like 2
  Uniprot ID: Q3MIP1
  ENSP ID: ENSP00000370849
MSVHYTLNLRVFWPLVTGLCTALVCLYHVLRGSGGARAEPADGVDGGFPLLKVAVLLLLSYVLLRCRHAVRQRFLPGSPRLEGHAAFSSRHFREPGLSILLESYYEHEVRLSPHVLGHSKAHVSRIVGELVRAGRARGSPGLIPGGALALAFRGDFIQVGSAYEQHKIRRPDSFDVLVPLRLPPLVALEPRSLGEEPALAPAFRGCFLCALKAPPSPSGASGGHWLRDCKPFADAFCVDVRGRRHLSATLVLRWFQSHLQRSLATVRYSLEGRCRVTLTPGGLEQPPTLHILPCRTDYGCCRLSMAVRLIPAVHLGDGVFLVAPPPPPLPSAPLLELPEGLRAEALWGVNTARQEQKLLSWLQERAAPGACYLKCLQLLKALRDLGARGLDSAAATQWGRILSSYVLKTVLLAVLLRKGAPGQGWDEEHLGRCLEELVQFLRDCLLRRHTLFHCVLGPGGAAAEVGPLPKALREAAPVDLLAAFDGHARELAAARLLSTWQRLPQLLRAYGGPRYLARCPPPRSQRTQGFLEGEP

SEQ ID NO: 40332 - protein, 127 aa, Homo sapiens
  Payload ID: 8213
  Gene Symbol: ITPRIPL2
  Gene Name: inositol 1,4,5-trisphosphate receptor interacting protein-like 2
  ENSP ID: ENSP00000455257
VALRRRPGRGPTRLASSTLGSRLRHFLPASWRGLASPSEEETPGVRVTGSGAERSGGRARRAAQAMSSCAVATLSGSASCPGLPVWRVTPPSPRDTSESRASASCWRVTTSMRCACLRTCWATARRT

SEQ ID NO: 40333 - protein, 2743 aa, Homo sapiens
  Payload ID: 8214
  Gene Symbol: ITPR1
  Gene Name: inositol 1,4,5-trisphosphate receptor, type 1
  Uniprot ID: Q14643
  ENSP ID: ENSP00000306253
MSDKMSSFLHIGDICSLYAEGSTNGFISTLGLVDDRCVVQPETGDLNNPPKKFRDCLFKLCPMNRYSAQKQFWKAAKPGANSTTDAVLLNKLHHAADLEKKQNETENRKLLGTVIQYGNVIQLLHLKSNKYLTVNKRLPALLEKNAMRVTLDEAGNEGSWFYIQPFYKLRSIGDSVVIGDKVVLNPVNAGQPLHASSHQLVDNPGCNEVNSVNCNTSWKIVLFMKWSDNKDDILKGGDVVRLFHAEQEKFLTCDEHRKKQHVFLRTTGRQSATSATSSKALWEVEVVQHDPCRGGAGYWNSLFRFKHLATGHYLAAEVDPDQDASRSRLRNAQEKMVYSLVSVPEGNDISSIFELDPTTLRGGDSLVPRNSYVRLRHLCTNTWVHSTNIPIDKEEEKPVMLKIGTSPVKEDKEAFAIVPVSPAEVRDLDFANDASKVLGSIAGKLEKGTITQNERRSVTKLLEDLVYFVTGGTNSGQDVLEVVFSKPNRERQKLMREQNILKQIFKLLQAPFTDCGDGPMLRLEELGDQRHAPFRHICRLCYRVLRHSQQDYRKNQEYIAKQFGFMQKQIGYDVLAEDTITALLHNNRKLLEKHITAAEIDTFVSLVRKNREPRFLDYLSDLCVSMNKSIPVTQELICKAVLNPTNADILIETKLVLSRFEFEGVSSTGENALEAGEDEEEVWLFWRDSNKEIRSKSVRELAQDAKEGQKEDRDVLSYYRYQLNLFARMCLDRQYLAINEISGQLDVDLILRCMSDENLPYDLRASFCRLMLHMHVDRDPQEQVTPVKYARLWSEIPSEIAIDDYDSSGASKDEIKERFAQTMEFVEEYLRDVVCQRFPFSDKEKNKLTFEVVNLARNLIYFGFYNFSDLLRLTKILLAILDCVHVTTIFPISKMAKGEENKGNNDVEKLKSSNVMRSIHGVGELMTQVVLRGGGFLPMTPMAAAPEGNVKQAEPEKEDIMVMDTKLKIIEILQFILNVRLDYRISCLLCIFKREFDESNSQTSETSSGNSSQEGPSNVPGALDFEHIEEQAEGIFGGSEENTPLDLDDHGGRTFLRVLLHLTMHDYPPLVSGALQLLFRHFSQRQEVLQAFKQVQLLVTSQDVDNYKQIKQDLDQLRSIVEKSELWVYKGQGPDETMDGASGENEHKKTEEGNNKPQKHESTSSYNYRVVKEILIRLSKLCVQESASVRKSRKQQQRLLRNMGAHAVVLELLQIPYEKAEDTKMQEIMRLAHEFLQNFCAGNQQNQALLHKHINLFLNPGILEAVTMQHIFMNNFQLCSEINERVVQHFVHCIETHGRNVQYIKFLQTIVKAEGKFIKKCQDMVMAELVNSGEDVLVFYNDRASFQTLIQMMRSERDRMDENSPLMYHIHLVELLAVCTEGKNVYTEIKCNSLLPLDDIVRVVTHEDCIPEVKIAYINFLNHCYVDTEVEMKEIYTSNHMWKLFENFLVDICRACNNTSDRKHADSILEKYVTEIVMSIVTTFFSSPFSDQSTTLQTRQPVFVQLLQGVFRVYHCNWLMPSQKASVESCIRVLSDVAKSRAIAIPVDLDSQVNNLFLKSHSIVQKTAMNWRLSARNAARRDSVLAASRDYRNIIERLQDIVSALEDRLRPLVQAELSVLVDVLHRPELLFPENTDARRKCESGGFICKLIKHTKQLLEENEEKLCIKVLQTLREMMTKDRGYGEKLISIDELDNAELPPAPDSENATEELEPSPPLRQLEDHKRGEALRQVLVNRYYGNVRPSGRRESLTSFGNGPLSAGGPGKPGGGGGGSGSSSMSRGEMSLAEVQCHLDKEGASNLVIDLIMNASSDRVFHESILLAIALLEGGNTTIQHSFFCRLTEDKKSEKFFKVFYDRMKVAQQEIKATVTVNTSDLGNKKKDDEVDRDAPSRKKAKEPTTQITEEVRDQLLEASAATRKAFTTFRREADPDDHYQPGEGTQATADKAKDDLEMSAVITIMQPILRFLQLLCENHNRDLQNFLRCQNNKTNYNLVCETLQFLDCICGSTTGGLGLLGLYINEKNVALINQTLESLTEYCQGPCHENQNCIATHESNGIDIITALILNDINPLGKKRMDLVLELKNNASKLLLAIMESRHDSENAERILYNMRPKELVEVIKKAYMQGEVEFEDGENGEDGAASPRNVGHNIYILAHQLARHNKELQSMLKPGGQVDGDEALEFYAKHTAQIEIVRLDRTMEQIVFPVPSICEFLTKESKLRIYYTTERDEQGSKINDFFLRSEDLFNEMNWQKKLRAQPVLYWCARNMSFWSSISFNLAVLMNLLVAFFYPFKGVRGGTLEPHWSGLLWTAMLISLAIVIALPKPHGIRALIASTILRLIFSVGLQPTLFLLGAFNVCNKIIFLMSFVGNCGTFTRGYRAMVLDVEFLYHLLYLVICAMGLFVHEFFYSLLLFDLVYREETLLNVIKSVTRNGRSIILTAVLALILVYLFSIVGYLFFKDDFILEVDRLPNETAVPETGESLASEFLFSDVCRVESGENCSSPAPREELVPAEETEQDKEHTCETLLMCIVTVLSHGLRSGGGVGDVLRKPSKEEPLFAARVIYDLLFFFMVIIIVLNLIFGVIIDTFADLRSEKQKKEEILKTTCFICGLERDKFDNKTVTFEEHIKEEHNMWHYLCFIVLVKVKDSTEYTGPESYVAEMIKERNLDWFPRMRAMSLVSSDSEGEQNELRNLQEKLESTMKLVTNLSGQLSELKDQMTEQRKQKQRIGLLGHPPHMNVNPQQPA

SEQ ID NO: 40334 - protein, 2758 aa, Homo sapiens
  Payload ID: 8214
  Gene Symbol: ITPR1
  Gene Name: inositol 1,4,5-trisphosphate receptor, type 1
  Uniprot ID: Q14643
  ENSP ID: ENSP00000346595
MSDKMSSFLHIGDICSLYAEGSTNGFISTLGLVDDRCVVQPETGDLNNPPKKFRDCLFKLCPMNRYSAQKQFWKAAKPGANSTTDAVLLNKLHHAADLEKKQNETENRKLLGTVIQYGNVIQLLHLKSNKYLTVNKRLPALLEKNAMRVTLDEAGNEGSWFYIQPFYKLRSIGDSVVIGDKVVLNPVNAGQPLHASSHQLVDNPGCNEVNSVNCNTSWKIVLFMKWSDNKDDILKGGDVVRLFHAEQEKFLTCDEHRKKQHVFLRTTGRQSATSATSSKALWEVEVVQHDPCRGGAGYWNSLFRFKHLATGHYLAAEVDPDFEEECLEFQPSVDPDQDASRSRLRNAQEKMVYSLVSVPEGNDISSIFELDPTTLRGGDSLVPRNSYVRLRHLCTNTWVHSTNIPIDKEEEKPVMLKIGTSPVKEDKEAFAIVPVSPAEVRDLDFANDASKVLGSIAGKLEKGTITQNERRSVTKLLEDLVYFVTGGTNSGQDVLEVVFSKPNRERQKLMREQNILKQIFKLLQAPFTDCGDGPMLRLEELGDQRHAPFRHICRLCYRVLRHSQQDYRKNQEYIAKQFGFMQKQIGYDVLAEDTITALLHNNRKLLEKHITAAEIDTFVSLVRKNREPRFLDYLSDLCVSMNKSIPVTQELICKAVLNPTNADILIETKLVLSRFEFEGVSSTGENALEAGEDEEEVWLFWRDSNKEIRSKSVRELAQDAKEGQKEDRDVLSYYRYQLNLFARMCLDRQYLAINEISGQLDVDLILRCMSDENLPYDLRASFCRLMLHMHVDRDPQEQVTPVKYARLWSEIPSEIAIDDYDSSGASKDEIKERFAQTMEFVEEYLRDVVCQRFPFSDKEKNKLTFEVVNLARNLIYFGFYNFSDLLRLTKILLAILDCVHVTTIFPISKMAKGEENKGNNDVEKLKSSNVMRSIHGVGELMTQVVLRGGGFLPMTPMAAAPEGNVKQAEPEKEDIMVMDTKLKIIEILQFILNVRLDYRISCLLCIFKREFDESNSQTSETSSGNSSQEGPSNVPGALDFEHIEEQAEGIFGGSEENTPLDLDDHGGRTFLRVLLHLTMHDYPPLVSGALQLLFRHFSQRQEVLQAFKQVQLLVTSQDVDNYKQIKQDLDQLRSIVEKSELWVYKGQGPDETMDGASGENEHKKTEEGNNKPQKHESTSSYNYRVVKEILIRLSKLCVQESASVRKSRKQQQRLLRNMGAHAVVLELLQIPYEKAEDTKMQEIMRLAHEFLQNFCAGNQQNQALLHKHINLFLNPGILEAVTMQHIFMNNFQLCSEINERVVQHFVHCIETHGRNVQYIKFLQTIVKAEGKFIKKCQDMVMAELVNSGEDVLVFYNDRASFQTLIQMMRSERDRMDENSPLMYHIHLVELLAVCTEGKNVYTEIKCNSLLPLDDIVRVVTHEDCIPEVKIAYINFLNHCYVDTEVEMKEIYTSNHMWKLFENFLVDICRACNNTSDRKHADSILEKYVTEIVMSIVTTFFSSPFSDQSTTLQTRQPVFVQLLQGVFRVYHCNWLMPSQKASVESCIRVLSDVAKSRAIAIPVDLDSQVNNLFLKSHSIVQKTAMNWRLSARNAARRDSVLAASRDYRNIIERLQDIVSALEDRLRPLVQAELSVLVDVLHRPELLFPENTDARRKCESGGFICKLIKHTKQLLEENEEKLCIKVLQTLREMMTKDRGYGEKLISIDELDNAELPPAPDSENATEELEPSPPLRQLEDHKRGEALRQVLVNRYYGNVRPSGRRESLTSFGNGPLSAGGPGKPGGGGGGSGSSSMSRGEMSLAEVQCHLDKEGASNLVIDLIMNASSDRVFHESILLAIALLEGGNTTIQHSFFCRLTEDKKSEKFFKVFYDRMKVAQQEIKATVTVNTSDLGNKKKDDEVDRDAPSRKKAKEPTTQITEEVRDQLLEASAATRKAFTTFRREADPDDHYQPGEGTQATADKAKDDLEMSAVITIMQPILRFLQLLCENHNRDLQNFLRCQNNKTNYNLVCETLQFLDCICGSTTGGLGLLGLYINEKNVALINQTLESLTEYCQGPCHENQNCIATHESNGIDIITALILNDINPLGKKRMDLVLELKNNASKLLLAIMESRHDSENAERILYNMRPKELVEVIKKAYMQGEVEFEDGENGEDGAASPRNVGHNIYILAHQLARHNKELQSMLKPGGQVDGDEALEFYAKHTAQIEIVRLDRTMEQIVFPVPSICEFLTKESKLRIYYTTERDEQGSKINDFFLRSEDLFNEMNWQKKLRAQPVLYWCARNMSFWSSISFNLAVLMNLLVAFFYPFKGVRGGTLEPHWSGLLWTAMLISLAIVIALPKPHGIRALIASTILRLIFSVGLQPTLFLLGAFNVCNKIIFLMSFVGNCGTFTRGYRAMVLDVEFLYHLLYLVICAMGLFVHEFFYSLLLFDLVYREETLLNVIKSVTRNGRSIILTAVLALILVYLFSIVGYLFFKDDFILEVDRLPNETAVPETGESLASEFLFSDVCRVESGENCSSPAPREELVPAEETEQDKEHTCETLLMCIVTVLSHGLRSGGGVGDVLRKPSKEEPLFAARVIYDLLFFFMVIIIVLNLIFGVIIDTFADLRSEKQKKEEILKTTCFICGLERDKFDNKTVTFEEHIKEEHNMWHYLCFIVLVKVKDSTEYTGPESYVAEMIKERNLDWFPRMRAMSLVSSDSEGEQNELRNLQEKLESTMKLVTNLSGQLSELKDQMTEQRKQKQRIGLLGHPPHMNVNPQQPA

SEQ ID NO: 40335 - protein, 2710 aa, Homo sapiens
  Payload ID: 8214
  Gene Symbol: ITPR1
  Gene Name: inositol 1,4,5-trisphosphate receptor, type 1
  Uniprot ID: Q14643
  ENSP ID: ENSP00000349597
MSDKMSSFLHIGDICSLYAEGSTNGFISTLGLVDDRCVVQPETGDLNNPPKKFRDCLFKLCPMNRYSAQKQFWKAAKPGANSTTDAVLLNKLHHAADLEKKQNETENRKLLGTVIQYGNVIQLLHLKSNKYLTVNKRLPALLEKNAMRVTLDEAGNEGSWFYIQPFYKLRSIGDSVVIGDKVVLNPVNAGQPLHASSHQLVDNPGCNEVNSVNCNTSWKIVLFMKWSDNKDDILKGGDVVRLFHAEQEKFLTCDEHRKKQHVFLRTTGRQSATSATSSKALWEVEVVQHDPCRGGAGYWNSLFRFKHLATGHYLAAEVDPDFEEECLEFQPSVDPDQDASRSRLRNAQEKMVYSLVSVPEGNDISSIFELDPTTLRGGDSLVPRNSYVRLRHLCTNTWVHSTNIPIDKEEEKPVMLKIGTSPVKEDKEAFAIVPVSPAEVRDLDFANDASKVLGSIAGKLEKGTITQNERRSVTKLLEDLVYFVTGGTNSGQDVLEVVFSKPNRERQKLMREQNILKQIFKLLQAPFTDCGDGPMLRLEELGDQRHAPFRHICRLCYRVLRHSQQDYRKNQEYIAKQFGFMQKQIGYDVLAEDTITALLHNNRKLLEKHITAAEIDTFVSLVRKNREPRFLDYLSDLCVSMNKSIPVTQELICKAVLNPTNADILIETKLVLSRFEFEGVSSTGENALEAGEDEEEVWLFWRDSNKEIRSKSVRELAQDAKEGQKEDRDVLSYYRYQLNLFARMCLDRQYLAINEISGQLDVDLILRCMSDENLPYDLRASFCRLMLHMHVDRDPQEQVTPVKYARLWSEIPSEIAIDDYDSSGASKDEIKERFAQTMEFVEEYLRDVVCQRFPFSDKEKNKLTFEVVNLARNLIYFGFYNFSDLLRLTKILLAILDCVHVTTIFPISKMAKGEENKGSNVMRSIHGVGELMTQVVLRGGGFLPMTPMAAAPEGNVKQAEPEKEDIMVMDTKLKIIEILQFILNVRLDYRISCLLCIFKREFDESNSQTSETSSGNSSQEGPSNVPGALDFEHIEEQAEGIFGGSEENTPLDLDDHGGRTFLRVLLHLTMHDYPPLVSGALQLLFRHFSQRQEVLQAFKQVQLLVTSQDVDNYKQIKQDLDQLRSIVEKSELWVYKGQGPDETMDGASGENEHKKTEEGNNKPQKHESTSSYNYRVVKEILIRLSKLCVQESASVRKSRKQQQRLLRNMGAHAVVLELLQIPYEKAEDTKMQEIMRLAHEFLQNFCAGNQQNQALLHKHINLFLNPGILEAVTMQHIFMNNFQLCSEINERVVQHFVHCIETHGRNVQYIKFLQTIVKAEGKFIKKCQDMVMAELVNSGEDVLVFYNDRASFQTLIQMMRSERDRMDENSPLMYHIHLVELLAVCTEGKNVYTEIKCNSLLPLDDIVRVVTHEDCIPEVKIAYINFLNHCYVDTEVEMKEIYTSNHMWKLFENFLVDICRACNNTSDRKHADSILEKYVTEIVMSIVTTFFSSPFSDQSTTLQTRQPVFVQLLQGVFRVYHCNWLMPSQKASVESCIRVLSDVAKSRAIAIPVDLDSQVNNLFLKSHSIVQKTAMNWRLSARNAARRDSVLAASRDYRNIIERLQDIVSALEDRLRPLVQAELSVLVDVLHRPELLFPENTDARRKCESGGFICKLIKHTKQLLEENEEKLCIKVLQTLREMMTKDRGYGEKGEALRQVLVNRYYGNVRPSGRRESLTSFGNGPLSAGGPGKPGGGGGGSGSSSMSRGEMSLAEVQCHLDKEGASNLVIDLIMNASSDRVFHESILLAIALLEGGNTTIQHSFFCRLTEDKKSEKFFKVFYDRMKVAQQEIKATVTVNTSDLGNKKKDDEVDRDAPSRKKAKEPTTQITEEVRDQLLEASAATRKAFTTFRREADPDDHYQPGEGTQATADKAKDDLEMSAVITIMQPILRFLQLLCENHNRDLQNFLRCQNNKTNYNLVCETLQFLDCICGSTTGGLGLLGLYINEKNVALINQTLESLTEYCQGPCHENQNCIATHESNGIDIITALILNDINPLGKKRMDLVLELKNNASKLLLAIMESRHDSENAERILYNMRPKELVEVIKKAYMQGEVEFEDGENGEDGAASPRNVGHNIYILAHQLARHNKELQSMLKPGGQVDGDEALEFYAKHTAQIEIVRLDRTMEQIVFPVPSICEFLTKESKLRIYYTTERDEQGSKINDFFLRSEDLFNEMNWQKKLRAQPVLYWCARNMSFWSSISFNLAVLMNLLVAFFYPFKGVRGGTLEPHWSGLLWTAMLISLAIVIALPKPHGIRALIASTILRLIFSVGLQPTLFLLGAFNVCNKIIFLMSFVGNCGTFTRGYRAMVLDVEFLYHLLYLVICAMGLFVHEFFYSLLLFDLVYREETLLNVIKSVTRNGRSIILTAVLALILVYLFSIVGYLFFKDDFILEVDRLPNETAVPETGESLASEFLFSDVCRVESGENCSSPAPREELVPAEETEQDKEHTCETLLMCIVTVLSHGLRSGGGVGDVLRKPSKEEPLFAARVIYDLLFFFMVIIIVLNLIFGVIIDTFADLRSEKQKKEEILKTTCFICGLERDKFDNKTVTFEEHIKEEHNMWHYLCFIVLVKVKDSTEYTGPESYVAEMIKERNLDWFPRMRAMSLVSSDSEGEQNELRNLQEKLESTMKLVTNLSGQLSELKDQMTEQRKQKQRIGLLGHPPHMNVNPQQPA

SEQ ID NO: 40336 - protein, 2695 aa, Homo sapiens
  Payload ID: 8214
  Gene Symbol: ITPR1
  Gene Name: inositol 1,4,5-trisphosphate receptor, type 1
  Uniprot ID: Q14643
  ENSP ID: ENSP00000397885
MSDKMSSFLHIGDICSLYAEGSTNGFISTLGLVDDRCVVQPETGDLNNPPKKFRDCLFKLCPMNRYSAQKQFWKAAKPGANSTTDAVLLNKLHHAADLEKKQNETENRKLLGTVIQYGNVIQLLHLKSNKYLTVNKRLPALLEKNAMRVTLDEAGNEGSWFYIQPFYKLRSIGDSVVIGDKVVLNPVNAGQPLHASSHQLVDNPGCNEVNSVNCNTSWKIVLFMKWSDNKDDILKGGDVVRLFHAEQEKFLTCDEHRKKQHVFLRTTGRQSATSATSSKALWEVEVVQHDPCRGGAGYWNSLFRFKHLATGHYLAAEVDPDQDASRSRLRNAQEKMVYSLVSVPEGNDISSIFELDPTTLRGGDSLVPRNSYVRLRHLCTNTWVHSTNIPIDKEEEKPVMLKIGTSPVKEDKEAFAIVPVSPAEVRDLDFANDASKVLGSIAGKLEKGTITQNERRSVTKLLEDLVYFVTGGTNSGQDVLEVVFSKPNRERQKLMREQNILKQIFKLLQAPFTDCGDGPMLRLEELGDQRHAPFRHICRLCYRVLRHSQQDYRKNQEYIAKQFGFMQKQIGYDVLAEDTITALLHNNRKLLEKHITAAEIDTFVSLVRKNREPRFLDYLSDLCVSMNKSIPVTQELICKAVLNPTNADILIETKLVLSRFEFEGVSSTGENALEAGEDEEEVWLFWRDSNKEIRSKSVRELAQDAKEGQKEDRDVLSYYRYQLNLFARMCLDRQYLAINEISGQLDVDLILRCMSDENLPYDLRASFCRLMLHMHVDRDPQEQVTPVKYARLWSEIPSEIAIDDYDSSGASKDEIKERFAQTMEFVEEYLRDVVCQRFPFSDKEKNKLTFEVVNLARNLIYFGFYNFSDLLRLTKILLAILDCVHVTTIFPISKMAKGEENKGSNVMRSIHGVGELMTQVVLRGGGFLPMTPMAAAPEGNVKQAEPEKEDIMVMDTKLKIIEILQFILNVRLDYRISCLLCIFKREFDESNSQTSETSSGNSSQEGPSNVPGALDFEHIEEQAEGIFGGSEENTPLDLDDHGGRTFLRVLLHLTMHDYPPLVSGALQLLFRHFSQRQEVLQAFKQVQLLVTSQDVDNYKQIKQDLDQLRSIVEKSELWVYKGQGPDETMDGASGENEHKKTEEGNNKPQKHESTSSYNYRVVKEILIRLSKLCVQESASVRKSRKQQQRLLRNMGAHAVVLELLQIPYEKAEDTKMQEIMRLAHEFLQNFCAGNQQNQALLHKHINLFLNPGILEAVTMQHIFMNNFQLCSEINERVVQHFVHCIETHGRNVQYIKFLQTIVKAEGKFIKKCQDMVMAELVNSGEDVLVFYNDRASFQTLIQMMRSERDRMDENSPLMYHIHLVELLAVCTEGKNVYTEIKCNSLLPLDDIVRVVTHEDCIPEVKIAYINFLNHCYVDTEVEMKEIYTSNHMWKLFENFLVDICRACNNTSDRKHADSILEKYVTEIVMSIVTTFFSSPFSDQSTTLQTRQPVFVQLLQGVFRVYHCNWLMPSQKASVESCIRVLSDVAKSRAIAIPVDLDSQVNNLFLKSHSIVQKTAMNWRLSARNAARRDSVLAASRDYRNIIERLQDIVSALEDRLRPLVQAELSVLVDVLHRPELLFPENTDARRKCESGGFICKLIKHTKQLLEENEEKLCIKVLQTLREMMTKDRGYGEKGEALRQVLVNRYYGNVRPSGRRESLTSFGNGPLSAGGPGKPGGGGGGSGSSSMSRGEMSLAEVQCHLDKEGASNLVIDLIMNASSDRVFHESILLAIALLEGGNTTIQHSFFCRLTEDKKSEKFFKVFYDRMKVAQQEIKATVTVNTSDLGNKKKDDEVDRDAPSRKKAKEPTTQITEEVRDQLLEASAATRKAFTTFRREADPDDHYQPGEGTQATADKAKDDLEMSAVITIMQPILRFLQLLCENHNRDLQNFLRCQNNKTNYNLVCETLQFLDCICGSTTGGLGLLGLYINEKNVALINQTLESLTEYCQGPCHENQNCIATHESNGIDIITALILNDINPLGKKRMDLVLELKNNASKLLLAIMESRHDSENAERILYNMRPKELVEVIKKAYMQGEVEFEDGENGEDGAASPRNVGHNIYILAHQLARHNKELQSMLKPGGQVDGDEALEFYAKHTAQIEIVRLDRTMEQIVFPVPSICEFLTKESKLRIYYTTERDEQGSKINDFFLRSEDLFNEMNWQKKLRAQPVLYWCARNMSFWSSISFNLAVLMNLLVAFFYPFKGVRGGTLEPHWSGLLWTAMLISLAIVIALPKPHGIRALIASTILRLIFSVGLQPTLFLLGAFNVCNKIIFLMSFVGNCGTFTRGYRAMVLDVEFLYHLLYLVICAMGLFVHEFFYSLLLFDLVYREETLLNVIKSVTRNGRSIILTAVLALILVYLFSIVGYLFFKDDFILEVDRLPNETAVPETGESLASEFLFSDVCRVESGENCSSPAPREELVPAEETEQDKEHTCETLLMCIVTVLSHGLRSGGGVGDVLRKPSKEEPLFAARVIYDLLFFFMVIIIVLNLIFGVIIDTFADLRSEKQKKEEILKTTCFICGLERDKFDNKTVTFEEHIKEEHNMWHYLCFIVLVKVKDSTEYTGPESYVAEMIKERNLDWFPRMRAMSLVSSDSEGEQNELRNLQEKLESTMKLVTNLSGQLSELKDQMTEQRKQKQRIGLLGHPPHMNVNPQQPA

SEQ ID NO: 40337 - protein, 2743 aa, Homo sapiens; identical to SEQ ID NO: 40333
  Payload ID: 8214
  Gene Symbol: ITPR1
  Gene Name: inositol 1,4,5-trisphosphate receptor, type 1
  Uniprot ID: Q14643
  ENSP ID: ENSP00000401671

SEQ ID NO: 40338 - protein, 721 aa, Homo sapiens
  Payload ID: 8214
  Gene Symbol: ITPR1
  Gene Name: inositol 1,4,5-trisphosphate receptor, type 1
  ENSP ID: ENSP00000440564
MSDKMSSFLHIGDICSLYAEGSTNGFISTLGLVDDRCVVQPETGDLNNPPKKFRDCLFKLCPMNRYSAQKQFWKAAKPGANSTTDAVLLNKLHHAADLEKKQNETENRKLLGTVIQYGNVIQLLHLKSNKYLTVNKRLPALLEKNAMRVTLDEAGNEGSWFYIQPFYKLRSIGDSVVIGDKVVLNPVNAGQPLHASSHQLVDNPGCNEVNSVNCNTSWKIVLFMKWSDNKDDILKGGDVVRLFHAEQEKFLTCDEHRKKQHVFLRTTGRQSATSATSSKALWEVEVVQHDPCRGGAGYWNSLFRFKHLATGHYLAAEVDPDFEEECLEFQPSVCNKIIFLMSFVGNCGTFTRGYRAMVLDVEFLYHLLYLVICAMGLFVHEFFYSLLLFDLVYREETLLNVIKSVTRNGRSIILTAVLALILVYLFSIVGYLFFKDDFILEVDRLPNETAVPETGESLASEFLFSDVCRVESGENCSSPAPREELVPAEETEQDKEHTCETLLMCIVTVLSHGLRSGGGVGDVLRKPSKEEPLFAARVIYDLLFFFMVIIIVLNLIFGVIIDTFADLRSEKQKKEEILKTTCFICGLERDKFDNKTVTFEEHIKEEHNMWHYLCFIVLVKVKDSTEYTGPESYVAEMIKERNLDWFPRMRAMSLVSSDSEGEQNELRNLQEKLESTMKLVTNLSGQLSELKDQMTEQRKQKQRIGLLGHPPHMNVNPQQPA

SEQ ID NO: 40339 - protein, 181 aa, Homo sapiens
  Payload ID: 8215
  Gene Symbol: ITPR2
  Gene Name: inositol 1,4,5-trisphosphate receptor, type 2
  Uniprot ID: Q14571
  ENSP ID: ENSP00000242737
MTEKMSSFLYIGDIVSLYAEGSVNGFISTLGLVDDRCVVHPEAGDLANPPKKFRDCLFKVCPMNRYSAQKQYWKAKQAKQGNHTEAALLKKLQHAAELEQKQNESENKKLLGEIVKYSNVIQLLHIKSNKYLTVNKRLPALLEKNAMRVSLDAAGNEGSWFYIHPFWKLRSEGDNDASFWI

SEQ ID NO: 40340 - protein, 2701 aa, Homo sapiens
  Payload ID: 8215
  Gene Symbol: ITPR2
  Gene Name: inositol 1,4,5-trisphosphate receptor, type 2
  Uniprot ID: Q14571
  ENSP ID: ENSP00000370744
MTEKMSSFLYIGDIVSLYAEGSVNGFISTLGLVDDRCVVHPEAGDLANPPKKFRDCLFKVCPMNRYSAQKQYWKAKQAKQGNHTEAALLKKLQHAAELEQKQNESENKKLLGEIVKYSNVIQLLHIKSNKYLTVNKRLPALLEKNAMRVSLDAAGNEGSWFYIHPFWKLRSEGDNIVVGDKVVLMPVNAGQPLHASNIELLDNPGCKEVNAVNCNTSWKITLFMKYSSYREDVLKGGDVVRLFHAEQEKFLTCDEYEKKQHIFLRTTLRQSATSATSSKALWEIEVVHHDPCRGGAGQWNSLFRFKHLATGNYLAAELNPDYRDAQNEGKNVRDGVPPTSKKKRQAGEKIMYTLVSVPHGNDIASLFELDATTLQRADCLVPRNSYVRLRHLCTNTWVTSTSIPIDTDEERPVMLKIGTCQTKEDKEAFAIVSVPLSEVRDLDFANDANKVLATTVKKLENGTITQNERRFVTKLLEDLIFFVADVPNNGQEVLDVVITKPNRERQKLMREQNILAQVFGILKAPFKEKAGEGSMLRLEDLGDQRYAPYKYMLRLCYRVLRHSQQDYRKNQEYIAKNFCVMQSQIGYDILAEDTITALLHNNRKLLEKHITAKEIETFVSLLRRNREPRFLDYLSDLCVSNTTAIPVTQELICKFMLSPGNADILIQTKVVSMQADNPMESSILSDDIDDEEVWLYWIDSNKEPHGKAIRHLAQEAKEGTKADLEVLTYYRYQLNLFARMCLDRQYLAINQISTQLSVDLILRCVSDESLPFDLRASFCRLMLHMHVDRDPQESVVPVRYARLWTEIPTKITIHEYDSITDSSRNDMKRKFALTMEFVEEYLKEVVNQPFPFGDKEKNKLTFEVVHLARNLIYFGFYSFSELLRLTRTLLAILDIVQAPMSSYFERLSKFQDGGNNVMRTIHGVGEMMTQMVLSRGSIFPMSVPDVPPSIHPSKQGSPTEHEDVTVMDTKLKIIEILQFILSVRLDYRISYMLSIYKKEFGEDNDNAETSASGSPDTLLPSAIVPDIDEIAAQAETMFAGRKEKNPVQLDDEGGRTFLRVLIHLIMHDYPPLLSGALQLLFKHFSQRAEVLQAFKQVQLLVSNQDVDNYKQIKADLDQLRLTVEKSELWVEKSSNYENGEIGESQVKGGEEPIEESNILSPVQDGTKKPQIDSNKSNNYRIVKEILIRLSKLCVQNKKCRNQHQRLLKNMGAHSVVLDLLQIPYEKNDEKMNEVMNLAHTFLQNFCRGNPQNQVLLHKHLNLFLTPGLLEAETMRHIFMNNYHLCNEISERVVQHFVHCIETHGRHVEYLRFLQTIVKADGKYVKKCQDMVMTELINGGEDVLIFYNDRASFPILLHMMCSERDRGDESGPLAYHITLVELLAACTEGKNVYTEIKCNSLLPLDDIVRVVTHDDCIPEVKIAYVNFVNHCYVDTEVEMKEIYTSNHIWKLFENFLVDMARVCNTTTDRKHADIFLEKCVTESIMNIVSGFFNSPFSDNSTSLQTHQPVFIQLLQSAFRIYNCTWPNPAQKASVESCIRTLAEVAKNRGIAIPVDLDSQVNTLFMKSHSNMVQRAAMGWRLSARSGPRFKEALGGPAWDYRNIIEKLQDVVASLEHQFSPMMQAEFSVLVDVLYSPELLFPEGSDARIRCGAFMSKLINHTKKLMEKEEKLCIKILQTLREMLEKKDSFVEEGNTLRKILLNRYFKGDYSIGVNGHLSGAYSKTAQVGGSFSGQDSDKMGISMSDIQCLLDKEGASELVIDVIVNTKNDRIFSEGIFLGIALLEGGNTQTQYSFYQQLHEQKKSEKFFKVLYDRMKAAQKEIRSTVTVNTIDLGNKKRDDDNELMTSGPRMRVRDSTLHLKEGMKGQLTEASSATSKAYCVYRREMDPEIDIMCTGPEAGNTEEKSAEEVTMSPAIAIMQPILRFLQLLCENHNRELQNFLRNQNNKTNYNLVCETLQFLDCICGSTTGGLGLLGLYINEKNVALVNQNLESLTEYCQGPCHENQTCIATHESNGIDIIIALILNDINPLGKYRMDLVLQLKNNASKLLLAIMESRHDSENAERILFNMRPRELVDVMKNAYNQGLECDHGDDEGGDDGVSPKDVGHNIYILAHQLARHNKLLQQMLKPGSDPDEGDEALKYYANHTAQIEIVRHDRTMEQIVFPVPNICEYLTRESKCRVFNTTERDEQGSKVNDFFQQTEDLYNEMKWQKKIRNNPALFWFSRHISLWGSISFNLAVFINLAVALFYPFGDDGDEGTLSPLFSVLLWIAVAICTSMLFFFSKPVGIRPFLVSIMLRSIYTIGLGPTLILLGAANLCNKIVFLVSFVGNRGTFTRGYRAVILDMAFLYHVAYVLVCMLGLFVHEFFYSFLLFDLVYREETLLNVIKSVTRNGRSIILTAVLALILVYLFSIIGFLFLKDDFTMEVDRLKNRTPVTGSHQVPTMTLTTMMEACAKENCSPTIPASNTADEEYEDGIERTCDTLLMCIVTVLNQGLRNGGGVGDVLRRPSKDEPLFAARVVYDLLFYFIVIIIVLNLIFGVIIDTFADLRSEKQKKEEILKTTCFICGLERDKFDNKTVSFEEHIKSEHNMWHYLYFIVLVKVKDPTEYTGPESYVAQMIVEKNLDWFPRMRAMSLVSNEGDSEQNEIRSLQEKLESTMSLVKQLSGQLAELKEQMTEQRKNKQRLGFLGSNTPHVNHHMPPH

SEQ ID NO: 40341 - protein, 102 aa, Homo sapiens
  Payload ID: 8215
  Gene Symbol: ITPR2
  Gene Name: inositol 1,4,5-trisphosphate receptor, type 2
  ENSP ID: ENSP00000408287
NTKNDRIFSEGIFLGIALLEGGNTQTQYSFYQQLHEQKKSEKFFKVLYDRMKAAQKEIRSTVTVNTIDLGNKKRDDDNELMTSGPRMREFWSWGDPKTALQD

SEQ ID NO: 40342 - protein, 79 aa, Homo sapiens
  Payload ID: 8215
  Gene Symbol: ITPR2
  Gene Name: inositol 1,4,5-trisphosphate receptor, type 2
  ENSP ID: ENSP00000440548
MTEKMSSFLYIGDIVSLYAEGSVNGFISTLGLPFQGVPYEQIFCPEAILESKASQTREPHRGSLAEETTARCRTGTKTK

SEQ ID NO: 40343 - protein, 2671 aa, Homo sapiens
  Payload ID: 8216
  Gene Symbol: ITPR3
  Gene Name: inositol 1,4,5-trisphosphate receptor, type 3
  Uniprot ID: Q14573
  ENSP ID: ENSP00000363435
MSEMSSFLHIGDIVSLYAEGSVNGFISTLGLVDDRCVVEPAAGDLDNPPKKFRDCLFKVCPMNRYSAQKQYWKAKQTKQDKEKIADVVLLQKLQHAAQMEQKQNDTENKKVHGDVVKYGSVIQLLHMKSNKYLTVNKRLPALLEKNAMRVTLDATGNEGSWLFIQPFWKLRSNGDNVVVGDKVILNPVNAGQPLHASNYELSDNAGCKEVNSVNCNTSWKINLFMQFRDHLEEVLKGGDVVRLFHAEQEKFLTCDEYKGKLQVFLRTTLRQSATSATSSNALWEVEVVHHDPCRGGAGHWNGLYRFKHLATGNYLAAEENPSYKGDASDPKAAGMGAQGRTGRRNAGEKIKYCLVAVPHGNDIASLFELDPTTLQKTDSFVPRNSYVRLRHLCTNTWIQSTNVPIDIEEERPIRLMLGTCPTKEDKEAFAIVSVPVSEIRDLDFANDASSMLASAVEKLNEGFISQNDRRFVIQLLEDLVFFVSDVPNNGQNVLDIMVTKPNRERQKLMREQNILKQVFGILKAPFREKGGEGPLVRLEELSDQKNAPYQHMFRLCYRVLRHSQEDYRKNQEHIAKQFGMMQSQIGYDILAEDTITALLHNNRKLLEKHITKTEVETFVSLVRKNREPRFLDYLSDLCVSNHIAIPVTQELICKCVLDPKNSDILIRTELRPVKEMAQSHEYLSIEYSEEEVWLTWTDKNNEHHEKSVRQLAQEARAGNAHDENVLSYYRYQLKLFARMCLDRQYLAIDEISQQLGVDLIFLCMADEMLPFDLRASFCHLMLHVHVDRDPQELVTPVKFARLWTEIPTAITIKDYDSNLNASRDDKKNKFANTMEFVEDYLNNVVSEAVPFANEEKNKLTFEVVSLAHNLIYFGFYSFSELLRLTRTLLGIIDCVQGPPAMLQAYEDPGGKNVRRSIQGVGHMMSTMVLSRKQSVFSAPSLSAGASAAEPLDRSKFEENEDIVVMETKLKILEILQFILNVRLDYRISYLLSVFKKEFVEVFPMQDSGADGTAPAFDSTTANMNLDRIGEQAEAMFGVGKTSSMLEVDDEGGRMFLRVLIHLTMHDYAPLVSGALQLLFKHFSQRQEAMHTFKQVQLLISAQDVENYKVIKSELDRLRTMVEKSELWVDKKGSGKGEEVEAGAAKDKKERPTDEEGFLHPPGEKSSENYQIVKGILERLNKMCGVGEQMRKKQQRLLKNMDAHKVMLDLLQIPYDKGDAKMMEILRYTHQFLQKFCAGNPGNQALLHKHLHLFLTPGLLEAETMQHIFLNNYQLCSEISEPVLQHFVHLLATHGRHVQYLDFLHTVIKAEGKYVKKCQDMIMTELTNAGDDVVVFYNDKASLAHLLDMMKAARDGVEDHSPLMYHISLVDLLAACAEGKNVYTEIKCTSLLPLEDVVSVVTHEDCITEVKMAYVNFVNHCYVDTEVEMKEIYTSNHIWTLFENFTLDMARVCSKREKRVADPTLEKYVLSVVLDTINAFFSSPFSENSTSLQTHQTIVVQLLQSTTRLLECPWLQQQHKGSVEACIRTLAMVAKGRAILLPMDLDAHISSMLSSGASCAAAAQRNASSYKATTRAFPRVTPTANQWDYKNIIEKLQDIITALEERLKPLVQAELSVLVDVLHWPELLFLEGSEAYQRCESGGFLSKLIQHTKDLMESEEKLCIKVLRTLQQMLLKKTKYGDRGNQLRKMLLQNYLQNRKSTSRGDLPDPIGTGLDPDWSAIAATQCRLDKEGATKLVCDLITSTKNEKIFQESIGLAIHLLDGGNTEIQKSFHNLMMSDKKSERFFKVLHDRMKRAQQETKSTVAVNMNDLGSQPHEDREPVDPTTKGRVASFSIPGSSSRYSLGPSLRRGHEVSERVQSSEMGTSVLIMQPILRFLQLLCENHNRDLQNFLRCQNNKTNYNLVCETLQFLDIMCGSTTGGLGLLGLYINEDNVGLVIQTLETLTEYCQGPCHENQTCIVTHESNGIDIITALILNDISPLCKYRMDLVLQLKDNASKLLLALMESRHDSENAERILISLRPQELVDVIKKAYLQEEERENSEVSPREVGHNIYILALQLSRHNKQLQHLLKPVKRIQEEEAEGISSMLSLNNKQLSQMLKSSAPAQEEEEDPLAYYENHTSQIEIVRQDRSMEQIVFPVPGICQFLTEETKHRLFTTTEQDEQGSKVSDFFDQSSFLHNEMEWQRKLRSMPLIYWFSRRMTLWGSISFNLAVFINIIIAFFYPYMEGASTGVLDSPLISLLFWILICFSIAALFTKRYSIRPLIVALILRSIYYLGIGPTLNILGALNLTNKIVFVVSFVGNRGTFIRGYKAMVMDMEFLYHVGYILTSVLGLFAHELFYSILLFDLIYREETLFNVIKSVTRNGRSILLTALLALILVYLFSIVGFLFLKDDFILEVDRLPNNHSTASPLGMPHGAAAFVDTCSGDKMDCVSGLSVPEVLEEDRELDSTERACDTLLMCIVTVMNHGLRNGGGVGDILRKPSKDESLFPARVVYDLLFFFIVIIIVLNLIFGVIIDTFADLRSEKQKKEEILKTTCFICGLERDKFDNKTVSFEEHIKLEHNMWNYLYFIVLVRVKNKTDYTGPESYVAQMIKNKNLDWFPRMRAMSLVSNEGEGEQNEIRILQDKLNSTMKLVSHLTAQLNELKEQMTEQRKRRQRLGFVDVQNCISR

SEQ ID NO: 40344 - protein, 2671 aa, Homo sapiens; identical to SEQ ID NO: 40343
  Payload ID: 8216
  Gene Symbol: ITPR3
  Gene Name: inositol 1,4,5-trisphosphate receptor, type 3
  Uniprot ID: Q14573
  ENSP ID: ENSP00000475177

SEQ ID NO: 40345 - protein, 441 aa, Homo sapiens
  Payload ID: 8217
  Gene Symbol: IP6K1
  Gene Name: inositol hexakisphosphate kinase 1
  Uniprot ID: Q92551
  ENSP ID: ENSP00000323780
MCVCQTMEVGQYGKNASRAGDRGVLLEPFIHQVGGHSSMMRYDDHTVCKPLISREQRFYESLPPEMKEFTPEYKGVVSVCFEGDSDGYINLVAYPYVESETVEQDDTTEREQPRRKHSRRSLHRSGSGSDHKEEKASLSLETSESSQEAKSPKVELHSHSEVPFQMLDGNSGLSSEKISHNPWSLRCHKQQLSRMRSESKDRKLYKFLLLENVVHHFKYPCVLDLKMGTRQHGDDASAEKAARQMRKCEQSTSATLGVRVCGMQVYQLDTGHYLCRNKYYGRGLSIEGFRNALYQYLHNGLDLRRDLFEPILSKLRGLKAVLERQASYRFYSSSLLVIYDGKECRAESCLDRRSEMRLKHLDMVLPEVASSCGPSTSPSNTSPEAGPSSQPKVDVRMIDFAHSTFKGFRDDPTVHDGPDRGYVFGLENLISIMEQMRDENQ

SEQ ID NO: 40346 - protein, 276 aa, Homo sapiens
  Payload ID: 8217
  Gene Symbol: IP6K1
  Gene Name: inositol hexakisphosphate kinase 1
  Uniprot ID: Q92551
  ENSP ID: ENSP00000378659
MLDGNSGLSSEKISHNPWSLRCHKQQLSRMRSESKDRKLYKFLLLENVVHHFKYPCVLDLKMGTRQHGDDASAEKAARQMRKCEQSTSATLGVRVCGMQVYQLDTGHYLCRNKYYGRGLSIEGFRNALYQYLHNGLDLRRDLFEPILSKLRGLKAVLERQASYRFYSSSLLVIYDGKECRAESCLDRRSEMRLKHLDMVLPEVASSCGPSTSPSNTSPEAGPSSQPKVDVRMIDFAHSTFKGFRDDPTVHDGPDRGYVFGLENLISIMEQMRDENQ

SEQ ID NO: 40347 - protein, 274 aa, Homo sapiens
  Payload ID: 8217
  Gene Symbol: IP6K1
  Gene Name: inositol hexakisphosphate kinase 1
  ENSP ID: ENSP00000420467
MCVCQTMEVGQYGKNASRAGDRGVLLEPFIHQVGGHSSMMRYDDHTVCKPLISREQRFYESLPPEMKEFTPEYKGVVSVCFEGDSDGYINLVAYPYVESETVEQDDTTEREQPRRKHSRRSLHRSGSGSDHKEEKASLSLETSESSQEAKSPKVELHSHSEVPFQMLDGNSGLSSEKISHNPWSLRCHKQQLSRMRSESKDRKLYKFLLLENVVHHFKYPCVLDLKMGTRQHGDDASAEKAARQMRKCEQSTSATLGVRVCGMQEQVLWPWALH

SEQ ID NO: 40348 - protein, 276 aa, Homo sapiens; identical to SEQ ID NO: 40346
  Payload ID: 8217
  Gene Symbol: IP6K1
  Gene Name: inositol hexakisphosphate kinase 1
  Uniprot ID: Q92551
  ENSP ID: ENSP00000420762

SEQ ID NO: 40349 - protein, 441 aa, Homo sapiens; identical to SEQ ID NO: 40345
  Payload ID: 8217
  Gene Symbol: IP6K1
  Gene Name: inositol hexakisphosphate kinase 1
  Uniprot ID: Q92551
  ENSP ID: ENSP00000482032

SEQ ID NO: 40350 - protein, 426 aa, Homo sapiens
  Payload ID: 8218
  Gene Symbol: IP6K2
  Gene Name: inositol hexakisphosphate kinase 2
  Uniprot ID: Q9UHH9
  ENSP ID: ENSP00000331103
MSPAFRAMDVEPRAKGVLLEPFVHQVGGHSCVLRFNETTLCKPLVPREHQFYETLPAEMRKFTPQYKGVVSVRFEEDEDRNLCLIAYPLKGDHGIVDIVDNSDCEPKSKLLRWTTNKKHHVLETEKTPKDWVRQHRKEEKMKSHKLEEEFEWLKKSEVLYYTVEKKGNISSQLKHYNPWSMKCHQQQLQRMKENAKHRNQYKFILLENLTSRYEVPCVLDLKMGTRQHGDDASEEKAANQIRKCQQSTSAVIGVRVCGMQVYQAGSGQLMFMNKYHGRKLSVQGFKEALFQFFHNGRYLRRELLGPVLKKLTELKAVLERQESYRFYSSSLLVIYDGKERPEVVLDSDAEDLEDLSEESADESAGAYAYKPIGASSVDVRMIDFAHTTCRLYGEDTVVHEGQDAGYIFGLQSLIDIVTEISEESGE

SEQ ID NO: 40351 - protein, 97 aa, Homo sapiens
  Payload ID: 8218
  Gene Symbol: IP6K2
  Gene Name: inositol hexakisphosphate kinase 2
  Uniprot ID: Q9UHH9
  ENSP ID: ENSP00000341925
MSPAFRAMDVEPRAKGVLLEPFVHQVGGHSCVLRFNETTLCKPLVPREHQFYETLPAEMRKFTPQYKGQSQRPLVSWPSLPHFFPWSFPLWPQGSVA

SEQ ID NO: 40352 - protein, 130 aa, Homo sapiens
  Payload ID: 8218
  Gene Symbol: IP6K2
  Gene Name: inositol hexakisphosphate kinase 2
  ENSP ID: ENSP00000387394
MSPAFRAMDVEPRAKGVLLEPFVHQVGGHSCVLRFNETTLCKPLVPREHQFYETLPAEMRKFTPQYKGKSQLLEGLPHWRGDVRDRGHGRPWQPSLEPSLPPTLCFPSLSSFSSSWPSAQHLTPSVFNPW

SEQ ID NO: 40353 - protein, 70 aa, Homo sapiens
  Payload ID: 8218
  Gene Symbol: IP6K2
  Gene Name: inositol hexakisphosphate kinase 2
  Uniprot ID: Q9UHH9
  ENSP ID: ENSP00000387759
MSPAFRAMDVEPRAKGVLLEPFVHQVGGHSCVLRFNETTLCKPLVPREHQFYETLPAEMRKFTPQYKGVS

SEQ ID NO: 40354 - protein, 130 aa, Homo sapiens; identical to SEQ ID NO: 40352
  Payload ID: 8218
  Gene Symbol: IP6K2
  Gene Name: inositol hexakisphosphate kinase 2
  ENSP ID: ENSP00000388116

SEQ ID NO: 40355 - protein, 54 aa, Homo sapiens
  Payload ID: 8218
  Gene Symbol: IP6K2
  Gene Name: inositol hexakisphosphate kinase 2
  ENSP ID: ENSP00000388420
MSPAFRAMDVEPRAKGVLLEPFVHQVGGHSCVLRFNETTLCKPLVPREHQFYET

SEQ ID NO: 40356 - protein, 128 aa, Homo sapiens
  Payload ID: 8218
  Gene Symbol: IP6K2
  Gene Name: inositol hexakisphosphate kinase 2
  ENSP ID: ENSP00000389755
MNLCQSPFQEGCQSLLASWPEQAKEPRREGHTDKQQTEDVLAAGLRCLPHLPAICARRMSPAFRAMDVEPRAKGVLLEPFVHQVGGHSCVLRFNETTLCKPLVPREHQFYETLPAEMRKFTPQYKGVS

SEQ ID NO: 40357 - protein, 100 aa, Homo sapiens
  Payload ID: 8218
  Gene Symbol: IP6K2
  Gene Name: inositol hexakisphosphate kinase 2
  ENSP ID: ENSP00000389761
MSPAFRAMDVEPRAKGVLLEPFVHQVGGHSCVLRFNETTLCKPLVPREHQFYETLPAEMRKFTPQYKGVVSVRFEEDEDRNLCLIAYPLKGDHGIVDIVD

SEQ ID NO: 40358 - protein, 130 aa, Homo sapiens; identical to SEQ ID NO: 40352
  Payload ID: 8218
  Gene Symbol: IP6K2
  Gene Name: inositol hexakisphosphate kinase 2
  ENSP ID: ENSP00000393077

SEQ ID NO: 40359 - protein, 54 aa, Homo sapiens; identical to SEQ ID NO: 40355
  Payload ID: 8218
  Gene Symbol: IP6K2
  Gene Name: inositol hexakisphosphate kinase 2
  ENSP ID: ENSP00000393797

SEQ ID NO: 40360 - protein, 151 aa, Homo sapiens
  Payload ID: 8218
  Gene Symbol: IP6K2
  Gene Name: inositol hexakisphosphate kinase 2
  ENSP ID: ENSP00000394488
MSLNLPEASLLRASWPEQAKEPRREGHTDKQQTEDVLAAGLRCLPHLPAICARRMSPAFRAMDVEPRAKGVLLEPFVHQVGGHSCVLRFNETTLCKPLVPREHQFYETLPAEMRKFTPQYKGQSQRPLVSWPSLPHFFPWSFPLWPQGSVA

SEQ ID NO: 40361 - protein, 87 aa, Homo sapiens
  Payload ID: 8218
  Gene Symbol: IP6K2
  Gene Name: inositol hexakisphosphate kinase 2
  ENSP ID: ENSP00000395819
MSPAFRAMDVEPRAKGVLLEPFVHQVGGHSCVLRFNETTLCKPLVPREHQFYETLPAEMRKFTPQYKGVVSVRFEEDEDRNLCLIAY

SEQ ID NO: 40362 - protein, 97 aa, Homo sapiens; identical to SEQ ID NO: 40351
  Payload ID: 8218
  Gene Symbol: IP6K2
  Gene Name: inositol hexakisphosphate kinase 2
  Uniprot ID: Q9UHH9
  ENSP ID: ENSP00000396203

SEQ ID NO: 40363 - protein, 130 aa, Homo sapiens; identical to SEQ ID NO: 40352
  Payload ID: 8218
  Gene Symbol: IP6K2
  Gene Name: inositol hexakisphosphate kinase 2
  ENSP ID: ENSP00000396904

SEQ ID NO: 40364 - protein, 188 aa, Homo sapiens
  Payload ID: 8218
  Gene Symbol: IP6K2
  Gene Name: inositol hexakisphosphate kinase 2
  Uniprot ID: Q9UHH9
  ENSP ID: ENSP00000399052
MNLCQSPFQEGCQSLLASWPEQAKEPRREGHTDKQQTEDVLAAGLRCLPHLPAICARRMSPAFRAMDVEPRAKGVLLEPFVHQVGGHSCVLRFNETTLCKPLVPREHQFYETLPAEMRKFTPQYKGKSQLLEGLPHWRGDVRDRGHGRPWQPSLEPSLPPTLCFPSLSSFSSSWPSAQHLTPSVFNPW

SEQ ID NO: 40365 - protein, 87 aa, Homo sapiens
  Payload ID: 8218
  Gene Symbol: IP6K2
  Gene Name: inositol hexakisphosphate kinase 2
  Uniprot ID: Q9UHH9
  ENSP ID: ENSP00000400812
MSPAFRAMDVEPRAKGVLLEPFVHQVGGHSCVLRFNETTLCKPLVPREHQFYETLPAEMRKFTPQYKGDISSHQHGGVFVGEWGSLL

SEQ ID NO: 40366 - protein, 91 aa, Homo sapiens
  Payload ID: 8218
  Gene Symbol: IP6K2
  Gene Name: inositol hexakisphosphate kinase 2
  ENSP ID: ENSP00000403968
MSPAFRAMDVEPRAKGVLLEPFVHQVGGHSCVLRFNETTLCKPLVPREHQFYETLPAEMRKFTPQYKGVVSVRFEEDEDRNLCLIAYPLKG

SEQ ID NO: 40367 - protein, 95 aa, Homo sapiens
  Payload ID: 8218
  Gene Symbol: IP6K2
  Gene Name: inositol hexakisphosphate kinase 2
  ENSP ID: ENSP00000406357
MSLNLPEASLLRASWPEQAKEPRREGHTDKQQTEDVLAAGLRCLPHLPAICARRMSPAFRAMDVEPRAKGVLLEPFVHQVGGHSCVLRFNETTLC

SEQ ID NO: 40368 - protein, 148 aa, Homo sapiens
  Payload ID: 8218
  Gene Symbol: IP6K2
  Gene Name: inositol hexakisphosphate kinase 2
  ENSP ID: ENSP00000410454
MNLCQSPFQEGCQSLLASWPEQAKEPRREGHTDKQQTEDVLAAGLRCLPHLPAICARRMSPAFRAMDVEPRAKGVLLEPFVHQVGGHSCVLRFNETTLCKPLVPREHQFYETLPAEMRKFTPQYKGQSQRPLVSWPSLPHFFPWSFPL

SEQ ID NO: 40369 - protein, 189 aa, Homo sapiens
  Payload ID: 8218
  Gene Symbol: IP6K2
  Gene Name: inositol hexakisphosphate kinase 2
  ENSP ID: ENSP00000410950
MNLCQSPFQEGCQSLLRASWPEQAKEPRREGHTDKQQTEDVLAAGLRCLPHLPAICARRMSPAFRAMDVEPRAKGVLLEPFVHQVGGHSCVLRFNETTLCKPLVPREHQFYETLPAEMRKFTPQYKGKSQLLEGLPHWRGDVRDRGHGRPWQPSLEPSLPPTLCFPSLSSFSSSWPSAQHLTPSVFNPW

SEQ ID NO: 40370 - protein, 130 aa, Homo sapiens
  Payload ID: 8218
  Gene Symbol: IP6K2
  Gene Name: inositol hexakisphosphate kinase 2
  ENSP ID: ENSP00000411776
MSPAFRAMDVEPRAKGVLLEPFVHQVGGHSCVLRFNETTLCKPLVPREHQFYETLPAEMRKFTPQYKAVLIFVKFADEFGASGNIETKELGVVSVRFEEDEDRNLCLIAYPLKGDHGIVDIVDNSDCEPK

SEQ ID NO: 40371 - protein, 140 aa, Homo sapiens
  Payload ID: 8218
  Gene Symbol: IP6K2
  Gene Name: inositol hexakisphosphate kinase 2
  ENSP ID: ENSP00000412121
MSLNLPEASLLRASWPEQAKEPRREGHTDKQQTEDVLAAGLRCLPHLPAICARRMSPAFRAMDVEPRAKGVLLEPFVHQVGGHSCVLRFNETTLCKPLVPREHQFYETLPAEMRKFTPQYKGVVSVRFEEDEDRNLCLIA

SEQ ID NO: 40372 - protein, 185 aa, Homo sapiens
  Payload ID: 8218
  Gene Symbol: IP6K2
  Gene Name: inositol hexakisphosphate kinase 2
  Uniprot ID: Q9UHH9
  ENSP ID: ENSP00000414139
MSLNLPEASLLSRASWPEQAKEPRREGHTDKQQTEDVLAAGLRCLPHLPAICARRMSPAFRAMDVEPRAKGVLLEPFVHQVGGHSCVLRFNETTLCKPLVPREHQFYETLPAEMRKFTPQYKGKSQLLEGLPHWRGDVRDRGHGRPWQPSLEPSLPPTLCFPSLSSFSSSWPSAQHLTPSVFNPW

SEQ ID NO: 40373 - protein, 104 aa, Homo sapiens
  Payload ID: 8218
  Gene Symbol: IP6K2
  Gene Name: inositol hexakisphosphate kinase 2
  ENSP ID: ENSP00000414428
MSPAFRAMDVEPRAKGVLLEPFVHQVGGHSCVLRFNETTLCKPLVPREHQFYETLPAEMRKFTPQYKGVVSVRFEEDEDRNLCLIAYPLKGDHGIVDIVDNSDC

SEQ ID NO: 40374 - protein, 410 aa, Homo sapiens
  Payload ID: 8219
  Gene Symbol: IP6K3
  Gene Name: inositol hexakisphosphate kinase 3
  Uniprot ID: Q96PC2
  ENSP ID: ENSP00000293756
MVVQNSADAGDMRAGVQLEPFLHQVGGHMSVMKYDEHTVCKPLVSREQRFYESLPLAMKRFTPQYKGTVTVHLWKDSTGHLSLVANPVKESQEPFKVSTESAAVAIWQTLQQTTGSNGSDCTLAQWPHAQLARSPKESPAKALLRSEPHLNTPAFSLVEDTNGNQVERKSFNPWGLQCHQAHLTRLCSEYPENKRHRFLLLENVVSQYTHPCVLDLKMGTRQHGDDASEEKKARHMRKCAQSTSACLGVRICGMQVYQTDKKYFLCKDKYYGRKLSVEGFRQALYQFLHNGSHLRRELLEPILHQLRALLSVIRSQSSYRFYSSSLLVIYDGQEPPERAPGSPHPHEAPQAAHGSSPGGLTKVDIRMIDFAHTTYKGYWNEHTTYDGPDPGYIFGLENLIRILQDIQEGE

SEQ ID NO: 40375 - protein, 410 aa, Homo sapiens; identical to SEQ ID NO: 40374
  Payload ID: 8219
  Gene Symbol: IP6K3
  Gene Name: inositol hexakisphosphate kinase 3
  Uniprot ID: Q96PC2
  ENSP ID: ENSP00000398861

SEQ ID NO: 40376 - protein, 76 aa, Homo sapiens
  Payload ID: 8219
  Gene Symbol: IP6K3
  Gene Name: inositol hexakisphosphate kinase 3
  ENSP ID: ENSP00000489479
MVVQNSADAGDMRAGVQLEPFLHQVGGHMSVMKYDEHTVCKPLVSREQRFYESLPLAMKRFTPQYKGTVTVHLWKD

SEQ ID NO: 40377 - protein, 359 aa, Homo sapiens
  Payload ID: 8220
  Gene Symbol: IMPAD1
  Gene Name: inositol monophosphatase domain containing 1
  Uniprot ID: Q9NX62
  ENSP ID: ENSP00000262644
MAPMGIRLSPLGVAVFCLLGLGVLYHLYSGFLAGRFSLFGLGGEPGGGAAGPAAAADGGTVDLREMLAVSVLAAVRGGDEVRRVRESNVLHEKSKGKTREGAEDKMTSGDVLSNRKMFYLLKTAFPSVQINTEEHVDAADQEVILWDHKIPEDILKEVTTPKEVPAESVTVWIDPLDATQEYTEDLRKYVTTMVCVAVNGKPMLGVIHKPFSEYTAWAMVDGGSNVKARSSYNEKTPRIVVSRSHSGMVKQVALQTFGNQTTIIPAGGAGYKVLALLDVPDKSQEKADLYIHVTYIKKWDICAGNAILKALGGHMTTLSGEEISYTGSDGIEGGLLASIRMNHQALVRKLPDLEKTGHK

SEQ ID NO: 40378 - protein, 82 aa, Homo sapiens
  Payload ID: 8220
  Gene Symbol: IMPAD1
  Gene Name: inositol monophosphatase domain containing 1
  ENSP ID: ENSP00000428617
  MOD_RES (1)..(1): Any amino acid
XTTPKEVPAESVTVWIDPLDATQEYTEDLRKYVTTMVCVAVNGKPMLGVIHKPFSEYTARNKLVMQLVSLLAMVDYILPCSE

SEQ ID NO: 40379 - protein, 82 aa, Homo sapiens
  Payload ID: 8220
  Gene Symbol: IMPAD1
  Gene Name: inositol monophosphatase domain containing 1
  ENSP ID: ENSP00000430185
RGGDEVRRVRESNVLHEKSKGKTREGAEDKMTSGDVLSNRKMFYLLKTAFPSVQINTEEHVDAADQEAGAGESLEPERWRLQ

SEQ ID NO: 40380 - protein, 416 aa, Homo sapiens
  Payload ID: 8221
  Gene Symbol: IPMK
  Gene Name: inositol polyphosphate multikinase
  Uniprot ID: Q8NFU5
  ENSP ID: ENSP00000363046
MATEPPSPLRVEAPGPPEMRTSPAIESTPEGTPQPAGGRLRFLNGCVPLSHQVAGHMYGKDKVGILQHPDGTVLKQLQPPPRGPRELEFYNMVYAADCFDGVLLELRKYLPKYYGIWSPPTAPNDLYLKLEDVTHKFNKPCIMDVKIGQKSYDPFASSEKIQQQVSKYPLMEEIGFLVLGMRVYHVHSDSYETENQHYGRSLTKETIKDGVSRFFHNGYCLRKDAVAASIQKIEKILQWFENQKQLNFYASSLLFVYEGSSQPTTTKLNDRTLAEKFLSKGQLSDTEVLEYNNNFHVLSSTANGKIESSVGKSLSKMYARHRKIYTKKHHSQTSLKVENLEQDNGWKSMSQEHLNGNVLSQLEKVFYHLPTGCQEIAEVEVRMIDFAHVFPSNTIDEGYVYGLKHLISVLRSILDN

SEQ ID NO: 40381 - protein, 1258 aa, Homo sapiens
  Payload ID: 8222
  Gene Symbol: INPPL1
  Gene Name: inositol polyphosphate phosphatase-like 1
  Uniprot ID: O15357
  ENSP ID: ENSP00000298229
MASACGAPGPGGALGSQAPSWYHRDLSRAAAEELLARAGRDGSFLVRDSESVAGAFALCVLYQKHVHTYRILPDGEDFLAVQTSQGVPVRRFQTLGELIGLYAQPNQGLVCALLLPVEGEREPDPPDDRDASDGEDEKPPLPPRSGSTSISAPTGPSSPLPAPETPTAPAAESAPNGLSTVSHDYLKGSYGLDLEAVRGGASHLPHLTRTLATSCRRLHSEVDKVLSGLEILSKVFDQQSSPMVTRLLQQQNLPQTGEQELESLVLKLSVLKDFLSGIQKKALKALQDMSSTAPPAPQPSTRKAKTIPVQAFEVKLDVTLGDLTKIGKSQKFTLSVDVEGGRLVLLRRQRDSQEDWTTFTHDRIRQLIKSQRVQNKLGVVFEKEKDRTQRKDFIFVSARKREAFCQLLQLMKNKHSKQDEPDMISVFIGTWNMGSVPPPKNVTSWFTSKGLGKTLDEVTVTIPHDIYVFGTQENSVGDREWLDLLRGGLKELTDLDYRPIAMQSLWNIKVAVLVKPEHENRISHVSTSSVKTGIANTLGNKGAVGVSFMFNGTSFGFVNCHLTSGNEKTARRNQNYLDILRLLSLGDRQLNAFDISLRFTHLFWFGDLNYRLDMDIQEILNYISRKEFEPLLRVDQLNLEREKHKVFLRFSEEEISFPPTYRYERGSRDTYAWHKQKPTGVRTNVPSWCDRILWKSYPETHIICNSYGCTDDIVTSDHSPVFGTFEVGVTSQFISKKGLSKTSDQAYIEFESIEAIVKTASRTKFFIEFYSTCLEEYKKSFENDAQSSDNINFLKVQWSSRQLPTLKPILADIEYLQDQHLLLTVKSMDGYESYGECVVALKSMIGSTAQQFLTFLSHRGEETGNIRGSMKVRVPTERLGTRERLYEWISIDKDEAGAKSKAPSVSRGSQEPRSGSRKPAFTEASCPLSRLFEEPEKPPPTGRPPAPPRAAPREEPLTPRLKPEGAPEPEGVAAPPPKNSFNNPAYYVLEGVPHQLLPPEPPSPARAPVPSATKNKVAITVPAPQLGHHRHPRVGEGSSSDEESGGTLPPPDFPPPPLPDSAIFLPPSLDPLPGPVVRGRGGAEARGPPPPKAHPRPPLPPGPSPASTFLGEVASGDDRSCSVLQMAKTLSEVDYAPAGPARSALLPGPLELQPPRGLPSDYGRPLSFPPPRIRESIQEDLAEEAPCLQGGRASGLGEAGMSAWLRAIGLERYEEGLVHNGWDDLEFLSDITEEDLEEAGVQDPAHKRLLLDTLQLSK

SEQ ID NO: 40382 - protein, 149 aa, Homo sapiens
  Payload ID: 8222
  Gene Symbol: INPPL1
  Gene Name: inositol polyphosphate phosphatase-like 1
  ENSP ID: ENSP00000321775
  MOD_RES (1)..(1): Any amino acid
XPARSALLPGPLELQPPRGLPSDYGRPLSFPPPRIRESIQEDLAEEAPCLQGGRASGLGEAGMSAWLRAIGLERYEEGLVHNGWDDLEFLRWGRGWPRGRSWGPQDPLAHLTSQPVLLHSDITEEDLEEAGVQDPAHKRLLLDTLQLSK

SEQ ID NO: 40383 - protein, 41 aa, Homo sapiens
  Payload ID: 8222
  Gene Symbol: INPPL1
  Gene Name: inositol polyphosphate phosphatase-like 1
  ENSP ID: ENSP00000437852
  MOD_RES (1)..(1): Any amino acid
XTIPPCLGHLRLELPPSSSPRKGSQRLQTRPTLSLRASRPL

SEQ ID NO: 40384 - protein, 127 aa, Homo sapiens
  Payload ID: 8222
  Gene Symbol: INPPL1
  Gene Name: inositol polyphosphate phosphatase-like 1
  ENSP ID: ENSP00000440018
MVTRLLQQQALKALQDMSSTAPPAPQPSTRKAKTIPVQAFEVKLDVTLGDLTKIGKSQKFTLSVDVEGGRLVLLRRQRDSQEDWTTFTHDRIRQLIKSQRVQNKLGVVFEKEKDRTQRKDFIFVSAR

SEQ ID NO: 40385 - protein, 17 aa, Homo sapiens
  Payload ID: 8222
  Gene Symbol: INPPL1
  Gene Name: inositol polyphosphate phosphatase-like 1
  ENSP ID: ENSP00000440512
MASACGAPGPGGALGSQ

SEQ ID NO: 40386 - protein, 22 aa, Homo sapiens
  Payload ID: 8222
  Gene Symbol: INPPL1
  Gene Name: inositol polyphosphate phosphatase-like 1
  ENSP ID: ENSP00000440904
MASACGAPGPGGALGSQAPSWY

SEQ ID NO: 40387 - protein, 197 aa, Homo sapiens
  Payload ID: 8222
  Gene Symbol: INPPL1
  Gene Name: inositol polyphosphate phosphatase-like 1
  ENSP ID: ENSP00000441094
VLEGVPHQLLPPEPPSPARAPVPSATKNKVAITVPAPQLGHHRHPRVGEGSSSDEESGGTLPPPDFPPPPLPDSAIFLPPSLDPLPGPVVRGRGGAEARGPPPPKAHPRPPLPPGPSPASTFLGEVASGDDRSCSVLQMAKTLSEVDYAPAGPARSALLPGPLELQPPRGLPSDYGRPLSFPPPRIRESIQEDLAEE

SEQ ID NO: 40388 - protein, 1016 aa, Homo sapiens
  Payload ID: 8222
  Gene Symbol: INPPL1
  Gene Name: inositol polyphosphate phosphatase-like 1
  Uniprot ID: O15357
  ENSP ID: ENSP00000444619
MVTRLLQQQNLPQTGEQELESLVLKLSVLKDFLSGIQKKALKALQDMSSTAPPAPQPSTRKAKTIPVQAFEVKLDVTLGDLTKIGKSQKFTLSVDVEGGRLVLLRRQRDSQEDWTTFTHDRIRQLIKSQRVQNKLGVVFEKEKDRTQRKDFIFVSARKREAFCQLLQLMKNKHSKQDEPDMISVFIGTWNMGSVPPPKNVTSWFTSKGLGKTLDEVTVTIPHDIYVFGTQENSVGDREWLDLLRGGLKELTDLDYRPIAMQSLWNIKVAVLVKPEHENRISHVSTSSVKTGIANTLGNKGAVGVSFMFNGTSFGFVNCHLTSGNEKTARRNQNYLDILRLLSLGDRQLNAFDISLRFTHLFWFGDLNYRLDMDIQEILNYISRKEFEPLLRVDQLNLEREKHKVFLRFSEEEISFPPTYRYERGSRDTYAWHKQKPTGVRTNVPSWCDRILWKSYPETHIICNSYGCTDDIVTSDHSPVFGTFEVGVTSQFISKKGLSKTSDQAYIEFESIEAIVKTASRTKFFIEFYSTCLEEYKKSFENDAQSSDNINFLKVQWSSRQLPTLKPILADIEYLQDQHLLLTVKSMDGYESYGECVVALKSMIGSTAQQFLTFLSHRGEETGNIRGSMKVRVPTERLGTRERLYEWISIDKDEAGAKSKAPSVSRGSQEPRSGSRKPAFTEASCPLSRLFEEPEKPPPTGRPPAPPRAAPREEPLTPRLKPEGAPEPEGVAAPPPKNSFNNPAYYVLEGVPHQLLPPEPPSPARAPVPSATKNKVAITVPAPQLGHHRHPRVGEGSSSDEESGGTLPPPDFPPPPLPDSAIFLPPSLDPLPGPVVRGRGGAEARGPPPPKAHPRPPLPPGPSPASTFLGEVASGDDRSCSVLQMAKTLSEVDYAPAGPARSALLPGPLELQPPRGLPSDYGRPLSFPPPRIRESIQEDLAEEAPCLQGGRASGLGEAGMSAWLRAIGLERYEEGLVHNGWDDLEFLSDITEEDLEEAGVQDPAHKRLLLDTLQLSK

SEQ ID NO: 40389 - protein, 33 aa, Homo sapiens
  Payload ID: 8222
  Gene Symbol: INPPL1
  Gene Name: inositol polyphosphate phosphatase-like 1
  ENSP ID: ENSP00000444630
MVTRLLQQQNLPQTGEQELESLVLKLSVLKDFL

SEQ ID NO: 40390 - protein, 1146 aa, Homo sapiens
  Payload ID: 8222
  Gene Symbol: INPPL1
  Gene Name: inositol polyphosphate phosphatase-like 1
  ENSP ID: ENSP00000446360
MCTRIAFCLMEKISWLCRPRRVCLCAASRPWVSSSACTPSPTRALCAPCFFLRVSESRTHRMTGMPQMGRMRSPRCPRALAPPAFLPTGPSSPLPAPETPTAPAAESAPNGLSTVSHDYLKGSYGLDLEAVRGGASHLPHLTRTLATSCRRLHSEVDKVLSGLEILSKVFDQQSSPMVTRLLQQQNLPQTGEQELESLVLKLSVLKDFLSGIQKKALKALQDMSSTAPPAPQPSTRKAKTIPVQAFEVKLDVTLGDLTKIGKSQKFTLSVDVEGGRLVLLRRQRDSQEDWTTFTHDRIRQLIKSQRVQNKLGVVFEKEKDRTQRKDFIFVSARKREAFCQLLQLMKNKHSKQDEPDMISVFIGTWNMGSVPPPKNVTSWFTSKGLGKTLDEVTVTIPHDIYVFGTQENSVGDREWLDLLRGGLKELTDLDYRPIAMQSLWNIKVAVLVKPEHENRISHVSTSSVKTGIANTLGNKGAVGVSFMFNGTSFGFVNCHLTSGNEKTARRNQNYLDILRLLSLGDRQLNAFDISLRFTHLFWFGDLNYRLDMDIQEILNYISRKEFEPLLRVDQLNLEREKHKVFLRFSEEEISFPPTYRYERGSRDTYAWHKQKPTGVRTNVPSWCDRILWKSYPETHIICNSYGCTDDIVTSDHSPVFGTFEVGVTSQFISKKGLSKTSDQAYIEFESIEAIVKTASRTKFFIEFYSTCLEEYKKSFENDAQSSDNINFLKVQWSSRQLPTLKPILADIEYLQDQHLLLTVKSMDGYESYGECVVALKSMIGSTAQQFLTFLSHRGEETGNIRGSMKVRVPTERLGTRERLYEWISIDKDEAGAKSKAPSVSRGSQEPRSGSRKPAFTEASCPLSRLFEEPEKPPPTGRPPAPPRAAPREEPLTPRLKPEGAPEPEGVAAPPPKNSFNNPAYYVLEGVPHQLLPPEPPSPARAPVPSATKNKVAITVPAPQLGHHRHPRVGEGSSSDEESGGTLPPPDFPPPPLPDSAIFLPPSLDPLPGPVVRGRGGAEARGPPPPKAHPRPPLPPGPSPASTFLGEVASGDDRSCSVLQMAKTLSEVDYAPAGPARSALLPGPLELQPPGTALGLWPAPQLPSTPHPGEHPGRPGRGGSVPAGRAGQRAGRGRHECLAAGHRLGAL

SEQ ID NO: 40391 - protein, 399 aa, Homo sapiens
  Payload ID: 8223
  Gene Symbol: INPP1
  Gene Name: inositol polyphosphate-1-phosphatase
  Uniprot ID: P49441
  ENSP ID: ENSP00000325423
MSDILRELLCVSEKAANIARACRQQEALFQLLIEEKKEGEKNKKFAVDFKTLADVLVQEVIKQNMENKFPGLEKNIFGEESNEFTNDWGEKITLRLCSTEEETAELLSKVLNGNKVASEALARVVHQDVAFTDPTLDSTEINVPQDILGIWVDPIDSTYQYIKGSADIKSNQGIFPCGLQCVTILIGVYDIQTGVPLMGVINQPFVSRDPNTLRWKGQCYWGLSYMGTNMHSLQLTISRRNGSETHTGNTGSEAAFSPSFSAVISTSEKETIKAALSRVCGDRIFGAAGAGYKSLCVVQGLVDIYIFSEDTTFKWDSCAAHAILRAMGGGIVDLKECLERNPETGLDLPQLVYHVENEGAAGVDRWANKGGLIAYRSRKRLETFLSLLVQNLAPAETHT

SEQ ID NO: 40392 - protein, 399 aa, Homo sapiens; identical to SEQ ID NO: 40391
  Payload ID: 8223
  Gene Symbol: INPP1
  Gene Name: inositol polyphosphate-1-phosphatase
  Uniprot ID: P49441
  ENSP ID: ENSP00000376142

SEQ ID NO: 40393 - protein, 155 aa, Homo sapiens
  Payload ID: 8223
  Gene Symbol: INPP1
  Gene Name: inositol polyphosphate-1-phosphatase
  ENSP ID: ENSP00000387079
MSDILRELLCVSEKAANIARACRQQEALFQLLIEEKKEGEKNKKFAVDFKTLADVLVQEVIKQNMENKFPGLEKNIFGEESNEFTNDWGEKITLRLCSTEEETAELLSKVLNGNKVASEALARVVHQDVAFTDPTLDSTEINVPQDILGIWVDPI

SEQ ID NO: 40394 - protein, 88 aa, Homo sapiens
  Payload ID: 8223
  Gene Symbol: INPP1
  Gene Name: inositol polyphosphate-1-phosphatase
  ENSP ID: ENSP00000391415
MSDILRELLCVSEKAANIARACRQQEALFQLLIEEKKEGEKNKKFAVDFKTLADVLVQEVIKQNMENKFPGLEKNIFGEESNEFTNDW

SEQ ID NO: 40395 - protein, 143 aa, Homo sapiens
  Payload ID: 8223
  Gene Symbol: INPP1
  Gene Name: inositol polyphosphate-1-phosphatase
  ENSP ID: ENSP00000392814
MSDILRELLCVSEKAANIARACRQQEALFQLLIEEKKEGEKNKKFAVDFKTLADVLVQEVIKQNMENKFPGLEKNIFGEESNEFTNDWGEKITLRLCSTEEETAELLSKVLNGNKVASEALARVVHQDVAFTDPTLDSTEINV

SEQ ID NO: 40396 - protein, 212 aa, Homo sapiens
  Payload ID: 8223
  Gene Symbol: INPP1
  Gene Name: inositol polyphosphate-1-phosphatase
  ENSP ID: ENSP00000395424
MSDILRELLCVSEKAANIARACRQQEALFQLLIEEKKEGEKNKKFAVDFKTLADVLVQEVIKQNMENKFPGLEKNIFGEESNEFTNDWGEKITLRLCSTEEETAELLSKVLNGNKVASEALARVVHQDVAFTDPTLDSTEINVPQDILGIWVDPIDSTYQYIKGSADIKSNQGIFPCGLQCVTILIGVYDIQTGVPLMGVINQPFVSRDPNT

SEQ ID NO: 40397 - protein, 190 aa, Homo sapiens
  Payload ID: 8223
  Gene Symbol: INPP1
  Gene Name: inositol polyphosphate-1-phosphatase
  ENSP ID: ENSP00000404732
MSDILRELLCVSEKAANIARACRQQEALFQLLIEEKKEGEKNKKFAVDFKTLADVLVQEVIKQNMENKFPGLEKNIFGEESNEFTNDWGEKITLRLCSTEEETAELLSKVLNGNKVASEALARVVHQDVAFTDPTLDSTEINVPQDILGIWVDPIDSTYQYIKGSADIKSNQGIFPCGLQCVTILIGVYD

SEQ ID NO: 40398 - protein, 213 aa, Homo sapiens
  Payload ID: 8223
  Gene Symbol: INPP1
  Gene Name: inositol polyphosphate-1-phosphatase
  ENSP ID: ENSP00000409786
MSDILRELLCVSEKAANIARACRQQEALFQLLIEEKKEGEKNKKFAVDFKTLADVLVQEVIKQNMENKFPGLEKNIFGEESNEFTNDWGEKITLRLCSTEEETAELLSKVLNGNKVASEALARVVHQDVAFTDPTLDSTEINVPQDILGIWVDPIDSTYQYIKGSADIKSNQGIFPCGLQCVTILIGVYDIQTGVPLMGVINQPFVSRDPNTL

SEQ ID NO: 40399 - protein, 30 aa, Homo sapiens
  Payload ID: 8223
  Gene Symbol: INPP1
  Gene Name: inositol polyphosphate-1-phosphatase
  ENSP ID: ENSP00000410662
MSDILRELLCVSEKAANIARACRQQEALFQ

SEQ ID NO: 40400 - protein, 68 aa, Homo sapiens
  Payload ID: 8223
  Gene Symbol: INPP1
  Gene Name: inositol polyphosphate-1-phosphatase
  ENSP ID: ENSP00000412119
MSDILRELLCVSEKAANIARACRQQEALFQLLIEEKKEGEKNKKFAVDFKTLADVLVQEVIKQNMENK

SEQ ID NO: 40401 - protein, 9 aa, Homo sapiens
  Payload ID: 8223
  Gene Symbol: INPP1
  Gene Name: inositol polyphosphate-1-phosphatase
  ENSP ID: ENSP00000415014
MSDILRELL

SEQ ID NO: 40402 - protein, 977 aa, Homo sapiens
  Payload ID: 8224
  Gene Symbol: INPP4A
  Gene Name: inositol polyphosphate-4-phosphatase type I A
  Uniprot ID: Q96PE3
  ENSP ID: ENSP00000074304
MTAREHSPRHGARARAMQRASTIDVAADMLGLSLAGNIQDPDEPILEFSLACSELHTPSLDRKPNSFVAVSVTTPPQAFWTKHAQTEIIEGTNNPIFLSSIAFFQDSLINQMTQVKLSVYDVKDRSQGTMYLLGSGTFIVKDLLQDRHHRLHLTLRSAESDRVGNITVIGWQMEEKSDQRPPVTRSVDTVNGRMVLPVDESLTEALGIRSKYASLRKDTLLKSVFGGAICRMYRFPTTDGNHLRILEQMAESVLSLHVPRQFVKLLLEEDAARVCELEELGELSPCWESLRRQIVTQYQTIILTYQENLTDLHQYRGPSFKASSLKADKKLEFVPTNLHIQRMRVQDDGGSDQNYDIVTIGAPAAHCQGFKSGGLRKKLHKFEETKKHFEECCTSSGCQSIIYIPQDVVRAKEIIAQINTLKTQVSYYAERLSRAAKDRSATGLERTLAILADKTRQLVTVCDCKLLANSIHGLNAARPDYIASKASPTSTEEEQVMLRNDQDTLMARWTGRNSRSSLQVDWHEEEWEKVWLNVDKSLECIIQRVDKLLQKERLHGEGCEDVFPCAGSCTSKKGNPDSHAYWIRPEDPFCDVPSSPCPSTMPSTACHPHLTTHCSPPPEESSPGEWSEALYPLLTTLTDCVAMMSDKAKKAMVFLLMQDSAPTIATYLSLQYRRDVVFCQTLTALICGFIIKLRNCLHDDGFLRQLYTIGLLAQFESLLSTYGEELAMLEDMSLGIMDLRNVTFKVTQATSSASADMLPVITGNRDGFNVRVPLPGPLFDALPREIQSGMLLRVQPVLFNVGINEQQTLAERFGDTSLQEVINVESLVRLNSYFEQFKEVLPEDCLPRSRSQTCLPELLRFLGQNVHARKNKNVDILWQAAEICRRLNGVRFTSCKSAKDRTAMSVTLEQCLILQHEHGMAPQVFTQALECMRSEGCRRENTMKNVGSRKYAFNSLQLKAFPKHYRPPEGTYGKVET

SEQ ID NO: 40403 - protein, 306 aa, Homo sapiens
  Payload ID: 8224
  Gene Symbol: INPP4A
  Gene Name: inositol polyphosphate-4-phosphatase type I A
  ENSP ID: ENSP00000386329
MTAREHSPRHGARARAMQRASTIDVAADMLGLSLAGNIQDPDEPILEFSLACSELHTPSLDRKPNSFVAVSVTTPPQATSSASADMLPVITGNRDGFNVRVPLPGPLFDALPREIQSGMLLRVQPVLFNVGINEQQTLAERFGDTSLQEVINVESLVRLNSYFEQFKEVLPEDCLPRSRSQTCLPELLRFLGQNVHARKNKNVDILWQAAEICRRLNGVRFTSCKSAKDRTAMSVTLEQCLILQHEHGMAPQVFTQALECMRSEGCRRENTMKNVGSRKYAFNSLQLKAFPKHYRPPEGTYGKVET

SEQ ID NO: 40404 - protein, 938 aa, Homo sapiens
  Payload ID: 8224
  Gene Symbol: INPP4A
  Gene Name: inositol polyphosphate-4-phosphatase type I A
  Uniprot ID: Q96PE3
  ENSP ID: ENSP00000386704
MTAREHSPRHGARARAMQRASTIDVAADMLGLSLAGNIQDPDEPILEFSLACSELHTPSLDRKPNSFVAVSVTTPPQAFWTKHAQTEIIEGTNNPIFLSSIAFFQDSLINQMTQVKLSVYDVKDRSQGTMYLLGSGTFIVKDLLQDRHHRLHLTLRSAESDRVGNITVIGWQMEEKSDQRPPVTRSVDTVNGRMVLPVDESLTEALGIRSKYASLRKDTLLKSVFGGAICRMYRFPTTDGNHLRILEQMAESVLSLHVPRQFVKLLLEEDAARVCELEELGELSPCWESLRRQIVTQYQTIILTYQENLTDLHQYRGPSFKASSLKADKKLEFVPTNLHIQRMRVQDDGGSDQNYDIVTIGAPAAHCQGFKSGGLRKKLHKFEETKKHFEECCTSSGCQSIIYIPQDVVRAKEIIAQINTLKTQVSYYAERLSRAAKDRSATGLERTLAILADKTRQLVTVCDCKLLANSIHGLNAARPDYIASKASPTSTEEEQVMLRNDQDTLMARWTGRNSRSSLQVDWHEEEWEKVWLNVDKSLECIIQRVDKLLQKERLHGEGCEDVFPCAGSCTSKKDCSPPPEESSPGEWSEALYPLLTTLTDCVAMMSDKAKKAMVFLLMQDSAPTIATYLSLQYRRDVVFCQTLTALICGFIIKLRNCLHDDGFLRQLYTIGLLAQFESLLSTYGEELAMLEDMSLGIMDLRNVTFKVTQATSSASADMLPVITGNRDGFNVRVPLPGPLFDALPREIQSGMLLRVQPVLFNVGINEQQTLAERFGDTSLQEVINVESLVRLNSYFEQFKEVLPEDCLPRSRSQTCLPELLRFLGQNVHARKNKNVDILWQAAEICRRLNGVRFTSCKSAKDRTAMSVTLEQCLILQHEHGMAPQVFTQALECMRSEGCRRENTMKNVGSRKYAFNSLQLKAFPKHYRPPEGTYGKVET

SEQ ID NO: 40405 - protein, 972 aa, Homo sapiens
  Payload ID: 8224
  Gene Symbol: INPP4A
  Gene Name: inositol polyphosphate-4-phosphatase type I A
  Uniprot ID: Q96PE3
  ENSP ID: ENSP00000386777
MTAREHSPRHGARARAMQRASTIDVAADMLGLSLAGNIQDPDEPILEFSLACSELHTPSLDRKPNSFVAVSVTTPPQAFWTKHAQTEIIEGTNNPIFLSSIAFFQDSLINQMTQVKLSVYDVKDRSQGTMYLLGSGTFIVKDLLQDRHHRLHLTLRSAESDRVGNITVIGWQMEEKSDQRPPVTRSVDTVNGRMVLPVDESLTEALGIRSKYASLRKDTLLKSVFGGAICRMYRFPTTDGNHLRILEQMAESVLSLHVPRQFVKLLLEEDAARVCELEELGELSPCWESLRRQIVTQYQTIILTYQENLTDLHQYRGPSFKASSLKADKKLEFVPTNLHIQRMRVQDDGGSDQNYDIVTIGAPAAHCQGFKSGGLRKKLHKFEETKKHTSSGCQSIIYIPQDVVRAKEIIAQINTLKTQVSYYAERLSRAAKDRSATGLERTLAILADKTRQLVTVCDCKLLANSIHGLNAARPDYIASKASPTSTEEEQVMLRNDQDTLMARWTGRNSRSSLQVDWHEEEWEKVWLNVDKSLECIIQRVDKLLQKERLHGEGCEDVFPCAGSCTSKKGNPDSHAYWIRPEDPFCDVPSSPCPSTMPSTACHPHLTTHCSPPPEESSPGEWSEALYPLLTTLTDCVAMMSDKAKKAMVFLLMQDSAPTIATYLSLQYRRDVVFCQTLTALICGFIIKLRNCLHDDGFLRQLYTIGLLAQFESLLSTYGEELAMLEDMSLGIMDLRNVTFKVTQATSSASADMLPVITGNRDGFNVRVPLPGPLFDALPREIQSGMLLRVQPVLFNVGINEQQTLAERFGDTSLQEVINVESLVRLNSYFEQFKEVLPEDCLPRSRSQTCLPELLRFLGQNVHARKNKNVDILWQAAEICRRLNGVRFTSCKSAKDRTAMSVTLEQCLILQHEHGMAPQVFTQALECMRSEGCRRENTMKNVGSRKYAFNSLQLKAFPKHYRPPEGTYGKVET

SEQ ID NO: 40406 - protein, 954 aa, Homo sapiens
  Payload ID: 8224
  Gene Symbol: INPP4A
  Gene Name: inositol polyphosphate-4-phosphatase type I A
  Uniprot ID: Q96PE3
  ENSP ID: ENSP00000387294
MTAREHSPRHGARARAMQRASTIDVAADMLGLSLAGNIQDPDEPILEFSLACSELHTPSLDRKPNSFVAVSVTTPPQAFWTKHAQTEIIEGTNNPIFLSSIAFFQDSLINQMTQVKLSVYDVKDRSQGTMYLLGSGTFIVKDLLQDRHHRLHLTLRSAESDRVGNITVIGWQMEEKSDQRPPVTRSVDTVNGRMVLPVDESLTEALGIRSKYASLRKDTLLKSVFGGAICRMYRFPTTDGNHLRILEQMAESVLSLHVPRQFVKLLLEEDAARVCELEELGELSPCWESLRRQIVTQYQTIILTYQENLTDLHQYRGPSFKASSLKADKKLEFVPTNLHIQRMRVQDDGGSDQNYDIVTIGAPAAHCQGFKSGGLRKKLHKFEETKKHFEECCTSSGCQSIIYIPQDVVRAKEIIAQINTLKTQVSYYAERLSRAAKDRSATGLERTLAILADKTRQLVTVCDCKLLANSIHGLNAARPDYIASKASPTSTEEEQVMLRNDQDTLMARWTGRNSRSSLQVDWHEEEWEKVWLNVDKSLECIIQRVDKLLQKERLHGEGCEDVFPCAGSCTSKKDCSPPPEESSPGEWSEALYPLLTTLTDCVAMMSDKAKKAMVFLLMQDSAPTIATYLSLQYRRDVVFCQTLTALICGFIIKLRNCLHDDGFLRQLYTIGLLAQFESLLSTYGEELAMLEDMSLGIMDLRNVTFKVTQATSSASADMLPVITGNRDGFNVRVPLPGPLFDALPREIQSGMLLRVQPVLFNVGINEQQTLAERFGDTSLQEVINVESLVRLNSYFEQFKEVLPEDCLPRSRSQTCLPELLRFLGQNVHARKNKNVDILWQAAEICRRLNGVRFTSCKSAKDRTAMSVTLEQCLILQHEHGMAPQVFTQALECMRSIGTREVVTQKNLSGLVPIRDLRLDPSLLCSIPLLALSPNLLIVWLFLSIAYLVTKLRCK

SEQ ID NO: 40407 - protein, 977 aa, Homo sapiens; identical to SEQ ID NO: 40402
  Payload ID: 8224
  Gene Symbol: INPP4A
  Gene Name: inositol polyphosphate-4-phosphatase type I A
  Uniprot ID: Q96PE3
  ENSP ID: ENSP00000427722

SEQ ID NO: 40408 - protein, 924 aa, Homo sapiens
  Payload ID: 8225
  Gene Symbol: INPP4B
  Gene Name: inositol polyphosphate-4-phosphatase type II B
  Uniprot ID: O15327
  ENSP ID: ENSP00000262992
MEIKEEGASEEGQHFLPTAQANDPGDCQFTSIQKTPNEPQLEFILACKDLVAPVRDRKLNTLVQISVIHPVEQSLTRYSSTEIVEGTRDPLFLTGVTFPSEYPIYEETKIKLTVYDVKDKSHDTVRTSVLPEHKDPPPEVGRSFLGYASFKVGELLKSKEQLLVLSLRTSDGGKVVGTIEVSVVKMGEIEDGEADHITTDVQGQKCALVCECTAPESVSGKDNLPFLNSVLKNPVCKLYRFPTSDNKWMRIREQMSESILSFHIPKELISLHIKEDLCRNQEIKELGELSPHWDNLRKNVLTHCDQMVNMYQDILTELSKETGSSFKSSSSKGEKTLEFVPINLHLQRMQVHSPHLKDALYDVITVGAPAAHFQGFKNGGLRKLLHRFETERRNTGYQFIYYSPENTAKAKEVLSNINQLQPLIATHADLLLNSASQHSPDSLKNSLKMLSEKTELFVHAFKDQLVRSALLALYTARPGGILKKPPSPKSSTEESSPQDQPPVMRGQDSIPHHSDYDEEEWDRVWANVGKSLNCIIAMVDKLIERDGGSEGSGGNNDGEKEPSLTDAIPSHPREDWYEQLYPLILTLKDCMGEVVNRAKQSLTFVLLQELAYSLPQCLMLTLRRDIVFSQALAGLVCGFIIKLQTSLYDPGFLQQLHTVGLIVQYEGLLSTYSDEIGMLEDMAVGISDLKKVAFKIIEAKSNDVLPVITGRREHYVVEVKLPARMFESLPLQIKEGQLLHVYPVLFNVGINEQQTLAERFGDVSLQESINQENFELLQEYYKIFMEKMPPDYISHFQEQNDLKALLENLLQNIQSKKRKNVEIMWLAATICRKLNGIRFTCCKSAKDRTSMSVTLEQCSILRDEHQLHKDFFIRALDCMRREGCRIENVLKNIKCRKYAFNMLQLMAFPKYYRPPEGTYGKADT

SEQ ID NO: 40409 - protein, 47 aa, Homo sapiens
  Payload ID: 8225
  Gene Symbol: INPP4B
  Gene Name: inositol polyphosphate-4-phosphatase type II B
  ENSP ID: ENSP00000420888
MEIKEEGASEEGQHFLPTAQANDPGDCQFTSIQKTPNEPQLEFILGN

SEQ ID NO: 40410 - protein, 686 aa, Homo sapiens
  Payload ID: 8225
  Gene Symbol: INPP4B
  Gene Name: inositol polyphosphate-4-phosphatase type II B
  ENSP ID: ENSP00000421065
MIHFHPLILPHERSFLGYASFKVGELLKSKEQLLVLSLRTSDGGKVVGTIEVSVVKMGEIEDGEADHITTDVQGQKCALVCECTAPESVSGKDNLPFLNSVLKNPVCKLYRFPTSDNKWMRIREQMSESILSFHIPKELISLHIKEDLCRNQEIKELGELSPHWDNLRKNVLTHCDQMVNMYQDILTELSKETGSSFKSSSSKGEKTLEFVPINLHLQRMQVHSPHLKDALYDVITVGAPAAHFQGFKNGGLRKLLHRFETERRNTGYQFIYYSPENTAKAKEVLSNINQLQPLIATHADLLLNSASQHSPDSLKNSLKMLSEKTELFVHAFKDQLVRSALLALYTARPGGILKKPPSPKSSTEESSPQDQPPVMRGQDSIPHHSDYDEEEWDRVWANVGKSLNCIIAMVDKLIERDGGSEGSGGNNDGEKEPSLTDAIPSHPREDWYEQLYPLILTLKDCMGEVVNRAKQSLTFVLLQELAYSLPQCLMLTLRRDIVFSQALAGLVCGFIIKLQTSLYDPGFLQQLHTVGLIVQYEGLLSTYSDEIGMLEDMAVGISDLKKVAFKIIEAKSNDVLPVITGRREHYVVEVKLPARMFESLPLQIKEGQLLHVYPVLFNVGINEQQTLAERFGDVSLQESINQENFELLQEYYKIFMEKMPPDYISHFQEQNDLKALLENLLQNIQS

SEQ ID NO: 40411 - protein, 39 aa, Homo sapiens
  Payload ID: 8225
  Gene Symbol: INPP4B
  Gene Name: inositol polyphosphate-4-phosphatase type II B
  ENSP ID: ENSP00000422052
MEIKEEGASEEGQHFLPTAQANDPGDCQFTSIQKTPNEP

SEQ ID NO: 40412 - protein, 938 aa, Homo sapiens
  Payload ID: 8225
  Gene Symbol: INPP4B
  Gene Name: inositol polyphosphate-4-phosphatase type II B
  ENSP ID: ENSP00000422793
MEIKEEGASEEGQHFLPTAQANDPGDCQFTSIQKTPNEPQLEFILACKDLVAPVRDRKLNTLVQISVIHPVEQSLTRYSSTEIVEGTRDPLFLTGVTFPSEYPIYEETKIKLTVYDVKDKSHDTVRTSVLPEHKDPPPEVGRSFLGYASFKVGELLKSKEQLLVLSLRTSDGGKVVGTIEVSVVKMGEIEDGEADHITTDVQGQKCALVCECTAPESVSGKDNLPFLNSVLKNPVCKLYRFPTSDNKWMRIREQMSESILSFHIPKELISLHIKEDLCRNQEIKELGELSPHWDNLRKNVLTHCDQMVNMYQDILTELSKETGSSFKSSSSKGEKTLEFVPINLHLQRMQVHSPHLKDALYDVITVGAPAAHFQGFKNGGLRKLLHRFETERRNTGYQFIYYSPENTAKAKEVLSNINQLQPLIATHADLLLNSASQHSPDSLKNSLKMLSEKTELFVHAFKDQLVRSALLALYTARPGGILKKPPSPKSSTEESSPQDQPPVMRGQDSIPHHSDYDEEEWDRVWANVGKSLNCIIAMVDKLIERDGGSEGSGGNNDGEKEPSLTDAIPSHPREDWYEQLYPLILTLKDCMGEVVNRAKQSLTFVLLQELAYSLPQCLMLTLRRDIVFSQALAGLVCGFIIKLQTSLYDPGFLQQLHTVGLIVQYEGLLSTYSDEIGMLEDMAVGISDLKKVAFKIIEAKSNDVLPVITGRREHYVVEVKLPARMFESLPLQIKEGQLLHVYPVLFNVGINEQQTLAERFGDVSLQESINQENFELLQEYYKIFMEKMPPDYISHFQEQNDLKALLENLLQNIQSKKRKNVEIMWLAATICRKLNGIRFTCCKSAKDRTSMSVTLEQCSILRDEHQLHKDFFIRALDCMRSRQTQGALNESDDPETGCLTDNKPTSRHFYPVALLLVSSHLLVVWLILSLALLLAKYQ

SEQ ID NO: 40413 - protein, 416 aa, Homo sapiens
  Payload ID: 8225
  Gene Symbol: INPP4B
  Gene Name: inositol polyphosphate-4-phosphatase type II B
  ENSP ID: ENSP00000423771
MEIKEEGASEEGQHFLPTAQANDPGDCQFTSIQKTPNEPQLEFILACKDLVAPVRDRKLNTLVQISVIHPVEQSLTRYSSTEIVEGTRDPLFLTGVTFPSEYPIYEETKIKLTVYDVKDKSHDTVRTSVLPEHKDPPPEVGRSFLGYASFKVGELLKSKEQLLVLSLRTSDGGKVVGTIEVSVVKMGEIEDGEADHITTDVQGQKCALVCECTAPESVSGKDNLPFLNSVLKNPVCKLYRFPTSDNKWMRIREQMSESILSFHIPKELISLHIKEDLCRNQEIKELGELSPHWDNLRKNVLTHCDQMVNMYQDILTELSKETGSSFKSSSSKGEKTLEFVPINLHLQRMQMLSTMSSLWEPQLPIFRDLRMVVFGSYSIDLKQKEEIPDTSLFTIHLKTQPKQRKFSATSINYNLL

SEQ ID NO: 40414 - protein, 924 aa, Homo sapiens; identical to SEQ ID NO: 40408
  Payload ID: 8225
  Gene Symbol: INPP4B
  Gene Name: inositol polyphosphate-4-phosphatase type II B
  Uniprot ID: O15327
  ENSP ID: ENSP00000423954

SEQ ID NO: 40415 - protein, 131 aa, Homo sapiens
  Payload ID: 8225
  Gene Symbol: INPP4B
  Gene Name: inositol polyphosphate-4-phosphatase type II B
  Uniprot ID: O15327
  ENSP ID: ENSP00000424057
MEIKEEGASEEGQHFLPTAQANDPGDCQFTSIQKTPNEPQLEFILACKDLVAPVRDRKLNTLVQISVIHPVEQSLTRYSSTEIVEGTRDPLFLTGVTFPSEYPIYEETKIKLTVYDVKDKSHDTIANSSRI

SEQ ID NO: 40416 - protein, 33 aa, Homo sapiens
  Payload ID: 8225
  Gene Symbol: INPP4B
  Gene Name: inositol polyphosphate-4-phosphatase type II B
  ENSP ID: ENSP00000424731
EYPIYEETKIKLTVYDVKDKSHDTFRINRLTSL

SEQ ID NO: 40417 - protein, 924 aa, Homo sapiens; identical to SEQ ID NO: 40408
  Payload ID: 8225
  Gene Symbol: INPP4B
  Gene Name: inositol polyphosphate-4-phosphatase type II B
  Uniprot ID: O15327
  ENSP ID: ENSP00000425487

SEQ ID NO: 40418 - protein, 65 aa, Homo sapiens
  Payload ID: 8225
  Gene Symbol: INPP4B
  Gene Name: inositol polyphosphate-4-phosphatase type II B
  ENSP ID: ENSP00000425764
  MOD_RES (1)..(1): Any amino acid
XIHPVEQSLTRYSSTEIVEGTRDPLFLTGVTFPSEYPIYEETKIKLTVYDVKDKSHDTIANSSRI

SEQ ID NO: 40419 - protein, 688 aa, Homo sapiens
  Payload ID: 8225
  Gene Symbol: INPP4B
  Gene Name: inositol polyphosphate-4-phosphatase type II B
  ENSP ID: ENSP00000426207
MGEIEDGEADHITTDVQGQKCALVCECTAPESVSGKDNLPFLNSVLKNPVCKLYRFPTSDNKWMRIREQMSESILSFHIPKELISLHIKEDLCRNQEIKELGELSPHWDNLRKNVLTHCDQMVNMYQDILTELSKETGSSFKSSSSKGEKTLEFVPINLHLQRMQVHSPHLKDALYDVITVGAPAAHFQGFKNGGLRKLLHRFETERRNTGYQFIYYSPENTAKAKEVLSNINQLQPLIATHADLLLNSASQHSPDSLKNSLKMLSEKTELFVHAFKDQLVRSALLALYTARPGGILKKPPSPKSSTEESSPQDQPPVMRGQDSIPHHSDYDEEEWDRVWANVGKSLNCIIAMVDKLIERDGGSEGSGGNNDGEKEPSLTDAIPSHPREDWYEQLYPLILTLKDCMGEVVNRAKQSLTFVLLQELAYSLPQCLMLTLRRDIVFSQALAGLVCGFIIKLQTSLYDPGFLQQLHTVGLIVQYEGLLSTYSDEIGMLEDMAVGISDLKKVAFKIIEAKSNDVLPVITGRREHYVVEVKLPARMFESLPLQIKEGQLLHVYPVLFNVGINEQQTLAERFGDVSLQESINQENFELLQEYYKIFMEKMPPDYISHFQEQNDLKALLENLLQNIQSKKRKNVEIMWLAATICRKLNGIRFTCCKSAKDRTSMSVTLEQCSILRDEHQLHKDFFI

SEQ ID NO: 40420 - protein, 53 aa, Homo sapiens
  Payload ID: 8225
  Gene Symbol: INPP4B
  Gene Name: inositol polyphosphate-4-phosphatase type II B
  ENSP ID: ENSP00000426897
MEIKEEGASEEGQHFLPTAQANDPGDCQFTSIQKTPNEPQLEFILDLNQELRD

SEQ ID NO: 40421 - protein, 84 aa, Homo sapiens
  Payload ID: 8225
  Gene Symbol: INPP4B
  Gene Name: inositol polyphosphate-4-phosphatase type II B
  ENSP ID: ENSP00000426957
MEIKEEGASEEGQHFLPTAQANDPGDCQFTSIQKTPNEPQLEFILACKDLVAPVRDRKLNTLVQISVIHPVEQSLTRYSSTEIV

SEQ ID NO: 40422 - protein, 817 aa, Homo sapiens
  Payload ID: 8225
  Gene Symbol: INPP4B
  Gene Name: inositol polyphosphate-4-phosphatase type II B
  ENSP ID: ENSP00000427250
MEIKEEGASEEGQHFLPTAQANDPGDCQFTSIQKTPNEPQLEFILACKDLVAPVRDRKLNTLVQISVIHPVEQSLTRYSSTEIVEGTRDPLFLTGVTFPSEYPIYEETKIKLTVYDVKDKSHDTVRTSVLPEHKDPPPEVGRSFLGYASFKVGELLKSKEQLLVLSLRTSDGGKVVGTIEVSVVKMGEIEDGEADHITTDVQGQKCALVCECTAPESVSGKDNLPFLNSVLKNPVCKLYRFPTSDNKWMRIREQMSESILSFHIPKELISLHIKEDLCRNQEIKELGELSPHWDNLRKNVLTHCDQMVNMYQDILTELSKETGSSFKSSSSKGEKTLEFVPINLHLQRMQVHSPHLKDALYDVITVGAPAAHFQGFKNGGLRKLLHRFETERRNTGYQFIYYSPENTAKAKEVLSNINQLQPLIATHADLLLNSASQHSPDSLKNSLKMLSEKTELFVHAFKDQLVRSALLALYTARPGGILKKPPSPKSSTEESSPQDQPPVMRGQDSIPHHSDYDEEEWDRVWANVGKSLNCIIAMVDKLIERDGGSEGSGGNNDGEKEPSLTDAIPSHPREDWYEQLYPLILTLKDCMGEVVNRAKQSLTFVLLQELAYSLPQCLMLTLRRDIVFSQALAGLVCGFIIKLQTSLYDPGFLQQLHTVGLIVQYEGLLSTYSDEIGMLEDMAVGISDLKKVAFKIIEAKSNDVLPVITGRREHYVVEVKLPARMFESLPLQIKEGQLLHVYPVLFNVGINEQQTLAERFGDVSLQESINQENFELLQEYYKIFMEKMPPDYISHFQEQNDLKALLENLLQNIQSKK

SEQ ID NO: 40423 - protein, 53 aa, Homo sapiens; identical to SEQ ID NO: 40420
  Payload ID: 8225
  Gene Symbol: INPP4B
  Gene Name: inositol polyphosphate-4-phosphatase type II B
  ENSP ID: ENSP00000486368

SEQ ID NO: 40424 - protein, 278 aa, Homo sapiens
  Payload ID: 8226
  Gene Symbol: INPP5A
  Gene Name: inositol polyphosphate-5-phosphatase A
  ENSP ID: ENSP00000340707
  MOD_RES (1)..(1): Any amino acid
XQKNWLREFYQVVHTHKPHFMALHCQEFGGKNYEASMSHVDKFVKELLSSDAMKEYNRARVYLDENYKSQEHFTALGSFYFLHESLKNIYQFDFKAKKYRKVAGKEIYSDTLESTPMLEKEKFPQDYFPECKWSRKGFIRTRWCIADCAFDLVNIHLFHDASNLVAWETSPSVYSGIRHKALGYVLDRIIDQRFEKVSYFVFGDFNFRLDSKSVVELLEFDKELSVFKDRLYELDISFPPSYPYSEDARQGEQYMNTRCPAWCDRILMSPSAKELVLR

SEQ ID NO: 40425 - protein, 387 aa, Homo sapiens
  Payload ID: 8226
  Gene Symbol: INPP5A
  Gene Name: inositol polyphosphate-5-phosphatase A
  ENSP ID: ENSP00000357582
MAGKAAAPGTAVLLVTANVGSLFDDPENLQKNWLREFYQVVHTHKPHFMALHCQEFGGKNYEASMSHVDKFVKELLSSDAMKEYNRARVYLDENYKSQEHFTALGSFYFLHESLKNIYQFDFKAKKYRKVAGKEIYSDTLESTPMLEKEKFPQDYFPECKWSRKGFIRTRWCIADCAFDLVNIHLFHDASNLVAWETSPSVYSGIRHKALGYVLDRIIDQRFEKVSYFVFGDFNFRLDSKSVVETLCTKATMQTVRAADTNEVVKLIFRESDNDRKVMLQLEKKLFDYFNQEVFRDNNGTALLEFDKELSVFKDRLYELDISFPPSYPYSEDARQGEQYMNTRCPAWCDRILMSPSAKELVLRVSVCCPSPGHRGMWSAGSGLAQPW

SEQ ID NO: 40426 - protein, 412 aa, Homo sapiens
  Payload ID: 8226
  Gene Symbol: INPP5A
  Gene Name: inositol polyphosphate-5-phosphatase A
  Uniprot ID: Q14642
  ENSP ID: ENSP00000357583
MAGKAAAPGTAVLLVTANVGSLFDDPENLQKNWLREFYQVVHTHKPHFMALHCQEFGGKNYEASMSHVDKFVKELLSSDAMKEYNRARVYLDENYKSQEHFTALGSFYFLHESLKNIYQFDFKAKKYRKVAGKEIYSDTLESTPMLEKEKFPQDYFPECKWSRKGFIRTRWCIADCAFDLVNIHLFHDASNLVAWETSPSVYSGIRHKALGYVLDRIIDQRFEKVSYFVFGDFNFRLDSKSVVETLCTKATMQTVRAADTNEVVKLIFRESDNDRKVMLQLEKKLFDYFNQEVFRDNNGTALLEFDKELSVFKDRLYELDISFPPSYPYSEDARQGEQYMNTRCPAWCDRILMSPSAKELVLRSESEEKVVTYDHIGPNVCMGDHKPVFLAFRIMPGAGKPHAHVHKCCVVQ

SEQ ID NO: 40427 - protein, 104 aa, Homo sapiens
  Payload ID: 8226
  Gene Symbol: INPP5A
  Gene Name: inositol polyphosphate-5-phosphatase A
  ENSP ID: ENSP00000390749
LDISFPPSYPYSEDARQGEQYMNTRCPAWCDRILMSPSAKELVLRSESEEKVVTYDHIGPNVCMGDHKPVFLAFRIMPGAGKRCQRHERTLREPPCSRGPNTHS

SEQ ID NO: 40428 - protein, 138 aa, Homo sapiens
  Payload ID: 8226
  Gene Symbol: INPP5A
  Gene Name: inositol polyphosphate-5-phosphatase A
  ENSP ID: ENSP00000390936
VTANVGSLFDDPENLQKNWLREFYQALGSFYFLHESLKNIYQFDFKAKKYRKVAGKEIYSDTLESTPMLEKEKFPQDYFPECKWSRKGFIRTRWCIADCAFDLVNIHLFHDASNLVAWETSPSVYSGIRHKALGYVLD

SEQ ID NO: 40429 - protein, 319 aa, Homo sapiens
  Payload ID: 8227
  Gene Symbol: INPP5B
  Gene Name: inositol polyphosphate-5-phosphatase B
  ENSP ID: ENSP00000362112
MDQSVAIQETLAEGEYCVIAVQGVLCEGDSRQSRLLGLVRYRLEHGGQEHALFLYTHRRMAITGDDVSLDQIVPVSRDFTLEEVSPDGELYILGSDVTVQLDTAELSLVFQLPFGSQTRMFLHEVARACPGFDSATRDPEFLWLSRYRCAELELEMPTPRGCNSALVTWPGYATIGGGRYPSRKKRWGLEEARPQGAGSVLFWGGAMEKTGFRLMERAHGGGFVWGRSARDGRRDEELEEAGREMSAAAGSRERNTAGSAGGGKLGWGAGPGAAVRPALGWAGSAVWPVDARGEDQSPGGPLEAGTLGQKFCDVLLRRA

SEQ ID NO: 40430 - protein, 993 aa, Homo sapiens
  Payload ID: 8227
  Gene Symbol: INPP5B
  Gene Name: inositol polyphosphate-5-phosphatase B
  Uniprot ID: P32019
  ENSP ID: ENSP00000362114
MDQSVAIQETLAEGEYCVIAVQGVLCEGDSRQSRLLGLVRYRLEHGGQEHALFLYTHRRMAITGDDVSLDQIVPVSRDFTLEEVSPDGELYILGSDVTVQLDTAELSLVFQLPFGSQTRMFLHEVARACPGFDSATRDPEFLWLSRYRCAELELEMPTPRGCNSALVTWPGYATIGGGRYPSRKKRWGLEEARPQGAGSVLFWGGAMEKTGFRLMERAHGGGFVWGRSARDGRRDEELEEAGREMSAAAGSRERNTAGGSNFDGLRPNGKGVPMDQSSRGQDKPESLQPRQNKSKSEITDMVRSSTITVSDKAHILSMQKFGLRDTIVKSHLLQKEEDYTYIQNFRFFAGTYNVNGQSPKECLRLWLSNGIQAPDVYCVGFQELDLSKEAFFFHDTPKEEEWFKAVSEGLHPDAKYAKVKLIRLVGIMLLLYVKQEHAAYISEVEAETVGTGIMGRMGNKGGVAIRFQFHNTSICVVNSHLAAHIEEYERRNQDYKDICSRMQFCQPDPSLPPLTISNHDVILWLGDLNYRIEELDVEKVKKLIEEKDFQMLYAYDQLKIQVAAKTVFEGFTEGELTFQPTYKYDTGSDDWDTSEKCRAPAWCDRILWKGKNITQLSYQSHMALKTSDHKPVSSVFDIGVRVVNDELYRKTLEEIVRSLDKMENANIPSVSLSKREFCFQNVKYMQLKVESFTIHNGQVPCHFEFINKPDEESYCKQWLNANPSRGFLLPDSDVEIDLELFVNKMTATKLNSGEDKIEDILVLHLDRGKDYFLSVSGNYLPSCFGSPIHTLCYMREPILDLPLETISELTLMPVWTGDDGSQLDSPMEIPKELWMMVDYLYRNAVQQEDLFQQPGLRSEFEHIRDCLDTGMIDNLSASNHSVAEALLLFLESLPEPVICYSTYHNCLECSGNYTASKQVISTLPIFHKNVFHYLMAFLRELLKNSAKNHLDENILASIFGSLLLRNPAGHQKLDMTEKKKAQEFIHQFLCNPL

SEQ ID NO: 40431 - protein, 913 aa, Homo sapiens
  Payload ID: 8227
  Gene Symbol: INPP5B
  Gene Name: inositol polyphosphate-5-phosphatase B
  Uniprot ID: P32019
  ENSP ID: ENSP00000362115
MDQSVAIQETLAEGEYCVIAVQGVLCEGDSRQSRLLGLVRYRLEHGGQEHALFLYTHRRMAITGDDVSLDQIVPVSRDFTLEEVSPDGELYILGSDVTVQLDTAELSLVFQLPFGSQTRMFLHEVARACPGFDSATRDPEFLWLSRYRCAELELEMPTPRGCNSALVTWPGYATIGGGGSNFDGLRPNGKGVPMDQSSRGQDKPESLQPRQNKSKSEITDMVRSSTITVSDKAHILSMQKFGLRDTIVKSHLLQKEEDYTYIQNFRFFAGTYNVNGQSPKECLRLWLSNGIQAPDVYCVGFQELDLSKEAFFFHDTPKEEEWFKAVSEGLHPDAKYAKVKLIRLVGIMLLLYVKQEHAAYISEVEAETVGTGIMGRMGNKGGVAIRFQFHNTSICVVNSHLAAHIEEYERRNQDYKDICSRMQFCQPDPSLPPLTISNHDVILWLGDLNYRIEELDVEKVKKLIEEKDFQMLYAYDQLKIQVAAKTVFEGFTEGELTFQPTYKYDTGSDDWDTSEKCRAPAWCDRILWKGKNITQLSYQSHMALKTSDHKPVSSVFDIGVRVVNDELYRKTLEEIVRSLDKMENANIPSVSLSKREFCFQNVKYMQLKVESFTIHNGQVPCHFEFINKPDEESYCKQWLNANPSRGFLLPDSDVEIDLELFVNKMTATKLNSGEDKIEDILVLHLDRGKDYFLSVSGNYLPSCFGSPIHTLCYMREPILDLPLETISELTLMPVWTGDDGSQLDSPMEIPKELWMMVDYLYRNAVQQEDLFQQPGLRSEFEHIRDCLDTGMIDNLSASNHSVAEALLLFLESLPEPVICYSTYHNCLECSGNYTASKQVISTLPIFHKNVFHYLMAFLRELLKNSAKNHLDENILASIFGSLLLRNPAGHQKLDMTEKKKAQEFIHQFLCNPL

SEQ ID NO: 40432 - protein, 993 aa, Homo sapiens; identical to SEQ ID NO: 40430
  Payload ID: 8227
  Gene Symbol: INPP5B
  Gene Name: inositol polyphosphate-5-phosphatase B
  Uniprot ID: P32019
  ENSP ID: ENSP00000362117

SEQ ID NO: 40433 - protein, 749 aa, Homo sapiens
  Payload ID: 8227
  Gene Symbol: INPP5B
  Gene Name: inositol polyphosphate-5-phosphatase B
  Uniprot ID: P32019
  ENSP ID: ENSP00000362118
MSAAAGSRERNTAGGSNFDGLRPNGKGVPMDQSSRGQDKPESLQPRQNKSKSEITDMVRSSTITVSDKAHILSMQKFGLRDTIVKSHLLQKEEDYTYIQNFRFFAGTYNVNGQSPKECLRLWLSNGIQAPDVYCVGFQELDLSKEAFFFHDTPKEEEWFKAVSEGLHPDAKYAKVKLIRLVGIMLLLYVKQEHAAYISEVEAETVGTGIMGRMGNKGGVAIRFQFHNTSICVVNSHLAAHIEEYERRNQDYKDICSRMQFCQPDPSLPPLTISNHDVILWLGDLNYRIEELDVEKVKKLIEEKDFQMLYAYDQLKIQVAAKTVFEGFTEGELTFQPTYKYDTGSDDWDTSEKCRAPAWCDRILWKGKNITQLSYQSHMALKTSDHKPVSSVFDIGVRVVNDELYRKTLEEIVRSLDKMENANIPSVSLSKREFCFQNVKYMQLKVESFTIHNGQVPCHFEFINKPDEESYCKQWLNANPSRGFLLPDSDVEIDLELFVNKMTATKLNSGEDKIEDILVLHLDRGKDYFLSVSGNYLPSCFGSPIHTLCYMREPILDLPLETISELTLMPVWTGDDGSQLDSPMEIPKELWMMVDYLYRNAVQQEDLFQQPGLRSEFEHIRDCLDTGMIDNLSASNHSVAEALLLFLESLPEPVICYSTYHNCLECSGNYTASKQVISTLPIFHKNVFHYLMAFLRELLKNSAKNHLDENILASIFGSLLLRNPAGHQKLDMTEKKKAQEFIHQFLCNPL

SEQ ID NO: 40434 - protein, 748 aa, Homo sapiens [sequence omitted]

SEQ ID NO: 40435 - protein, 1188 aa, Homo sapiens
  Payload ID: 8228
  Gene Symbol: INPP5D
  Gene Name: inositol polyphosphate-5-phosphatase D
  Uniprot ID: Q92835
  ENSP ID: ENSP00000352575
MVPCWNHGNITRSKAEELLSRTGKDGSFLVRASESISRAYALCVLYRNCVYTYRILPNEDDKFTVQASEGVSMRFFTKLDQLIEFYKKENMGLVTHLQYPVPLEEEDTGDDPEEDTESVVSPPELPPRNIPLTASSCEAKEVPFSNENPRATETSRPSLSETLFQRLQSMDTSGLPEEHLKAIQDYLSTQLAQDSEFVKTGSSSLPHLKKLTTLLCKELYGEVIRTLPSLESLQRLFDQQLSPGLRPRPQVPGEANPINMVSKLSQLTSLLSSIEDKVKALLHEGPESPHRPSLIPPVTFEVKAESLGIPQKMQLKVDVESGKLIIKKSKDGSEDKFYSHKKILQLIKSQKFLNKLVILVETEKEKILRKEYVFADSKKREGFCQLLQQMKNKHSEQPEPDMITIFIGTWNMGNAPPPKKITSWFLSKGQGKTRDDSADYIPHDIYVIGTQEDPLSEKEWLEILKHSLQEITSVTFKTVAIHTLWNIRIVVLAKPEHENRISHICTDNVKTGIANTLGNKGAVGVSFMFNGTSLGFVNSHLTSGSEKKLRRNQNYMNILRFLALGDKKLSPFNITHRFTHLFWFGDLNYRVDLPTWEAETIIQKIKQQQYADLLSHDQLLTERREQKVFLHFEEEEITFAPTYRFERLTRDKYAYTKQKATGMKYNLPSWCDRVLWKSYPLVHVVCQSYGSTSDIMTSDHSPVFATFEAGVTSQFVSKNGPGTVDSQGQIEFLRCYATLKTKSQTKFYLEFHSSCLESFVKSQEGENEEGSEGELVVKFGETLPKLKPIISDPEYLLDQHILISIKSSDSDESYGEGCIALRLEATETQLPIYTPLTHHGELTGHFQGEIKLQTSQGKTREKLYDFVKTERDESSGPKTLKSLTSHDPMKQWEVTSRAPPCSGSSITEIINPNYMGVGPFGPPMPLHVKQTLSPDQQPTAWSYDQPPKDSPLGPCRGESPPTPPGQPPISPKKFLPSTANRGLPPRTQESRPSDLGKNAGDTLPQEDLPLTKPEMFENPLYGSLSSFPKPAPRKDQESPKMPRKEPPPCPEPGILSPSIVLTKAQEADRGEGPGKQVPAPRLRSFTCSSSAEGRAAGGDKSQGKPKTPVSSQAPVPAKRPIKPSRSEINQQTPPTPTPRPPLPVKSPAVLHLQHSKGRDYRDNTELPHHGKHRPEEGPPGPLGRTAMQ

SEQ ID NO: 40436 - protein, 810 aa, Homo sapiens
  Payload ID: 8228
  Gene Symbol: INPP5D
  Gene Name: inositol polyphosphate-5-phosphatase D
  ENSP ID: ENSP00000397421
KREGFCQLLQQMKNKHSEQPEPDMITIFIGTWNMGNAPPPKKITSWFLSKGQGKTRDDSADYIPHDIYVIGTQEDPLSEKEWLEILKHSLQEITSVTFKTVAIHTLWNIRIVVLAKPEHENRISHICTDNVKTGIANTLGNKGAVGVSFMFNGTSLGFVNSHLTSGSEKKLRRNQNYMNILRFLALGDKKLSPFNITHRFTHLFWFGDLNYRVDLPTWEAETIIQKIKQQQYADLLSHDQLLTERREQKVFLHFEEEEITFAPTYRFERLTRDKYAYTKQKATGMKYNLPSWCDRVLWKSYPLVHVVCQSYGSTSDIMTSDHSPVFATFEAGVTSQFVSKNGPGTVDSQGQIEFLRCYATLKTKSQTKFYLEFHSSCLESFVKSQEGENEEGSEGELVVKFGETLPKLKPIISDPEYLLDQHILISIKSSDSDESYGEGCIALRLEATETQLPIYTPLTHHGELTGHFQGEIKLQTSQGKTREKLYDFVKTERDESSGPKTLKSLTSHDPMKQWEVTSRAPPCSGSSITEIINPNYMGVGPFGPPMPLHVKQTLSPDQQPTAWSYDQPPKDSPLGPCRGESPPTPPGQPPISPKKFLPSTANRGLPPRTQESRPSDLGKNAGDTLPQEDLPLTKPEMFENPLYGSLSSFPKPAPRKDQESPKMPRKEPPPCPEPGILSPSIVLTKAQEADRGEGPGKQVPAPRLRSFTCSSSAEGRAAGGDKSQGKPKTPVSSQAPVPAKRPIKPSRSEINQQTPPTPTPRPPLPVKSPAVLHLQHSKGRDYRDNTELPHHGKHRPEEGPPGPLGRTAMQ

SEQ ID NO: 40437 - protein, 1189 aa, Homo sapiens
  Payload ID: 8228
  Gene Symbol: INPP5D
  Gene Name: inositol polyphosphate-5-phosphatase D
  Uniprot ID: Q92835
  ENSP ID: ENSP00000405338
MVPCWNHGNITRSKAEELLSRTGKDGSFLVRASESISRAYALCVLYRNCVYTYRILPNEDDKFTVQASEGVSMRFFTKLDQLIEFYKKENMGLVTHLQYPVPLEEEDTGDDPEEDTVESVVSPPELPPRNIPLTASSCEAKEVPFSNENPRATETSRPSLSETLFQRLQSMDTSGLPEEHLKAIQDYLSTQLAQDSEFVKTGSSSLPHLKKLTTLLCKELYGEVIRTLPSLESLQRLFDQQLSPGLRPRPQVPGEANPINMVSKLSQLTSLLSSIEDKVKALLHEGPESPHRPSLIPPVTFEVKAESLGIPQKMQLKVDVESGKLIIKKSKDGSEDKFYSHKKILQLIKSQKFLNKLVILVETEKEKILRKEYVFADSKKREGFCQLLQQMKNKHSEQPEPDMITIFIGTWNMGNAPPPKKITSWFLSKGQGKTRDDSADYIPHDIYVIGTQEDPLSEKEWLEILKHSLQEITSVTFKTVAIHTLWNIRIVVLAKPEHENRISHICTDNVKTGIANTLGNKGAVGVSFMFNGTSLGFVNSHLTSGSEKKLRRNQNYMNILRFLALGDKKLSPFNITHRFTHLFWFGDLNYRVDLPTWEAETIIQKIKQQQYADLLSHDQLLTERREQKVFLHFEEEEITFAPTYRFERLTRDKYAYTKQKATGMKYNLPSWCDRVLWKSYPLVHVVCQSYGSTSDIMTSDHSPVFATFEAGVTSQFVSKNGPGTVDSQGQIEFLRCYATLKTKSQTKFYLEFHSSCLESFVKSQEGENEEGSEGELVVKFGETLPKLKPIISDPEYLLDQHILISIKSSDSDESYGEGCIALRLEATETQLPIYTPLTHHGELTGHFQGEIKLQTSQGKTREKLYDFVKTERDESSGPKTLKSLTSHDPMKQWEVTSRAPPCSGSSITEIINPNYMGVGPFGPPMPLHVKQTLSPDQQPTAWSYDQPPKDSPLGPCRGESPPTPPGQPPISPKKFLPSTANRGLPPRTQESRPSDLGKNAGDTLPQEDLPLTKPEMFENPLYGSLSSFPKPAPRKDQESPKMPRKEPPPCPEPGILSPSIVLTKAQEADRGEGPGKQVPAPRLRSFTCSSSAEGRAAGGDKSQGKPKTPVSSQAPVPAKRPIKPSRSEINQQTPPTPTPRPPLPVKSPAVLHLQHSKGRDYRDNTELPHHGKHRPEEGPPGPLGRTAMQ

SEQ ID NO: 40438 - protein, 130 aa, Homo sapiens
  Payload ID: 8228
  Gene Symbol: INPP5D
  Gene Name: inositol polyphosphate-5-phosphatase D
  ENSP ID: ENSP00000414835
KTLKSLTSHDPMKQWEVTSRAPPCSGSSITEIINPNYMGVGPFGPPMPLHVKQTLSPDQQPTAWSYDQPPKDSPLGPCRGESPPTPPGQPPISPKKFLPSTANRGLPPRTQESSEALSELPLSREPRGTA

SEQ ID NO: 40439 - protein, 43 aa, Homo sapiens
  Payload ID: 8228
  Gene Symbol: INPP5D
  Gene Name: inositol polyphosphate-5-phosphatase D
  ENSP ID: ENSP00000473280
  MOD_RES (1)..(1): Any amino acid
XTELPHHGKHRPEEGPPGPLGRTAMQVRCATRGFVCICVCVHA

SEQ ID NO: 40440 - protein, 43 aa, Homo sapiens; identical to SEQ ID NO: 40439
  Payload ID: 8228
  Gene Symbol: INPP5D
  Gene Name: inositol polyphosphate-5-phosphatase D
  ENSP ID: ENSP00000486018
  MOD_RES (1)..(1): Any amino acid

SEQ ID NO: 40441 - protein, 1188 aa, Homo sapiens; identical to SEQ ID NO: 40435
  Payload ID: 8228
  Gene Symbol: INPP5D
  Gene Name: inositol polyphosphate-5-phosphatase D
  Uniprot ID: Q92835
  ENSP ID: ENSP00000486669

SEQ ID NO: 40442 - protein, 1189 aa, Homo sapiens; identical to SEQ ID NO: 40437
  Payload ID: 8228
  Gene Symbol: INPP5D
  Gene Name: inositol polyphosphate-5-phosphatase D
  Uniprot ID: Q92835
  ENSP ID: ENSP00000487191

SEQ ID NO: 40443 - protein, 130 aa, Homo sapiens; identical to SEQ ID NO: 40438
  Payload ID: 8228
  Gene Symbol: INPP5D
  Gene Name: inositol polyphosphate-5-phosphatase D
  ENSP ID: ENSP00000487335

SEQ ID NO: 40444 - protein, 810 aa, Homo sapiens; identical to SEQ ID NO: 40436
  Payload ID: 8228
  Gene Symbol: INPP5D
  Gene Name: inositol polyphosphate-5-phosphatase D
  ENSP ID: ENSP00000487535

SEQ ID NO: 40445 - protein, 644 aa, Homo sapiens
  Payload ID: 8229
  Gene Symbol: INPP5E
  Gene Name: inositol polyphosphate-5-phosphatase E
  Uniprot ID: Q9NRR6
  ENSP ID: ENSP00000360777
MPSKAENLRPSEPAPQPPEGRTLQGQLPGAPPAQRAGSPPDAPGSESPALACSTPATPSGEDPPARAAPIAPRPPARPRLERALSLDDKGWRRRRFRGSQEDLEARNGTSPSRGSVQSEGPGAPAHSCSPPCLSTSLQEIPKSRGVLSSERGSPSSGGNPLSGVASSSPNLPHRDAAVAGSSPRLPSLLPPRPPPALSLDIASDSLRTANKVDSDLADYKLRAQPLLVRAHSSLGPGRPRSPLACDDCSLRSAKSSFSLLAPIRSKDVRSRSYLEGSLLASGALLGADELARYFPDRNVALFVATWNMQGQKELPPSLDEFLLPAEADYAQDLYVIGVQEGCSDRREWETRLQETLGPHYVLLSSAAHGVLYMSLFIRRDLIWFCSEVECSTVTTRIVSQIKTKGALGISFTFFGTSFLFITSHFTSGDGKVAERLLDYTRTVQALVLPRNVPDTNPYRSSAADVTTRFDEVFWFGDFNFRLSGGRTVVDALLCQGLVVDVPALLQHDQLIREMRKGSIFKGFQEPDIHFLPSYKFDIGKDTYDSTSKQRTPSYTDRVLYRSRHKGDICPVSYSSCPGIKTSDHRPVYGLFRVKVRPGRDNIPLAAGKFDRELYLLGIKRRISKEIQRQQALQSQNSSTICSVS

SEQ ID NO: 40446 - protein, 1132 aa, Homo sapiens
  Payload ID: 8230
  Gene Symbol: INPP5F
  Gene Name: inositol polyphosphate-5-phosphatase F
  Uniprot ID: Q9Y2H2
  ENSP ID: ENSP00000354519
MELFQAKDHYILQQGERALWCSRRDGGLQLRPATDLLLAWNPICLGLVEGVIGKIQLHSDLPWWLILIRQKALVGKLPGDHEVCKVTKIAVLSLSEMEPQDLELELCKKHHFGINKPEKIIPSPDDSKFLLKTFTHIKSNVSAPNKKKVKESKEKEKLERRLLEELLKMFMDSESFYYSLTYDLTNSVQRQSTGERDGRPLWQKVDDRFFWNKYMIQDLTEIGTPDVDFWIIPMIQGFVQIEELVVNYTESSDDEKSSPETPPQESTCVDDIHPRFLVALISRRSRHRAGMRYKRRGVDKNGNVANYVETEQLIHVHNHTLSFVQTRGSVPVFWSQVGYRYNPRPRLDRSEKETVAYFCAHFEEQLNIYKKQVIINLVDQAGREKIIGDAYLKQVLLFNNSHLTYVSFDFHEHCRGMKFENVQTLTDAIYDIILDMKWCWVDEAGVICKQEGIFRVNCMDCLDRTNVVQAAIARVVMEQQLKKLGVMPPEQPLPVKCNRIYQIMWANNGDSISRQYAGTAALKGDFTRTGERKLAGVMKDGVNSANRYYLNRFKDAYRQAVIDLMQGIPVTEDLYSIFTKEKEHEALHKENQRSHQELISQLLQSYMKLLLPDDEKFHGGWALIDCDPSLIDATHRDVDVLLLLSNSAYYVAYYDDEVDKVNQYQRLSLENLEKIEIGPEPTLFGKPKFSCMRLHYRYKEASGYFHTLRAVMRNPEEDGKDTLQCIAEMLQITKQAMGSDLPIIEKKLERKSSKPHEDIIGIRSQNQGSLAQGKNFLMSKFSSLNQKVKQTKSNVNIGNLRKLGNFTKPEMKVNFLKPNLKVNLWKSDSSLETMENTGVMDKVQAESDGDMSSDNDSYHSDEFLTNSKSDEDRQLANSLESVGPIDYVLPSCGIIASAPRLGSRSQSLSSTDSSVHAPSEITVAHGSGLGKGQESPLKKSPSAGDVHILTGFAKPMDIYCHRFVQDAQNKVTHLSETRSVSQQASQERNQMTNQVSNETQSESTEQTPSRPSQLDVSLSATGPQFLSVEPAHSVASQKTPTSASSMLELETGLHVTPSPSESSSSRAVSPFAKIRSSMVQVASITQAGLTHGINFAVSKVQKSPPEPEIINQVQQNELKKMFIQCQTRIIQI

SEQ ID NO: 40447 - protein, 522 aa, Homo sapiens
  Payload ID: 8230
  Gene Symbol: INPP5F
  Gene Name: inositol polyphosphate-5-phosphatase F
  Uniprot ID: Q9Y2H2
  ENSP ID: ENSP00000358076
MCHDVIFMAWLKQQFSECTLIDATHRDVDVLLLLSNSAYYVAYYDDEVDKVNQYQRLSLENLEKIEIGPEPTLFGKPKFSCMRLHYRYKEASGYFHTLRAVMRNPEEDGKDTLQCIAEMLQITKQAMGSDLPIIEKKLERKSSKPHEDIIGIRSQNQGSLAQGKNFLMSKFSSLNQKVKQTKSNVNIGNLRKLGNFTKPEMKVNFLKPNLKVNLWKSDSSLETMENTGVMDKVQAESDGDMSSDNDSYHSDEFLTNSKSDEDRQLANSLESVGPIDYVLPSCGIIASAPRLGSRSQSLSSTDSSVHAPSEITVAHGSGLGKGQESPLKKSPSAGDVHILTGFAKPMDIYCHRFVQDAQNKVTHLSETRSVSQQASQERNQMTNQVSNETQSESTEQTPSRPSQLDVSLSATGPQFLSVEPAHSVASQKTPTSASSMLELETGLHVTPSPSESSSSRAVSPFAKIRSSMVQVASITQAGLTHGINFAVSKVQKSPPEPEIINQVQQNELKKMFIQCQTRIIQI

SEQ ID NO: 40448 - protein, 57 aa, Homo sapiens
  Payload ID: 8230
  Gene Symbol: INPP5F
  Gene Name: inositol polyphosphate-5-phosphatase F
  ENSP ID: ENSP00000487706
MRLHYRYKEASGYFHTLRAVMRNPEEDGKDTLQCIAEMLQITKQAMGSDLPIIEKKL

SEQ ID NO: 40449 - protein, 105 aa, Homo sapiens
  Payload ID: 8230
  Gene Symbol: INPP5F
  Gene Name: inositol polyphosphate-5-phosphatase F
  ENSP ID: ENSP00000488052
MRLHYRYKEASGYFHTLRAVMRNPEEDGKDTLQCIAEMLQITKQAMGSDLPIIEKKLERKSSKPHEDIIGIRSQNQGSLAQGKNFLMSKFSSLNQKVKQTKSNVN

SEQ ID NO: 40450 - protein, 183 aa, Homo sapiens
  Payload ID: 8230
  Gene Symbol: INPP5F
  Gene Name: inositol polyphosphate-5-phosphatase F
  ENSP ID: ENSP00000488726
MPRSHRPPPTAQRAATAAAAEPKSEGVVAMTFKIFLLFAGLMVKVPVGLYFSCKLLLFQSLMLMSPEDSGFYATIVAVVGLHVQQFSECTLIDATHRDVDVLLLLSNSAYYVAYYDDEVDKVNQYQRLSLENLEKIEIGPEPTLFGKPKFSCMRLHYRYKEASGYFHTLRAVMRNPEEDGKDT

SEQ ID NO: 40451 - protein, 82 aa, Homo sapiens
  Payload ID: 8230
  Gene Symbol: INPP5F
  Gene Name: inositol polyphosphate-5-phosphatase F
  ENSP ID: ENSP00000488905
MRLHYRYKEASGYFHTLRAVMRNPEEDGKDTLQCIAEMLQITKQAMGSDLPIIEKKLERKSSKPHEDIIGIRSQNQGSLAQG

SEQ ID NO: 40452 - protein, 1006 aa, Homo sapiens
  Payload ID: 8231
  Gene Symbol: INPP5J
  Gene Name: inositol polyphosphate-5-phosphatase J
  Uniprot ID: Q15735
  ENSP ID: ENSP00000333262
MEGQSSRGSRRPGTRAGLGSLPMPQGVAQTGAPSKVDSSFQLPAKKNAALGPSEPRLALAPVGPRAAMSASSEGPRLALASPRPILAPLCTPEGQKTATAHRSSSLAPTSVGQLVMSASAGPKPPPATTGSVLAPTSLGLVMPASAGPRSPPVTLGPNLAPTSRDQKQEPPASVGPKPTLAASGLSLALASEEQPPELPSTPSPVPSPVLSPTQEQALAPASTASGAASVGQTSARKRDAPAPRPLPASEGHLQPPAQTSGPTGSPPCIQTSPDPRLSPSFRARPEALHSSPEDPVLPRPPQTLPLDVGQGPSEPGTHSPGLLSPTFRPGAPSGQTVPPPLPKPPRSPSRSPSHSPNRSPCVPPAPDMALPRLGTQSTGPGRCLSPNLQAQEAPAPVTTSSSTSTLSSSPWSAQPTWKSDPGFRITVVTWNVGTAMPPDDVTSLLHLGGGDDSDGADMIAIGLQEVNSMLNKRLKDALFTDQWSELFMDALGPFNFVLVSSVRMQGVILLLFAKYYHLPFLRDVQTDCTRTGLGGYWGNKGGVSVRLAAFGHMLCFLNCHLPAHMDKAEQRKDNFQTILSLQQFQGPGAQGILDHDLVFWFGDLNFRIESYDLHFVKFAIDSDQLHQLWEKDQLNMAKNTWPILKGFQEGPLNFAPTFKFDVGTNKYDTSAKKRKPAWTDRILWKVKAPGGGPSPSGRKSHRLQVTQHSYRSHMEYTVSDHKPVAAQFLLQFAFRDDMPLVRLEVADEWVRPEQAVVRYRMETVFARSSWDWIGLYRVGFRHCKDYVAYVWAKHEDVDGNTYQVTFSEESLPKGHGDFILGYYSHNHSILIGITEPFQISLPSSELASSSTDSSGTSSEGEDDSTLELLAPKSRSPSPGKSKRHRSRSPGLARFPGLALRPSSRERRGASRSPSPQSRRLSRVAPDRSSNGSSRGSSEEGPSGLPGPWAFPPAVPRSLGLLPALRLETVDPGGGGSWGPDREALAPNSLSPSPQGHRGLEEGGLGP

SEQ ID NO: 40453 - protein, 639 aa, Homo sapiens
  Payload ID: 8231
  Gene Symbol: INPP5J
  Gene Name: inositol polyphosphate-5-phosphatase J
  Uniprot ID: Q15735
  ENSP ID: ENSP00000383150
MALPRLGTQSTGPGRCLSPNLQAQEAPAPVTTSSSTSTLSSSPWSAQPTWKSDPGFRITVVTWNVGTAMPPDDVTSLLHLGGGDDSDGADMIAIGLQEVNSMLNKRLKDALFTDQWSELFMDALGPFNFVLVSSVRMQGVILLLFAKYYHLPFLRDVQTDCTRTGLGGYWGNKGGVSVRLAAFGHMLCFLNCHLPAHMDKAEQRKDNFQTILSLQQFQGPGAQGILDHDLVFWFGDLNFRIESYDLHFVKFAIDSDQLHQLWEKDQLNMAKNTWPILKGFQEGPLNFAPTFKFDVGTNKYDTSAKKRKPAWTDRILWKVKAPGGGPSPSGRKSHRLQVTQHSYRSHMEYTVSDHKPVAAQFLLQFAFRDDMPLVRLEVADEWVRPEQAVVRYRMETVFARSSWDWIGLYRVGFRHCKDYVAYVWAKHEDVDGNTYQVTFSEESLPKGHGDFILGYYSHNHSILIGITEPFQISLPSSELASSSTDSSGTSSEGEDDSTLELLAPKSRSPSPGKSKRHRSRSPGLARFPGLALRPSSRERRGASRSPSPQSRRLSRVAPDRSSNGSSRGSSEEGPSGLPGPWAFPPAVPRSLGLLPALRLETVDPGGGGSWGPDREALAPNSLSPSPQGHRGLEEGGLGP

SEQ ID NO: 40454 - protein, 638 aa, Homo sapiens
  Payload ID: 8231
  Gene Symbol: INPP5J
  Gene Name: inositol polyphosphate-5-phosphatase J
  Uniprot ID: Q15735
  ENSP ID: ENSP00000384534
MEGQSSRGSRRPGTRAGLGSLPMPQGVAQTGAPSKVDSSFQLPAKKNAALGPSEPRITVVTWNVGTAMPPDDVTSLLHLGGGDDSDGADMIAIGLQEVNSMLNKRLKDALFTDQWSELFMDALGPFNFVLVSSVRMQGVILLLFAKYYHLPFLRDVQTDCTRTGLGGYWGNKGGVSVRLAAFGHMLCFLNCHLPAHMDKAEQRKDNFQTILSLQQFQGPGAQGILDHDLVFWFGDLNFRIESYDLHFVKFAIDSDQLHQLWEKDQLNMAKNTWPILKGFQEGPLNFAPTFKFDVGTNKYDTSAKKRKPAWTDRILWKVKAPGGGPSPSGRKSHRLQVTQHSYRSHMEYTVSDHKPVAAQFLLQFAFRDDMPLVRLEVADEWVRPEQAVVRYRMETVFARSSWDWIGLYRVGFRHCKDYVAYVWAKHEDVDGNTYQVTFSEESLPKGHGDFILGYYSHNHSILIGITEPFQISLPSSELASSSTDSSGTSSEGEDDSTLELLAPKSRSPSPGKSKRHRSRSPGLARFPGLALRPSSRERRGASRSPSPQSRRLSRVAPDRSSNGSSRGSSEEGPSGLPGPWAFPPAVPRSLGLLPALRLETVDPGGGGSWGPDREALAPNSLSPSPQGHRGLEEGGLGP

SEQ ID NO: 40455 - protein, 371 aa, Homo sapiens
  Payload ID: 8231
  Gene Symbol: INPP5J
  Gene Name: inositol polyphosphate-5-phosphatase J
  ENSP ID: ENSP00000384540
MAKNTWPILKGFQEGPLNFAPTFKFDVGTNKYDTSAKKRKPAWTDRILWKVKAPGGGPSPSGRKSHRLQVTQHSYRSHMEYTVSDHKPVAAQFLLQFAFRDDMPLVRLEVADEWVRPEQAVVRYRMETVFARSSWDWIGLYRVGFRHCKDYVAYVWAKHEDVDGNTYQVTFSEESLPKGHGDFILGYYSHNHSILIGITEPFQISLPSSELASSSTDSSGTSSEGEDDSTLELLAPKSRSPSPGKSKRHRSRSPGLARFPGLALRPSSRERRGASRSPSPQSRRLSRVAPDRSSNGSSRGSSEEGPSGLPGPWAFPPAVPRSLGLLPALRLETVDPGGGGSWGPDREALAPNSLSPSPQGHRGLEEGGLGP

SEQ ID NO: 40456 - protein, 639 aa, Homo sapiens; identical to SEQ ID NO: 40453
  Payload ID: 8231
  Gene Symbol: INPP5J
  Gene Name: inositol polyphosphate-5-phosphatase J
  Uniprot ID: Q15735
  ENSP ID: ENSP00000384596

SEQ ID NO: 40457 - protein, 345 aa, Homo sapiens
  Payload ID: 8231
  Gene Symbol: INPP5J
  Gene Name: inositol polyphosphate-5-phosphatase J
  ENSP ID: ENSP00000385264
MAKNTWPILKGFQEGPLNFAPTFKFDVGTNKYDTSAKKRKPAWTDRILWKVKAPGGGPSPSGRKSHRLQVTQHSYRSHMEYTVSDHKPVAAQFLLQFAFRDDMPLVRLEVADEWVRPEQAVVRYRMETVFARSSWDWIGLYRVTFSEESLPKGHGDFILGYYSHNHSILIGITEPFQISLPSSELASSSTDSSGTSSEGEDDSTLELLAPKSRSPSPGKSKRHRSRSPGLARFPGLALRPSSRERRGASRSPSPQSRRLSRVAPDRSSNGSSRGSSEEGPSGLPGPWAFPPAVPRSLGLLPALRLETVDPGGGGSWGPDREALAPNSLSPSPQGHRGLEEGGLGP

SEQ ID NO: 40458 - protein, 371 aa, Homo sapiens; identical to SEQ ID NO: 40455
  Payload ID: 8231
  Gene Symbol: INPP5J
  Gene Name: inositol polyphosphate-5-phosphatase J
  ENSP ID: ENSP00000385343

SEQ ID NO: 40459 - protein, 939 aa, Homo sapiens
  Payload ID: 8231
  Gene Symbol: INPP5J
  Gene Name: inositol polyphosphate-5-phosphatase J
  ENSP ID: ENSP00000392924
MSASSEGPRLALASPRPILAPLCTPEGQKTATAHRSSSLAPTSVGQLVMSASAGPKPPPATTGSVLAPTSLGLVMPASAGPRSPPVTLGPNLAPTSRDQKQEPPASVGPKPTLAASGLSLALASEEQPPELPSTPSPVPSPVLSPTQEQALAPASTASGAASVGQTSARKRDAPAPRPLPASEGHLQPPAQTSGPTGSPPCIQTSPDPRLSPSFRARPEALHSSPEDPVLPRPPQTLPLDVGQGPSEPGTHSPGLLSPTFRPGAPSGQTVPPPLPKPPRSPSRSPSHSPNRSPCVPPAPDMALPRLGTQSTGPGRCLSPNLQAQEAPAPVTTSSSTSTLSSSPWSAQPTWKSDPGFRITVVTWNVGTAMPPDDVTSLLHLGGGDDSDGADMIAIGLQEVNSMLNKRLKDALFTDQWSELFMDALGPFNFVLVSSVRMQGVILLLFAKYYHLPFLRDVQTDCTRTGLGGYWGNKGGVSVRLAAFGHMLCFLNCHLPAHMDKAEQRKDNFQTILSLQQFQGPGAQGILDHDLVFWFGDLNFRIESYDLHFVKFAIDSDQLHQLWEKDQLNMAKNTWPILKGFQEGPLNFAPTFKFDVGTNKYDTSAKKRKPAWTDRILWKVKAPGGGPSPSGRKSHRLQVTQHSYRSHMEYTVSDHKPVAAQFLLQFAFRDDMPLVRLEVADEWVRPEQAVVRYRMETVFARSSWDWIGLYRVGFRHCKDYVAYVWAKHEDVDGNTYQVTFSEESLPKGHGDFILGYYSHNHSILIGITEPFQISLPSSELASSSTDSSGTSSEGEDDSTLELLAPKSRSPSPGKSKRHRSRSPGLARFPGLALRPSSRERRGASRSPSPQSRRLSRVAPDRSSNGSSRGSSEEGPSGLPGPWAFPPAVPRSLGLLPALRLETVDPGGGGSWGPDREALAPNSLSPSPQGHRGLEEGGLGP

SEQ ID NO: 40460 - protein, 144 aa, Homo sapiens
  Payload ID: 8231
  Gene Symbol: INPP5J
  Gene Name: inositol polyphosphate-5-phosphatase J
  ENSP ID: ENSP00000401124
MSASSEGPRLALASPRPILAPLCTPEGQKTATAHRSSSLAPTSVGQLVMSASAGPKPPPATTGSVLAPTSLGLVMPASAGPRSPPVTLGPNLAPTSRDQKQEPPASVGPKPTLAASGLSLALASEEQPPELPSTPSPVPSPVLS

SEQ ID NO: 40461 - protein, 102 aa, Homo sapiens
  Payload ID: 8231
  Gene Symbol: INPP5J
  Gene Name: inositol polyphosphate-5-phosphatase J
  ENSP ID: ENSP00000406570
MPPDDVTSLLHLGGGDDSDGADMIAIGLQEVNSMLNKRLKDALFTDQWSELFMDALGPFNFVLVSSVRMQGVILLLFAKYYHLPFLRDVQTDCTRTGLGGYW

SEQ ID NO: 40462 - protein, 571 aa, Homo sapiens
  Payload ID: 8231
  Gene Symbol: INPP5J
  Gene Name: inositol polyphosphate-5-phosphatase J
  ENSP ID: ENSP00000479645
MPPDDVTSLLHLGGGDDSDGADMIAIGLQEVNSMLNKRLKDALFTDQWSELFMDALGPFNFVLVSSVRMQGVILLLFAKYYHLPFLRDVQTDCTRTGLGGYWGNKGGVSVRLAAFGHMLCFLNCHLPAHMDKAEQRKDNFQTILSLQQFQGPGAQGILDHDLVFWFGDLNFRIESYDLHFVKFAIDSDQLHQLWEKDQLNMAKNTWPILKGFQEGPLNFAPTFKFDVGTNKYDTSAKKRKPAWTDRILWKVKAPGGGPSPSGRKSHRLQVTQHSYRSHMEYTVSDHKPVAAQFLLQFAFRDDMPLVRLEVADEWVRPEQAVVRYRMETVFARSSWDWIGLYRVGFRHCKDYVAYVWAKHEDVDGNTYQVTFSEESLPKGHGDFILGYYSHNHSILIGITEPFQISLPSSELASSSTDSSGTSSEGEDDSTLELLAPKSRSPSPGKSKRHRSRSPGLARFPGLALRPSSRERRGASRSPSPQSRRLSRVAPDRSSNGSSRGSSEEGPSGLPGPWAFPPAVPRSLGLLPALRLETVDPGGGGSWGPDREALAPNSLSPSPQGHRGLEEGGLGP

SEQ ID NO: 40463 - protein, 63 aa, Homo sapiens
  Payload ID: 8232
  Gene Symbol: INPP5K
  Gene Name: inositol polyphosphate-5-phosphatase K
  ENSP ID: ENSP00000254712
MSSRKLSGPKGRRLRSPMSVCRGSSYWSLPSISICPISRFCLLNPPPLACLGTGGTKVESTSA

SEQ ID NO: 40464 - protein, 372 aa, Homo sapiens
  Payload ID: 8232
  Gene Symbol: INPP5K
  Gene Name: inositol polyphosphate-5-phosphatase K
  Uniprot ID: Q9BT40
  ENSP ID: ENSP00000318476
MDVLSPLSFIKVSHVRMQGILLLVFAKYQHLPYIQILSTKSTPTGLFGYWGNKGGVNICLKLYGYYVSIINCHLPPHISNNYQRLEHFDRILEMQNCEGRDIPNILDHDLIIWFGDMNFRIEDFGLHFVRESIKNRCYGGLWEKDQLSIAKKHDPLLREFQEGRLLFPPTYKFDRNSNDYDTSEKKRKPAWTDRILWRLKRQPCAGPDTPIPPASHFSLSLRGYSSHMTYGISDHKPVSGTFDLELKPLVSAPLIVLMPEDLWTVENDMMVSYSSTSDFPSSPWDWIGLYKVGLRDVNDYVSYAWVGDSKVSCSDNLNQVYIDISNIPTTEDEFLLCYYSNSLRSVVGISRPFQIPPGSLREDPLGEAQPQI

SEQ ID NO: 40465 - protein, 372 aa, Homo sapiens; identical to SEQ ID NO: 40464
  Payload ID: 8232
  Gene Symbol: INPP5K
  Gene Name: inositol polyphosphate-5-phosphatase K
  Uniprot ID: Q9BT40
  ENSP ID: ENSP00000385177

SEQ ID NO: 40466 - protein, 52 aa, Homo sapiens
  Payload ID: 8232
  Gene Symbol: INPP5K
  Gene Name: inositol polyphosphate-5-phosphatase K
  ENSP ID: ENSP00000389334
MSSRKLSGPKGRRLSIHVVTWNVASAAPPLDLSDLLQLNNRNLNLDIYVIGN

SEQ ID NO: 40467 - protein, 229 aa, Homo sapiens
  Payload ID: 8232
  Gene Symbol: INPP5K
  Gene Name: inositol polyphosphate-5-phosphatase K
  ENSP ID: ENSP00000413259
MQGILLLVFAKYQHLPYIQILSTKSTPTGLFGYWGNKGGVNICLKLYGYYVSIINCHLPPHISNNYQRLEHFDRILEMQNCEGRDIPNILDHDLIIWFGDMNFRIEDFGLHFVRESIKNRCYGGLWEKDQLSIAKKHDPLLREFQEGRLLFPPTYKFDRNSNDYDTSEKKRKPAWTDRILWRLKRQPCAGPDTPIPPASHFSLSLRGYSSHMTYGISDHKPVSGTFDLE

SEQ ID NO: 40468 - protein, 448 aa, Homo sapiens
  Payload ID: 8232
  Gene Symbol: INPP5K
  Gene Name: inositol polyphosphate-5-phosphatase K
  Uniprot ID: Q9BT40
  ENSP ID: ENSP00000413937
MSSRKLSGPKGRRLSIHVVTWNVASAAPPLDLSDLLQLNNRNLNLDIYVIGLQELNSGIISLLSDAAFNDSWSSFLMDVLSPLSFIKVSHVRMQGILLLVFAKYQHLPYIQILSTKSTPTGLFGYWGNKGGVNICLKLYGYYVSIINCHLPPHISNNYQRLEHFDRILEMQNCEGRDIPNILDHDLIIWFGDMNFRIEDFGLHFVRESIKNRCYGGLWEKDQLSIAKKHDPLLREFQEGRLLFPPTYKFDRNSNDYDTSEKKRKPAWTDRILWRLKRQPCAGPDTPIPPASHFSLSLRGYSSHMTYGISDHKPVSGTFDLELKPLVSAPLIVLMPEDLWTVENDMMVSYSSTSDFPSSPWDWIGLYKVGLRDVNDYVSYAWVGDSKVSCSDNLNQVYIDISNIPTTEDEFLLCYYSNSLRSVVGISRPFQIPPGSLREDPLGEAQPQI

SEQ ID NO: 40469 - protein, 84 aa, Homo sapiens
  Payload ID: 8232
  Gene Symbol: INPP5K
  Gene Name: inositol polyphosphate-5-phosphatase K
  ENSP ID: ENSP00000458413
MDVLSPLSFIKVSHVRMQGILLLVFAKYQHLPYIQILSTKSTPTGLFGYWGNKGGVNICLKLYGYYVSIINCHLPPHISNNYQR

SEQ ID NO: 40470 - protein, 51 aa, Homo sapiens
  Payload ID: 8232
  Gene Symbol: INPP5K
  Gene Name: inositol polyphosphate-5-phosphatase K
  ENSP ID: ENSP00000459029
MSSRKLSGPKGRRLRSPAAAGTPHRVPRTHARLFLVSAGSVAPARSVLRTV

SEQ ID NO: 40471 - protein, 158 aa, Homo sapiens
  Payload ID: 8232
  Gene Symbol: INPP5K
  Gene Name: inositol polyphosphate-5-phosphatase K
  ENSP ID: ENSP00000459758
MSSRKLSGPKGRRLSIHVVTWNVASAAPPLDLSDLLQLNNRNLNLDIYVIGLQELNSGIISLLSDAAFNDSWSSFLMDVLSPLSFIKVSHVRMQGILLLVFAKYQHLPYIQILSTKSTPTGLFGYWLSIAKKHDPLLREFQEGRLLFPPTYKFDRNSN

SEQ ID NO: 40472 - protein, 154 aa, Homo sapiens
  Payload ID: 8232
  Gene Symbol: INPP5K
  Gene Name: inositol polyphosphate-5-phosphatase K
  ENSP ID: ENSP00000461105
MSSRKLSGPKGRRLSEKKRKPAWTDRILWRLKRQPCAGPDTPIPPASHFSLSLRGYSSHMTYGISDHKPVSGTFDLELKPLVSAPLIVLMPEDLWTVENDMMVSYSSTSDFPSSPWDWIGLYKVGLRDVNDYVSYAWVGDSKVSCSDNLNQVYI

SEQ ID NO: 40473 - protein, 99 aa, Homo sapiens
  Payload ID: 8232
  Gene Symbol: INPP5K
  Gene Name: inositol polyphosphate-5-phosphatase K
  ENSP ID: ENSP00000461846
MSSRKLSGPKGRRLSIHVVTWNVASAAPPLDLSDLLQLNNRNLNLDIYVIGSPMSVCRGSSYWSLPSISICPISRFCLLNPPPLACLGTGGTKVESTSA

SEQ ID NO: 40474 - protein, 38 aa, Homo sapiens
  Payload ID: 8232
  Gene Symbol: INPP5K
  Gene Name: inositol polyphosphate-5-phosphatase K
  ENSP ID: ENSP00000466632
  MOD_RES (1)..(1): Any amino acid
XIHVVTWNVASAAPPLDLSDLLQLNNRNLNLDIYVIGN

SEQ ID NO: 40475 - protein, 23 aa, Homo sapiens
  Payload ID: 8232
  Gene Symbol: INPP5K
  Gene Name: inositol polyphosphate-5-phosphatase K
  ENSP ID: ENSP00000466929
MQGILLLVFAKYQHLPYIQILST

SEQ ID NO: 40476 - protein, 50 aa, Homo sapiens
  Payload ID: 8232
  Gene Symbol: INPP5K
  Gene Name: inositol polyphosphate-5-phosphatase K
  ENSP ID: ENSP00000467376
MDVLSPLSFIKVSHVRMQGILLLVFAKYQHLPYIQILSTKSTPTGLFGYW

SEQ ID NO: 40477 - protein, 277 aa, Homo sapiens
  Payload ID: 8233
  Gene Symbol: IMPA1
  Gene Name: inositol(myo)-1(or 4)-monophosphatase 1
  Uniprot ID: P29218
  ENSP ID: ENSP00000256108
MADPWQECMDYAVTLARQAGEVVCEAIKNEMNVMLKSSPVDLVTATDQKVEKMLISSIKEKYPSHSFIGEESVAAGEKSILTDNPTWIIDPIDGTTNFVHRFPFVAVSIGFAVNKKIEFGVVYSCVEGKMYTARKGKGAFCNGQKLQVSQQEDITKSLLVTELGSSRTPETVRMVLSNMEKLFCIPVHGIRSVGTAAVNMCLVATGGADAYYEMGIHCWDVAGAGIIVTEAGGVLMDVTGGPFDLMSRRVIAANNRILAERIAKEIQVIPLQRDDED

SEQ ID NO: 40478 - protein, 198 aa, Homo sapiens
  Payload ID: 8233
  Gene Symbol: IMPA1
  Gene Name: inositol(myo)-1(or 4)-monophosphatase 1
  Uniprot ID: P29218
  ENSP ID: ENSP00000311803
MADPWQECMDYAVTLARQAGEVVCEAIKNEMNVMLKSSPVDLVTATDQKVEKMLISSIKEKYPSHSFIGEESVAAGEKSILTDNPTWIIDPIDGTTNFVHRFPFVAVSIGFAVNKKIEFGVVYSCVEGKMYTARKGKGAFCNGQKLQVSQQEGSGVLEQQLLICALWQLAEQMHIMKWEFTAGMLQELALLLLKLVAC

SEQ ID NO: 40479 - protein, 336 aa, Homo sapiens
  Payload ID: 8233
  Gene Symbol: IMPA1
  Gene Name: inositol(myo)-1(or 4)-monophosphatase 1
  Uniprot ID: P29218
  ENSP ID: ENSP00000408526
MGQRPGPVLPAVAVLGQVAKRKVAWLLRWKAVTRTETAGNSSGVYGFGKMKIFVKYFQKMADPWQECMDYAVTLARQAGEVVCEAIKNEMNVMLKSSPVDLVTATDQKVEKMLISSIKEKYPSHSFIGEESVAAGEKSILTDNPTWIIDPIDGTTNFVHRFPFVAVSIGFAVNKKIEFGVVYSCVEGKMYTARKGKGAFCNGQKLQVSQQEDITKSLLVTELGSSRTPETVRMVLSNMEKLFCIPVHGIRSVGTAAVNMCLVATGGADAYYEMGIHCWDVAGAGIIVTEAGGVLMDVTGGPFDLMSRRVIAANNRILAERIAKEIQVIPLQRDDED

SEQ ID NO: 40480 - protein, 109 aa, Homo sapiens
  Payload ID: 8233
  Gene Symbol: IMPA1
  Gene Name: inositol(myo)-1(or 4)-monophosphatase 1
  ENSP ID: ENSP00000428425
MADPWQECMDYAVTLARQAGEVVCEAIKNEMNVMLKSSPVDLVTATDQKVEKMLISSIKEKYPSHSFIGEESVAAGEKSILTDNPTWIIDPIDGTTNFVHSCFNWLCCK

SEQ ID NO: 40481 - protein, 126 aa, Homo sapiens
  Payload ID: 8233
  Gene Symbol: IMPA1
  Gene Name: inositol(myo)-1(or 4)-monophosphatase 1
  ENSP ID: ENSP00000428594
MADPWQECMDYAVTLARQAGEVVCEAIKNEMNVMLKSSPVDLVTATDQKVEKMLISSIKEKYPSHSFIGEESVAAGEKSILTDNPTWIIDPIDGTTNFVHRFPFVAVSIGFAVNKKVWNRRFFPRL

SEQ ID NO: 40482 - protein, 101 aa, Homo sapiens
  Payload ID: 8233
  Gene Symbol: IMPA1
  Gene Name: inositol(myo)-1(or 4)-monophosphatase 1
  ENSP ID: ENSP00000428812
MADPWQECMDYAVTLARQAGEVVCEAIKNEMNVMLKSSPVDLVTATDQKVEKMLISSIKEKYPSHSFIGEESVAAGEKSILTDNPTWIIDPIDGTTNFVHR

SEQ ID NO: 40483 - protein, 180 aa, Homo sapiens
  Payload ID: 8233
  Gene Symbol: IMPA1
  Gene Name: inositol(myo)-1(or 4)-monophosphatase 1
  ENSP ID: ENSP00000429322
MHGLCSNSSKTSWRVCEAIKNEMNVMLKSSPVDLVTATDQKVEKMLISSIKEKYPSHSFIGEESVAAGEKSILTDNPTWIIDPIDGTTNFVHRFPFVAVSIGFAVNKKIEFGVVYSCVEGKMYTARKGKGAFCNGQKLQVSQQEDITKSLLVTELGSSRTPETVRMVLSNMEKLFCIPVH

SEQ ID NO: 40484 - protein, 174 aa, Homo sapiens
  Payload ID: 8233
  Gene Symbol: IMPA1
  Gene Name: inositol(myo)-1(or 4)-monophosphatase 1
  ENSP ID: ENSP00000429516
MADPWQECMDYAVTLARQAGEVVCEAIKNEMNVMLKSSPVDLVTATDQKVEKMLISSIKEKYPSHSFIGEESVAAGEKSILTDNPTWIIDPIDGTTNFVHRWSFPLVGQAEMQWRSLGSLQPPPPGFKRFFCLSLPTVSIGFAVNKKIEFGVVYSCVEGKMYTARKGKGAFCNG

SEQ ID NO: 40485 - protein, 265 aa, Homo sapiens
  Payload ID: 8233
  Gene Symbol: IMPA1
  Gene Name: inositol(myo)-1(or 4)-monophosphatase 1
  ENSP ID: ENSP00000429735
  MOD_RES (1)..(1): Any amino acid
XWKAVTRTETAGNSSGVYGFGKMKKMADPWQECMDYAVTLARQAGEVVCEAIKNEMNVMLKSSPVDLVTATDQKVEKMLISSIKEKYPSHSFIGEESVAAGEKSILTDNPTWIIDPIDGTTNFVHRFPFVAVSIGFAVNKKIEFGVVYSCVEGKMYTARKGKGAFCNGQKLQVSQQEDITKSLLVTELGSSRTPETVRMVLSNMEKLFCIPVHGIRSVGTAAVNMCLVATGGADAYYEMGIHCWDVAGAGIIVTEAGGVLMDVTG

SEQ ID NO: 40486 - protein, 211 aa, Homo sapiens
  Payload ID: 8233
  Gene Symbol: IMPA1
  Gene Name: inositol(myo)-1(or 4)-monophosphatase 1
  ENSP ID: ENSP00000430081
MGQRPGPVLPAVAVLGQVAKRKVAWLLRWKAVTRTETAGNSSGVYGFGKMKIFVKYFQKMADPWQECMDYAVTLARQAGEVVCEAIKNEMNVMLKSSPVDLVTATDQKVEKMLISSIKEKYPSHSFIGEESVAAGEKSILTDNPTWIIDPIDGTTNFVHRFPFVAVSIGFAVNKKIEFGVVYSCVEGKMYTARKGKGAFCNGQKLQVSQQE

SEQ ID NO: 40487 - protein, 153 aa, Homo sapiens
  Payload ID: 8233
  Gene Symbol: IMPA1
  Gene Name: inositol(myo)-1(or 4)-monophosphatase 1
  ENSP ID: ENSP00000430283
MADPWQECMDYAVTLARQAGEVVCEAIKNEMNVMLKSSPVDLVTATDQKVEKMLISSIKEKYPSHRFPFVAVSIGFAVNKKIEFGVVYSCVEGKMYTARKGKGAFCNGQKLQVSQQEDITKSLLVTELGSSRTPETVRMVLSNMEKLFCIPVH

SEQ ID NO: 40488 - protein, 288 aa, Homo sapiens
  Payload ID: 8234
  Gene Symbol: IMPA2
  Gene Name: inositol(myo)-1(or 4)-monophosphatase 2
  Uniprot ID: O14732
  ENSP ID: ENSP00000269159
MKPSGEDQAALAAGPWEECFQAAVQLALRAGQIIRKALTEEKRVSTKTSAADLVTETDHLVEDLIISELRERFPSHRFIAEEAAASGAKCVLTHSPTWIIDPIDGTCNFVHRFPTVAVSIGFAVRQELEFGVIYHCTEERLYTGRRGRGAFCNGQRLRVSGETDLSKALVLTEIGPKRDPATLKLFLSNMERLLHAKAHGVRVIGSSTLALCHLASGAADAYYQFGLHCWDLAAATVIIREAGGIVIDTSGGPLDLMACRVVAASTREMAMLIAQALQTINYGRDDEK

SEQ ID NO: 40489 - protein, 85 aa, Homo sapiens
  Payload ID: 8234
  Gene Symbol: IMPA2
  Gene Name: inositol(myo)-1(or 4)-monophosphatase 2
  ENSP ID: ENSP00000372867
MKPSGEDQAALAAGPWEECFQAAVQLALRAGQIIRKALTEEKRVSTKTSAADLVTETDHLVEDLIISELRERFPSHRSPFSLVHM

SEQ ID NO: 40490 - protein, 126 aa, Homo sapiens
  Payload ID: 8234
  Gene Symbol: IMPA2
  Gene Name: inositol(myo)-1(or 4)-monophosphatase 2
  ENSP ID: ENSP00000464754
  MOD_RES (1)..(1): Any amino acid
XHSPTWIIDPIDGTCNFVHRFPTVAVSIGFAVRQELEFGVIYHCTEERLYTGRRGRGAFCNGQRLRVSGETEMGLRHAAQAGLEVLTSKRSAHLSLAKCWDYRHEPPRPAHESLKGLGSDRNWPQT

SEQ ID NO: 40491 - protein, 99 aa, Homo sapiens
  Payload ID: 8234
  Gene Symbol: IMPA2
  Gene Name: inositol(myo)-1(or 4)-monophosphatase 2
  ENSP ID: ENSP00000464767
MERLLHAKAHGVRVIGSSTLALCHLASGAADAYYQFGLHCWDLAAATVIIREAGGIVIDTSGGPLDLMACRVVAASTREMAMLIAQALQTINYGRDDEK

SEQ ID NO: 40492 - protein, 99 aa, Homo sapiens; identical to SEQ ID NO: 40491
  Payload ID: 8234
  Gene Symbol: IMPA2
  Gene Name: inositol(myo)-1(or 4)-monophosphatase 2
  ENSP ID: ENSP00000465416

SEQ ID NO: 40493 - protein, 116 aa, Homo sapiens
  Payload ID: 8234
  Gene Symbol: IMPA2
  Gene Name: inositol(myo)-1(or 4)-monophosphatase 2
  ENSP ID: ENSP00000465938
MKPSGEDQAALAAGPWEECFQAAVQLALRAGQIIRKALTEEKRVSTKTSAADLVTETDHLVEDLIISELRERFPSHRFIAEEAAASGAKCVLTHSPTWIIDPIDGTCNFVHSLNSE

SEQ ID NO: 40494 - protein, 163 aa, Homo sapiens
  Payload ID: 8234
  Gene Symbol: IMPA2
  Gene Name: inositol(myo)-1(or 4)-monophosphatase 2
  ENSP ID: ENSP00000466059
MKPSGEDQAALAAGPWEECFQAAVQLALRAGQIIRKALTEEKRVSTKTSAADLVTETDHLVEDLIISELRERFPSHRFIAEEAAASGAKCVLTHSPTWIIDPIDGTCNFVHRFPTVAVSIGFAVRQEVRVWPRSPGPLPGLPLAILPFWLQPLCAWFAVCPVP

SEQ ID NO: 40495 - protein, 85 aa, Homo sapiens; identical to SEQ ID NO: 40489
  Payload ID: 8234
  Gene Symbol: IMPA2
  Gene Name: inositol(myo)-1(or 4)-monophosphatase 2
  ENSP ID: ENSP00000486461

SEQ ID NO: 40496 - protein, 558 aa, Homo sapiens
  Payload ID: 8235
  Gene Symbol: ISYNA1
  Gene Name: inositol-3-phosphate synthase 1
  Uniprot ID: Q9NPH2
  ENSP ID: ENSP00000337746
MEAAAQFFVESPDVVYGPEAIEAQYEYRTTRVSREGGVLKVHPTSTRFTFRTARQVPRLGVMLVGWGGNNGSTLTAAVLANRLRLSWPTRSGRKEANYYGSLTQAGTVSLGLDAEGQEVFVPFSAVLPMVAPNDLVFDGWDISSLNLAEAMRRAKVLDWGLQEQLWPHMEALRPRPSVYIPEFIAANQSARADNLIPGSRAQQLEQIRRDIRDFRSSAGLDKVIVLWTANTERFCEVIPGLNDTAENLLRTIELGLEVSPSTLFAVASILEGCAFLNGSPQNTLVPGALELAWQHRVFVGGDDFKSGQTKVKSVLVDFLIGSGLKTMSIVSYNHLGNNDGENLSAPLQFRSKEVSKSNVVDDMVQSNPVLYTPGEEPDHCVVIKYVPYVGDSKRALDEYTSELMLGGTNTLVLHNTCEDSLLAAPIMLDLALLTELCQRVSFCTDMDPEPQTFHPVLSLLSFLFKAPLVPPGSPVVNALFRQRSCIENILRACVGLPPQNHMLLEHKMERPGPSLKRVGPVAATYPMLNKKGPVPAATNGCTGDANGHLQEEPPMPTT

SEQ ID NO: 40497 - protein, 504 aa, Homo sapiens
  Payload ID: 8235
  Gene Symbol: ISYNA1
  Gene Name: inositol-3-phosphate synthase 1
  Uniprot ID: Q9NPH2
  ENSP ID: ENSP00000415458
MEAAAQFFVESPDVVYGPEAIEAQYEYRTTRVSREGGVLKEANYYGSLTQAGTVSLGLDAEGQEVFVPFSAVLPMVAPNDLVFDGWDISSLNLAEAMRRAKVLDWGLQEQLWPHMEALRPRPSVYIPEFIAANQSARADNLIPGSRAQQLEQIRRDIRDFRSSAGLDKVIVLWTANTERFCEVIPGLNDTAENLLRTIELGLEVSPSTLFAVASILEGCAFLNGSPQNTLVPGALELAWQHRVFVGGDDFKSGQTKVKSVLVDFLIGSGLKTMSIVSYNHLGNNDGENLSAPLQFRSKEVSKSNVVDDMVQSNPVLYTPGEEPDHCVVIKYVPYVGDSKRALDEYTSELMLGGTNTLVLHNTCEDSLLAAPIMLDLALLTELCQRVSFCTDMDPEPQTFHPVLSLLSFLFKAPLVPPGSPVVNALFRQRSCIENILRACVGLPPQNHMLLEHKMERPGPSLKRVGPVAATYPMLNKKGPVPAATNGCTGDANGHLQEEPPMPTT

SEQ ID NO: 40498 - protein, 177 aa, Homo sapiens
  Payload ID: 8235
  Gene Symbol: ISYNA1
  Gene Name: inositol-3-phosphate synthase 1
  ENSP ID: ENSP00000462001
MEAAAQFFVESPDVVYGPEAIEAQYEYRTTRVSREGGVLKVHPTSTRFTFRTARQVPRLGVMLVGWGGNNGSTLTAAVLANRLRLSWPTRSGRKLEQIRRDIRDFRSSAGLDKVIVLWTANTERFCEVIPGLNDTAENLLRTIELGLEVSPSTLFAVASILEGCAFLNGSPQNTLVP

SEQ ID NO: 40499 - protein, 46 aa, Homo sapiens
  Payload ID: 8235
  Gene Symbol: ISYNA1
  Gene Name: inositol-3-phosphate synthase 1
  ENSP ID: ENSP00000463271
MEAAAQFFVESPDVVYGPEAIEAQYEYRTTRVSREGGVLKAGTSRR

SEQ ID NO: 40500 - protein, 182 aa, Homo sapiens
  Payload ID: 8235
  Gene Symbol: ISYNA1
  Gene Name: inositol-3-phosphate synthase 1
  ENSP ID: ENSP00000463500
MEAAAQFFVESPDVVYGPEAIEAQYEYRTTRVSREGGVLKVDQGAEEGGVLGRAGRLGEKGTGPGIHCAACLQVHPTSTRFTFRTARQVPRLGVMLVGWGGNNGSTLTAAVLANRLRLSWPTRSGRKEANYYGSLTQAGTVSLGLDAEGQEVFVPFSAVLPMVAPNDLVFDGWDISSLNLAE

SEQ ID NO: 40501 - protein, 46 aa, Homo sapiens; identical to SEQ ID NO: 40499
  Payload ID: 8235
  Gene Symbol: ISYNA1
  Gene Name: inositol-3-phosphate synthase 1
  ENSP ID: ENSP00000463628

SEQ ID NO: 40502 - protein, 151 aa, Homo sapiens
  Payload ID: 8235
  Gene Symbol: ISYNA1
  Gene Name: inositol-3-phosphate synthase 1
  ENSP ID: ENSP00000464209
MEAAAQFFVESPDVVYGPEAIEAQYEYRTTRVSREGGVLKVHPTSTRFTFRTARQVPRLGVMLVGWGGNNGSTLTAAVLANRLRLSWPTRSGRKEANYYGSLTQAGTVSLGLDAEGQEVFVPFSAVLPMVAPNDLVFDAGADPQGHPRLPV

SEQ ID NO: 40503 - protein, 148 aa, Homo sapiens
  Payload ID: 8235
  Gene Symbol: ISYNA1
  Gene Name: inositol-3-phosphate synthase 1
  ENSP ID: ENSP00000464430
MEAAAQFFVESPDVVYGPEAIEAQYEYRTTRVSREGGVLKVHPTSTRFTFRTARQVPRLGVMLVGWGGNNGSTLTAAVLANRLRLSWPTRSGRKEANYYGSLTQAGTVSLGLDAEGQEVFVPFSAVLPMVAPNDLVFDGWDISSLNLA

SEQ ID NO: 40504 - protein, 233 aa, Homo sapiens
  Payload ID: 8235
  Gene Symbol: ISYNA1
  Gene Name: inositol-3-phosphate synthase 1
  ENSP ID: ENSP00000464528
  MOD_RES (1)..(1): Any amino acid
XNHLGNNDGENLSAPLQFRSKEVSKSNVVDDMVQSNPVLYTPGEEPDHCVVIKYVPYVGDSKRALDEYTSELMLGGTNTLVLHNTCEDSLLAAPIMLDLALLTELCQRVSFCTDMDPEPQTFHPVLSLLSFLFKAPLVPPGSPVVNALFRQRSCIENILRCTPASRACVGLPPQNHMLLEHKMERPGPSLKRVGPVAATYPMLNKKGPVPAATNGCTGDANGHLQEEPPMPTT

SEQ ID NO: 40505 - protein, 430 aa, Homo sapiens
  Payload ID: 8235
  Gene Symbol: ISYNA1
  Gene Name: inositol-3-phosphate synthase 1
  Uniprot ID: Q9NPH2
  ENSP ID: ENSP00000475677
MVAPNDLVFDGWDISSLNLAEAMRRAKVLDWGLQEQLWPHMEALRPRPSVYIPEFIAANQSARADNLIPGSRAQQLEQIRRDIRDFRSSAGLDKVIVLWTANTERFCEVIPGLNDTAENLLRTIELGLEVSPSTLFAVASILEGCAFLNGSPQNTLVPGALELAWQHRVFVGGDDFKSGQTKVKSVLVDFLIGSGLKTMSIVSYNHLGNNDGENLSAPLQFRSKEVSKSNVVDDMVQSNPVLYTPGEEPDHCVVIKYVPYVGDSKRALDEYTSELMLGGTNTLVLHNTCEDSLLAAPIMLDLALLTELCQRVSFCTDMDPEPQTFHPVLSLLSFLFKAPLVPPGSPVVNALFRQRSCIENILRACVGLPPQNHMLLEHKMERPGPSLKRVGPVAATYPMLNKKGPVPAATNGCTGDANGHLQEEPPMPTT

SEQ ID NO: 40506 - protein, 414 aa, Homo sapiens
  Payload ID: 8236
  Gene Symbol: ITPK1
  Gene Name: inositol-tetrakisphosphate 1-kinase
  Uniprot ID: Q13572
  ENSP ID: ENSP00000267615
MQTFLKGKRVGYWLSEKKIKKLNFQAFAELCRKRGMEVVQLNLSRPIEEQGPLDVIIHKLTDVILEADQNDSQSLELVHRFQEYIDAHPETIVLDPLPAIRTLLDRSKSYELIRKIEAYMEDDRICSPPFMELTSLCGDDTMRLLEKNGLTFPFICKTRVAHGTNSHEMAIVFNQEGLNAIQPPCVVQNFINHNAVLYKVFVVGESYTVVQRPSLKNFSAGTSDRESIFFNSHNVSKPESSSVLTELDKIEGVFERPSDEVIRELSRALRQALGVSLFGIDIIINNQTGQHAVIDINAFPGYEGVSEFFTDLLNHIATVLQGQSTAMAATGDVALLRHSKLLAEPAGGLVGERTCSASPGCCGSMMGQDAPWKAEADAGGTAKLPHQRLGCNAGVSPSFQQHCVASLATKASSQ

SEQ ID NO: 40507 - protein, 314 aa, Homo sapiens
  Payload ID: 8236
  Gene Symbol: ITPK1
  Gene Name: inositol-tetrakisphosphate 1-kinase
  Uniprot ID: Q13572
  ENSP ID: ENSP00000346272
MQTFLKGKRVGYWLSEKKIKKLNFQAFAELCRKRGMEVVQLNLSRPIEEQGPLDVIIHKLTDVILEADQNDSQSLELVHRFQEYIDAHPETIVLDPLPAIRTLLDRSKSYELIRKIEAYMEDDRICSPPFMELTSLCGDDTMRLLEKNGLTFPFICKTRVAHGTNSHEMAIVFNQEGLNAIQPPCVVQNFINHNAVLYKVFVVGESYTVVQRPSLKNFSAGTSDRESIFFNSHNVSKPESSSVLTELDKIEGVFERPSDEVIRELSRALRQALGVSLFGIDIIINNQTGQHAVIDINAFPGDCQVCFIEGWKTD

SEQ ID NO: 40508 - protein, 168 aa, Homo sapiens
  Payload ID: 8236
  Gene Symbol: ITPK1
  Gene Name: inositol-tetrakisphosphate 1-kinase
  ENSP ID: ENSP00000450421
MQTFLKGKRVGYWLSEKKIKKLNFQAFAELCRKRGMEVVQLNLSRPIEEQGPLDVIIHKLTDVILEADQNDSQSLELVHRFQEYIDAHPETIVLDPLPAIRTLLDRSKSYELIRKIEAYMEDDRICSPPFMELTSLCGDDTMRLLEKNGLTFPFICKTRVAHGTNSHE

SEQ ID NO: 40509 - protein, 414 aa, Homo sapiens; identical to SEQ ID NO: 40506
  Payload ID: 8236
  Gene Symbol: ITPK1
  Gene Name: inositol-tetrakisphosphate 1-kinase
  Uniprot ID: Q13572
  ENSP ID: ENSP00000451091

SEQ ID NO: 40510 - protein, 181 aa, Homo sapiens
  Payload ID: 8236
  Gene Symbol: ITPK1
  Gene Name: inositol-tetrakisphosphate 1-kinase
  ENSP ID: ENSP00000451154
MQTFLKGKRVGYWLSEKKIKKLNFQAFAELCRKRGMEVVQEYIDAHPETIVLDPLPAIRTLLDRSKSYELIRKIEAYMEDDRICSPPFMELTSLCGDDTMRLLEKNGLTFPFICKTRVAHGTNSHEMAIVFNQEGLNAIQPPCVVQNFINHNAVLYKVFVVGESYTVVQRPSLKNFSAGTS

SEQ ID NO: 40511 - protein, 295 aa, Homo sapiens
  Payload ID: 8236
  Gene Symbol: ITPK1
  Gene Name: inositol-tetrakisphosphate 1-kinase
  ENSP ID: ENSP00000451893
MEDDRICSPPFMELTSLCGDDTMRLLEKNGLTFPFICKTRVAHGTNSHEMAIVFNQEGLNAIQPPCVVQNFINHNAVLYKVFVVGESYTVVQRPSLKNFSAGTSDRESIFFNSHNVSKPESSSVLTELDKIEGVFERPSDEVIRELSRALRQALGVSLFGIDIIINNQTGQHAVIDINAFPGYEGVSEFFTDLLNHIATVLQGQSTAMAATGDVALLRHSKLLAEPAGGLVGERTCSASPGCCGSMMGQDAPWKAEADAGGTAKLPHQRLGCNAGVSPSFQQHCVASLATKASSQ

SEQ ID NO: 40512 - protein, 168 aa, Homo sapiens; identical to SEQ ID NO: 40508
  Payload ID: 8236
  Gene Symbol: ITPK1
  Gene Name: inositol-tetrakisphosphate 1-kinase
  ENSP ID: ENSP00000452230

SEQ ID NO: 40513 - protein, 206 aa, Homo sapiens
  Payload ID: 8236
  Gene Symbol: ITPK1
  Gene Name: inositol-tetrakisphosphate 1-kinase
  ENSP ID: ENSP00000452258
MQTFLKGKRVGYWLSEKKIKKLNFQAFAELCRKRGMEVVQLNLSRPIEEQGPLDVIIHKLTDVILEADQNDSQSLELVHRFQEYIDAHPETIVLDPLPAIRTLLDRSKSYELIRKIEAYMEGLPSALDDRICSPPFMELTSLCGDDTMRLLEKNGLTFPFICKTRVAHGTNSHEMAIVFNQEGLNAIQPPCVVQNFINHNAVLYKV

SEQ ID NO: 40514 - protein, 314 aa, Homo sapiens; identical to SEQ ID NO: 40507
  Payload ID: 8236
  Gene Symbol: ITPK1
  Gene Name: inositol-tetrakisphosphate 1-kinase
  Uniprot ID: Q13572
  ENSP ID: ENSP00000480918

SEQ ID NO: 40515 - protein, 414 aa, Homo sapiens; identical to SEQ ID NO: 40506
  Payload ID: 8236
  Gene Symbol: ITPK1
  Gene Name: inositol-tetrakisphosphate 1-kinase
  Uniprot ID: Q13572
  ENSP ID: ENSP00000483767

SEQ ID NO: 40516 - protein, 206 aa, Homo sapiens; identical to SEQ ID NO: 40513
  Payload ID: 8236
  Gene Symbol: ITPK1
  Gene Name: inositol-tetrakisphosphate 1-kinase
  ENSP ID: ENSP00000486255

SEQ ID NO: 40517 - protein, 168 aa, Homo sapiens; identical to SEQ ID NO: 40508
  Payload ID: 8236
  Gene Symbol: ITPK1
  Gene Name: inositol-tetrakisphosphate 1-kinase
  ENSP ID: ENSP00000486438

SEQ ID NO: 40518 - protein, 181 aa, Homo sapiens; identical to SEQ ID NO: 40510
  Payload ID: 8236
  Gene Symbol: ITPK1
  Gene Name: inositol-tetrakisphosphate 1-kinase
  ENSP ID: ENSP00000486466

SEQ ID NO: 40519 - protein, 295 aa, Homo sapiens; identical to SEQ ID NO: 40511
  Payload ID: 8236
  Gene Symbol: ITPK1
  Gene Name: inositol-tetrakisphosphate 1-kinase
  ENSP ID: ENSP00000486579

SEQ ID NO: 40520 - protein, 168 aa, Homo sapiens; identical to SEQ ID NO: 40508
  Payload ID: 8236
  Gene Symbol: ITPK1
  Gene Name: inositol-tetrakisphosphate 1-kinase
  ENSP ID: ENSP00000486971

SEQ ID NO: 40521 - protein, 414 aa, Homo sapiens; identical to SEQ ID NO: 40506
  Payload ID: 8236
  Gene Symbol: ITPK1
  Gene Name: inositol-tetrakisphosphate 1-kinase
  Uniprot ID: Q13572
  ENSP ID: ENSP00000486991

SEQ ID NO: 40522 - protein, 461 aa, Homo sapiens
  Payload ID: 8237
  Gene Symbol: ITPKA
  Gene Name: inositol-trisphosphate 3-kinase A
  Uniprot ID: P23677
  ENSP ID: ENSP00000260386
MTLPGGPTGMARPGGARPCSPGLERAPRRSVGELRLLFEARCAAVAAAAAAGEPRARGAKRRGGQVPNGLPRAPPAPVIPQLTVTAEEPDVPPTSPGPPERERDCLPAAGSSHLQQPRRLSTSSVSSTGSSSLLEDSEDDLLSDSESRSRGNVQLEAGEDVGQKNHWQKIRTMVNLPVISPFKKRYAWVQLAGHTGSFKAAGTSGLILKRCSEPERYCLARLMADALRGCVPAFHGVVERDGESYLQLQDLLDGFDGPCVLDCKMGVRTYLEEELTKARERPKLRKDMYKKMLAVDPEAPTEEEHAQRAVTKPRYMQWREGISSSTTLGFRIEGIKKADGSCSTDFKTTRSREQVLRVFEEFVQGDEEVLRRYLNRLQQIRDTLEVSEFFRRHEVIGSSLLFVHDHCHRAGVWLIDFGKTTPLPDGQILDHRRPWEEGNREDGYLLGLDNLIGILASLAER

SEQ ID NO: 40523 - protein, 260 aa, Homo sapiens
  Payload ID: 8237
  Gene Symbol: ITPKA
  Gene Name: inositol-trisphosphate 3-kinase A
  ENSP ID: ENSP00000396560
MNTQRNPRNGQPRRLSTSSVSSTGSSSLLEDSEDDLLSDSESRSRGNVQLEAGEDVGQKNHWQKIRTMVNLPVISPFKKRYAWVQLAGHTGSFKAAGTSGLILKRCSEPERYCLARLMADALRGCVPAFHGVVERDGESYLQLQDLLDGFDGPCVLDCKMGVRTYLEEELTKARERPKLRKDMYKKMLAVDPEAPTEEEHAQRAVTKPRYMQWREGISSSTTLGFRIEGIKKADGSCSTDFKTTRSREQVLRVFEEFVQG

SEQ ID NO: 40524 - protein, 946 aa, Homo sapiens
  Payload ID: 8238
  Gene Symbol: ITPKB
  Gene Name: inositol-trisphosphate 3-kinase B
  Uniprot ID: P27987
  ENSP ID: ENSP00000272117
MAVYCYALNSLVIMNSANEMKSGGGPGPSGSETPPPPRRAVLSPGSVFSPGRGASFLFPPAESLSPEEPRSPGGWRSGRRRLNSSSGSGSGSSGSSVSSPSWAGRLRGDRQQVVAAGTLSPPGPEEAKRKLRILQRELQNVQVNQKVGMFEAHIQAQSSAIQAPRSPRLGRARSPSPCPFRSSSQPPGRVLVQGARSEERRTKSWGEQCPETSGTDSGRKGGPSLCSSQVKKGMPPLPGRAAPTGSEAQGPSAFVRMEKGIPASPRCGSPTAMEIDKRGSPTPGTRSCLAPSLGLFGASLTMATEVAARVTSTGPHRPQDLALTEPSGRARELEDLQPPEALVERQGQFLGSETSPAPERGGPRDGEPPGKMGKGYLPCGMPGSGEPEVGKRPEETTVSVQSAESSDSLSWSRLPRALASVGPEEARSGAPVGGGRWQLSDRVEGGSPTLGLLGGSPSAQPGTGNVEAGIPSGRMLEPLPCWDAAKDLKEPQCPPGDRVGVQPGNSRVWQGTMEKAGLAWTRGTGVQSEGTWESQRQDSDALPSPELLPQDPDKPFLRKACSPSNIPAVIITDMGTQEDGALEETQGSPRGNLPLRKLSSSSASSTGFSSSYEDSEEDISSDPERTLDPNSAFLHTLDQQKPRVSKSWRKIKNMVHWSPFVMSFKKKYPWIQLAGHAGSFKAAANGRILKKHCESEQRCLDRLMVDVLRPFVPAYHGDVVKDGERYNQMDDLLADFDSPCVMDCKMGIRTYLEEELTKARKKPSLRKDMYQKMIEVDPEAPTEEEKAQRAVTKPRYMQWRETISSTATLGFRIEGIKKEDGTVNRDFKKTKTREQVTEAFREFTKGNHNILIAYRDRLKAIRTTLEVSPFFKCHEVIGSSLLFIHDKKEQAKVWMIDFGKTTPLPEGQTLQHDVPWQEGNREDGYLSGLNNLVDILTEMSQDAPLA

SEQ ID NO: 40525 - protein, 644 aa, Homo sapiens
  Payload ID: 8238
  Gene Symbol: ITPKB
  Gene Name: inositol-trisphosphate 3-kinase B
  Uniprot ID: P27987
  ENSP ID: ENSP00000355748
MAVYCYALNSLVIMNSANEMKSGGGPGPSGSETPPPPRRAVLSPGSVFSPGRGASFLFPPAESLSPEEPRSPGGWRSGRRRLNSSSGSGSGSSGSSVSSPSWAGRLRGDRQQVVAAGTLSPPGPEEAKRKLRILQRELQNVQVNQKVGMFEAHIQAQSSAIQAPRSPRLGRARSPSPCPFRSSSQPPGRVLVQGARSEERRTKSWGEQCPETSGTDSGRKGGPSLCSSQVKKGMPPLPGRAAPTGSEAQGPSAFVRMEKGIPASPRCGSPTAMEIDKRGSPTPGTRSCLAPSLGLFGASLTMATEVAARVTSTGPHRPQDLALTEPSGRARELEDLQPPEALVERQGQFLGSETSPAPERGGPRDGEPPGKMGKGYLPCGMPGSGEPEVGKRPEETTVSVQSAESSDSLSWSRLPRALASVGPEEARSGAPVGGGRWQLSDRVEGGSPTLGLLGGSPSAQPGTGNVEAGIPSGRMLEPLPCWDAAKDLKEPQCPPGDRVGVQPGNSRVWQGTMEKAGLAWTRGTGVQSEGTWESQRQDSDALPSPELLPQDPDKPFLRKACSPSNIPAVIITDMGTQEDGALEETQGSPRGNLPLRKLSSSSASSTGFSSSYEDSEEDISSDPERTLDPNSAFLHTLDQQKPRV

SEQ ID NO: 40526 - protein, 946 aa, Homo sapiens; identical to SEQ ID NO: 40524
  Payload ID: 8238
  Gene Symbol: ITPKB
  Gene Name: inositol-trisphosphate 3-kinase B
  Uniprot ID: P27987
  ENSP ID: ENSP00000411152

SEQ ID NO: 40527 - protein, 683 aa, Homo sapiens
  Payload ID: 8239
  Gene Symbol: ITPKC
  Gene Name: inositol-trisphosphate 3-kinase C
  Uniprot ID: Q96DU7
  ENSP ID: ENSP00000263370
MRRCPCRGSLNEAEAGALPAAARMGLEAPRGGRRRQPGQQRPGPGAGAPAGRPEGGGPWARTEGSSLHSEPERAGLGPAPGTESPQAEFWTDGQTEPAAAGLGVETERPKQKTEPDRSSLRTHLEWSWSELETTCLWTETGTDGLWTDPHRSDLQFQPEEASPWTQPGVHGPWTELETHGSQTQPERVKSWADNLWTHQNSSSLQTHPEGACPSKEPSADGSWKELYTDGSRTQQDIEGPWTEPYTDGSQKKQDTEAARKQPGTGGFQIQQDTDGSWTQPSTDGSQTAPGTDCLLGEPEDGPLEEPEPGELLTHLYSHLKCSPLCPVPRLIITPETPEPEAQPVGPPSRVEGGSGGFSSASSFDESEDDVVAGGGGASDPEDRSGSKPWKKLKTVLKYSPFVVSFRKHYPWVQLSGHAGNFQAGEDGRILKRFCQCEQRSLEQLMKDPLRPFVPAYYGMVLQDGQTFNQMEDLLADFEGPSIMDCKMGSRTYLEEELVKARERPRPRKDMYEKMVAVDPGAPTPEEHAQGAVTKPRYMQWRETMSSTSTLGFRIEGIKKADGTCNTNFKKTQALEQVTKVLEDFVDGDHVILQKYVACLEELREALEISPFFKTHEVVGSSLLFVHDHTGLAKVWMIDFGKTVALPDHQTLSHRLPWAEGNREDGYLWGLDNMICLLQGLAQS

SEQ ID NO: 40528 - protein, 50 aa, Homo sapiens
  Payload ID: 8239
  Gene Symbol: ITPKC
  Gene Name: inositol-trisphosphate 3-kinase C
  ENSP ID: ENSP00000472655
MVLQDGQTFNQMEDLLADFEGPSIMDCKMGSRRQMGPVTPTSRRRRHWSR

SEQ ID NO: 40529 - protein, 579 aa, Homo sapiens
  Payload ID: 8240
  Gene Symbol: INSC
  Gene Name: inscuteable homolog (Drosophila)
  Uniprot ID: Q1MX18
  ENSP ID: ENSP00000368872
MRRPPGNGEAASEGPGGWGLWGVQESRRLCCAGHDRCKQALLQIGINMMALPGGRHLDSVTLPGQRLHLMQVDSVQRWMEDLKLMTECECMCVLQAKPISLEEDAQGDLILAGGPGPGDPLQLLLKRGWVISTELRRIGQKLAQDRWARVHSMSVRLTCHARSMVSEYSAVSRNSLKEMGEIEKLLMEKCSELSAVTERCLQVENEHVLKSMKACVSETLSMLGQHFGQLLELALTREVQALVRKIDASDNIYTTESTTGNLFSLTQEGAPLCRIIAKEGGVVALFKVCRQDSFRCLYPQALRTLASICCVEEGVHQLEKVDGVLCLADILTDNSHSEATRAEAAAVVAQVTSPHLPVTQHLSSFLESMEEIVTALVKLCQEASSGEVFLLASAALANITFFDTMACEMLLQLNAIRVLLEACSDKQRVDTPYTRDQIVTILANMSVLEQCASDIIQENGVQLIMGMLSEKPRSGTPAEVAACERVQQKAAVTLARLSRDPDVAREAVRLSCMSRLIELCRSPSERNSSDAVLVACLAALRRLAGVCPEGLQDSDFQQLVQPRLVDSFLLCSNMEESFV

SEQ ID NO: 40530 - protein, 532 aa, Homo sapiens
  Payload ID: 8240
  Gene Symbol: INSC
  Gene Name: inscuteable homolog (Drosophila)
  Uniprot ID: Q1MX18
  ENSP ID: ENSP00000368874
MMALPGGRHLDSVTLPGQRLHLMQVDSVQRWMEDLKLMTECECMCVLQAKPISLEEDAQGDLILAGGPGPGDPLQLLLKRGWVISTELRRIGQKLAQDRWARVHSMSVRLTCHARSMVSEYSAVSRNSLKEMGEIEKLLMEKCSELSAVTERCLQVENEHVLKSMKACVSETLSMLGQHFGQLLELALTREVQALVRKIDASDNIYTTESTTGNLFSLTQEGAPLCRIIAKEGGVVALFKVCRQDSFRCLYPQALRTLASICCVEEGVHQLEKVDGVLCLADILTDNSHSEATRAEAAAVVAQVTSPHLPVTQHLSSFLESMEEIVTALVKLCQEASSGEVFLLASAALANITFFDTMACEMLLQLNAIRVLLEACSDKQRVDTPYTRDQIVTILANMSVLEQCASDIIQENGVQLIMGMLSEKPRSGTPAEVAACERVQQKAAVTLARLSRDPDVAREAVRLSCMSRLIELCRSPSERNSSDAVLVACLAALRRLAGVCPEGLQDSDFQQLVQPRLVDSFLLCSNMEESFV

SEQ ID NO: 40531 - protein, 566 aa, Homo sapiens
  Payload ID: 8240
  Gene Symbol: INSC
  Gene Name: inscuteable homolog (Drosophila)
  ENSP ID: ENSP00000389161
MALPGGRHLDSVTLPGQRLHLMQVDSVQRWMEDLKLMTECECMCVLQAKPISLEEDAQGDLILAGGPGPGDPLQLLLKRGWVISTELRRIGQKLAQDRWARVHSMSVRLTCHARSMVSEYSAVSRNSLKEMGEIEKLLMEKCSELSAVTERCLQVENEHVLKSMKACVSETLSMLGQHFGQLLELALTREVQVESHSVTRLECSGAISAQCNLRLLGSSDSPASASQALVRKIDASDNIYTTESTTGNLFSLTQEGAPLCRIIAKEGGVVALFKVCRQDSFRCLYPQALRTLASICCVEEGVHQLEKVDGVLCLADILTDNSHSEATRAEAAAVVAQVTSPHLPVTQHLSSFLESMEEIVTALVKLCQEASSGEVFLLASAALANITFFDTMACEMLLQLNAIRVLLEACSDKQRVDTPYTRDQIVTILANMSVLEQCASDIIQENGVQLIMGMLSEKPRSGTPAEVAACERVQQKAAVTLARLSRDPDVAREAVRLSCMSRLIELCRSPSERNSSDAVLVACLAALRRLAGVCPEGLQDSDFQQLVQPRLVDSFLLCSNMEESFV

SEQ ID NO: 40532 - protein, 520 aa, Homo sapiens
  Payload ID: 8240
  Gene Symbol: INSC
  Gene Name: inscuteable homolog (Drosophila)
  Uniprot ID: Q1MX18
  ENSP ID: ENSP00000435022
MMALPGGRHLDSVTLPGQRLHLMQVDSVQRWMEDLKLMTECECMCVLQAKPISLEEDAQGDLILAGGPGPGDPLQLLLKRGWVISTELRRIGQKLAQDRWARVHSMSVRLTCHARSMVSEYSAVSRNSLKEMGEIEKLLMEKCSELSAVTERCLQVENEHVLKSMKACVSETLSMLGQHFGQLLELALTREVQALVRKIDASDNIYTTESTTGNLFSLTQEGAPLCRIIAKEGGVVALFKVCRQDSFRCLYPQALRTLASICCVEEGVHQLEKVDGVLCLADILTDNSHSEATRAEAAAVVAQVTSPHLPVTQHLSSFLESMEEIVTALVKLCQEASSGEVFLLASAALANITFFDTMACEMLLQLNAIRVLLEACSDKQRVDTPYTRDQIVTILANMSVLEQCASDIIQENGVQLIMGMLSEKPRSGTPAEVAACERVQQKAAVTLARLSRDPDVAREAVRLSCMSRLIELCRSPSERNSSDAVLVACLAMGIQLQVKKTNISALLLWFLFWHIQGCSA

SEQ ID NO: 40533 - protein, 490 aa, Homo sapiens
  Payload ID: 8240
  Gene Symbol: INSC
  Gene Name: inscuteable homolog (Drosophila)
  Uniprot ID: Q1MX18
  ENSP ID: ENSP00000436113
MMALPGGRHLDSVTLPGQRLHLMQVDSVQRWMEDLKLMTECECMCVLQAKPISLEEDAQGDLILAGGPGPGDPLQLLLKRGWVISTELRRIGQKLAQDRWARVHSMSVRLTCHARSMVSEYSAVSRNSLKEMGEIEKLLMEKCSELSAVTERCLQVENEHVLKSMKACVSETLSMLGQHFGQLLELALTREVQALVRKIDASDNIYTTESTTGNLFSLTQEGAPLCRIIAKVDGVLCLADILTDNSHSEATRAEAAAVVAQVTSPHLPVTQHLSSFLESMEEIVTALVKLCQEASSGEVFLLASAALANITFFDTMACEMLLQLNAIRVLLEACSDKQRVDTPYTRDQIVTILANMSVLEQCASDIIQENGVQLIMGMLSEKPRSGTPAEVAACERVQQKAAVTLARLSRDPDVAREAVRLSCMSRLIELCRSPSERNSSDAVLVACLAALRRLAGVCPEGLQDSDFQQLVQPRLVDSFLLCSNMEESFV

SEQ ID NO: 40534 - protein, 532 aa, Homo sapiens; identical to SEQ ID NO: 40530
  Payload ID: 8240
  Gene Symbol: INSC
  Gene Name: inscuteable homolog (Drosophila)
  Uniprot ID: Q1MX18
  ENSP ID: ENSP00000436194

SEQ ID NO: 40535 - protein, 200 aa, Homo sapiens
  Payload ID: 8241
  Gene Symbol: INS-IGF2
  Gene Name: INS-IGF2 readthrough
  Uniprot ID: F8WCM5
  ENSP ID: ENSP00000348986
MALWMRLLPLLALLALWGPDPAAAFVNQHLCGSHLVEALYLVCGERGFFYTPKTRREAEDLQASALSLSSSTSTWPEGLDATARAPPALVVTANIGQAGGSSSRQFRQRALGTSDSPVLFIHCPGAAGTAQGLEYRGRRVTTELVWEEVDSSPQPQGSESLPAQPPAQPAPQPEPQQAREPSPEVSCCGLWPRRPQRSQN

SEQ ID NO: 40536 - protein, 200 aa, Homo sapiens; identical to SEQ ID NO: 40535
  Payload ID: 8241
  Gene Symbol: INS-IGF2
  Gene Name: INS-IGF2 readthrough
  Uniprot ID: F8WCM5
  ENSP ID: ENSP00000380440

SEQ ID NO: 40537 - protein, 110 aa, Homo sapiens
  Payload ID: 8242
  Gene Symbol: INS
  Gene Name: insulin
  Uniprot ID: P01308
  ENSP ID: ENSP00000250971
MALWMRLLPLLALLALWGPDPAAAFVNQHLCGSHLVEALYLVCGERGFFYTPKTRREAEDLQVGQVELGGGPGAGSLQPLALEGSLQKRGIVEQCCTSICSLYQLENYCN

SEQ ID NO: 40538 - protein, 110 aa, Homo sapiens; identical to SEQ ID NO: 40537
  Payload ID: 8242
  Gene Symbol: INS
  Gene Name: insulin
  Uniprot ID: P01308
  ENSP ID: ENSP00000370731

SEQ ID NO: 40539 - protein, 110 aa, Homo sapiens; identical to SEQ ID NO: 40537
  Payload ID: 8242
  Gene Symbol: INS
  Gene Name: insulin
  Uniprot ID: P01308
  ENSP ID: ENSP00000380432

SEQ ID NO: 40540 - protein, 92 aa, Homo sapiens
  Payload ID: 8242
  Gene Symbol: INS
  Gene Name: insulin
  ENSP ID: ENSP00000408400
MALWMRLLPLLALLALWGPDPAAAFVNQHLCGSHLVEALYLVCGERGFFYTPKTRREAEDLQAGELLQLDAARRQPHTRRLLHRERWNKALE

SEQ ID NO: 40541 - protein, 98 aa, Homo sapiens
  Payload ID: 8242
  Gene Symbol: INS
  Gene Name: insulin
  ENSP ID: ENSP00000424008
MALWMRLLPLLALLALWGPDPAAAFVNQHLCGSHLVEALYLVCGERGFFYTPKTRREAEDLQGSLQPLALEGSLQKRGIVEQCCTSICSLYQLENYCN

SEQ ID NO: 40542 - protein, 178 aa, Homo sapiens
  Payload ID: 8243
  Gene Symbol: INSIG1
  Gene Name: insulin induced gene 1
  ENSP ID: ENSP00000340010
MPRLHDHFWSCSCAHSARRRGPPRASAKLDFANNVQLSLTLAALSLGLWWTFDRSRSGLGLGITIAFLATLITQFLVYNGVYQYTSPDFLYIRSWLPCIFFSGGVTVGNIGRQLAMLIPFCEELNLKTTWLFHKTRSNYRVFLKSPIVIESSKPPILRARKILEENLTVDYDKDYLFS

SEQ ID NO: 40543 - protein, 164 aa, Homo sapiens
  Payload ID: 8243
  Gene Symbol: INSIG1
  Gene Name: insulin induced gene 1
  Uniprot ID: O15503
  ENSP ID: ENSP00000344035
MPRLHDHFWSCSCAHSARRRGPPRASAAGLAAKVGEMINVSVSGPSLLAAHGAPDADPAPRGRSAAMSGPEPGSPYPNTWHHRLLQRSLVLFSVGVVLALVLNLLQIQRNVTLFPEEVIATIFSSAWWVPPCCGTAAGIHPQISSIFVLGSLVYFSQEASRWGT

SEQ ID NO: 40544 - protein, 277 aa, Homo sapiens
  Payload ID: 8243
  Gene Symbol: INSIG1
  Gene Name: insulin induced gene 1
  Uniprot ID: O15503
  ENSP ID: ENSP00000344741
MPRLHDHFWSCSCAHSARRRGPPRASAAGLAAKVGEMINVSVSGPSLLAAHGAPDADPAPRGRSAAMSGPEPGSPYPNTWHHRLLQRSLVLFSVGVVLALVLNLLQIQRNVTLFPEEVIATIFSSAWWVPPCCGTAAAVVGLLYPCIDSHLGEPHKFKREWASVMRCIAVFVGINHASAKLDFANNVQLSLTLAALSLGLWWTFDRSRSGLGLGITIAFLATLITQFLVYNGVYQYTSPDFLYIRSWLPCIFFSGGVTVGNIGRQLAMGVPEKPHSD

SEQ ID NO: 40545 - protein, 123 aa, Homo sapiens
  Payload ID: 8243
  Gene Symbol: INSIG1
  Gene Name: insulin induced gene 1
  ENSP ID: ENSP00000414691
MPRLHDHFWSCSCAHSARRRGPPRASAAGLAAKVGEMINVSVSGPSLLAAHGAPDADPAPRGRSAAMSGPEPGSPYPNTWHHRLLQRSLVLFSVGVVLALVLNLLQIQRNVTLFPEEVIATIF

SEQ ID NO: 40546 - protein, 239 aa, Homo sapiens
  Payload ID: 8243
  Gene Symbol: INSIG1
  Gene Name: insulin induced gene 1
  ENSP ID: ENSP00000420198
  MOD_RES (1)..(1): Any amino acid
XSVGVVLALVLNLLQIQRNVTLFPEEVIATIFSSAWWVPPCCGTAAAVVGLLYPCIDSHLGEPHKFKREWASVMRCIAVFVGINHASAKLDFANNVQLSLTLAALSLGLWWTFDRSRSGLGLGITIAFLATLITQFLVYNGVYQYTSPDFLYIRSWLPCIFFSGGVTVGNIGRQLAMLIPFCEELNLKTTWLFHKTRSNYRVFLKSPIVIESSKPPILRARKILEENLTVDYDKDYLFS

SEQ ID NO: 40547 - protein, 225 aa, Homo sapiens
  Payload ID: 8244
  Gene Symbol: INSIG2
  Gene Name: insulin induced gene 2
  Uniprot ID: Q9Y5U4
  ENSP ID: ENSP00000245787
MAEGETESPGPKKCGPYISSVTSQSVNLMIRGVVLFFIGVFLALVLNLLQIQRNVTLFPPDVIASIFSSAWWVPPCCGTASAVIGLLYPCIDRHLGEPHKFKREWSSVMRCVAVFVGINHASAKVDFDNNIQLSLTLAALSIGLWWTFDRSRSGFGLGVGIAFLATVVTQLLVYNGVYQYTSPDFLYVRSWLPCIFFAGGITMGNIGRQLAMYECKVIAEKSHQE

SEQ ID NO: 40548 - protein, 39 aa, Homo sapiens
  Payload ID: 8244
  Gene Symbol: INSIG2
  Gene Name: insulin induced gene 2
  ENSP ID: ENSP00000400126
MPVLKWISITTYSCLSHWLHYPLDCGGLLIDLEVVLALE

SEQ ID NO: 40549 - protein, 238 aa, Homo sapiens
  Payload ID: 8244
  Gene Symbol: INSIG2
  Gene Name: insulin induced gene 2
  ENSP ID: ENSP00000484179
MAEGETESPGPKKCGPYISSVTSQSVNLMIRGVVLFFIGVFLALVLNLLQIQRNVTLFPPDVIASIFSSAWWVPPCCGTASAVIGLLYPCIDRHLGEPHKFKREWSSVMRCVAVFVGINHASAKVDFDNNIQLSLTLAALSIGLWWTFDRSRSGFGLGVGIAFLATVVTQLLVYNGVYQYTSPDFLYVRSWLPCIFFAGGITMGNIGRQLAMYECKVIAENLIRNEEGKKYLLYRKAR

SEQ ID NO: 40550 - protein, 1382 aa, Homo sapiens
  Payload ID: 8245
  Gene Symbol: INSR
  Gene Name: insulin receptor
  Uniprot ID: P06213
  ENSP ID: ENSP00000303830
MATGGRRGAAAAPLLVAVAALLLGAAGHLYPGEVCPGMDIRNNLTRLHELENCSVIEGHLQILLMFKTRPEDFRDLSFPKLIMITDYLLLFRVYGLESLKDLFPNLTVIRGSRLFFNYALVIFEMVHLKELGLYNLMNITRGSVRIEKNNELCYLATIDWSRILDSVEDNYIVLNKDDNEECGDICPGTAKGKTNCPATVINGQFVERCWTHSHCQKVCPTICKSHGCTAEGLCCHSECLGNCSQPDDPTKCVACRNFYLDGRCVETCPPPYYHFQDWRCVNFSFCQDLHHKCKNSRRQGCHQYVIHNNKCIPECPSGYTMNSSNLLCTPCLGPCPKVCHLLEGEKTIDSVTSAQELRGCTVINGSLIINIRGGNNLAAELEANLGLIEEISGYLKIRRSYALVSLSFFRKLRLIRGETLEIGNYSFYALDNQNLRQLWDWSKHNLTITQGKLFFHYNPKLCLSEIHKMEEVSGTKGRQERNDIALKTNGDQASCENELLKFSYIRTSFDKILLRWEPYWPPDFRDLLGFMLFYKEAPYQNVTEFDGQDACGSNSWTVVDIDPPLRSNDPKSQNHPGWLMRGLKPWTQYAIFVKTLVTFSDERRTYGAKSDIIYVQTDATNPSVPLDPISVSNSSSQIILKWKPPSDPNGNITHYLVFWERQAEDSELFELDYCLKGLKLPSRTWSPPFESEDSQKHNQSEYEDSAGECCSCPKTDSQILKELEESSFRKTFEDYLHNVVFVPRKTSSGTGAEDPRPSRKRRSLGDVGNVTVAVPTVAAFPNTSSTSVPTSPEEHRPFEKVVNKESLVISGLRHFTGYRIELQACNQDTPEERCSVAAYVSARTMPEAKADDIVGPVTHEIFENNVVHLMWQEPKEPNGLIVLYEVSYRRYGDEELHLCVSRKHFALERGCRLRGLSPGNYSVRIRATSLAGNGSWTEPTYFYVTDYLDVPSNIAKIIIGPLIFVFLFSVVIGSIYLFLRKRQPDGPLGPLYASSNPEYLSASDVFPCSVYVPDEWEVSREKITLLRELGQGSFGMVYEGNARDIIKGEAETRVAVKTVNESASLRERIEFLNEASVMKGFTCHHVVRLLGVVSKGQPTLVVMELMAHGDLKSYLRSLRPEAENNPGRPPPTLQEMIQMAAEIADGMAYLNAKKFVHRDLAARNCMVAHDFTVKIGDFGMTRDIYETDYYRKGGKGLLPVRWMAPESLKDGVFTTSSDMWSFGVVLWEITSLAEQPYQGLSNEQVLKFVMDGGYLDQPDNCPERVTDLMRMCWQFNPKMRPTFLEIVNLLKDDLHPSFPEVSFFHSEENKAPESEELEMEFEDMENVPLDRSSHCQREEAGGRDGGSSLGFKRSYEEHIPYTHMNGGKKNGRILTLPRSNPS

SEQ ID NO: 40551 - protein, 1370 aa, Homo sapiens
  Payload ID: 8245
  Gene Symbol: INSR
  Gene Name: insulin receptor
  Uniprot ID: P06213
  ENSP ID: ENSP00000342838
MATGGRRGAAAAPLLVAVAALLLGAAGHLYPGEVCPGMDIRNNLTRLHELENCSVIEGHLQILLMFKTRPEDFRDLSFPKLIMITDYLLLFRVYGLESLKDLFPNLTVIRGSRLFFNYALVIFEMVHLKELGLYNLMNITRGSVRIEKNNELCYLATIDWSRILDSVEDNYIVLNKDDNEECGDICPGTAKGKTNCPATVINGQFVERCWTHSHCQKVCPTICKSHGCTAEGLCCHSECLGNCSQPDDPTKCVACRNFYLDGRCVETCPPPYYHFQDWRCVNFSFCQDLHHKCKNSRRQGCHQYVIHNNKCIPECPSGYTMNSSNLLCTPCLGPCPKVCHLLEGEKTIDSVTSAQELRGCTVINGSLIINIRGGNNLAAELEANLGLIEEISGYLKIRRSYALVSLSFFRKLRLIRGETLEIGNYSFYALDNQNLRQLWDWSKHNLTITQGKLFFHYNPKLCLSEIHKMEEVSGTKGRQERNDIALKTNGDQASCENELLKFSYIRTSFDKILLRWEPYWPPDFRDLLGFMLFYKEAPYQNVTEFDGQDACGSNSWTVVDIDPPLRSNDPKSQNHPGWLMRGLKPWTQYAIFVKTLVTFSDERRTYGAKSDIIYVQTDATNPSVPLDPISVSNSSSQIILKWKPPSDPNGNITHYLVFWERQAEDSELFELDYCLKGLKLPSRTWSPPFESEDSQKHNQSEYEDSAGECCSCPKTDSQILKELEESSFRKTFEDYLHNVVFVPRPSRKRRSLGDVGNVTVAVPTVAAFPNTSSTSVPTSPEEHRPFEKVVNKESLVISGLRHFTGYRIELQACNQDTPEERCSVAAYVSARTMPEAKADDIVGPVTHEIFENNVVHLMWQEPKEPNGLIVLYEVSYRRYGDEELHLCVSRKHFALERGCRLRGLSPGNYSVRIRATSLAGNGSWTEPTYFYVTDYLDVPSNIAKIIIGPLIFVFLFSVVIGSIYLFLRKRQPDGPLGPLYASSNPEYLSASDVFPCSVYVPDEWEVSREKITLLRELGQGSFGMVYEGNARDIIKGEAETRVAVKTVNESASLRERIEFLNEASVMKGFTCHHVVRLLGVVSKGQPTLVVMELMAHGDLKSYLRSLRPEAENNPGRPPPTLQEMIQMAAEIADGMAYLNAKKFVHRDLAARNCMVAHDFTVKIGDFGMTRDIYETDYYRKGGKGLLPVRWMAPESLKDGVFTTSSDMWSFGVVLWEITSLAEQPYQGLSNEQVLKFVMDGGYLDQPDNCPERVTDLMRMCWQFNPKMRPTFLEIVNLLKDDLHPSFPEVSFFHSEENKAPESEELEMEFEDMENVPLDRSSHCQREEAGGRDGGSSLGFKRSYEEHIPYTHMNGGKKNGRILTLPRSNPS

SEQ ID NO: 40552 - protein, 152 aa, Homo sapiens
  Payload ID: 8245
  Gene Symbol: INSR
  Gene Name: insulin receptor
  ENSP ID: ENSP00000473170
YKEAPYQNVTEFDGQDACGSNSWTVVDIDPPLRSNDPKSQNHPGWLMRGLKPWTQYAIFVKTLVTFSDERRTYGAKSDIIYVQTDATNPSVPLDPISVSNSSSQIILKWKPPSDPNGNITHYLVFWERQAEDSELFELDYCLKGRVQSSAPL

SEQ ID NO: 40553 - protein, 1242 aa, Homo sapiens
  Payload ID: 8246
  Gene Symbol: IRS1
  Gene Name: insulin receptor substrate 1
  Uniprot ID: P35568
  ENSP ID: ENSP00000304895
MASPPESDGFSDVRKVGYLRKPKSMHKRFFVLRAASEAGGPARLEYYENEKKWRHKSSAPKRSIPLESCFNINKRADSKNKHLVALYTRDEHFAIAADSEAEQDSWYQALLQLHNRAKGHHDGAAALGAGGGGGSCSGSSGLGEAGEDLSYGDVPPGPAFKEVWQVILKPKGLGQTKNLIGIYRLCLTSKTISFVKLNSEAAAVVLQLMNIRRCGHSENFFFIEVGRSAVTGPGEFWMQVDDSVVAQNMHETILEAMRAMSDEFRPRSKSQSSSNCSNPISVPLRRHHLNNPPPSQVGLTRRSRTESITATSPASMVGGKPGSFRVRASSDGEGTMSRPASVDGSPVSPSTNRTHAHRHRGSARLHPPLNHSRSIPMPASRCSPSATSPVSLSSSSTSGHGSTSDCLFPRRSSASVSGSPSDGGFISSDEYGSSPCDFRSSFRSVTPDSLGHTPPARGEEELSNYICMGGKGPSTLTAPNGHYILSRGGNGHRCTPGTGLGTSPALAGDEAASAADLDNRFRKRTHSAGTSPTITHQKTPSQSSVASIEEYTEMMPAYPPGGGSGGRLPGHRHSAFVPTRSYPEEGLEMHPLERRGGHHRPDSSTLHTDDGYMPMSPGVAPVPSGRKGSGDYMPMSPKSVSAPQQIINPIRRHPQRVDPNGYMMMSPSGGCSPDIGGGPSSSSSSSNAVPSGTSYGKLWTNGVGGHHSHVLPHPKPPVESSGGKLLPCTGDYMNMSPVGDSNTSSPSDCYYGPEDPQHKPVLSYYSLPRSFKHTQRPGEPEEGARHQHLRLSTSSGRLLYAATADDSSSSTSSDSLGGGYCGARLEPSLPHPHHQVLQPHLPRKVDTAAQTNSRLARPTRLSLGDPKASTLPRAREQQQQQQPLLHPPEPKSPGEYVNIEFGSDQSGYLSGPVAFHSSPSVRCPSQLQPAPREEETGTEEYMKMDLGPGRRAAWQESTGVEMGRLGPAPPGAASICRPTRAVPSSRGDYMTMQMSCPRQSYVDTSPAAPVSYADMRTGIAAEEVSLPRATMAAASSSSAASASPTGPQGAAELAAHSSLLGGPQGPGGMSAFTRVNLSPNRNQSAKVIRADPQGCRRRHSSETFSSTPSATRVGNTVPFGAGAAVGGGGGSSSSSEDVKRHSSASFENVWLRPGELGGAPKEPAKLCGAAGGLENGLNYIDLDLVKDFKQCPQECTPEPQPPPPPPPHQPLGSGESSSTRRSSEDLSAYASISFQKQPEDRQ

SEQ ID NO: 40554 - protein, 1338 aa, Homo sapiens
  Payload ID: 8247
  Gene Symbol: IRS2
  Gene Name: insulin receptor substrate 2
  Uniprot ID: Q9Y4H2
  ENSP ID: ENSP00000365016
MASPPRHGPPGPASGDGPNLNNNNNNNNHSVRKCGYLRKQKHGHKRFFVLRGPGAGGDEATAGGGSAPQPPRLEYYESEKKWRSKAGAPKRVIALDCCLNINKRADAKHKYLIALYTKDEYFAVAAENEQEQEGWYRALTDLVSEGRAAAGDAPPAAAPAASCSASLPGALGGSAGAAGAEDSYGLVAPATAAYREVWQVNLKPKGLGQSKNLTGVYRLCLSARTIGFVKLNCEQPSVTLQLMNIRRCGHSDSFFFIEVGRSAVTGPGELWMQADDSVVAQNIHETILEAMKALKELFEFRPRSKSQSSGSSATHPISVPGARRHHHLVNLPPSQTGLVRRSRTDSLAATPPAAKCSSCRVRTASEGDGGAAAGAAAAGARPVSVAGSPLSPGPVRAPLSRSHTLSGGCGGRGSKVALLPAGGALQHSRSMSMPVAHSPPAATSPGSLSSSSGHGSGSYPPPPGPHPPLPHPLHHGPGQRPSSGSASASGSPSDPGFMSLDEYGSSPGDLRAFCSHRSNTPESIAETPPARDGGGGGEFYGYMTMDRPLSHCGRSYRRVSGDAAQDLDRGLRKRTYSLTTPARQRPVPQPSSASLDEYTLMRATFSGSAGRLCPSCPASSPKVAYHPYPEDYGDIEIGSHRSSSSNLGADDGYMPMTPGAALAGSGSGSCRSDDYMPMSPASVSAPKQILQPRAAAAAAAAVPSAGPAGPAPTSAAGRTFPASGGGYKASSPAESSPEDSGYMRMWCGSKLSMEHADGKLLPNGDYLNVSPSDAVTTGTPPDFFSAALHPGGEPLRGVPGCCYSSLPRSYKAPYTCGGDSDQYVLMSSPVGRILEEERLEPQATPGPSQAASAFGAGPTQPPHPVVPSPVRPSGGRPEGFLGQRGRAVRPTRLSLEGLPSLPSMHEYPLPPEPKSPGEYINIDFGEPGARLSPPAPPLLASAASSSSLLSASSPASSLGSGTPGTSSDSRQRSPLSDYMNLDFSSPKSPKPGAPSGHPVGSLDGLLSPEASSPYPPLPPRPSASPSSSLQPPPPPPAPGELYRLPPASAVATAQGPGAASSLSSDTGDNGDYTEMAFGVAATPPQPIAAPPKPEAARVASPTSGVKRLSLMEQVSGVEAFLQASQPPDPHRGAKVIRADPQGGRRRHSSETFSSTTTVTPVSPSFAHNPKRHNSASVENVSLRKSSEGGVGVGPGGGDEPPTSPRQLQPAPPLAPQGRPWTPGQPGGLVGCPGSGGSPMRRETSAGFQNGLNYIAIDVREEPGLPPQPQPPPPPLPQPGDKSSWGRTRSLGGLISAVGVGSTGGGCGGPGPGALPPANTYASIDFLSHHLKEATIVKE

SEQ ID NO: 40555 - protein, 1257 aa, Homo sapiens
  Payload ID: 8248
  Gene Symbol: IRS4
  Gene Name: insulin receptor substrate 4
  Uniprot ID: O14654
  ENSP ID: ENSP00000361202
MASCSFTRDQATRRLRGAAAAAAAALAAVVTTPLLSSGTPTALIGTGSSCPGAMWLSTATGSRSDSESEEEDLPVGEEVCKRGYLRKQKHGHRRYFVLKLETADAPARLEYYENARKFRHSVRAAAAAAAAAASGAAIPPLIPPRRVITLYQCFSVSQRADARYRHLIALFTQDEYFAMVAENESEQESWYLLLSRLILESKRRRCGTLGAQPDGEPAALAAAAAAEPPFYKDVWQVIVKPRGLGHRKELSGVFRLCLTDEEVVFVRLNTEVASVVVQLLSIRRCGHSEQYFFLEVGRSTVIGPGELWMQVDDCVVAQNMHELFLEKMRALCADEYRARCRSYSISIGAHLLTLLSARRHLGLVPLEPGGWLRRSRFEQFCHLRAIGDGEDEMLFTRRFVTPSEPVAHSRRGRLHLPRGRRSRRAVSVPASFFRRLAPSPARPRHPAEAPNNGARLSSEVSGSGSGNFGEEGNPQGKEDQEGSGGDYMPMNNWGSGNGRGSGGGQGSNGQGSSSHSSGGNQCSGEGQGSRGGQGSNGQGSGGNQCSRDGQGTAGGHGSGGGQRPGGGHGSGGGQGPGDGHGSGGGKNSGGGKGSGSGKGSDGDGERGKSLKKRSYFGKLTQSKQQQMPPPPPPPPPPPPAGGTGGKGKSGGRFRLYFCVDRGATKECKEAKEVKDAEIPEGAARGPHRARAFDEDEDDPYVPMRPGVATPLVSSSDYMPMAPQNVSASKKRHSRSPFEDSRGYMMMFPRVSPPPAPSPPKAPDTNKEDDSKDNDSESDYMFMAPGAGAIPKNPRNPQGGSSSKSWSSYFSLPNPFRSSPLGQNDNSEYVPMLPGKFLGRGLDKEVSYNWDPKDAASKPSGEGSFSKPGDGGSPSKPSDHEPPKNKAKRPNRLSFITKGYKIKPKPQKPTHEQREADSSSDYVNMDFTKRESNTPAPSTQGLPDSWGIIAEPRQSAFSNYVNVEFGVPFPNPANDLSDLLRAIPRANPLSLDSARWPLPPLPLSATGSNAIEEEGDYIEVIFNSAMTPAMALADSAIRYDAETGRIYVVDPFSECCMDISLSPSRCSEPPPVARLLQEEEQERRRPQSRSQSFFAAARAAVSAFPTDSLERDLSPSSAPAVASAAEPTLALSQVVAAASALAAAPGIGAAAAAAGFDSASARWFQPVANAADAEAVRGAQDVAGGSNPGAHNPSANLARGDNQAGGAAAAAAAPEPPPRSRRVPRPPEREDSDNDDDTHVRMDFARRDNQFDSPKRGR

SEQ ID NO: 40556 - protein, 1297 aa, Homo sapiens
  Payload ID: 8249
  Gene Symbol: INSRR
  Gene Name: insulin receptor-related receptor
  Uniprot ID: P14616
  ENSP ID: ENSP00000357178
MAVPSLWPWGACLPVIFLSLGFGLDTVEVCPSLDIRSEVAELRQLENCSVVEGHLQILLMFTATGEDFRGLSFPRLTQVTDYLLLFRVYGLESLRDLFPNLAVIRGTRLFLGYALVIFEMPHLRDVALPALGAVLRGAVRVEKNQELCHLSTIDWGLLQPAPGANHIVGNKLGEECADVCPGVLGAAGEPCAKTTFSGHTDYRCWTSSHCQRVCPCPHGMACTARGECCHTECLGGCSQPEDPRACVACRHLYFQGACLWACPPGTYQYESWRCVTAERCASLHSVPGRASTFGIHQGSCLAQCPSGFTRNSSSIFCHKCEGLCPKECKVGTKTIDSIQAAQDLVGCTHVEGSLILNLRQGYNLEPQLQHSLGLVETITGFLKIKHSFALVSLGFFKNLKLIRGDAMVDGNYTLYVLDNQNLQQLGSWVAAGLTIPVGKIYFAFNPRLCLEHIYRLEEVTGTRGRQNKAEINPRTNGDRAACQTRTLRFVSNVTEADRILLRWERYEPLEARDLLSFIVYYKESPFQNATEHVGPDACGTQSWNLLDVELPLSRTQEPGVTLASLKPWTQYAVFVRAITLTTEEDSPHQGAQSPIVYLRTLPAAPTVPQDVISTSNSSSHLLVRWKPPTQRNGNLTYYLVLWQRLAEDGDLYLNDYCHRGLRLPTSNNDPRFDGEDGDPEAEMESDCCPCQHPPPGQVLPPLEAQEASFQKKFENFLHNAITIPISPWKVTSINKSPQRDSGRHRRAAGPLRLGGNSSDFEIQEDKVPRERAVLSGLRHFTEYRIDIHACNHAAHTVGCSAATFVFARTMPHREADGIPGKVAWEASSKNSVLLRWLEPPDPNGLILKYEIKYRRLGEEATVLCVSRLRYAKFGGVHLALLPPGNYSARVRATSLAGNGSWTDSVAFYILGPEEEDAGGLHVLLTATPVGLTLLIVLAALGFFYGKKRNRTLYASVNPEYFSASDMYVPDEWEVPREQISIIRELGQGSFGMVYEGLARGLEAGEESTPVALKTVNELASPRECIEFLKEASVMKAFKCHHVVRLLGVVSQGQPTLVIMELMTRGDLKSHLRSLRPEAENNPGLPQPALGEMIQMAGEIADGMAYLAANKFVHRDLAARNCMVSQDFTVKIGDFGMTRDVYETDYYRKGGKGLLPVRWMAPESLKDGIFTTHSDVWSFGVVLWEIVTLAEQPYQGLSNEQVLKFVMDGGVLEELEGCPLQLQELMSRCWQPNPRLRPSFTHILDSIQEELRPSFRLLSFYYSPECRGARGSLPTTDAEPDSSPTPRDCSPQNGGPGH

SEQ ID NO: 40557 - protein, 1019 aa, Homo sapiens [sequence omitted]

SEQ ID NO: 40558 - protein, 464 aa, Homo sapiens
  Payload ID: 8250
  Gene Symbol: IDE
  Gene Name: insulin-degrading enzyme
  Uniprot ID: P14735
  ENSP ID: ENSP00000360637
MSKLWFKQDDKFFLPKACLNFEFFSPFAYVDPLHCNMAYLYLELLKDSLNEYAYAAELAGLSYDLQNTIYGMYLSVKGYNDKQPILLKKIIEKMATFEIDEKRFEIIKEAYMRSLNNFRAEQPHQHAMYYLRLLMTEVAWTKDELKEALDDVTLPRLKAFIPQLLSRLHIEALLHGNITKQAALGIMQMVEDTLIEHAHTKPLLPSQLVRYREVQLPDRGWFVYQQRNEVHNNCGIEIYYQTDMQSTSENMFLELFCQIISEPCFNTLRTKEQLGYIVFSGPRRANGIQGLRFIIQSEKPPHYLESRVEAFLITMEKSIEDMTEEAFQKHIQALAIRRLDKPKKLSAECAKYWGEIISQQYNFDRDNTEVAYLKTLTKEDIIKFYKEMLAVDAPRRHKVSVHVLAREMDSCPVVGEFPCQNDINLSQAPALPQPEVIQNMTEFKRGLPLFPLVKPHINFMAAKL

SEQ ID NO: 40559 - protein, 257 aa, Homo sapiens
  Payload ID: 8250
  Gene Symbol: IDE
  Gene Name: insulin-degrading enzyme
  ENSP ID: ENSP00000408850
EFIIRGGRVPSHCLHFSRSFQKKTYSKMNNPAIKRIGNHITKSPEDKREYRGLELANGIKVLLISDPTTDKSSAALDVHIGSLSDPPNIAGLSHFCEHMLFLGTKKYPKENEYSQFLSEHAGSSNAFTSGEHTNYYFDVSHEHLEGALDRFAQFFLCPLFDESCKDREVNAVDSEHEKNVMNDAWRLFQLEKATGNPKHPFSKFGTGNKYTLETRPNQEGIDVRQELLKFHSAYYSSNLMAVCVLGRESLDDLTNLV

SEQ ID NO: 40560 - protein, 61 aa, Homo sapiens
  Payload ID: 8250
  Gene Symbol: IDE
  Gene Name: insulin-degrading enzyme
  ENSP ID: ENSP00000473506
MRYRLAWLLHPALPSTFRSVLGARLPPPERLCGNYQVVFQSSGTILHFHQQCVKIPISLYP

SEQ ID NO: 40561 - protein, 131 aa, Homo sapiens
  Payload ID: 8251
  Gene Symbol: INSL3
  Gene Name: insulin-like 3 (Leydig cell)
  Uniprot ID: P51460
  ENSP ID: ENSP00000321724
MDPRLPAWALVLLGPALVFALGPAPTPEMREKLCGHHFVRALVRVCGGPRWSTEARRPATGGDRELLQWLERRHLLHGLVADSNLTLGPGLQPLPQTSHHHRHHRAAATNPARYCCLSGCTQQDLLTLCPY

SEQ ID NO: 40562 - protein, 157 aa, Homo sapiens
  Payload ID: 8251
  Gene Symbol: INSL3
  Gene Name: insulin-like 3 (Leydig cell)
  Uniprot ID: P51460
  ENSP ID: ENSP00000369017
MDPRLPAWALVLLGPALVFALGPAPTPEMREKLCGHHFVRALVRVCGGPRWSTEARRPATGGDQRESHSVSQAGLKLLSSSNPPTLTFQSVGISDVSCYSGWRDDICSMGWWPTVISRWDLACSPCPRPLTITATTVQLPPTLHATAASVAVPNKTC

SEQ ID NO: 40563 - protein, 71 aa, Homo sapiens
  Payload ID: 8251
  Gene Symbol: INSL3
  Gene Name: insulin-like 3 (Leydig cell)
  ENSP ID: ENSP00000469309
  MOD_RES (1)..(1): Any amino acid
XDPRLPAWALVLLGPALVFALGPAPTPEMREKLCGHHFVRALVRVCGGPRWSTEARRPATGGDPEFHSVPR

SEQ ID NO: 40564 - protein, 139 aa, Homo sapiens
  Payload ID: 8252
  Gene Symbol: INSL4
  Gene Name: insulin-like 4 (placenta)
  Uniprot ID: Q14641
  ENSP ID: ENSP00000239316
MASLFRSYLPAIWLLLSQLLRESLAAELRGCGPRFGKHLLSYCPMPEKTFTTTPGGWLLESGRPKEMVSTSNNKDGQALGTTSEFIPNLSPELKKPLSEGQPSLKKIILSRKKRSGRHRFDPFCCEVICDDGTSVKLCT

SEQ ID NO: 40565 - protein, 135 aa, Homo sapiens
  Payload ID: 8253
  Gene Symbol: INSL5
  Gene Name: insulin-like 5
  Uniprot ID: Q9Y5Q6
  ENSP ID: ENSP00000302724
MKGSIFTLFLFSVLFAISEVRSKESVRLCGLEYIRTVIYICASSRWRRHQEGIPQAQQAETGNSFQLPHKREFSEENPAQNLPKVDASGEDRLWGGQMPTEELWKSKKHSVMSRQDLQTLCCTDGCSMTDLSALC

SEQ ID NO: 40566 - protein, 213 aa, Homo sapiens
  Payload ID: 8254
  Gene Symbol: INSL6
  Gene Name: insulin-like 6
  Uniprot ID: Q9Y581
  ENSP ID: ENSP00000371054
MPRLLRLSLLWLGLLLVRFSRELSDISSARKLCGRYLVKEIEKLCGHANWSQFRFEEETPFSRLIAQASEKVEAYSPYQFESPQTASPARGRGTNPVSTSWEEAVNSWEMQSLPEYKDKKGYSPLGKTREFSSSHNINVYIHENAKFQKKRRNKIKTLSNLFWGHHPQRKRRGYSEKCCLTGCTKEELSIACLPYIDFKRLKEKRSSLVTKIY

SEQ ID NO: 40567 - protein, 195 aa, Homo sapiens
  Payload ID: 8255
  Gene Symbol: IGF1
  Gene Name: insulin-like growth factor 1 (somatomedin C)
  Uniprot ID: P05019
  ENSP ID: ENSP00000302665
MGKISSLPTQLFKCCFCDFLKVKMHTMSSSHLFYLALCLLTFTSSATAGPETLCGAELVDALQFVCGDRGFYFNKPTGYGSSSRRAPQTGIVDECCFRSCDLRRLEMYCAPLKPAKSARSVRAQRHTDMPKTQKYQPPSTNKNTKSQRRKGWPKTHPGGEQKEGTEASLQIRGKKKEQRREIGSRNAECRGKKGK

SEQ ID NO: 40568 - protein, 153 aa, Homo sapiens
  Payload ID: 8255
  Gene Symbol: IGF1
  Gene Name: insulin-like growth factor 1 (somatomedin C)
  Uniprot ID: P05019
  ENSP ID: ENSP00000337612
MGKISSLPTQLFKCCFCDFLKVKMHTMSSSHLFYLALCLLTFTSSATAGPETLCGAELVDALQFVCGDRGFYFNKPTGYGSSSRRAPQTGIVDECCFRSCDLRRLEMYCAPLKPAKSARSVRAQRHTDMPKTQKEVHLKNASRGSAGNKNYRM

SEQ ID NO: 40569 - protein, 158 aa, Homo sapiens
  Payload ID: 8255
  Gene Symbol: IGF1
  Gene Name: insulin-like growth factor 1 (somatomedin C)
  Uniprot ID: P05019
  ENSP ID: ENSP00000376637
MGKISSLPTQLFKCCFCDFLKVKMHTMSSSHLFYLALCLLTFTSSATAGPETLCGAELVDALQFVCGDRGFYFNKPTGYGSSSRRAPQTGIVDECCFRSCDLRRLEMYCAPLKPAKSARSVRAQRHTDMPKTQKYQPPSTNKNTKSQRRKGSTFEERK

SEQ ID NO: 40570 - protein, 139 aa, Homo sapiens
  Payload ID: 8255
  Gene Symbol: IGF1
  Gene Name: insulin-like growth factor 1 (somatomedin C)
  ENSP ID: ENSP00000376638
LKVKMHTMSSSHLFYLALCLLTFTSSATAGPETLCGAELVDALQFVCGDRGFYFNKPTGYGSSSRRAPQTGIVDECCFRSCDLRRLEMYCAPLKPAKSARSVRAQRHTDMPKTQKYQPPSTNKNTKSQRRKGSTFEERK

SEQ ID NO: 40571 - protein, 158 aa, Homo sapiens; identical to SEQ ID NO: 40569
  Payload ID: 8255
  Gene Symbol: IGF1
  Gene Name: insulin-like growth factor 1 (somatomedin C)
  Uniprot ID: P05019
  ENSP ID: ENSP00000394999

SEQ ID NO: 40572 - protein, 137 aa, Homo sapiens
  Payload ID: 8255
  Gene Symbol: IGF1
  Gene Name: insulin-like growth factor 1 (somatomedin C)
  Uniprot ID: P05019
  ENSP ID: ENSP00000416811
MITPTVKMHTMSSSHLFYLALCLLTFTSSATAGPETLCGAELVDALQFVCGDRGFYFNKPTGYGSSSRRAPQTGIVDECCFRSCDLRRLEMYCAPLKPAKSARSVRAQRHTDMPKTQKEVHLKNASRGSAGNKNYRM

SEQ ID NO: 40573 - protein, 1367 aa, Homo sapiens
  Payload ID: 8256
  Gene Symbol: IGF1R
  Gene Name: insulin-like growth factor 1 receptor
  Uniprot ID: P08069
  ENSP ID: ENSP00000268035
MKSGSGGGSPTSLWGLLFLSAALSLWPTSGEICGPGIDIRNDYQQLKRLENCTVIEGYLHILLISKAEDYRSYRFPKLTVITEYLLLFRVAGLESLGDLFPNLTVIRGWKLFYNYALVIFEMTNLKDIGLYNLRNITRGAIRIEKNADLCYLSTVDWSLILDAVSNNYIVGNKPPKECGDLCPGTMEEKPMCEKTTINNEYNYRCWTTNRCQKMCPSTCGKRACTENNECCHPECLGSCSAPDNDTACVACRHYYYAGVCVPACPPNTYRFEGWRCVDRDFCANILSAESSDSEGFVIHDGECMQECPSGFIRNGSQSMYCIPCEGPCPKVCEEEKKTKTIDSVTSAQMLQGCTIFKGNLLINIRRGNNIASELENFMGLIEVVTGYVKIRHSHALVSLSFLKNLRLILGEEQLEGNYSFYVLDNQNLQQLWDWDHRNLTIKAGKMYFAFNPKLCVSEIYRMEEVTGTKGRQSKGDINTRNNGERASCESDVLHFTSTTTSKNRIIITWHRYRPPDYRDLISFTVYYKEAPFKNVTEYDGQDACGSNSWNMVDVDLPPNKDVEPGILLHGLKPWTQYAVYVKAVTLTMVENDHIRGAKSEILYIRTNASVPSIPLDVLSASNSSSQLIVKWNPPSLPNGNLSYYIVRWQRQPQDGYLYRHNYCSKDKIPIRKYADGTIDIEEVTENPKTEVCGGEKGPCCACPKTEAEKQAEKEEAEYRKVFENFLHNSIFVPRPERKRRDVMQVANTTMSSRSRNTTAADTYNITDPEELETEYPFFESRVDNKERTVISNLRPFTLYRIDIHSCNHEAEKLGCSASNFVFARTMPAEGADDIPGPVTWEPRPENSIFLKWPEPENPNGLILMYEIKYGSQVEDQRECVSRQEYRKYGGAKLNRLNPGNYTARIQATSLSGNGSWTDPVFFYVQAKTGYENFIHLIIALPVAVLLIVGGLVIMLYVFHRKRNNSRLGNGVLYASVNPEYFSAADVYVPDEWEVAREKITMSRELGQGSFGMVYEGVAKGVVKDEPETRVAIKTVNEAASMRERIEFLNEASVMKEFNCHHVVRLLGVVSQGQPTLVIMELMTRGDLKSYLRSLRPEMENNPVLAPPSLSKMIQMAGEIADGMAYLNANKFVHRDLAARNCMVAEDFTVKIGDFGMTRDIYETDYYRKGGKGLLPVRWMSPESLKDGVFTTYSDVWSFGVVLWEIATLAEQPYQGLSNEQVLRFVMEGGLLDKPDNCPDMLFELMRMCWQYNPKMRPSFLEIISSIKEEMEPGFREVSFYYSEENKLPEPEELDLEPENMESVPLDPSASSSSLPLPDRHSGHKAENGPGPGVLVLRASFDERQPYAHMNGGRKNERALPLPQSSTC

SEQ ID NO: 40574 - protein, 1366 aa, Homo sapiens
  Payload ID: 8256
  Gene Symbol: IGF1R
  Gene Name: insulin-like growth factor 1 receptor
  ENSP ID: ENSP00000453007
MKSGSGGGSPTSLWGLLFLSAALSLWPTSGEICGPGIDIRNDYQQLKRLENCTVIEGYLHILLISKAEDYRSYRFPKLTVITEYLLLFRVAGLESLGDLFPNLTVIRGWKLFYNYALVIFEMTNLKDIGLYNLRNITRGAIRIEKNADLCYLSTVDWSLILDAVSNNYIVGNKPPKECGDLCPGTMEEKPMCEKTTINNEYNYRCWTTNRCQKMCPSTCGKRACTENNECCHPECLGSCSAPDNDTACVACRHYYYAGVCVPACPPNTYRFEGWRCVDRDFCANILSAESSDSEGFVIHDGECMQECPSGFIRNGSQSMYCIPCEGPCPKVCEEEKKTKTIDSVTSAQMLQGCTIFKGNLLINIRRGNNIASELENFMGLIEVVTGYVKIRHSHALVSLSFLKNLRLILGEEQLEGNYSFYVLDNQNLQQLWDWDHRNLTIKAGKMYFAFNPKLCVSEIYRMEEVTGTKGRQSKGDINTRNNGERASCESDVLHFTSTTTSKNRIIITWHRYRPPDYRDLISFTVYYKEAPFKNVTEYDGQDACGSNSWNMVDVDLPPNKDVEPGILLHGLKPWTQYAVYVKAVTLTMVENDHIRGAKSEILYIRTNASVPSIPLDVLSASNSSSQLIVKWNPPSLPNGNLSYYIVRWQRQPQDGYLYRHNYCSKDKIPIRKYADGTIDIEEVTENPKTEVCGGEKGPCCACPKTEAEKQAEKEEAEYRKVFENFLHNSIFVPRPERKRRDVMQVANTTMSSRSRNTTAADTYNITDPEELETEYPFFESRVDNKERTVISNLRPFTLYRIDIHSCNHEAEKLGCSASNFVFARTMPAEGADDIPGPVTWEPRPENSIFLKWPEPENPNGLILMYEIKYGSQVEDQRECVSRQEYRKYGGAKLNRLNPGNYTARIQATSLSGNGSWTDPVFFYVQAKRYENFIHLIIALPVAVLLIVGGLVIMLYVFHRKRNNSRLGNGVLYASVNPEYFSAADVYVPDEWEVAREKITMSRELGQGSFGMVYEGVAKGVVKDEPETRVAIKTVNEAASMRERIEFLNEASVMKEFNCHHVVRLLGVVSQGQPTLVIMELMTRGDLKSYLRSLRPEMENNPVLAPPSLSKMIQMAGEIADGMAYLNANKFVHRDLAARNCMVAEDFTVKIGDFGMTRDIYETDYYRKGGKGLLPVRWMSPESLKDGVFTTYSDVWSFGVVLWEIATLAEQPYQGLSNEQVLRFVMEGGLLDKPDNCPDMLFELMRMCWQYNPKMRPSFLEIISSIKEEMEPGFREVSFYYSEENKLPEPEELDLEPENMESVPLDPSASSSSLPLPDRHSGHKAENGPGPGVLVLRASFDERQPYAHMNGGRKNERALPLPQSSTC

SEQ ID NO: 40575 - protein, 103 aa, Homo sapiens
  Payload ID: 8256
  Gene Symbol: IGF1R
  Gene Name: insulin-like growth factor 1 receptor
  ENSP ID: ENSP00000453180
NYTARIQATSLSGNGSWTDPVFFYVQAKTGYENFIHLIIALPVAVLLIVGGLVIMLYVFHRKRNNSRLGNGVLYASVNPEYFSAADGAIAGCGVPRPANTGHH

SEQ ID NO: 40576 - protein, 190 aa, Homo sapiens
  Payload ID: 8256
  Gene Symbol: IGF1R
  Gene Name: insulin-like growth factor 1 receptor
  ENSP ID: ENSP00000453630
MTNLKDIGLYNLRNITRGAIRIEKNADLCYLSTVDWSLILDAVSNNYIVGNKPPKECGDLCPGTMEEKPMCEKTTINNEYNYRCWTTNRCQKMCPSTCGKRACTENNECCHPECLGSCSAPDNDTACVACRHYYYAGVCVPACPPNTYRFEGWRCVDRDFCANILSAESSDSEGFVIHDGECMQECPSGF

SEQ ID NO: 40577 - protein, 212 aa, Homo sapiens
  Payload ID: 8256
  Gene Symbol: IGF1R
  Gene Name: insulin-like growth factor 1 receptor
  ENSP ID: ENSP00000454115
MQECPSGFIRNGSQSMYCIPCEGPCPKVCEEEKKTKTIDSVTSAQMLQGCTIFKGNLLINIRRGNNIASELENFMGLIEVVTGYVKIRHSHALVSLSFLKNLRLILGEEQLEGNYSFYVLDNQNLQQLWDWDHRNLTIKAGKMYFAFNPKLCVSEIYRMEEVTGTKGRQSKGDINTRNNGERASCESDVLHFTSTTTSKNRIIITWHRYRPP

SEQ ID NO: 40578 - protein, 90 aa, Homo sapiens
  Payload ID: 8256
  Gene Symbol: IGF1R
  Gene Name: insulin-like growth factor 1 receptor
  ENSP ID: ENSP00000456950
  MOD_RES (1)..(1): Any amino acid
XTQYAVYVKAVTLTMVENDHIRGAKSEILYIRTNASVNREVEPSLSAQRQPELLHCALAAAASGRLPLPAQLLLQRQNPHQEVCRRHHRH

SEQ ID NO: 40579 - protein, 180 aa, Homo sapiens
  Payload ID: 8257
  Gene Symbol: IGF2
  Gene Name: insulin-like growth factor 2
  Uniprot ID: P01344
  ENSP ID: ENSP00000370796
MGIPMGKSMLVLLTFLAFASCCIAAYRPSETLCGGELVDTLQFVCGDRGFYFSRPASRVSRRSRGIVEECCFRSCDLALLETYCATPAKSERDVSTPPTVLPDNFPRYPVGKFFQYDTWKQSTQRLRRGLPALLRARRGHVLAKELEAFREAKRHRPLIALPTQDPAHGGAPPEMASNRK

SEQ ID NO: 40580 - protein, 183 aa, Homo sapiens
  Payload ID: 8257
  Gene Symbol: IGF2
  Gene Name: insulin-like growth factor 2
  Uniprot ID: P01344
  ENSP ID: ENSP00000370799
MGIPMGKSMLVLLTFLAFASCCIAAYRPSETLCGGELVDTLQFVCGDRGFYFRLPGRPASRVSRRSRGIVEECCFRSCDLALLETYCATPAKSERDVSTPPTVLPDNFPRYPVGKFFQYDTWKQSTQRLRRGLPALLRARRGHVLAKELEAFREAKRHRPLIALPTQDPAHGGAPPEMASNRK

SEQ ID NO: 40581 - protein, 180 aa, Homo sapiens; identical to SEQ ID NO: 40579
  Payload ID: 8257
  Gene Symbol: IGF2
  Gene Name: insulin-like growth factor 2
  Uniprot ID: P01344
  ENSP ID: ENSP00000370802

SEQ ID NO: 40582 - protein, 183 aa, Homo sapiens; identical to SEQ ID NO: 40580
  Payload ID: 8257
  Gene Symbol: IGF2
  Gene Name: insulin-like growth factor 2
  Uniprot ID: P01344
  ENSP ID: ENSP00000370813

SEQ ID NO: 40583 - protein, 236 aa, Homo sapiens
  Payload ID: 8257
  Gene Symbol: IGF2
  Gene Name: insulin-like growth factor 2
  Uniprot ID: P01344
  ENSP ID: ENSP00000391826
MVSPDPQIIVVAPETELASMQVQRTEDGVTIIQIFWVGRKGELLRRTPVSSAMQTPMGIPMGKSMLVLLTFLAFASCCIAAYRPSETLCGGELVDTLQFVCGDRGFYFSRPASRVSRRSRGIVEECCFRSCDLALLETYCATPAKSERDVSTPPTVLPDNFPRYPVGKFFQYDTWKQSTQRLRRGLPALLRARRGHVLAKELEAFREAKRHRPLIALPTQDPAHGGAPPEMASNRK

SEQ ID NO: 40584 - protein, 180 aa, Homo sapiens; identical to SEQ ID NO: 40579
  Payload ID: 8257
  Gene Symbol: IGF2
  Gene Name: insulin-like growth factor 2
  Uniprot ID: P01344
  ENSP ID: ENSP00000402047

SEQ ID NO: 40585 - protein, 180 aa, Homo sapiens; identical to SEQ ID NO: 40579
  Payload ID: 8257
  Gene Symbol: IGF2
  Gene Name: insulin-like growth factor 2
  Uniprot ID: P01344
  ENSP ID: ENSP00000414497

SEQ ID NO: 40586 - protein, 577 aa, Homo sapiens
  Payload ID: 8258
  Gene Symbol: IGF2BP1
  Gene Name: insulin-like growth factor 2 mRNA binding protein 1
  Uniprot ID: Q9NZI8
  ENSP ID: ENSP00000290341
MNKLYIGNLNESVTPADLEKVFAEHKISYSGQFLVKSGYAFVDCPDEHWAMKAIETFSGKVELQGKRLEIEHSVPKKQRSRKIQIRNIPPQLRWEVLDSLLAQYGTVENCEQVNTESETAVVNVTYSNREQTRQAIMKLNGHQLENHALKVSYIPDEQIAQGPENGRRGGFGSRGQPRQGSPVAAGAPAKQQQVDIPLRLLVPTQYVGAIIGKEGATIRNITKQTQSKIDVHRKENAGAAEKAISVHSTPEGCSSACKMILEIMHKEAKDTKTADEVPLKILAHNNFVGRLIGKEGRNLKKVEQDTETKITISSLQDLTLYNPERTITVKGAIENCCRAEQEIMKKVREAYENDVAAMSLQSHLIPGLNLAAVGLFPASSSAVPPPPSSVTGAAPYSSFMQAPEQEMVQVFIPAQAVGAIIGKKGQHIKQLSRFASASIKIAPPETPDSKVRMVIITGPPEAQFKAQGRIYGKLKEENFFGPKEEVKLETHIRVPASAAGRVIGKGGKTVNELQNLTAAEVVVPRDQTPDENDQVIVKIIGHFYASQMAQRKIRDILAQVKQQHQKGQSNQAQARRK

SEQ ID NO: 40587 - protein, 438 aa, Homo sapiens
  Payload ID: 8258
  Gene Symbol: IGF2BP1
  Gene Name: insulin-like growth factor 2 mRNA binding protein 1
  Uniprot ID: Q9NZI8
  ENSP ID: ENSP00000389135
MNKLYIGNLNESVTPADLEKVFAEHKISYSGQFLVKSGYAFVDCPDEHWAMKAIETFSGKVELQGKRLEIEHSVPKKQRSRKIQIRNIPPQLRWEVLDSLLAQYGTVENCEQVNTESETAVVNVTYSNREQTRQADEVPLKILAHNNFVGRLIGKEGRNLKKVEQDTETKITISSLQDLTLYNPERTITVKGAIENCCRAEQEIMKKVREAYENDVAAMSLQSHLIPGLNLAAVGLFPASSSAVPPPPSSVTGAAPYSSFMQAPEQEMVQVFIPAQAVGAIIGKKGQHIKQLSRFASASIKIAPPETPDSKVRMVIITGPPEAQFKAQGRIYGKLKEENFFGPKEEVKLETHIRVPASAAGRVIGKGGKTVNELQNLTAAEVVVPRDQTPDENDQVIVKIIGHFYASQMAQRKIRDILAQVKQQHQKGQSNQAQARRK

SEQ ID NO: 40588 - protein, 556 aa, Homo sapiens
  Payload ID: 8259
  Gene Symbol: IGF2BP2
  Gene Name: insulin-like growth factor 2 mRNA binding protein 2
  Uniprot ID: Q9Y6M1
  ENSP ID: ENSP00000320204
MMNKLYIGNLSPAVTADDLRQLFGDRKLPLAGQVLLKSGYAFVDYPDQNWAIRAIETLSGKVELHGKIMEVDYSVSKKLRSRKIQIRNIPPHLQWEVLDGLLAQYGTVENVEQVNTDTETAVVNVTYATREEAKIAMEKLSGHQFENYSFKISYIPDEEVSSPSPPQRAQRGDHSSREQGHAPGGTSQARQIDFPLRILVPTQFVGAIIGKEGLTIKNITKQTQSRVDIHRKENSGAAEKPVTIHATPEGTSEACRMILEIMQKEADETKLAEEIPLKILAHNGLVGRLIGKEGRNLKKIEHETGTKITISSLQDLSIYNPERTITVKGTVEACASAEIEIMKKLREAFENDMLAVNTHSGYFSSLYPHHQFGPFPHHHSYPEQEIVNLFIPTQAVGAIIGKKGAHIKQLARFAGASIKIAPAEGPDVSERMVIITGPPEAQFKAQGRIFGKLKEENFFNPKEEVKLEAHIRVPSSTAGRVIGKGGKTVNELQNLTSAEVIVPRDQTPDENEEVIVRIIGHFFASQTAQRKIREIVQQVKQQEQKYPQGVASQRSK

SEQ ID NO: 40589 - protein, 599 aa, Homo sapiens
  Payload ID: 8259
  Gene Symbol: IGF2BP2
  Gene Name: insulin-like growth factor 2 mRNA binding protein 2
  Uniprot ID: Q9Y6M1
  ENSP ID: ENSP00000371634
MMNKLYIGNLSPAVTADDLRQLFGDRKLPLAGQVLLKSGYAFVDYPDQNWAIRAIETLSGKVELHGKIMEVDYSVSKKLRSRKIQIRNIPPHLQWEVLDGLLAQYGTVENVEQVNTDTETAVVNVTYATREEAKIAMEKLSGHQFENYSFKISYIPDEEVSSPSPPQRAQRGDHSSREQGHAPGGTSQARQIDFPLRILVPTQFVGAIIGKEGLTIKNITKQTQSRVDIHRKENSGAAEKPVTIHATPEGTSEACRMILEIMQKEADETKLAEEIPLKILAHNGLVGRLIGKEGRNLKKIEHETGTKITISSLQDLSIYNPERTITVKGTVEACASAEIEIMKKLREAFENDMLAVNQQANLIPGLNLSALGIFSTGLSVLSPPAGPRGAPPAAPYHPFTTHSGYFSSLYPHHQFGPFPHHHSYPEQEIVNLFIPTQAVGAIIGKKGAHIKQLARFAGASIKIAPAEGPDVSERMVIITGPPEAQFKAQGRIFGKLKEENFFNPKEEVKLEAHIRVPSSTAGRVIGKGGKTVNELQNLTSAEVIVPRDQTPDENEEVIVRIIGHFFASQTAQRKIREIVQQVKQQEQKYPQGVASQRSK

SEQ ID NO: 40590 - protein, 605 aa, Homo sapiens
  Payload ID: 8259
  Gene Symbol: IGF2BP2
  Gene Name: insulin-like growth factor 2 mRNA binding protein 2
  ENSP ID: ENSP00000410242
MMNKLYIGNLSPAVTADDLRQLFGDRKLPLAGQVLLKSGYAFVDYPDQNWAIRAIETLSGKVELHGKIMEVDYSVSKKLRSRKIQIRNIPPHLQWEVLDGLLAQYGTVENVEQVFAFSLVNTDTETAVVNVTYATREEAKIAMEKLSGHQFENYSFKISYIPDEEVSSPSPPQRAQRGDHSSREQGHAPGGTSQARQIDFPLRILVPTQFVGAIIGKEGLTIKNITKQTQSRVDIHRKENSGAAEKPVTIHATPEGTSEACRMILEIMQKEADETKLAEEIPLKILAHNGLVGRLIGKEGRNLKKIEHETGTKITISSLQDLSIYNPERTITVKGTVEACASAEIEIMKKLREAFENDMLAVNQQANLIPGLNLSALGIFSTGLSVLSPPAGPRGAPPAAPYHPFTTHSGYFSSLYPHHQFGPFPHHHSYPEQEIVNLFIPTQAVGAIIGKKGAHIKQLARFAGASIKIAPAEGPDVSERMVIITGPPEAQFKAQGRIFGKLKEENFFNPKEEVKLEAHIRVPSSTAGRVIGKGGKTVNELQNLTSAEVIVPRDQTPDENEEVIVRIIGHFFASQTAQRKIREIVQQVKQQEQKYPQGVASQRSK

SEQ ID NO: 40591 - protein, 536 aa, Homo sapiens
  Payload ID: 8259
  Gene Symbol: IGF2BP2
  Gene Name: insulin-like growth factor 2 mRNA binding protein 2
  Uniprot ID: Q9Y6M1
  ENSP ID: ENSP00000413787
MFSCPGHYHVDGFLNPGSRKIQIRNIPPHLQWEVLDGLLAQYGTVENVEQVNTDTETAVVNVTYATREEAKIAMEKLSGHQFENYSFKISYIPDEEVSSPSPPQRAQRGDHSSREQGHAPGGTSQARQIDFPLRILVPTQFVGAIIGKEGLTIKNITKQTQSRVDIHRKENSGAAEKPVTIHATPEGTSEACRMILEIMQKEADETKLAEEIPLKILAHNGLVGRLIGKEGRNLKKIEHETGTKITISSLQDLSIYNPERTITVKGTVEACASAEIEIMKKLREAFENDMLAVNQQANLIPGLNLSALGIFSTGLSVLSPPAGPRGAPPAAPYHPFTTHSGYFSSLYPHHQFGPFPHHHSYPEQEIVNLFIPTQAVGAIIGKKGAHIKQLARFAGASIKIAPAEGPDVSERMVIITGPPEAQFKAQGRIFGKLKEENFFNPKEEVKLEAHIRVPSSTAGRVIGKGGKTVNELQNLTSAEVIVPRDQTPDENEEVIVRIIGHFFASQTAQRKIREIVQQVKQQEQKYPQGVASQRSK

SEQ ID NO: 40592 - protein, 579 aa, Homo sapiens
  Payload ID: 8260
  Gene Symbol: IGF2BP3
  Gene Name: insulin-like growth factor 2 mRNA binding protein 3
  Uniprot ID: O00425
  ENSP ID: ENSP00000258729
MNKLYIGNLSENAAPSDLESIFKDAKIPVSGPFLVKTGYAFVDCPDESWALKAIEALSGKIELHGKPIEVEHSVPKRQRIRKLQIRNIPPHLQWEVLDSLLVQYGVVESCEQVNTDSETAVVNVTYSSKDQARQALDKLNGFQLENFTLKVAYIPDEMAAQQNPLQQPRGRRGLGQRGSSRQGSPGSVSKQKPCDLPLRLLVPTQFVGAIIGKEGATIRNITKQTQSKIDVHRKENAGAAEKSITILSTPEGTSAACKSILEIMHKEAQDIKFTEEIPLKILAHNNFVGRLIGKEGRNLKKIEQDTDTKITISPLQELTLYNPERTITVKGNVETCAKAEEEIMKKIRESYENDIASMNLQAHLIPGLNLNALGLFPPTSGMPPPTSGPPSAMTPPYPQFEQSETETVHLFIPALSVGAIIGKQGQHIKQLSRFAGASIKIAPAEAPDAKVRMVIITGPPEAQFKAQGRIYGKIKEENFVSPKEEVKLEAHIRVPSFAAGRVIGKGGKTVNELQNLSSAEVVVPRDQTPDENDQVVVKITGHFYACQVAQRKIQEILTQVKQHQQQKALQSGPPQSRRK

SEQ ID NO: 40593 - protein, 81 aa, Homo sapiens
  Payload ID: 8260
  Gene Symbol: IGF2BP3
  Gene Name: insulin-like growth factor 2 mRNA binding protein 3
  ENSP ID: ENSP00000395936
MNKLYIGNLSENAAPSDLESIFKDAKIPVSGPFLVKTGYAFVDCPDESWALKAIEALSGKIELHGKPIEVEHSVPKRQSEH

SEQ ID NO: 40594 - protein, 198 aa, Homo sapiens
  Payload ID: 8260
  Gene Symbol: IGF2BP3
  Gene Name: insulin-like growth factor 2 mRNA binding protein 3
  Uniprot ID: O00425
  ENSP ID: ENSP00000480267
MPPPTSGPPSAMTPPYPQFEQSETETVHLFIPALSVGAIIGKQGQHIKQLSRFAGASIKIAPAEAPDAKVRMVIITGPPEAQFKAQGRIYGKIKEENFVSPKEEVKLEAHIRVPSFAAGRVIGKGGKTVNELQNLSSAEVVVPRDQTPDENDQVVVKITGHFYACQVAQRKIQEILTQVKQHQQQKALQSGPPQSRRK

SEQ ID NO: 40595 - protein, 2491 aa, Homo sapiens
  Payload ID: 8261
  Gene Symbol: IGF2R
  Gene Name: insulin-like growth factor 2 receptor
  Uniprot ID: P11717
  ENSP ID: ENSP00000349437
MGAAAGRSPHLGPAPARRPQRSLLLLQLLLLVAAPGSTQAQAAPFPELCSYTWEAVDTKNNVLYKINICGSVDIVQCGPSSAVCMHDLKTRTYHSVGDSVLRSATRSLLEFNTTVSCDQQGTNHRVQSSIAFLCGKTLGTPEFVTATECVHYFEWRTTAACKKDIFKANKEVPCYVFDEELRKHDLNPLIKLSGAYLVDDSDPDTSLFINVCRDIDTLRDPGSQLRACPPGTAACLVRGHQAFDVGQPRDGLKLVRKDRLVLSYVREEAGKLDFCDGHSPAVTITFVCPSERREGTIPKLTAKSNCRYEIEWITEYACHRDYLESKTCSLSGEQQDVSIDLTPLAQSGGSSYISDGKEYLFYLNVCGETEIQFCNKKQAAVCQVKKSDTSQVKAAGRYHNQTLRYSDGDLTLIYFGGDECSSGFQRMSVINFECNKTAGNDGKGTPVFTGEVDCTYFFTWDTEYACVKEKEDLLCGATDGKKRYDLSALVRHAEPEQNWEAVDGSQTETEKKHFFINICHRVLQEGKARGCPEDAAVCAVDKNGSKNLGKFISSPMKEKGNIQLSYSDGDDCGHGKKIKTNITLVCKPGDLESAPVLRTSGEGGCFYEFEWHTAAACVLSKTEGENCTVFDSQAGFSFDLSPLTKKNGAYKVETKKYDFYINVCGPVSVSPCQPDSGACQVAKSDEKTWNLGLSNAKLSYYDGMIQLNYRGGTPYNNERHTPRATLITFLCDRDAGVGFPEYQEEDNSTYNFRWYTSYACPEEPLECVVTDPSTLEQYDLSSLAKSEGGLGGNWYAMDNSGEHVTWRKYYINVCRPLNPVPGCNRYASACQMKYEKDQGSFTEVVSISNLGMAKTGPVVEDSGSLLLEYVNGSACTTSDGRQTTYTTRIHLVCSRGRLNSHPIFSLNWECVVSFLWNTEAACPIQTTTDTDQACSIRDPNSGFVFNLNPLNSSQGYNVSGIGKIFMFNVCGTMPVCGTILGKPASGCEAETQTEELKNWKPARPVGIEKSLQLSTEGFITLTYKGPLSAKGTADAFIVRFVCNDDVYSGPLKFLHQDIDSGQGIRNTYFEFETALACVPSPVDCQVTDLAGNEYDLTGLSTVRKPWTAVDTSVDGRKRTFYLSVCNPLPYIPGCQGSAVGSCLVSEGNSWNLGVVQMSPQAAANGSLSIMYVNGDKCGNQRFSTRITFECAQISGSPAFQLQDGCEYVFIWRTVEACPVVRVEGDNCEVKDPRHGNLYDLKPLGLNDTIVSAGEYTYYFRVCGKLSSDVCPTSDKSKVVSSCQEKREPQGFHKVAGLLTQKLTYENGLLKMNFTGGDTCHKVYQRSTAIFFYCDRGTQRPVFLKETSDCSYLFEWRTQYACPPFDLTECSFKDGAGNSFDLSSLSRYSDNWEAITGTGDPEHYLINVCKSLAPQAGTEPCPPEAAACLLGGSKPVNLGRVRDGPQWRDGIIVLKYVDGDLCPDGIRKKSTTIRFTCSESQVNSRPMFISAVEDCEYTFAWPTATACPMKSNEHDDCQVTNPSTGHLFDLSSLSGRAGFTAAYSEKGLVYMSICGENENCPPGVGACFGQTRISVGKANKRLRYVDQVLQLVYKDGSPCPSKSGLSYKSVISFVCRPEARPTNRPMLISLDKQTCTLFFSWHTPLACEQATECSVRNGSSIVDLSPLIHRTGGYEAYDESEDDASDTNPDFYINICQPLNPMHGVPCPAGAAVCKVPIDGPPIDIGRVAGPPILNPIANEIYLNFESSTPCLADKHFNYTSLIAFHCKRGVSMGTPKLLRTSECDFVFEWETPVVCPDEVRMDGCTLTDEQLLYSFNLSSLSTSTFKVTRDSRTYSVGVCTFAVGPEQGGCKDGGVCLLSGTKGASFGRLQSMKLDYRHQDEAVVLSYVNGDRCPPETDDGVPCVFPFIFNGKSYEECIIESRAKLWCSTTADYDRDHEWGFCRHSNSYRTSSIIFKCDEDEDIGRPQVFSEVRGCDVTFEWKTKVVCPPKKLECKFVQKHKTYDLRLLSSLTGSWSLVHNGVSYYINLCQKIYKGPLGCSERASICRRTTTGDVQVLGLVHTQKLGVIGDKVVVTYSKGYPCGGNKTASSVIELTCTKTVGRPAFKRFDIDSCTYYFSWDSRAACAVKPQEVQMVNGTITNPINGKSFSLGDIYFKLFRASGDMRTNGDNYLYEIQLSSITSSRNPACSGANICQVKPNDQHFSRKVGTSDKTKYYLQDGDLDVVFASSSKCGKDKTKSVSSTIFFHCDPLVEDGIPEFSHETADCQYLFSWYTSAVCPLGVGFDSENPGDDGQMHKGLSERSQAVGAVLSLLLVALTCCLLALLLYKKERRETVISKLTTCCRRSSNVSYKYSKVNKEEETDENETEWLMEEIQLPPPRQGKEGQENGHITTKSVKALSSLHGDDQDSEDEVLTIPEVKVHSGRGAGAESSHPVRNAQSNALQEREDDRVGLVRGEKARKGKSSSAQQKTVSSTKLVSFHDDSDEDLLHI

SEQ ID NO: 40596 - protein, 185 aa, Homo sapiens
  Payload ID: 8261
  Gene Symbol: IGF2R
  Gene Name: insulin-like growth factor 2 receptor
  ENSP ID: ENSP00000473880
  MOD_RES (1)..(1): Any amino acid
XCRRTTTGDVQVLGLVHTQKLGVIGDKVVVTYSKGYPCGGNKTASSVIELTCTKTVGRPAFKRFDIDSCTYYFSWDSRAACAVKPQEVQMVNGTITNPINGKSFSLGDIYFKLFRASGDMRTNGDNYLYEIQLSSITSSRNPACSGANICQVKPNDQHFSRKVGTSDKTKYYLQGNPWLPTKFHI

SEQ ID NO: 40597 - protein, 259 aa, Homo sapiens
  Payload ID: 8262
  Gene Symbol: IGFBP1
  Gene Name: insulin-like growth factor binding protein 1
  Uniprot ID: P08833
  ENSP ID: ENSP00000275525
MSEVPVARVWLVLLLLTVQVGVTAGAPWQCAPCSAEKLALCPPVSASCSEVTRSAGCGCCPMCALPLGAACGVATARCARGLSCRALPGEQQPLHALTRGQGACVQESDASAPHAAEAGSPESPESTEITEEELLDNFHLMAPSEEDHSILWDAISTYDGSKALHVTNIKKWKEPCRIELYRVVESLAKAQETSGEEISKFYLPNCNKNGFYHSRQCETSMDGEAGLCWCVYPWNGKRIPGSPEIRGDPNCQIYFNVQN

SEQ ID NO: 40598 - protein, 257 aa, Homo sapiens
  Payload ID: 8262
  Gene Symbol: IGFBP1
  Gene Name: insulin-like growth factor binding protein 1
  ENSP ID: ENSP00000413511
MSEVPVARVWLVLLLLTVQVGVTAGAPWQCAPCSAEKLALCPPVSASCSEVTRSAGCGCCPMCALPLGAACGVATARCARGLSCRALPGEQQPLHALTRGQGACVQESDASAPHAAEAGSPESPESTEITEEELLDNFHLMAPSEEDHSILWDAISTYDGSKALHVTNIKKWKEPCRIELYRVVESLAKAQETSGEEISKFYLPNCNKNGFYHSRQTSMDGEAGLCWCVYPWNGKRIPGSPEIRGDPNCQIYFNVQN

SEQ ID NO: 40599 - protein, 216 aa, Homo sapiens
  Payload ID: 8262
  Gene Symbol: IGFBP1
  Gene Name: insulin-like growth factor binding protein 1
  ENSP ID: ENSP00000417069
MSEVPVARVWLVLLLLTVQVGVTAGAPWQCAPCSAEKLALCPPVSASCSEVTRSAGCGCCPMCALPLGAACGVATARCARGLSCRALPGEQQPLHALTRGQGACVQESDASAPHAAEAGSPESPESTEITEEELLDNFHLMAPSEEDHSILWDAISTYDGSKALHVTNIKKWKCETSMDGEAGLCWCVYPWNGKRIPGSPEIRGDPNCQIYFNVQN

SEQ ID NO: 40600 - protein, 325 aa, Homo sapiens
  Payload ID: 8263
  Gene Symbol: IGFBP2
  Gene Name: insulin-like growth factor binding protein 2, 36kDa
  Uniprot ID: P18065
  ENSP ID: ENSP00000233809
MLPRVGCPALPLPPPPLLPLLLLLLGASGGGGGARAEVLFRCPPCTPERLAACGPPPVAPPAAVAAVAGGARMPCAELVREPGCGCCSVCARLEGEACGVYTPRCGQGLRCYPHPGSELPLQALVMGEGTCEKRRDAEYGASPEQVADNGDDHSEGGLVENHVDSTMNMLGGGGSAGRKPLKSGMKELAVFREKVTEQHRQMGKGGKHHLGLEEPKKLRPPPARTPCQQELDQVLERISTMRLPDERGPLEHLYSLHIPNCDKHGLYNLKQCKMSLNGQRGECWCVNPNTGKLIQGAPTIRGDPECHLFYNEQQEARGVHTQRMQ

SEQ ID NO: 40601 - protein, 181 aa, Homo sapiens
  Payload ID: 8263
  Gene Symbol: IGFBP2
  Gene Name: insulin-like growth factor binding protein 2, 36kDa
  ENSP ID: ENSP00000389646
MPCNNGDDHSEGGLVENHVDSTMNMLGGGGSAGRKPLKSGMKELAVFREKVTEQHRQMGKGGKHHLGLEEPKKLRPPPARTPCQQELDQVLERISTMRLPDERGPLEHLYSLHIPNCDKHGLYNLKQCKMSLNGQRGECWCVNPNTGKLIQGAPTIRGDPECHLFYNEQQEARGVHTQRMQ

SEQ ID NO: 40602 - protein, 98 aa, Homo sapiens
  Payload ID: 8263
  Gene Symbol: IGFBP2
  Gene Name: insulin-like growth factor binding protein 2, 36kDa
  ENSP ID: ENSP00000400308
KHHLGLEEPKKLRPPPARQLLAELASGACFVGLLSSLRASPAVCACRLPANRNWTRSWSGSPPCAFRMSGALWSTSTPCTSPTVTSMACTTSNSARCL

SEQ ID NO: 40603 - protein, 78 aa, Homo sapiens
  Payload ID: 8263
  Gene Symbol: IGFBP2
  Gene Name: insulin-like growth factor binding protein 2, 36kDa
  ENSP ID: ENSP00000401698
MNMLGGGGSAGRKPLKSGMKELAVFREKVTEQHRQMGKGGKHHLGLEEPKKLRPPPARTPCQQELDQVLERISTMRLP

SEQ ID NO: 40604 - protein, 291 aa, Homo sapiens
  Payload ID: 8264
  Gene Symbol: IGFBP3
  Gene Name: insulin-like growth factor binding protein 3
  Uniprot ID: P17936
  ENSP ID: ENSP00000275521
MQRARPTLWAAALTLLVLLRGPPVARAGASSAGLGPVVRCEPCDARALAQCAPPPAVCAELVREPGCGCCLTCALSEGQPCGIYTERCGSGLRCQPSPDEARPLQALLDGRGLCVNASAVSRLRAYLLPAPPAPGNASESEEDRSAGSVESPSVSSTHRVSDPKFHPLHSKIIIIKKGHAKDSQRYKVDYESQSTDTQNFSSESKRETEYGPCRREMEDTLNHLKFLNVLSPRGVHIPNCDKKGFYKKKQCRPSKGRKRGFCWCVDKYGQPLPGYTTKGKEDVHCYSMQSK

SEQ ID NO: 40605 - protein, 297 aa, Homo sapiens
  Payload ID: 8264
  Gene Symbol: IGFBP3
  Gene Name: insulin-like growth factor binding protein 3
  Uniprot ID: P17936
  ENSP ID: ENSP00000370473
MQRARPTLWAAALTLLVLLRGPPVARAGASSAGLGPVVRCEPCDARALAQCAPPPAVCAELVREPGCGCCLTCALSEGQPCGIYTERCGSGLRCQPSPDEARPLQALLDGRGLCVNASAVSRLRAYLLPAPPAPGEPPAPGNASESEEDRSAGSVESPSVSSTHRVSDPKFHPLHSKIIIIKKGHAKDSQRYKVDYESQSTDTQNFSSESKRETEYGPCRREMEDTLNHLKFLNVLSPRGVHIPNCDKKGFYKKKQCRPSKGRKRGFCWCVDKYGQPLPGYTTKGKEDVHCYSMQSK

SEQ ID NO: 40606 - protein, 194 aa, Homo sapiens
  Payload ID: 8264
  Gene Symbol: IGFBP3
  Gene Name: insulin-like growth factor binding protein 3
  ENSP ID: ENSP00000370476
MQRARPLQALLDGRGLCVNASAVSRLRAYLLPAPPAPGNASESEEDRSAGSVESPSVSSTHRVSDPKFHPLHSKIIIIKKGHAKDSQRYKVDYESQSTDTQNFSSESKRETEYGPCRREMEDTLNHLKFLNVLSPRGVHIPNCDKKGFYKKKQCRPSKGRKRGFCWCVDKYGQPLPGYTTKGKEDVHCYSMQSK

SEQ ID NO: 40607 - protein, 132 aa, Homo sapiens
  Payload ID: 8264
  Gene Symbol: IGFBP3
  Gene Name: insulin-like growth factor binding protein 3
  ENSP ID: ENSP00000389668
MRSAVCQFPRHRLAAGRPHPESGRGNASESEEDRSAGSVESPSVSSTHRVSDPKFHPLHSKIIIIKKGHAKDSQRYKVDYESQSTDTQNFSSESKRETEYGPCRREMEDTLNHLKFLNVLSPRGVHIPNCDK

SEQ ID NO: 40608 - protein, 143 aa, Homo sapiens
  Payload ID: 8264
  Gene Symbol: IGFBP3
  Gene Name: insulin-like growth factor binding protein 3
  ENSP ID: ENSP00000390298
  MOD_RES (1)..(1): Any amino acid
XESPSVSSTHRVSDPKFHPLHSKIIIIKKGHAKDSQRYKVDYESQSTDTQNFSSESKRETEYGPCRREMEDTLNHLKFLNVLSPRGVHIPNCDKKGFYKKKQCRPSKGRKRGFCWCVDKYGQPLPGYTTKGKEDVHCYSMQSK

SEQ ID NO: 40609 - protein, 153 aa, Homo sapiens
  Payload ID: 8264
  Gene Symbol: IGFBP3
  Gene Name: insulin-like growth factor binding protein 3
  ENSP ID: ENSP00000399116
  MOD_RES (1)..(1): Any amino acid
XSEEDRSAGSVESPSVSSTHRVSDPKFHPLHSKIIIIKKGHAKDSQRYKVDYESQSTDTQNFSSESKRETEYGPCRREMEDTLNHLKFLNVLSPRGVHIPNCDKKGFYKKKQCRPSKGRKRGFCWCVDKYGQPLPGYTTKGKEDVHCYSMQSK

SEQ ID NO: 40610 - protein, 270 aa, Homo sapiens
  Payload ID: 8264
  Gene Symbol: IGFBP3
  Gene Name: insulin-like growth factor binding protein 3
  ENSP ID: ENSP00000477772
MQRARPTLWAAALTLLVRCEPCDARALAQCAPPPAVCAELVREPGCGCCLTCALSEGQPCGIYTERCGSGLRCQPSPDEARPLQALLDGRGLCVNASAVSRLRAYLLPAPPAPGNASESEEDRSAGSVESPSVSSTHRVSDPKFHPLHSKIIIIKKGHAKDSQRYKVDYESQSTDTQNFSSESKRETEYGPCRREMEDTLNHLKFLNVLSPRGVHIPNCDKKGFYKKKQCRPSKGRKRGFCWCVDKYGQPLPGYTTKGKEDVHCYSMQSK

SEQ ID NO: 40611 - protein, 263 aa, Homo sapiens
  Payload ID: 8264
  Gene Symbol: IGFBP3
  Gene Name: insulin-like growth factor binding protein 3
  ENSP ID: ENSP00000480717
MQRARPTLWAACEPCDARALAQCAPPPAVCAELVREPGCGCCLTCALSEGQPCGIYTERCGSGLRCQPSPDEARPLQALLDGRGLCVNASAVSRLRAYLLPAPPAPGNASESEEDRSAGSVESPSVSSTHRVSDPKFHPLHSKIIIIKKGHAKDSQRYKVDYESQSTDTQNFSSESKRETEYGPCRREMEDTLNHLKFLNVLSPRGVHIPNCDKKGFYKKKQCRPSKGRKRGFCWCVDKYGQPLPGYTTKGKEDVHCYSMQSK

SEQ ID NO: 40612 - protein, 258 aa, Homo sapiens
  Payload ID: 8265
  Gene Symbol: IGFBP4
  Gene Name: insulin-like growth factor binding protein 4
  Uniprot ID: P22692
  ENSP ID: ENSP00000269593
MLPLCLVAALLLAAGPGPSLGDEAIHCPPCSEEKLARCRPPVGCEELVREPGCGCCATCALGLGMPCGVYTPRCGSGLRCYPPRGVEKPLHTLMHGQGVCMELAEIEAIQESLQPSDKDEGDHPNNSFSPCSAHDRRCLQKHFAKIRDRSTSGGKMKVNGAPREDARPVPQGSCQSELHRALERLAASQSRTHEDLYIIPIPNCDRNGNFHPKQCHPALDGQRGKCWCVDRKTGVKLPGGLEPKGELDCHQLADSFRE

SEQ ID NO: 40613 - protein, 272 aa, Homo sapiens
  Payload ID: 8266
  Gene Symbol: IGFBP5
  Gene Name: insulin-like growth factor binding protein 5
  Uniprot ID: P24593
  ENSP ID: ENSP00000233813
MVLLTAVLLLLAAYAGPAQSLGSFVHCEPCDEKALSMCPPSPLGCELVKEPGCGCCMTCALAEGQSCGVYTERCAQGLRCLPRQDEEKPLHALLHGRGVCLNEKSYREQVKIERDSREHEEPTTSEMAEETYSPKIFRPKHTRISELKAEAVKKDRRKKLTQSKFVGGAENTAHPRIISAPEMRQESEQGPCRRHMEASLQELKASPRMVPRAVYLPNCDRKGFYKRKQCKPSRGRKRGICWCVDKYGMKLPGMEYVDGDFQCHTFDSSNVE

SEQ ID NO: 40614 - protein, 233 aa, Homo sapiens
  Payload ID: 8266
  Gene Symbol: IGFBP5
  Gene Name: insulin-like growth factor binding protein 5
  ENSP ID: ENSP00000413474
MVLLTAVLLLLAAYAGPAQSLGSFVHCEPCDEKALSMCPPSPLGCELVKEPGCGCCMTCALAEGQSCGVYTERCAQGLRCLPRQDEEKPLHALLHGRGVCLNEKSYREQVKIGCAPGGQRHICFSLYYSPHPKLPSPGLWPCAPWPTGADPPAPSPAERDSREHEEPTTSEMAEETYSPKIFRPKHTRISELKAEAVKKDRRKKLTQSKFVGGAENTAHPRIISAPEMRQESE

SEQ ID NO: 40615 - protein, 240 aa, Homo sapiens
  Payload ID: 8267
  Gene Symbol: IGFBP6
  Gene Name: insulin-like growth factor binding protein 6
  Uniprot ID: P24592
  ENSP ID: ENSP00000301464
MTPHRLLPPLLLLLALLLAASPGGALARCPGCGQGVQAGCPGGCVEEEDGGSPAEGCAEAEGCLRREGQECGVYTPNCAPGLQCHPPKDDEAPLRALLLGRGRCLPARAPAVAEENPKESKPQAGTARPQDVNRRDQQRNPGTSTTPSQPNSAGVQDTEMGPCRRHLDSVLQQLQTEVYRGAQTLYVPNCDHRGFYRKRQCRSSQGQRRGPCWCVDRMGKSLPGSPDGNGSSSCPTGSSG

SEQ ID NO: 40616 - protein, 238 aa, Homo sapiens
  Payload ID: 8267
  Gene Symbol: IGFBP6
  Gene Name: insulin-like growth factor binding protein 6
  ENSP ID: ENSP00000448953
MTPHRLLPPLLLLLALLLAASPGGALARCPGCGQGVQAGCPGGCVEEEDGGSPAEGCAEAEGCLRREGQECGVYTPNCAPGLQCHPPKDDEAPLRALLLGRGRCLPARAPAEENPKESKPQAGTARPQDVNRRDQQRNPGTSTTPSQPNSAGVQDTEMGPCRRHLDSVLQQLQTEVYRGAQTLYVPNCDHRGFYRKRQCRSSQGQRRGPCWCVDRMGKSLPGSPDGNGSSSCPTGSSG

SEQ ID NO: 40617 - protein, 136 aa, Homo sapiens
  Payload ID: 8267
  Gene Symbol: IGFBP6
  Gene Name: insulin-like growth factor binding protein 6
  ENSP ID: ENSP00000449344
MTPHRLLPPLLLLLALLLAASPGGALARCPGCGQGVQAGCPGGCVEEEDGGSPAEGCAEAEGCLRREGQECGVYTPNCAPGLQCHPPKDDEAPLRALLLGRGRCLPARAPAVLSSPRTLRKLSPEPGATCSCRGES

SEQ ID NO: 40618 - protein, 282 aa, Homo sapiens
  Payload ID: 8268
  Gene Symbol: IGFBP7
  Gene Name: insulin-like growth factor binding protein 7
  Uniprot ID: Q16270
  ENSP ID: ENSP00000295666
MERPSLRALLLGAAGLLLLLLPLSSSSSSDTCGPCEPASCPPLPPLGCLLGETRDACGCCPMCARGEGEPCGGGGAGRGYCAPGMECVKSRKRRKGKAGAAAGGPGVSGVCVCKSRYPVCGSDGTTYPSGCQLRAASQRAESRGEKAITQVSKGTCEQGPSIVTPPKDIWNVTGAQVYLSCEVIGIPTPVLIWNKVKRGHYGVQRTELLPGDRDNLAIQTRGGPEKHEVTGWVLVSPLSKEDAGEYECHASNSQGQASASAKITVVDALHEIPVKKGEGAEL

SEQ ID NO: 40619 - protein, 279 aa, Homo sapiens
  Payload ID: 8268
  Gene Symbol: IGFBP7
  Gene Name: insulin-like growth factor binding protein 7
  Uniprot ID: Q16270
  ENSP ID: ENSP00000486293
MERPSLRALLLGAAGLLLLLLPLSSSSSSDTCGPCEPASCPPLPPLGCLLGETRDACGCCPMCARGEGEPCGGGGAGRGYCAPGMECVKSRKRRKGKAGAAAGGPGVSGVCVCKSRYPVCGSDGTTYPSGCQLRAASQRAESRGEKAITQVSKGTCEQGPSIVTPPKDIWNVTGAQVYLSCEVIGIPTPVLIWNKVKRGHYGVQRTELLPGDRDNLAIQTRGGPEKHEVTGWVLVSPLSKEDAGEYECHASNSQGQASASAKITVVDALHEIPVKKGTQ

SEQ ID NO: 40620 - protein, 605 aa, Homo sapiens
  Payload ID: 8269
  Gene Symbol: IGFALS
  Gene Name: insulin-like growth factor binding protein, acid labile subunit
  Uniprot ID: P35858
  ENSP ID: ENSP00000215539
MALRKGGLALALLLLSWVALGPRSLEGADPGTPGEAEGPACPAACVCSYDDDADELSVFCSSRNLTRLPDGVPGGTQALWLDGNNLSSVPPAAFQNLSSLGFLNLQGGQLGSLEPQALLGLENLCHLHLERNQLRSLALGTFAHTPALASLGLSNNRLSRLEDGLFEGLGSLWDLNLGWNSLAVLPDAAFRGLGSLRELVLAGNRLAYLQPALFSGLAELRELDLSRNALRAIKANVFVQLPRLQKLYLDRNLIAAVAPGAFLGLKALRWLDLSHNRVAGLLEDTFPGLLGLRVLRLSHNAIASLRPRTFKDLHFLEELQLGHNRIRQLAERSFEGLGQLEVLTLDHNQLQEVKAGAFLGLTNVAVMNLSGNCLRNLPEQVFRGLGKLHSLHLEGSCLGRIRPHTFTGLSGLRRLFLKDNGLVGIEEQSLWGLAELLELDLTSNQLTHLPHRLFQGLGKLEYLLLSRNRLAELPADALGPLQRAFWLDVSHNRLEALPNSLLAPLGRLRYLSLRNNSLRTFTPQPPGLERLWLEGNPWDCGCPLKALRDFALQNPSAVPRFVQAICEGDDCQPPAYTYNNITCASPPEVVGLDLRDLSEAHFAPC

SEQ ID NO: 40621 - protein, 643 aa, Homo sapiens
  Payload ID: 8269
  Gene Symbol: IGFALS
  Gene Name: insulin-like growth factor binding protein, acid labile subunit
  Uniprot ID: P35858
  ENSP ID: ENSP00000416683
MALRKAGDLEPQFTPERRFRLCWYQAHSGRALLGPPPQASPPAGGLALALLLLSWVALGPRSLEGADPGTPGEAEGPACPAACVCSYDDDADELSVFCSSRNLTRLPDGVPGGTQALWLDGNNLSSVPPAAFQNLSSLGFLNLQGGQLGSLEPQALLGLENLCHLHLERNQLRSLALGTFAHTPALASLGLSNNRLSRLEDGLFEGLGSLWDLNLGWNSLAVLPDAAFRGLGSLRELVLAGNRLAYLQPALFSGLAELRELDLSRNALRAIKANVFVQLPRLQKLYLDRNLIAAVAPGAFLGLKALRWLDLSHNRVAGLLEDTFPGLLGLRVLRLSHNAIASLRPRTFKDLHFLEELQLGHNRIRQLAERSFEGLGQLEVLTLDHNQLQEVKAGAFLGLTNVAVMNLSGNCLRNLPEQVFRGLGKLHSLHLEGSCLGRIRPHTFTGLSGLRRLFLKDNGLVGIEEQSLWGLAELLELDLTSNQLTHLPHRLFQGLGKLEYLLLSRNRLAELPADALGPLQRAFWLDVSHNRLEALPNSLLAPLGRLRYLSLRNNSLRTFTPQPPGLERLWLEGNPWDCGCPLKALRDFALQNPSAVPRFVQAICEGDDCQPPAYTYNNITCASPPEVVGLDLRDLSEAHFAPC

SEQ ID NO: 40622 - protein, 131 aa, Homo sapiens
  Payload ID: 8269
  Gene Symbol: IGFALS
  Gene Name: insulin-like growth factor binding protein, acid labile subunit
  ENSP ID: ENSP00000456923
MTVGRRLPTALHGACQEAWPWRCCCCPGWHWAPAAWREQTPERRGKPRAQRARPPVSAATMTTRMSSASSAAPGTSRACLMESRAAPKPCGWTATTSRPSPRQPSRTSPAWASSTCRAASWAAWSHRRCWA

SEQ ID NO: 40623 - protein, 278 aa, Homo sapiens
  Payload ID: 8270
  Gene Symbol: IGFBPL1
  Gene Name: insulin-like growth factor binding protein-like 1
  Uniprot ID: Q8WX77
  ENSP ID: ENSP00000366923
MPRLSLLLPLLLLLLLPLLPPLSPSLGIRDVGGRRPKCGPCRPEGCPAPAPCPAPGISALDECGCCARCLGAEGASCGGRAGGRCGPGLVCASQAAGAAPEGTGLCVCAQRGTVCGSDGRSYPSVCALRLRARHTPRAHPGHLHKARDGPCEFAPVVVVPPRSVHNVTGAQVGLSCEVRAVPTPVITWRKVTKSPEGTQALEELPGDHVNIAVQVRGGPSDHEATAWILINPLRKEDEGVYQCHAANMVGEAESHSTVTVLDLSKYRSFHFPAPDDRM

SEQ ID NO: 40624 - protein, 510 aa, Homo sapiens
  Payload ID: 8271
  Gene Symbol: INSM1
  Gene Name: insulinoma-associated 1
  Uniprot ID: Q01101
  ENSP ID: ENSP00000312631
MPRGFLVKRSKKSTPVSYRVRGGEDGDRALLLSPSCGGARAEPPAPSPVPGPLPPPPPAERAHAALAAALACAPGPQPPPQGPRAAHFGNPEAAHPAPLYSPTRPVSREHEKHKYFERSFNLGSPVSAESFPTPAALLGGGGGGGASGAGGGGTCGGDPLLFAPAELKMGTAFSAGAEAARGPGPGPPLPPAAALRPPGKRPPPPTAAEPPAKAVKAPGAKKPKAIRKLHFEDEVTTSPVLGLKIKEGPVEAPRGRAGGAARPLGEFICQLCKEEYADPFALAQHKCSRIVRVEYRCPECAKVFSCPANLASHRRWHKPRPAPAAARAPEPEAAARAEAREAPGGGSDRDTPSPGGVSESGSEDGLYECHHCAKKFRRQAYLRKHLLAHHQALQAKGAPLAPPAEDLLALYPGPDEKAPQEAAGDGEGAGVLGLSASAECHLCPVCGESFASKGAQERHLRLLHAAQVFPCKYCPATFYSSPGLTRHINKCHPSENRQVILLQVPVRPAC

SEQ ID NO: 40625 - protein, 566 aa, Homo sapiens
  Payload ID: 8272
  Gene Symbol: INSM2
  Gene Name: insulinoma-associated 2
  Uniprot ID: Q96T92
  ENSP ID: ENSP00000306523
MPRGFLVKRTKRTGGLYRVRLAERVFPLLGPQGAPPFLEEAPSASLPGAERATPPTREEPGKGLTAEAAREQSGSPCRAAGVSPGTGGREGAEWRAGGREGPGPSPSPSPSPAKPAGAELRRAFLERCLSSPVSAESFPGGAAAVAAFSCSVAPAAAPTPGEQFLLPLRAPFPEPALQPDPAPLSAALQSLKRAAGGERRGKAPTDCASGPAAAGIKKPKAMRKLSFADEVTTSPVLGLKIKEEEPGAPSRGLGGSRTPLGEFICQLCKEQYADPFALAQHRCSRIVRVEYRCPECDKVFSCPANLASHRRWHKPRPAAANAATVSSADGKPPSSSSSSSRDSGAIASFLAEGKENSRIERTADQHPQARDSSGADQHPDSAPRQGLQVLTHPEPPLPQGPYTEGVLGRRVPVPGSTSGGRGSEIFVCPYCHKKFRRQAYLRKHLSTHEAGSARALAPGFGSERGAPLAFACPLCGAHFPTADIREKHRLWHAVREELLLPALAGAPPETSGPSGPSDGSAQQIFSCKHCPSTFFSSPGLTRHINKCHPSESRQVLLLQMPLRPGC

SEQ ID NO: 40626 - protein, 263 aa, Homo sapiens
  Payload ID: 8273
  Gene Symbol: ITM2A
  Gene Name: integral membrane protein 2A
  Uniprot ID: O43736
  ENSP ID: ENSP00000362395
MVKIAFNTPTAVQKEEARQDVEALLSRTVRTQILTGKELRVATQEKEGSSGRCMLTLLGLSFILAGLIVGGACIYKYFMPKSTIYRGEMCFFDSEDPANSLRGGEPNFLPVTEEADIREDDNIAIIDVPVPSFSDSDPAAIIHDFEKGMTAYLDLLLGNCYLMPLNTSIVMPPKNLVELFGKLASGRYLPQTYVVREDLVAVEEIRDVSNLGIFIYQLCNNRKSFRLRRRDLLLGFNKRAIDKCWKIRHFPNEFIVETKICQE

SEQ ID NO: 40627 - protein, 219 aa, Homo sapiens
  Payload ID: 8273
  Gene Symbol: ITM2A
  Gene Name: integral membrane protein 2A
  Uniprot ID: O43736
  ENSP ID: ENSP00000415533
MVKIAFNTPTAVQKEEARQDVEALLSRTVRTQILTGKSTIYRGEMCFFDSEDPANSLRGGEPNFLPVTEEADIREDDNIAIIDVPVPSFSDSDPAAIIHDFEKGMTAYLDLLLGNCYLMPLNTSIVMPPKNLVELFGKLASGRYLPQTYVVREDLVAVEEIRDVSNLGIFIYQLCNNRKSFRLRRRDLLLGFNKRAIDKCWKIRHFPNEFIVETKICQE

SEQ ID NO: 40628 - protein, 160 aa, Homo sapiens
  Payload ID: 8274
  Gene Symbol: ITM2B
  Gene Name: integral membrane protein 2B
  Uniprot ID: Q9Y287
  ENSP ID: ENSP00000367811
MVKVTFNSALAQKEAKKDEPKSGEEALIIPPDAVAVDCKDPDDVVPVGQRRAWCWCMCFGLAFMLAGVILGGAYLYKYFALQAGTYLPQSYLIHEHMVITDRIENIDHLGFFIYRLCHDKETYKLQRRETIKGIQKREASNCFAIRHFENKFAVETLICS

SEQ ID NO: 40629 - protein, 266 aa, Homo sapiens
  Payload ID: 8274
  Gene Symbol: ITM2B
  Gene Name: integral membrane protein 2B
  Uniprot ID: Q9Y287
  ENSP ID: ENSP00000367828
MVKVTFNSALAQKEAKKDEPKSGEEALIIPPDAVAVDCKDPDDVVPVGQRRAWCWCMCFGLAFMLAGVILGGAYLYKYFALQPDDVYYCGIKYIKDDVILNEPSADAPAALYQTIEENIKIFEEEEVEFISVPVPEFADSDPANIVHDFNKKLTAYLDLNLDKCYVIPLNTSIVMPPRNLLELLINIKAGTYLPQSYLIHEHMVITDRIENIDHLGFFIYRLCHDKETYKLQRRETIKGIQKREASNCFAIRHFENKFAVETLICS

SEQ ID NO: 40630 - protein, 53 aa, Homo sapiens
  Payload ID: 8274
  Gene Symbol: ITM2B
  Gene Name: integral membrane protein 2B
  ENSP ID: ENSP00000475556
  MOD_RES (1)..(1): Any amino acid
XFMLAGVILGGAYLYKYFALQSFSLVAQTGVQWRDLGSLHPLSPGQMTCTTVE

SEQ ID NO: 40631 - protein, 29 aa, Homo sapiens
  Payload ID: 8274
  Gene Symbol: ITM2B
  Gene Name: integral membrane protein 2B
  ENSP ID: ENSP00000476004
  MOD_RES (1)..(1): Any amino acid
XGIQKREASNCFAIRHFENKFAVETLICS

SEQ ID NO: 40632 - protein, 230 aa, Homo sapiens
  Payload ID: 8275
  Gene Symbol: ITM2C
  Gene Name: integral membrane protein 2C
  Uniprot ID: Q9NQX7
  ENSP ID: ENSP00000322100
MVKISFQPAVAGIKGDKADKASASAPAPASATEILLTPAREEQPPQHRSKRGGSVGGVCYLSMGMVVLLMGLVFASVYIYRYFFLAQLARDNFFRCGVLYEDSLSSQVRTQMELEEDVKIYLDENYERINVPVPQFGGGDPADIIHDFQRRGTYLPQTYIIQEEMVVTEHVSDKEALGSFIYHLCNGKDTYRLRRRATRRRINKRGAKNCNAIRHFENTFVVETLICGVV

SEQ ID NO: 40633 - protein, 267 aa, Homo sapiens
  Payload ID: 8275
  Gene Symbol: ITM2C
  Gene Name: integral membrane protein 2C
  Uniprot ID: Q9NQX7
  ENSP ID: ENSP00000322730
MVKISFQPAVAGIKGDKADKASASAPAPASATEILLTPAREEQPPQHRSKRGGSVGGVCYLSMGMVVLLMGLVFASVYIYRYFFLAQLARDNFFRCGVLYEDSLSSQVRTQMELEEDVKIYLDENYERINVPVPQFGGGDPADIIHDFQRGLTAYHDISLDKCYVIELNTTIVLPPRNFWELLMNVKRGTYLPQTYIIQEEMVVTEHVSDKEALGSFIYHLCNGKDTYRLRRRATRRRINKRGAKNCNAIRHFENTFVVETLICGVV

SEQ ID NO: 40634 - protein, 220 aa, Homo sapiens
  Payload ID: 8275
  Gene Symbol: ITM2C
  Gene Name: integral membrane protein 2C
  Uniprot ID: Q9NQX7
  ENSP ID: ENSP00000335121
MVKISFQPAVAGIKGDKADKASASAPAPASATEILLTPARLARDNFFRCGVLYEDSLSSQVRTQMELEEDVKIYLDENYERINVPVPQFGGGDPADIIHDFQRGLTAYHDISLDKCYVIELNTTIVLPPRNFWELLMNVKRGTYLPQTYIIQEEMVVTEHVSDKEALGSFIYHLCNGKDTYRLRRRATRRRINKRGAKNCNAIRHFENTFVVETLICGVV

SEQ ID NO: 40635 - protein, 205 aa, Homo sapiens
  Payload ID: 8275
  Gene Symbol: ITM2C
  Gene Name: integral membrane protein 2C
  ENSP ID: ENSP00000387242
MGMVVLLMGLVFASVYIYRYFFLAQLARDNFFRCGVLYEDSLSSQVRTQMELEEDVKIYLDENYERINVPVPQFGGGDPADIIHDFQRGLTAYHDISLDKCYVIELNTTIVLPPRNFWELLMNVKRGTYLPQTYIIQEEMVVTEHVSDKEALGSFIYHLCNGKDTYRLRRRATRRRINKRGAKNCNAIRHFENTFVVETLICGVV

SEQ ID NO: 40636 - protein, 180 aa, Homo sapiens
  Payload ID: 8275
  Gene Symbol: ITM2C
  Gene Name: integral membrane protein 2C
  ENSP ID: ENSP00000390655
MVKISFQPAVAGIKGDKADKASASAPAPASATEILLTPAREEQPPQHRSKRGGSVGGVCYLSMGMVVLLMGLVFASVYIYRYFFLAQLARDNFFRCGVLYEDSLSSQVRTQMELEEDVKIYLDENYERINVPVPQFGGGDPADIIHDFQRGLTAYHDISLDKCYVIELNTTIVLPPRNFW

SEQ ID NO: 40637 - protein, 125 aa, Homo sapiens
  Payload ID: 8275
  Gene Symbol: ITM2C
  Gene Name: integral membrane protein 2C
  ENSP ID: ENSP00000403257
MGMVVLLMGLVFASVYIYRYFFLAQLARDNFFRCGVLYEDSLSSQVRTQMELEEDVKIYLDENYERINVPVPQFGGGDPADIIHDFQRGLTAYHDISLDKCYVIELNTTIVLPPRNFWELLMNVK

SEQ ID NO: 40638 - protein, 125 aa, Homo sapiens; identical to SEQ ID NO: 40637
  Payload ID: 8275
  Gene Symbol: ITM2C
  Gene Name: integral membrane protein 2C
  ENSP ID: ENSP00000440295

SEQ ID NO: 40639 - protein, 122 aa, Homo sapiens
  Payload ID: 8275
  Gene Symbol: ITM2C
  Gene Name: integral membrane protein 2C
  ENSP ID: ENSP00000444899
MGMVVLLMGLVFASVYIYRYFFLAQLARDNFFRCGVLYEDSLSSQVRTQMELEEDVKIYLDENYERINVPVPQFGGGDPADIIHDFQRGLTAYHDISLDKCYVIELNTTIVLPPRNFWELLM

SEQ ID NO: 40640 - protein, 166 aa, Homo sapiens
  Payload ID: 8275
  Gene Symbol: ITM2C
  Gene Name: integral membrane protein 2C
  ENSP ID: ENSP00000480137
MSLHSSPTLPTSLYQSCDLSVGGPSLLTWVWRRERRCCKVFSVSHCLEAGPAKAWAHSCTGSPRGRTGWGSRACEALGKGMGLWGRGGMGFRSICTIRKVLRSFFLEGTLSSLSLFLDLGLELRMGRCAQGGTHQSTREGGYLGVSQGLCQCLQPTSRSLEFGEWG

SEQ ID NO: 40641 - protein, 2190 aa, Homo sapiens
  Payload ID: 8276
  Gene Symbol: INTS1
  Gene Name: integrator complex subunit 1
  Uniprot ID: Q8N201
  ENSP ID: ENSP00000385722
MNRAKPTTVRRPSAAAKPSGHPPPGDFIALGSKGQANESKTASTLLKPAPSGLPSERKRDAAAALSSASALTGLTKRPKLSSTPPLSALGRLAEAAVAEKRAISPSIKEPSVVPIEVLPTVLLDEIEAAELEGNDDRIEGVLCGAVKQLKVTRAKPDSTLYLSLMYLAKIKPNIFATEGVIEALCSLLRRDASINFKAKGNSLVSVLACNLLMAAYEEDENWPEIFVKVYIEDSLGERIWVDSPHCKTFVDNIQTAFNTRMPPRSVLLQGEAGRVAGDLGAGSSPHPSLTEEEDSQTELLIAEEKLSPEQEGQLMPRYEELAESVEEYVLDMLRDQLNRRQPIDNVSRNLLRLLTSTCGYKEVRLLAVQKLEMWLQNPKLTRPAQDLLMSVCMNCNTHGSEDMDVISHLIKIRLKPKVLLNHFMLCIRELLSAHKDNLGTTIKLVIFNELSSARNPNNMQVLYTALQHSSELAPKFLAMVFQDLLTNKDDYLRASRALLREIIKQTKHEINFQAFCLGLMQERKEPQYLEMEFKERFVVHITDVLAVSMMLGITAQVKEAGIAWDKGEKRNLEVLRSFQNQIAAIQRDAVWWLHTVVPSISKLAPKDYVHCLHKVLFTEQPETYYKWDNWPPESDRNFFLRLCSEVPILEDTLMRILVIGLSRELPLGPADAMELADHLVKRAAAVQADDVEVLKVGRTQLIDAVLNLCTYHHPENIQLPPGYQPPNLAISTLYWKAWPLLLVVAAFNPENIGLAAWEEYPTLKMLMEMVMTNNYSYPPCTLTDEETRTEMLNRELQTAQREKQEILAFEGHLAAASTKQTITESSSLLLSQLTSLDPQGPPRRPPPHILDQVKSLNQSLRLGHLLCRSRNPDFLLHIIQRQASSQSMPWLADLVQSSEGSLDVLPVQCLCEFLLHDAVDDAASGEEDDEGESKEQKAKKRQRQQKQRQLLGRLQDLLLGPKADEQTTCEVLDYFLRRLGSSQVASRVLAMKGLSLVLSEGSLRDGEEKEPPMEEDVGDTDVLQGYQWLLRDLPRLPLFDSVRSTTALALQQAIHMETDPQTISAYLIYLSQHTPVEEQAQHSDLALDVARLVVERSTIMSHLFSKLSPSAASDAVLSALLSIFSRYVRRMRQSKEGEEVYSWSESQDQVFLRWSSGETATMHILVVHAMVILLTLGPPRADDSEFQALLDIWFPEEKPLPTAFLVDTSEEALLLPDWLKLRMIRSEVLRLVDAALQDLEPQQLLLFVQSFGIPVSSMSKLLQFLDQAVAHDPQTLEQNIMDKNYMAHLVEVQHERGASGGQTFHSLLTASLPPRRDSTEAPKPKSSPEQPIGQGRIRVGTQLRVLGPEDDLAGMFLQIFPLSPDPRWQSSSPRPVALALQQALGQELARVVQGSPEVPGITVRVLQALATLLSSPHGGALVMSMHRSHFLACPLLRQLCQYQRCVPQDTGFSSLFLKVLLQMLQWLDSPGVEGGPLRAQLRMLASQASAGRRLSDVRGGLLRLAEALAFRQDLEVVSSTVRAVIATLRSGEQCSVEPDLISKVLQGLIEVRSPHLEELLTAFFSATADAASPFPACKPVVVVSSLLLQEEEPLAGGKPGADGGSLEAVRLGPSSGLLVDWLEMLDPEVVSSCPDLQLRLLFSRRKGKGQAQVPSFRPYLLTLFTHQSSWPTLHQCIRVLLGKSREQRFDPSASLDFLWACIHVPRIWQGRDQRTPQKRREELVLRVQGPELISLVELILAEAETRSQDGDTAACSLIQARLPLLLSCCCGDDESVRKVTEHLSGCIQQWGDSVLGRRCRDLLLQLYLQRPELRVPVPEVLLHSEGAASSSVCKLDGLIHRFITLLADTSDSRALENRGADASMACRKLAVAHPLLLLRHLPMIAALLHGRTHLNFQEFRQQNHLSCFLHVLGLLELLQPHVFRSEHQGALWDCLLSFIRLLLNYRKSSRHLAAFINKFVQFIHKYITYNAPAAISFLQKHADPLHDLSFDNSDLVMLKSLLAGLSLPSRDDRTDRGLDEEGEEESSAGSLPLVSVSLFTPLTAAEMAPYMKRLSRGQTVEDLLEVLSDIDEMSRRRPEILSFFSTNLQRLMSSAEECCRNLAFSLALRSMQNSPSIAAAFLPTFMYCLGSQDFEVVQTALRNLPEYALLCQEHAAVLLHRAFLVGMYGQMDPSAQISEALRILHMEAVM

SEQ ID NO: 40642 - protein, 128 aa, Homo sapiens
  Payload ID: 8276
  Gene Symbol: INTS1
  Gene Name: integrator complex subunit 1
  ENSP ID: ENSP00000419206
LKSLLAGLSLPSRDDRTDRGLDEEGEEESSAGSLPLVSVSLFTPLTAAEMAPYMKRLSRGQTVEGESGPASPTPDLLEVLSDIDEMSRRRPEILSFFSTNLQRLMSSAEECCRNLAFSLALRSMQNSP

SEQ ID NO: 40643 - protein, 710 aa, Homo sapiens
  Payload ID: 8277
  Gene Symbol: INTS10
  Gene Name: integrator complex subunit 10
  Uniprot ID: Q9NVR2
  ENSP ID: ENSP00000381064
MSAQGDCEFLVQRARELVPQDLWAAKAWLITARSLYPADFNIQYEMYTIERNAERTATAGRLLYDMFVNFPDQPVVWREISIITSALRNDSQDKQTQFLRSLFETLPGRVQCEMLLKVTEQCFNTLERSEMLLLLLRRFPETVVQHGVGLGEALLEAETIEEQESPVNCFRKLFVCDVLPLIINNHDVRLPANLLYKYLNKAAEFYINYVTRSTQIENQHQGAQDTSDLMSPSKRSSQKYIIEGLTEKSSQIVDPWERLFKILNVVGMRCEWQMDKGRRSYGDILHRMKDLCRYMNNFDSEAHAKYKNQVVYSTMLVFFKNAFQYVNSIQPSLFQGPNAPSQVPLVLLEDVSNVYGDVEIDRNKHIHKKRKLAEGREKTMSSDDEDCSAKGRNRHIVVNKAELANSTEVLESFKLARESWELLYSLEFLDKEFTRICLAWKTDTWLWLRIFLTDMIIYQGQYKKAIASLHHLAALQGSISQPQITGQGTLEHQRALIQLATCHFALGEYRMTCEKVLDLMCYMVLPIQDGGKSQEEPSKVKPKFRKGSDLKLLPCTSKAIMPYCLHLMLACFKLRAFTDNRDDMALGHVIVLLQQEWPRGENLFLKAVNKICQQGNFQYENFFNYVTNIDMLEEFAYLRTQEGGKIHLELLPNQGMLIKHHTVTRGITKGVKEDFRLAMERQVSRCGENLMVVLHRFCINEKILLLQTLT

SEQ ID NO: 40644 - protein, 54 aa, Homo sapiens
  Payload ID: 8277
  Gene Symbol: INTS10
  Gene Name: integrator complex subunit 10
  ENSP ID: ENSP00000428107
  MOD_RES (1)..(1): Any amino acid
XELVPQDLWAAKAWLITARSLYPADFNIQYEMYTIERNAERTATAGRLLYDMFI

SEQ ID NO: 40645 - protein, 29 aa, Homo sapiens
  Payload ID: 8277
  Gene Symbol: INTS10
  Gene Name: integrator complex subunit 10
  ENSP ID: ENSP00000428300
  MOD_RES (1)..(1): Any amino acid
XCYMVLPIQDGGKSQEEPSKVKPKFRKGS

SEQ ID NO: 40646 - protein, 173 aa, Homo sapiens
  Payload ID: 8277
  Gene Symbol: INTS10
  Gene Name: integrator complex subunit 10
  ENSP ID: ENSP00000428608
  MOD_RES (1)..(1): Any amino acid
XLHLMLACFKLRAFTDNRDDMALGHVIVLLQQEWPRGENLFLKAVNKICQQGNFQYENFFNYVTNIDMLEEFAYLRTQEGGKIHLELLPNQGMLIKPSSPPMGLLQQEFLPVLQPSIQTADRHHTVTRGITKGVKEDFRLAMERQVSRCGENLMVVLHRFCINEKILLLQTLT

SEQ ID NO: 40647 - protein, 41 aa, Homo sapiens
  Payload ID: 8277
  Gene Symbol: INTS10
  Gene Name: integrator complex subunit 10
  ENSP ID: ENSP00000428671
  MOD_RES (1)..(1): Any amino acid
XLLQQEWPRGENLFLKAVNKICQQGNFQYENFFNYVTTCRY

SEQ ID NO: 40648 - protein, 66 aa, Homo sapiens
  Payload ID: 8277
  Gene Symbol: INTS10
  Gene Name: integrator complex subunit 10
  ENSP ID: ENSP00000429011
MSAQGDCEFLVQRARELVPQDLWAAKAWLITARSLYPADFNIQYEMYTIERNAERTATAGRLLYDM

SEQ ID NO: 40649 - protein, 103 aa, Homo sapiens
  Payload ID: 8277
  Gene Symbol: INTS10
  Gene Name: integrator complex subunit 10
  ENSP ID: ENSP00000429117
  MOD_RES (1)..(1): Any amino acid
XTCEKVLDLMCYMVLPIQDGGKSQEEPSKVKPKFRKGSDLKLLPCTSKAIMPYCLHLMLACFKAPHCNSRHHQRREGGLSPGHGAPGLPLWRESDGGSAQVLH

SEQ ID NO: 40650 - protein, 153 aa, Homo sapiens
  Payload ID: 8277
  Gene Symbol: INTS10
  Gene Name: integrator complex subunit 10
  ENSP ID: ENSP00000429534
  MOD_RES (1)..(1): Any amino acid
XSWELLYSLEFLDKEFTRICLAWKTDTWLWLRIFLTDMIIYQGQYKKAIASLHHLAALQGSISQPQITGQGTLEHQRALIQLATCHFALGEYRMTCEKVLDLMCYMVLPIQDGGKSQEEPSKVKPKFRKDIDMLEEFAYLRTQEGGKIHLELL

SEQ ID NO: 40651 - protein, 235 aa, Homo sapiens
  Payload ID: 8277
  Gene Symbol: INTS10
  Gene Name: integrator complex subunit 10
  ENSP ID: ENSP00000430446
  MOD_RES (1)..(1): Any amino acid
XFYINYVTRSTQIENQHQGAQDTSDLMSPSKRSSQKYIIEGLTEKSSQIVDPWERSYGDILHRMKDLCRYMNNFDSEAHAKYKNQVVYSTMLVFFKNAFQYVNSIQPSLFQGPNAPSQVPLVLLEDVSNVYGDVEIDRNKHIHKKRKLAEGREKTMSSDDEDCSAKGRNRHIVVNKAELANSTEVLESFKLARESWELLYSLEFLDKEFTRICLAWKTDTWLWLRIFLTDMIIYQ

SEQ ID NO: 40652 - protein, 49 aa, Homo sapiens
  Payload ID: 8277
  Gene Symbol: INTS10
  Gene Name: integrator complex subunit 10
  ENSP ID: ENSP00000430704
  MOD_RES (1)..(1): Any amino acid
XCRYMNNFDSEAHAKYKNQVVYSTMLVFFKNAFQYVNSIQPSLFQEFRR

SEQ ID NO: 40653 - protein, 65 aa, Homo sapiens
  Payload ID: 8277
  Gene Symbol: INTS10
  Gene Name: integrator complex subunit 10
  ENSP ID: ENSP00000430877
MSAQGDCEFLVQRARELVPQDLWAAKAWLITARSLYPADFNIQEGQRAMLDELGAFWAGVSDQGA

SEQ ID NO: 40654 - protein, 462 aa, Homo sapiens
  Payload ID: 8278
  Gene Symbol: INTS12
  Gene Name: integrator complex subunit 12
  Uniprot ID: Q96CB8
  ENSP ID: ENSP00000340737
MAATVNLELDPIFLKALGFLHSKSKDSAEKLKALLDESLARGIDSSYRPSQKDVEPPKISSTKNISIKQEPKISSSLPSGNNNGKVLTTEKVKKEAEKRPADKMKSDITEGVDIPKKPRLEKPETQSSPITVQSSKDLPMADLSSFEETSADDFAMEMGLACVVCRQMMVASGNQLVECQECHNLYHRDCHKPQVTDKEANDPRLVWYCARCTRQMKRMAQKTQKPPQKPAPAVVSVTPAVKDPLVKKPETKLKQETTFLAFKRTEVKTSTVISGNSSSASVSSSVTSGLTGWAAFAAKTSSAGPSTAKLSSTTQNNTGKPATSSANQKPVGLTGLATSSKGGIGSKIGSNNSTTPTVPLKPPPPLTLGKTGLSRSVSCDNVSKVGLPSPSSLVPGSSSQLSGNGNSGTSGPSGSTTSKTTSESSSSPSASLKGPTSQESQLNAMKRLQMVKKKAAQKKLKK

SEQ ID NO: 40655 - protein, 462 aa, Homo sapiens; identical to SEQ ID NO: 40654
  Payload ID: 8278
  Gene Symbol: INTS12
  Gene Name: integrator complex subunit 12
  Uniprot ID: Q96CB8
  ENSP ID: ENSP00000378221

SEQ ID NO: 40656 - protein, 88 aa, Homo sapiens
  Payload ID: 8278
  Gene Symbol: INTS12
  Gene Name: integrator complex subunit 12
  ENSP ID: ENSP00000396309
MAATVNLELDPIFLKALGFLHSKSKDSAEKLKALLDESLARGIDSSYRPSQKDVEPPKISSTKNISIKQEPKISSSLPSGNNNGKVLT

SEQ ID NO: 40657 - protein, 87 aa, Homo sapiens
  Payload ID: 8278
  Gene Symbol: INTS12
  Gene Name: integrator complex subunit 12
  ENSP ID: ENSP00000396729
MAATVNLELDPIFLKALGFLHSKSKDSAEKLKALLDESLARGIDSSYRPSQKDVEPPKISSTKNISIKQEPKISSSLPSGNNNGKVL

SEQ ID NO: 40658 - protein, 131 aa, Homo sapiens
  Payload ID: 8278
  Gene Symbol: INTS12
  Gene Name: integrator complex subunit 12
  ENSP ID: ENSP00000412317
MAATVNLELDPIFLKALGFLHSKSKDSAEKLKALLDESLARGIDSSYRPSQKDVEPPKISSTKNISIKQEPKISSSLPSGNNNGKVLTTEKVKKEAEKRPADKMKSDITEGVDIPKKPRLEKPETQSSPIT

SEQ ID NO: 40659 - protein, 462 aa, Homo sapiens; identical to SEQ ID NO: 40654
  Payload ID: 8278
  Gene Symbol: INTS12
  Gene Name: integrator complex subunit 12
  Uniprot ID: Q96CB8
  ENSP ID: ENSP00000415433

SEQ ID NO: 40660 - protein, 18 aa, Homo sapiens
  Payload ID: 8278
  Gene Symbol: INTS12
  Gene Name: integrator complex subunit 12
  ENSP ID: ENSP00000422048
MAATVNLELDPIFLKALG

SEQ ID NO: 40661 - protein, 57 aa, Homo sapiens
  Payload ID: 8278
  Gene Symbol: INTS12
  Gene Name: integrator complex subunit 12
  ENSP ID: ENSP00000422856
MVMSRQSQSQAFAMAATVNLELDPIFLKALGFLHSKSKDSAEKLKALLDESLARGID

SEQ ID NO: 40662 - protein, 159 aa, Homo sapiens
  Payload ID: 8278
  Gene Symbol: INTS12
  Gene Name: integrator complex subunit 12
  ENSP ID: ENSP00000423618
MAATVNLELDPIFLKALGFLHSKSKDSAEKLKALLDESLARGIDSSYRPSQKDVEPPKISSTKNISIKQEPKISSSLPSGNNNGKVLTTEKVKKEAEKRPADKMKSDITEGVDIPKKPRLEKPETQSSPITVQSSKDLPMADLSSFEETSADDFAMEMG

SEQ ID NO: 40663 - protein, 444 aa, Homo sapiens
  Payload ID: 8278
  Gene Symbol: INTS12
  Gene Name: integrator complex subunit 12
  ENSP ID: ENSP00000481164
MAATVNLELDPIFLKALGFLHSKSKDSAEKLKALLDESLARGIDSSYRPSQKDVEPPKISSTKNISIKQEPKISSSLPSGNNNGKVLTTEKVKKEAEKRPADKMKSDITEGVDIPKKPRLEKPETQSSPITVQSSKDLPMADLSSFEETSADDFAMEMGLACVVCRQMMVASGNQLVECQECHNLYHRDCHKPQVTDKEANDPRLVWYCARCTRQMKRMAQKTQKPPQKPAPAVVSVTPAVKDPLVKKPETKLKQETTFLAFKRTEVKTSTVISGNSSSASVSSSVTSGLTGWAAFAAKTSSAGPSTAKLSSTTQNNTGKPATSSANQKPVGLTGLATSSKGGIGSKIGSNNSTTPTVPLKPPPPLTLGKTGLSRSVSCDNVSKVGLPSPSSLVPGSSSQLSGNGNSGTSGPSGSTTSKTTSESSSSPSASLKGPTSQNHSSML

SEQ ID NO: 40664 - protein, 1196 aa, Homo sapiens
  Payload ID: 8279
  Gene Symbol: INTS2
  Gene Name: integrator complex subunit 2
  ENSP ID: ENSP00000251334
MTECTSLQFVSPFAFEAMQKVDVVCLASLSDPELRLLLPCLVRMALCAPADQSQSWAQDKKLILRLLSGVEAVNSIVALLSVDFHALEQDASKEQQLRHKLGGGSGESILVSQLQHGLTLEFEHSDSPRRLRLVLSELLAIMNKVSESNGEFFFKSSELFESPVYLEEAADVLCILQAELPSLLPIVDVAEALLHVRNGAWFLCLLVANVPDSFNEVCRGLIKNGERQDEESLGGRRRTDALRFLCKMNPSQALKVRGMVVEECHLPGLGVALTLDHTKNEACEDGVSDLVCFVSGLLLGTNAKVRTWFGTFIRNGQQRKRETSSSVLWQMRRQLLLELMGILPTVRSTRIVEEADVDMEPNVSVYSGLKEEHVVKASALLRLYCALMGIAGLKPTEEEAEQLLQLMTSRPPATPAGVRFVSLSFCMLLAFSTLVSTPEQEQLMVVWLSWMIKEEAYFESTSGVSASFGEMLLLVAMYFHSNQLSAIIDLVCSTLGMKIVIKPSSLSRMKTIFTQEIFTEQVVTAHAVRVPVTSNLSANITGFLPIHCIYQLLRSRSFTKHKVSIKDWIYRQLCETSTPLHPQLLPLIDVYINSILTPASKSNPEATNQPVTEQEILNIFQGVIGGDNIRLNQRFSITAQLLVLYYILSYEEALLANTKTLAAMQRKPKSYSSSLMDQIPIKFLIRQAQGLQQELGGLHSALLRLLATNYPHLCIVDDWICEEEITGTDALLRRMLLTNNAKNHSPKQLQEAFSAVPVNNTQVMQIIEHLTLLSASELIPYAEVLTSNMSQLLNSGVPRRILQTVNKLWMVLNTVMPRRLWVMTVNALQPSIKFVRQQKYTQNDLMIDPLIVLRCDQRVHRCPPLMDITLHMLNGYLLASKAYLSAHLKETEQDRPSQNNTIGLVGQTDAPEVTREELKNALLAAQDSAAVQILLEICLPTEEEKANGVNPDSLLRNVQSVITTSAPNKGMEEGEDNLLCNLREVQCLICCLLHQMYIADPNIAKLVHFQGYPCELLPLTVAGIPSMHICLDFIPELIAQPELEKQIFAIQLLSHLCIQYALPKSLSVARLAVNVMGTLLTVLTQAKRYAFFMPTLPSLVSFCRAFPPLYEDIMSLLIQIGQVCASDVATQTRDIDPIITRLQQIKEKPSGWSQICKDSSYKNGSRDTGSMDPDVQLCHCIERTVIEIINMSVSGI

SEQ ID NO: 40665 - protein, 1204 aa, Homo sapiens
  Payload ID: 8279
  Gene Symbol: INTS2
  Gene Name: integrator complex subunit 2
  Uniprot ID: Q9H0H0
  ENSP ID: ENSP00000414237
MKDQQTVIMTECTSLQFVSPFAFEAMQKVDVVCLASLSDPELRLLLPCLVRMALCAPADQSQSWAQDKKLILRLLSGVEAVNSIVALLSVDFHALEQDASKEQQLRHKLGGGSGESILVSQLQHGLTLEFEHSDSPRRLRLVLSELLAIMNKVSESNGEFFFKSSELFESPVYLEEAADVLCILQAELPSLLPIVDVAEALLHVRNGAWFLCLLVANVPDSFNEVCRGLIKNGERQDEESLGGRRRTDALRFLCKMNPSQALKVRGMVVEECHLPGLGVALTLDHTKNEACEDGVSDLVCFVSGLLLGTNAKVRTWFGTFIRNGQQRKRETSSSVLWQMRRQLLLELMGILPTVRSTRIVEEADVDMEPNVSVYSGLKEEHVVKASALLRLYCALMGIAGLKPTEEEAEQLLQLMTSRPPATPAGVRFVSLSFCMLLAFSTLVSTPEQEQLMVVWLSWMIKEEAYFESTSGVSASFGEMLLLVAMYFHSNQLSAIIDLVCSTLGMKIVIKPSSLSRMKTIFTQEIFTEQVVTAHAVRVPVTSNLSANITGFLPIHCIYQLLRSRSFTKHKVSIKDWIYRQLCETSTPLHPQLLPLIDVYINSILTPASKSNPEATNQPVTEQEILNIFQGVIGGDNIRLNQRFSITAQLLVLYYILSYEEALLANTKTLAAMQRKPKSYSSSLMDQIPIKFLIRQAQGLQQELGGLHSALLRLLATNYPHLCIVDDWICEEEITGTDALLRRMLLTNNAKNHSPKQLQEAFSAVPVNNTQVMQIIEHLTLLSASELIPYAEVLTSNMSQLLNSGVPRRILQTVNKLWMVLNTVMPRRLWVMTVNALQPSIKFVRQQKYTQNDLMIDPLIVLRCDQRVHRCPPLMDITLHMLNGYLLASKAYLSAHLKETEQDRPSQNNTIGLVGQTDAPEVTREELKNALLAAQDSAAVQILLEICLPTEEEKANGVNPDSLLRNVQSVITTSAPNKGMEEGEDNLLCNLREVQCLICCLLHQMYIADPNIAKLVHFQGYPCELLPLTVAGIPSMHICLDFIPELIAQPELEKQIFAIQLLSHLCIQYALPKSLSVARLAVNVMGTLLTVLTQAKRYAFFMPTLPSLVSFCRAFPPLYEDIMSLLIQIGQVCASDVATQTRDIDPIITRLQQIKEKPSGWSQICKDSSYKNGSRDTGSMDPDVQLCHCIERTVIEIINMSVSGI

SEQ ID NO: 40666 - protein, 79 aa, Homo sapiens
  Payload ID: 8279
  Gene Symbol: INTS2
  Gene Name: integrator complex subunit 2
  ENSP ID: ENSP00000461996
MTECTSLQFVSPFAFEAMQKVDVVCLASLSDPELRLLLPCLVRMALCAPADQSQSWAQDKKLILRLLSGVEAVNSIVAL

SEQ ID NO: 40667 - protein, 1204 aa, Homo sapiens; identical to SEQ ID NO: 40665
  Payload ID: 8279
  Gene Symbol: INTS2
  Gene Name: integrator complex subunit 2
  Uniprot ID: Q9H0H0
  ENSP ID: ENSP00000482710

SEQ ID NO: 40668 - protein, 1042 aa, Homo sapiens
  Payload ID: 8280
  Gene Symbol: INTS3
  Gene Name: integrator complex subunit 3
  Uniprot ID: Q68E01
  ENSP ID: ENSP00000318641
MELQKGKGAAAAAAASGAAGGGGGGAGAGAPGGGRLLLSTSLDAKDELEERLERCMSIVTSMTAGVSEREANDALNAYVCKGLPQHEEICLGLFTLILTEPAQAQKCYRDLALVSRDGMNIVLNKINQILMEKYLKLQDTCRTQLVWLVRELVKSGVLGADGVCMTFMKQIAGGDVTAKNIWLAESVLDILTEQREWVLKSSILIAMAVYTYLRLIVDHHGTAQLQALRQKEVDFCISLLRERFMECLMIGRDLVRLLQNVARIPEFELLWKDIIHNPQALSPQFTGILQLLQSRTSRKFLACRLTPDMETKLLFMTSRVRFGQQKRYQDWFQRQYLSTPDSQSLRCDLIRYICGVVHPSNEVLSSDILPRWAIIGWLLTTCTSNVAASNAKLALFYDWLFFSPDKDSIMNIEPAILVMHHSMKPHPAITATLLDFMCRIIPNFYPPLEGHVRQGVFSSLNHIVEKRVLAHLAPLFDNPKLDKELRAMLREKFPEFCSSPSPPVEVKIEEPVSMEMDNHMSDKDESCYDNAEAAFSDDEEDLNSKGKKREFRFHPIKETVVEEPVDITPYLDQLDESLRDKVLQLQKGSDTEAQCEVMQEIVDQVLEEDFDSEQLSVLASCLQELFKAHFRGEVLPEEITEESLEESVGKPLYLIFRNLCQMQEDNSSFSLLLDLLSELYQKQPKIGYHLLYYLRASKAAAGKMNLYESFAQATQLGDLHTCLMMDMKACQEDDVRLLCHLTPSIYTEFPDETLRSGELLNMIVAVIDSAQLQELVCHVMMGNLVMFRKDSVLNILIQSLDWETFEQYCAWQLFLAHNIPLETIIPILQHLKYKEHPEALSCLLLQLRREKPSEEMVKMVLSRPCHPDDQFTTSILRHWCMKHDELLAEHIKSLLIKNNSLPRKRQSLRSSSSKLAQLTLEQILEHLDNLRLNLTNTKQNFFSQTPILQALQHVQASCDEAHKMKFSDLFSLAEEYEDSSTKPPKSRRKAALSSPRSRKNATQPPNAEEESGSSSASEEEDTKPKPTKRKRKGSSAVGSDSD

SEQ ID NO: 40669 - protein, 1042 aa, Homo sapiens; identical to SEQ ID NO: 40668
  Payload ID: 8280
  Gene Symbol: INTS3
  Gene Name: integrator complex subunit 3
  Uniprot ID: Q68E01
  ENSP ID: ENSP00000404290

SEQ ID NO: 40670 - protein, 49 aa, Homo sapiens
  Payload ID: 8280
  Gene Symbol: INTS3
  Gene Name: integrator complex subunit 3
  ENSP ID: ENSP00000422616
  MOD_RES (1)..(1): Any amino acid
XSQSLRCDLIRYICGVVHPSNEVLSSDILPRWAIIGWLLTTCTTPSSPV

SEQ ID NO: 40671 - protein, 902 aa, Homo sapiens
  Payload ID: 8280
  Gene Symbol: INTS3
  Gene Name: integrator complex subunit 3
  Uniprot ID: Q68E01
  ENSP ID: ENSP00000425437
MAVYTYLRLIVDHHGTAQLQALRQKEVDFCISLLRERFMECLMIGRDLVRLLQNVARIPEFELLWKDIIHNPQALSPQFTGILQLLQSRTSRKFLACRLTPDMETKLLFMTSRVRFGQQKRYQDWFQRQYLSTPDSQSLRCDLIRYICGVVHPSNEVLSSDILPRWAIIGWLLTTCTSNVAASNAKLALFYDWLFFSPDKDSIMNIEPAILVMHHSMKPHPAITATLLDFMCRIIPNFYPPLEGHVRQGVFSSLNHIVEKRVLAHLAPLFDNPKLDKELRAMLREKFPEFCSSPSPPVEVKIEEPVSMEMDNHMSDKDESCYDNAEAAFSDDEEDLNSKGKKREFRFHPIKETVVEEPVDITPYLDQLDESLRDKVLQLQKGSDTEAQCEVMQEIVDQVLEEDFDSEQLSVLASCLQELFKAHFRGEVLPEEITEESLEESVGKPLYLIFRNLCQMQEDNSSFSLLLDLLSELYQKQPKIGYHLLYYLRASKAAAGKMNLYESFAQATQLGDLHTCLMMDMKACQEDDVRLLCHLTPSIYTEFPDETLRSGELLNMIVAVIDSAQLQELVCHVMMGNLVMFRKDSVLNILIQSLDWETFEQYCAWQLFLAHNIPLETIIPILQHLKYKEHPEALSCLLLQLRREKPSEEMVKMVLSRPCHPDDQFTTSILRHWCMKHDELLAEHIKSLLIKNNSLPRKRQSLRSSSSKLAQLTLEQILEHLDNLRLNLTNTKQNCMPSTLGVQCRRCCPGPDYAWSQAGGRGRTPGATTHTRDKTTCACCLISSQTSDCFSFPALPFLPLVFSQTPILQALQHVQASCDEAHKMKFSDLFSLAEEYEDSSTKPPKSRRKAALSSPRSRKNATQPPNAEEESGSSSASEEEDTKPKPTKRKRKGSSAVGSDSD

SEQ ID NO: 40672 - protein, 1042 aa, Homo sapiens; identical to SEQ ID NO: 40668
  Payload ID: 8280
  Gene Symbol: INTS3
  Gene Name: integrator complex subunit 3
  Uniprot ID: Q68E01
  ENSP ID: ENSP00000458631

SEQ ID NO: 40673 - protein, 49 aa, Homo sapiens; identical to SEQ ID NO: 40670
  Payload ID: 8280
  Gene Symbol: INTS3
  Gene Name: integrator complex subunit 3
  ENSP ID: ENSP00000459285
  MOD_RES (1)..(1): Any amino acid

SEQ ID NO: 40674 - protein, 902 aa, Homo sapiens; identical to SEQ ID NO: 40671
  Payload ID: 8280
  Gene Symbol: INTS3
  Gene Name: integrator complex subunit 3
  Uniprot ID: Q68E01
  ENSP ID: ENSP00000459907

SEQ ID NO: 40675 - protein, 1042 aa, Homo sapiens; identical to SEQ ID NO: 40668
  Payload ID: 8280
  Gene Symbol: INTS3
  Gene Name: integrator complex subunit 3
  Uniprot ID: Q68E01
  ENSP ID: ENSP00000460221

SEQ ID NO: 40676 - protein, 41 aa, Homo sapiens
  Payload ID: 8280
  Gene Symbol: INTS3
  Gene Name: integrator complex subunit 3
  ENSP ID: ENSP00000485252
TQPPNAEEESGSSSASEEEDTKPKPTKRKRKGSSAVGSDSD

SEQ ID NO: 40677 - protein, 280 aa, Homo sapiens
  Payload ID: 8280
  Gene Symbol: INTS3
  Gene Name: integrator complex subunit 3
  ENSP ID: ENSP00000485263
VYTYLRLIVDHHGTAQLQALRQKEVDFCISLLRERFMECLMIGRDLVRLLQNVARIPEFELLWKDIIHNPQALSPQFTGILQLLQSRTSRKFLACRLTPDMETKLLFMTSRVRFGQQKRYQDWFQRQYLSTPDSQSLRCDLIRYICGVVHPSNEVLSSDILPRWAIIGWLLTTCTSNVAASNAKLALFYDWLFFSPDKDSIMNIEPAILVMHHSMKPHPAITATLLDFMCRIIPNFYPPLEGHVRQGVFSSLNHIVEKRVLACKKYWLYLRLLGICLLGS

SEQ ID NO: 40678 - protein, 280 aa, Homo sapiens; identical to SEQ ID NO: 40677
  Payload ID: 8280
  Gene Symbol: INTS3
  Gene Name: integrator complex subunit 3
  ENSP ID: ENSP00000485412

SEQ ID NO: 40679 - protein, 41 aa, Homo sapiens; identical to SEQ ID NO: 40676
  Payload ID: 8280
  Gene Symbol: INTS3
  Gene Name: integrator complex subunit 3
  ENSP ID: ENSP00000485502

SEQ ID NO: 40680 - protein, 132 aa, Homo sapiens
  Payload ID: 8281
  Gene Symbol: INTS4
  Gene Name: integrator complex subunit 4
  ENSP ID: ENSP00000407787
MAAHLKKRVYEEFTKVVQPQEEIATKKLRLTKPSKSAALHIDLCKATSPADALQYLLQFARKPVEAESVEGVVRILLEHYYKENDPSVRLKIASLLGLLSKTAGFSPDCIMDDAINILQNETSDRYVSWCKK

SEQ ID NO: 40681 - protein, 96 aa, Homo sapiens
  Payload ID: 8281
  Gene Symbol: INTS4
  Gene Name: integrator complex subunit 4
  ENSP ID: ENSP00000432776
MAAHLKKRVYEEFTKVVQPQEEIATKKLRLTKPSKSAALHIDLCKATSPADALQYLLQFARKPVEAESVEGVVRILLEHYYKRWSLSVLPRLVANS

SEQ ID NO: 40682 - protein, 505 aa, Homo sapiens
  Payload ID: 8281
  Gene Symbol: INTS4
  Gene Name: integrator complex subunit 4
  Uniprot ID: Q96HW7
  ENSP ID: ENSP00000433644
MAAHLKKRVYEEFTKVVQPQEEIATKKLRLTKPSKSAALHIDLCKATSPADALQYLLQFARKPVEAESVEGVVRILLEHYYKENDPSVRLKIASLLGLLSKTAGFSPDCIMDDAINILQNEKSHQVLAQLLDTLLAIGTKLPENQAIQMRLVDVACKHLTDTSHGVRNKCLQLLGNLGSLEKSVTKDAEGLAARDVQKIIGDYFSDQDPRVRTAAIKAMLQLHERGLKLHQTIYNQACKLLSDDYEQVRSAAVQLIWVVSQLYPESIVPIPSSNEEIRLVDDAFGKICHMVSDGSWVVRVQAAKLLGSMEQVSSHFLEQTLDKKLMSDLRRKRTAHERAKELYSSGEFSSGRKWGDDAPKEEVDTGAVNLIESGACGAFVHGLEDEMYEVRIAAVEALCMLAQSSPSFAEKCLDFLVDMFNDEIEEVRLQSIHTMRKISNNITLREDQLDTVLAVLEDSSRDIREALHELLCCTNVSTKEGIHLALVELLKNLTKYPTDRDSIWK

SEQ ID NO: 40683 - protein, 963 aa, Homo sapiens
  Payload ID: 8281
  Gene Symbol: INTS4
  Gene Name: integrator complex subunit 4
  Uniprot ID: Q96HW7
  ENSP ID: ENSP00000434466
MAAHLKKRVYEEFTKVVQPQEEIATKKLRLTKPSKSAALHIDLCKATSPADALQYLLQFARKPVEAESVEGVVRILLEHYYKENDPSVRLKIASLLGLLSKTAGFSPDCIMDDAINILQNEKSHQVLAQLLDTLLAIGTKLPENQAIQMRLVDVACKHLTDTSHGVRNKCLQLLGNLGSLEKSVTKDAEGLAARDVQKIIGDYFSDQDPRVRTAAIKAMLQLHERGLKLHQTIYNQACKLLSDDYEQVRSAAVQLIWVVSQLYPESIVPIPSSNEEIRLVDDAFGKICHMVSDGSWVVRVQAAKLLGSMEQVSSHFLEQTLDKKLMSDLRRKRTAHERAKELYSSGEFSSGRKWGDDAPKEEVDTGAVNLIESGACGAFVHGLEDEMYEVRIAAVEALCMLAQSSPSFAEKCLDFLVDMFNDEIEEVRLQSIHTMRKISNNITLREDQLDTVLAVLEDSSRDIREALHELLCCTNVSTKEGIHLALVELLKNLTKYPTDRDSIWKCLKFLGSRHPTLVLPLVPELLSTHPFFDTAEPDMDDPAYIAVLVLIFNAAKTCPTMPALFSDHTFRHYAYLRDSLSHLVPALRLPGRKLVSSAVSPSIIPQEDPSQQFLQQSLERVYSLQHLDPQGAQELLEFTIRDLQRLGELQSELAGVADFSATYLRCQLLLIKALQEKLWNVAAPLYLKQSDLASAAAKQIMEETYKMEFMYSGVENKQVVIIHHMRLQAKALQLIVTARTTRGLDPLFGMCEKFLQEVDFFQRYFIADLPHLQDSFVDKLLDLMPRLMTSKPAEVVKILQTMLRQSAFLHLPLPEQIHKASATIIEPAGESDNPLRFTSGLVVALDVDATLEHVQDPQNTVKVQVLYPDGQAQMIHPKPADFRNPGPGRHRLITQVYLSHTAWTEACQVEVRLLLAYNSSARIPKCPWMEGGEMSPQVETSIEGTIPFSKPVKVYIMPKPARR

SEQ ID NO: 40684 - protein, 96 aa, Homo sapiens; identical to SEQ ID NO: 40681
  Payload ID: 8281
  Gene Symbol: INTS4
  Gene Name: integrator complex subunit 4
  ENSP ID: ENSP00000435758

SEQ ID NO: 40685 - protein, 96 aa, Homo sapiens; identical to SEQ ID NO: 40681
  Payload ID: 8281
  Gene Symbol: INTS4
  Gene Name: integrator complex subunit 4
  ENSP ID: ENSP00000436248

SEQ ID NO: 40686 - protein, 338 aa, Homo sapiens
  Payload ID: 8281
  Gene Symbol: INTS4
  Gene Name: integrator complex subunit 4
  Uniprot ID: Q96HW7
  ENSP ID: ENSP00000441084
MPALKQTASQVTQTLRDLQRLGELQSELAGVADFSATYLRCQLLLIKALQEKLWNVAAPLYLKQSDLASAAAKQIMEETYKMEFMYSGVENKQVVIIHHMRLQAKALQLIVTARTTRGLDPLFGMCEKFLQEVDFFQRYFIADLPHLQDSFVDKLLDLMPRLMTSKPAEVVKILQTMLRQSAFLHLPLPEQIHKASATIIEPAGESDNPLRFTSGLVVALDVDATLEHVQDPQNTVKVQVLYPDGQAQMIHPKPADFRNPGPGRHRLITQVYLSHTAWTEACQVEVRLLLAYNSSARIPKCPWMEGGEMSPQVETSIEGTIPFSKPVKVYIMPKPARR

SEQ ID NO: 40687 - protein, 1019 aa, Homo sapiens
  Payload ID: 8282
  Gene Symbol: INTS5
  Gene Name: integrator complex subunit 5
  Uniprot ID: Q6P9B9
  ENSP ID: ENSP00000327889
MSALCDPPGAPGPPGPAPATHGPAPLSAQELSQEIKAFLTGVDPILGHQLSAREHARCGLLLLRSLPPARAAVLDHLRGVFDESVRAHLAALDETPVAGPPHLRPPPPSHVPAGGPGLEDVVQEVQQVLSEFIRANPKAWAPVISAWSIDLMGQLSSTYSGQHQRVPHATGALNELLQLWMGCRATRTLMDIYVQCLSALIGSCPDACVDALLDTSVQHSPHFDWVVAHIGSSFPGTIISRVLSCGLKDFCVHGGAGGGAGSSGGSSSQTPSTDPFPGSPAIPAEKRVPKIASVVGILGHLASRHGDSIRRELLRMFHDSLAGGSGGRSGDPSLQATVPFLLQLAVMSPALLGTVSGELVDCLKPPAVLSQLQQHLQGFPREELDNMLNLAVHLVSQASGAGAYRLLQFLVDTAMPASVITTQGLAVPDTVREACDRLIQLLLLHLQKLVHHRGGSPGEGVLGPPPPPRLVPFLDALKNHVGELCGETLRLERKRFLWQHQLLGLLSVYTRPSCGPEALGHLLSRARSPEELSLATQLYAGLVVSLSGLLPLAFRSCLARVHAGTLQPPFTARFLRNLALLVGWEQQGGEGPAALGAHFGESASAHLSDLAPLLLHPEEEVAEAAASLLAICPFPSEALSPSQLLGLVRAGVHRFFASLRLHGPPGVASACQLLTRLSQTSPAGLKAVLQLLVEGALHRGNTELFGGQVDGDNETLSVVSASLASASLLDTNRRHTAAVPGPGGIWSVFHAGVIGRGLKPPKFVQSRNQQEVIYNTQSLLSLLVHCCSAPGGTECGECWGAPILSPEAAKAVAVTLVESVCPDAAGAELAWPPEEHARATVERDLRIGRRFREQPLLFELLKLVAAAPPALCYCSVLLRGLLAALLGHWEASRHPDTTHSPWHLEASCTLVAVMAEGSLLPPALGNMHEVFSQLAPFEVRLLLLSVWGFLREHGPLPQKFIFQSERGRFIRDFSREGGGEGGPHLAVLHSVLHRNIDRLGLFSGRFQAPSPSTLLRQGT

SEQ ID NO: 40688 - protein, 887 aa, Homo sapiens
  Payload ID: 8283
  Gene Symbol: INTS6
  Gene Name: integrator complex subunit 6
  Uniprot ID: Q9UL03
  ENSP ID: ENSP00000310260
MPILLFLIDTSASMNQRSHLGTTYLDTAKGAVETFMKLRARDPASRGDRYMLVTFEEPPYAIKAGWKENHATFMNELKNLQAEGLTTLGQSLRTAFDLLNLNRLVTGIDNYGQGRNPFFLEPAIIITITDGSKLTTTSGVQDELHLPLNSPLPGSELTKEPFRWDQRLFALVLRLPGTMSVESEQLTGVPLDDSAITPMCEVTGGRSYSVCSPRMLNQCLESLVQKVQSGVVINFEKAGPDPSPVEDGQPDISRPFGSQPWHSCHKLIYVRPNPKTGVPIGHWPVPESFWPDQNSPTLPPRTSHPVVKFSCTDCEPMVIDKLPFDKYELEPSPLTQFILERKSPQTCWQVYVSNSAKYSELGHPFGYLKASTALNCVNLFVMPYNYPVLLPLLDDLFKVHKAKPTLKWRQSFESYLKTMPPYYLGPLKKAVRMMGAPNLIADSMEYGLSYSVISYLKKLSQQAKIESDRVIGSVGKKVVQETGIKVRSRSHGLSMAYRKDFQQLLQGISEDVPHRLLDLNMKEYTGFQVALLNKDLKPQTFRNAYDIPRRNLLDHLTRMRSNLLKSTRRFLKGQDEDQVHSVPIAQMGNYQEYLKQVPSPLRELDPDQPRRLHTFGNPFKLDKKGMMIDEADEFVAGPQNKHKRPGEPNMQGIPKRRRCMSPLLRGRQQNPVVNNHIGGKGPPAPTTQAQPDLIKPLPLHKISETTNDSIIHDVVENHVADQLSSDITPNAMDTEFSASSPASLLERPTNHMEALGHDHLGTNDLTVGGFLENHEEPRDKEQCAEENIPASSLNKGKKLMHCRSHEEVNTELKAQIMKEIRKPGRKYERIFTLLKHVQGSLQTRLIFLQNVIKEASRFKKRMLIEQLENFLDEIHRRANQINHINSN

SEQ ID NO: 40689 - protein, 874 aa, Homo sapiens
  Payload ID: 8283
  Gene Symbol: INTS6
  Gene Name: integrator complex subunit 6
  Uniprot ID: Q9UL03
  ENSP ID: ENSP00000381187
MNQRSHLGTTYLDTAKGAVETFMKLRARDPASRGDRYMLVTFEEPPYAIKAGWKENHATFMNELKNLQAEGLTTLGQSLRTAFDLLNLNRLVTGIDNYGQGRNPFFLEPAIIITITDGSKLTTTSGVQDELHLPLNSPLPGSELTKEPFRWDQRLFALVLRLPGTMSVESEQLTGVPLDDSAITPMCEVTGGRSYSVCSPRMLNQCLESLVQKVQSGVVINFEKAGPDPSPVEDGQPDISRPFGSQPWHSCHKLIYVRPNPKTGVPIGHWPVPESFWPDQNSPTLPPRTSHPVVKFSCTDCEPMVIDKLPFDKYELEPSPLTQFILERKSPQTCWQVYVSNSAKYSELGHPFGYLKASTALNCVNLFVMPYNYPVLLPLLDDLFKVHKAKPTLKWRQSFESYLKTMPPYYLGPLKKAVRMMGAPNLIADSMEYGLSYSVISYLKKLSQQAKIESDRVIGSVGKKVVQETGIKVRSRSHGLSMAYRKDFQQLLQGISEDVPHRLLDLNMKEYTGFQVALLNKDLKPQTFRNAYDIPRRNLLDHLTRMRSNLLKSTRRFLKGQDEDQVHSVPIAQMGNYQEYLKQVPSPLRELDPDQPRRLHTFGNPFKLDKKGMMIDEADEFVAGPQNKHKRPGEPNMQGIPKRRRCMSPLLRGRQQNPVVNNHIGGKGPPAPTTQAQPDLIKPLPLHKISETTNDSIIHDVVENHVADQLSSDITPNAMDTEFSASSPASLLERPTNHMEALGHDHLGTNDLTVGGFLENHEEPRDKEQCAEENIPASSLNKGKKLMHCRSHEEVNTELKAQIMKEIRKPGRKYERIFTLLKHVQGSLQTRLIFLQNVIKEASRFKKRMLIEQLENFLDEIHRRANQINHINSN

SEQ ID NO: 40690 - protein, 115 aa, Homo sapiens
  Payload ID: 8283
  Gene Symbol: INTS6
  Gene Name: integrator complex subunit 6
  Uniprot ID: Q9UL03
  ENSP ID: ENSP00000411245
MPILLFLIDTSASMNQRSHLGTTYLDTAKGAVETFMKLRARDPASRGDRYMLVTFEEPPYAIKAGWKENHATFMNELKNLQAEGLTTLGQSLRTAFDLLNLNRLVTGIDNYGQVG

SEQ ID NO: 40691 - protein, 151 aa, Homo sapiens
  Payload ID: 8283
  Gene Symbol: INTS6
  Gene Name: integrator complex subunit 6
  ENSP ID: ENSP00000417442
MPILLFLIDTSASMNQRSHLGTTYLDTAKGAVETFMKLRARDPASRGDRYMLVTFEEPPYAIKAGWKENHATFMNELKNLQAEGLTTLGQSLRTAFDLLNLNRLVTGIDNYGQGRNPFFLEPAIIITITDGSKLTTTSGVQDEVLGTHRWN

SEQ ID NO: 40692 - protein, 126 aa, Homo sapiens
  Payload ID: 8283
  Gene Symbol: INTS6
  Gene Name: integrator complex subunit 6
  ENSP ID: ENSP00000417707
MNQRSHLGTTYLDTAKGAVETFMKLRARDPASRGDRYMLVTFEEPPYAIKAGWKENHATFMNELKNLQAEGLTTLGQSLRTAFDLLNLNRLVTGIDNYGQGRNPFFLEPAIIITITDGSKLTTTSG

SEQ ID NO: 40693 - protein, 154 aa, Homo sapiens
  Payload ID: 8283
  Gene Symbol: INTS6
  Gene Name: integrator complex subunit 6
  ENSP ID: ENSP00000418026
MEDEGKISRITARFLEQPPRTSHPVVKFSCTDCEPMVIDKLPFDKYELEPSPLTQFILERKSPQTCWQVYVSNSAKYSELGHPFGYLKASTALNCVNLFVMPYNYPVLLPLLDDLFKVHKAKPTLKWRQSFESYLKTMPPYYLGPLKKAVRMMG

SEQ ID NO: 40694 - protein, 89 aa, Homo sapiens
  Payload ID: 8283
  Gene Symbol: INTS6
  Gene Name: integrator complex subunit 6
  ENSP ID: ENSP00000419144
MNELKNLQAEGLTTLGQSLRTAFDLLNLNRLVTGIDNYGQGRNPFFLEPAIIITITDGSKLTTTSGVQDEVSCAYITWIMQMQLNNPLF

SEQ ID NO: 40695 - protein, 131 aa, Homo sapiens
  Payload ID: 8283
  Gene Symbol: INTS6
  Gene Name: integrator complex subunit 6
  ENSP ID: ENSP00000419287
MNELKNLQAEGLTTLGQSLRTAFDLLNLNRLVTGIDNYGQGRNPFFLEPAIIITITDGSKLTTTSGVQDELHLPLNSPLPGSELTKEPFRWDQRLFALVLRLPGTMSVESEQLTGVPLDDSAITPMCEVTG

SEQ ID NO: 40696 - protein, 130 aa, Homo sapiens
  Payload ID: 8283
  Gene Symbol: INTS6
  Gene Name: integrator complex subunit 6
  ENSP ID: ENSP00000419569
MNQRSHLGTTYLDTAKGAVETFMKLRARDPASRGDRYMLVTFEEPPYAIKAGWKENHATFMNELKNLQAEGLTTLGQSLRTAFDLLNLNRLVTGIDNYGQGRNPFFLEPAIIITITDGSKLTTTSGVQDE

SEQ ID NO: 40697 - protein, 709 aa, Homo sapiens
  Payload ID: 8283
  Gene Symbol: INTS6
  Gene Name: integrator complex subunit 6
  ENSP ID: ENSP00000419871
MSVESEQLTGVPLDDSAITPMCEVTGGRSYSVCSPRMLNQCLESLVQKVQSGVVINFEKAGPDPSPVEDGQPDISRPFGSQPWHSCHKLIYVRPNPKTGVPIGHWPVPESFWPDQNSPTLPPRTSHPVVKFSCTDCEPMVIDKLPFDKYELEPSPLTQFILERKSPQTCWQVYVSNSAKYSELGHPFGYLKASTALNCVNLFVMPYNYPVLLPLLDDLFKVHKAKPTLKWRQSFESYLKTMPPYYLGPLKKAVRMMGAPNLIADSMEYGLSYSVISYLKKLSQQAKIESDRVIGSVGKKVVQETGIKVRSRSHGLSMAYRKDFQQLLQGISEDVPHRLLDLNMKEYTGFQVALLNKDLKPQTFRNAYDIPRRNLLDHLTRMRSNLLKSTRRFLKGQDEDQVHSVPIAQMGNYQEYLKQVPSPLRELDPDQPRRLHTFGNPFKLDKKGMMIDEADEFVAGPQNKHKRPGEPNMQGIPKRRRCMSPLLRGRQQNPVVNNHIGGKGPPAPTTQAQPDLIKPLPLHKISETTNDSIIHDVVENHVADQLSSDITPNAMDTEFSASSPASLLERPTNHMEALGHDHLGTNDLTVGGFLENHEEPRDKEQCAEENIPASSLNKGKKLMHCRSHEEVNTELKAQIMKEIRKPGRKYERIFTLLKHVQGSLQTRLIFLQNVIKEASRFKKRMLIEQLENFLDEIHRRANQINHINSN

SEQ ID NO: 40698 - protein, 571 aa, Homo sapiens
  Payload ID: 8283
  Gene Symbol: INTS6
  Gene Name: integrator complex subunit 6
  ENSP ID: ENSP00000419984
MVIDKLPFDKYELEPSPLTQFILERKSPQTCWQVYVSNSAKYSELGHPFGYLKASTALNCVNLFVMPYNYPVLLPLLDDLFKVHKAKPTLKWRQSFESYLKTMPPYYLGPLKKAVRMMGAPNLIADSMEYGLSYSVISYLKKLSQQAKIESDRVIGSVGKKVVQETGIKVRSRSHGLSMAYRKDFQQLLQGISEDVPHRLLDLNMKEYTGFQVALLNKDLKPQTFRNAYDIPRRNLLDHLTRMRSNLLKSTRRFLKGQDEDQVHSVPIAQMGNYQEYLKQVPSPLRELDPDQPRRLHTFGNPFKLDKKGMMIDEADEFVAGPQNKHKRPGEPNMQGIPKRRRCMSPLLRGRQQNPVVNNHIGGKGPPAPTTQAQPDLIKPLPLHKISETTNDSIIHDVVENHVADQLSSDITPNAMDTEFSASSPASLLERPTNHMEALGHDHLGTNDLTVGGFLENHEEPRDKEQCAEENIPASSLNKGKKLMHCRSHEEVNTELKAQIMKEIRKPGRKYERIFTLLKHVQGSLQTRLIFLQNVIKEASRFKKRMLIEQLENFLDEIHRRANQINHINSN

SEQ ID NO: 40699 - protein, 942 aa, Homo sapiens
  Payload ID: 8284
  Gene Symbol: INTS7
  Gene Name: integrator complex subunit 7
  Uniprot ID: Q9NVH2
  ENSP ID: ENSP00000355959
MASNSTKSFLADAGYGEQELDANSALMELDKGLRSGKLGEQCEAVVRFPRLFQKYPFPILINSAFLKLADVFRVGNNFLRLCVLKVTQQSEKHLEKILNVDEFVKRIFSVIHSNDPVARAITLRMLGSLASIIPERKNAHHSIRQSLDSHDNVEVEAAVFAAANFSAQSKDFAVGICNKISEMIQGLATPVDLKLKLIPILQHMHHDAILASSARQLLQQLVTSYPSTKMVIVSLHTFTLLAASSLVDTPKQIQLLLQYLKNDPRKAVKRLAIQDLKLLANKTPHTWSRENIQALCECALQTPYDSLKLGMLSVLSTLSGTIAIKHYFSIVPGNVSSSPRSSDLVKLAQECCYHNNRGIAAHGVRVLTNITVSCQEKDLLALEQDAVFGLESLLVLCSQDDSPGAQATLKIALNCMVKLAKGRPHLSQSVVETLLTQLHSAQDAARILMCHCLAAIAMQLPVLGDGMLGDLMELYKVIGRSATDKQQELLVSLATVIFVASQKALSVESKAVIKQQLESVSNGWTVYRIARQASRMGNHDMAKELYQSLLTQVASEHFYFWLNSLKEFSHAEQCLTGLQEENYSSALSCIAESLKFYHKGIASLTAASTPLNPLSFQCEFVKLRIDLLQAFSQLICTCNSLKTSPPPAIATTIAMTLGNDLQRCGRISNQMKQSMEEFRSLASRYGDLYQASFDADSATLRNVELQQQSCLLISHAIEALILDPESASFQEYGSTGTAHADSEYERRMMSVYNHVLEEVESLNRKYTPVSYMRYFFQKLQSTSIKLALSPSPRNPAEPIAVQNNQQLALKVEGVVQHGSKPGLFRKIQSVCLNVSSTLQSKSGQDYKIPIDNMTNEMEQRVEPHNDYFSTQFLLNFAILGTHNITVESSVKDANGIVWKTGPRTTIFVKSLEDPYSQQIRLQQQQAQQPLQQQQQRNAYTRF

SEQ ID NO: 40700 - protein, 948 aa, Homo sapiens
  Payload ID: 8284
  Gene Symbol: INTS7
  Gene Name: integrator complex subunit 7
  Uniprot ID: Q9NVH2
  ENSP ID: ENSP00000355960
MASNSTKSFLADAGYGEQELDANSALMELDKGLRSGKLGEQCEAVVRFPRLFQKYPFPILINSAFLKLADVFRVGNNFLRLCVLKVTQQSEKHLEKILNVDEFVKRIFSVIHSNDPVARAITLRMLGSLASIIPERKNAHHSIRQSLDSHDNVEVEAAVFAAANFSAQSKDFAVGICNKISEMIQGLATPVDLKLKLIPILQHMHHDAILASSARQLLQQLVTSYPSTKMVIVSLHTFTLLAASSLVDTPKQIQLLLQYLKNDPRKAVKRLAIQDLKLLANKTPHTWSRENIQALCECALQTPYDSLKLGMLSVLSTLSGTIAIKHYFSIVPGNVSSSPRSSDLVKLAQECCYHNNRGIAAHGVRVLTNITVSCQEKDLLALEQDAVFGLESLLVLCSQDDSPGAQATLKIALNCMVKLAKGRPHLSQSVVETLLTQLHSAQDAARILMCHCLAAIAMQLPVLGDGMLGDLMELYKVIGRSATDKQQELLVSLATVIFVASQKALSVESKAVIKQQLESVSNGWTVYRIARQASRMGNHDMAKELYQSLLTQVASEHFYFWLNSLKEFSHAEQCLTGLQEENYSSALSCIAESLKFYHKGIASLTAASTPLNPLSFQCEFVKLRIDLLQAFSQLICTCNSLKTSPPPAIATTIAMTLGNDLQRCGRISNQMKQSMEEFRSLASRYGDLYQASFDADSATLRNVELQQQSCLLISHAIEALILDPESASFQEYGSTGTAHADSEYERRMMSVYNHVLEEHTACLCNAIIALLKVPLSFQRYFFQKLQSTSIKLALSPSPRNPAEPIAVQNNQQLALKVEGVVQHGSKPGLFRKIQSVCLNVSSTLQSKSGQDYKIPIDNMTNEMEQRVEPHNDYFSTQFLLNFAILGTHNITVESSVKDANGIVWKTGPRTTIFVKSLEDPYSQQIRLQQQQAQQPLQQQQQRNAYTRF

SEQ ID NO: 40701 - protein, 962 aa, Homo sapiens
  Payload ID: 8284
  Gene Symbol: INTS7
  Gene Name: integrator complex subunit 7
  Uniprot ID: Q9NVH2
  ENSP ID: ENSP00000355961
MASNSTKSFLADAGYGEQELDANSALMELDKGLRSGKLGEQCEAVVRFPRLFQKYPFPILINSAFLKLADVFRVGNNFLRLCVLKVTQQSEKHLEKILNVDEFVKRIFSVIHSNDPVARAITLRMLGSLASIIPERKNAHHSIRQSLDSHDNVEVEAAVFAAANFSAQSKDFAVGICNKISEMIQGLATPVDLKLKLIPILQHMHHDAILASSARQLLQQLVTSYPSTKMVIVSLHTFTLLAASSLVDTPKQIQLLLQYLKNDPRKAVKRLAIQDLKLLANKTPHTWSRENIQALCECALQTPYDSLKLGMLSVLSTLSGTIAIKHYFSIVPGNVSSSPRSSDLVKLAQECCYHNNRGIAAHGVRVLTNITVSCQEKDLLALEQDAVFGLESLLVLCSQDDSPGAQATLKIALNCMVKLAKGRPHLSQSVVETLLTQLHSAQDAARILMCHCLAAIAMQLPVLGDGMLGDLMELYKVIGRSATDKQQELLVSLATVIFVASQKALSVESKAVIKQQLESVSNGWTVYRIARQASRMGNHDMAKELYQSLLTQVASEHFYFWLNSLKEFSHAEQCLTGLQEENYSSALSCIAESLKFYHKGIASLTAASTPLNPLSFQCEFVKLRIDLLQAFSQLICTCNSLKTSPPPAIATTIAMTLGNDLQRCGRISNQMKQSMEEFRSLASRYGDLYQASFDADSATLRNVELQQQSCLLISHAIEALILDPESASFQEYGSTGTAHADSEYERRMMSVYNHVLEEVESLNRKYTPVSYMHTACLCNAIIALLKVPLSFQRYFFQKLQSTSIKLALSPSPRNPAEPIAVQNNQQLALKVEGVVQHGSKPGLFRKIQSVCLNVSSTLQSKSGQDYKIPIDNMTNEMEQRVEPHNDYFSTQFLLNFAILGTHNITVESSVKDANGIVWKTGPRTTIFVKSLEDPYSQQIRLQQQQAQQPLQQQQQRNAYTRF

SEQ ID NO: 40702 - protein, 913 aa, Homo sapiens
  Payload ID: 8284
  Gene Symbol: INTS7
  Gene Name: integrator complex subunit 7
  Uniprot ID: Q9NVH2
  ENSP ID: ENSP00000388908
MASNSTKSFLADAGYGEQELDANSALMELDKGLRSGKLGEQCEAVVRFPRLFQKYPFPILINSAFLKLADVFRVGMLGSLASIIPERKNAHHSIRQSLDSHDNVEVEAAVFAAANFSAQSKDFAVGICNKISEMIQGLATPVDLKLKLIPILQHMHHDAILASSARQLLQQLVTSYPSTKMVIVSLHTFTLLAASSLVDTPKQIQLLLQYLKNDPRKAVKRLAIQDLKLLANKTPHTWSRENIQALCECALQTPYDSLKLGMLSVLSTLSGTIAIKHYFSIVPGNVSSSPRSSDLVKLAQECCYHNNRGIAAHGVRVLTNITVSCQEKDLLALEQDAVFGLESLLVLCSQDDSPGAQATLKIALNCMVKLAKGRPHLSQSVVETLLTQLHSAQDAARILMCHCLAAIAMQLPVLGDGMLGDLMELYKVIGRSATDKQQELLVSLATVIFVASQKALSVESKAVIKQQLESVSNGWTVYRIARQASRMGNHDMAKELYQSLLTQVASEHFYFWLNSLKEFSHAEQCLTGLQEENYSSALSCIAESLKFYHKGIASLTAASTPLNPLSFQCEFVKLRIDLLQAFSQLICTCNSLKTSPPPAIATTIAMTLGNDLQRCGRISNQMKQSMEEFRSLASRYGDLYQASFDADSATLRNVELQQQSCLLISHAIEALILDPESASFQEYGSTGTAHADSEYERRMMSVYNHVLEEVESLNRKYTPVSYMHTACLCNAIIALLKVPLSFQRYFFQKLQSTSIKLALSPSPRNPAEPIAVQNNQQLALKVEGVVQHGSKPGLFRKIQSVCLNVSSTLQSKSGQDYKIPIDNMTNEMEQRVEPHNDYFSTQFLLNFAILGTHNITVESSVKDANGIVWKTGPRTTIFVKSLEDPYSQQIRLQQQQAQQPLQQQQQRNAYTRF

SEQ ID NO: 40703 - protein, 152 aa, Homo sapiens
  Payload ID: 8284
  Gene Symbol: INTS7
  Gene Name: integrator complex subunit 7
  ENSP ID: ENSP00000481102
AIEALILDPESASFQEYGSTGTAHADSEYERRMMSVYNHVLEEVESLNRKYTPVSYMIPIDNMTNEMEQRVEPHNDYFSTQFLLNFAILGTHNITVESSVKDANGIVWKTGPRTTIFVKSLEDPYSQQIRLQQQQAQQPLQQQQQRNAYTRF

SEQ ID NO: 40704 - protein, 87 aa, Homo sapiens
  Payload ID: 8284
  Gene Symbol: INTS7
  Gene Name: integrator complex subunit 7
  ENSP ID: ENSP00000481687
MASNSTKSFLADAGYGEQELDANSALMELDKGLRSGKLGEQCEAVVRFPRLFQKYPFPILINSAFLKLADVFRVGMRCMSVKYLKHK

SEQ ID NO: 40705 - protein, 114 aa, Homo sapiens
  Payload ID: 8284
  Gene Symbol: INTS7
  Gene Name: integrator complex subunit 7
  ENSP ID: ENSP00000483346
  MOD_RES (1)..(1): Any amino acid
XVIKQQLESVSNGWTVYRIARQASRMGNHDMAKELYQSLLTQVASEHFYFWLNSLKEFSHAEQCLTGLQEENYSSALSCIAESLKFYHKGIASLTPEDKPTTCNCHNNCHDLRK

SEQ ID NO: 40706 - protein, 42 aa, Homo sapiens
  Payload ID: 8284
  Gene Symbol: INTS7
  Gene Name: integrator complex subunit 7
  ENSP ID: ENSP00000484371
MASNSTKSFLADAGYGEQELDANSALMELDKDGVTSPVFQNT

SEQ ID NO: 40707 - protein, 758 aa, Homo sapiens
  Payload ID: 8285
  Gene Symbol: INTS8
  Gene Name: integrator complex subunit 8
  ENSP ID: ENSP00000343274
MSAEAADREAATSSRPCTPPQTCWFEFLLEESLLEKHLRKPCPDPAPVQLIVQFLEQASKPSVNEQNQVQPPPDNKRNRILKLLALKVAAHLKWDLDILEKSLSVPVLNMLLNELLCISKVPPGTKHVDMDLATLPPTTAMAVLLYNRWAIRTIVQSSFPVKQAKPGPPQLSVMNQMQQEKELTENILKVLKEQAADSILVLEAALKLNKDLYVHTMRTLDLLAMEPGMVNGETESSTAGLKVKTEEMQCQVCYDLGAAYFQQGSTNSAVYENAREKFFRTKELIAEIGSLSLHCTIDEKRLAGYCQACDVLVPSSDSTSQQLTPYSQVHICLRSGNYQEVIQIFIEDNLTLSLPVQFRQSVLRELFKKAQQGNEALDEICFKVCACNTVRDILEGRTISVQFNQLFLRPNKEKIDFLLEVCSRSVNLEKASESLKGNMAAFLKNVCLGLEDLQYVFMISSHELFITLLKDEERKLLVDQMRKRSPRVNLCIKPVTSFYDIPASASVNIGQLEHQLILSVDPWRIRQILIELHGMTSERQFWTVSNKWEVPSVYSGVILGIKDNLTRDLVYILMAKGLHCSTVKDFSHAKQLFAACLELVTEFSPKLRQVMLNEMLLLDIHTHEAGTGQAGERPPSDLISRVRGYLEMRLPDIPLRQVIAEECVAFMLNWRENEYLTLQVPAFLLQSNPYVKLGQLLAATCKELPGPKESRRTAKDLWEVVVQICSVSSQHKRGNDGRVSLIKQRESTLGIMYRYVLE

SEQ ID NO: 40708 - protein, 291 aa, Homo sapiens
  Payload ID: 8285
  Gene Symbol: INTS8
  Gene Name: integrator complex subunit 8
  ENSP ID: ENSP00000427840
MSAEAADREAATSSRPCTPPQTCWFEFLLEESLLEKHLRKPCPDPAPVQLIVQFLEQASKPSVNEQNQVQPPPDNKRNRILKLLALKVAAHLKWDLDILEKSLSVPVLNMLLNELLCISKVPPGTKHVDMDLATLPPTTAMAVLLYNRWAIRTIVQSSFPVKQAKPGPPQLSVMNQMQQEKELTENILKVLKEQAADSILVLEAALKLNKDLYVHTMRTLDLLAMEPGMVNGETESSTAGLKVKTEEMQCQVCYDLGAAYFQQGSTNSAVYENAREKFFRTKELIAEMRSG

SEQ ID NO: 40709 - protein, 146 aa, Homo sapiens
  Payload ID: 8285
  Gene Symbol: INTS8
  Gene Name: integrator complex subunit 8
  ENSP ID: ENSP00000428260
MSAEAADREAATSSRPCTPPQTCWFEFLLEESLLEKHLRKPCPDPAPVQLIVQFLEQASKPSVNEQNQVQPPPDNKRNRILKLLALKVAAHLKWDLDILEKRAIRTIVQSSFPVKQAKPGPPQLSVMNQMQQEKELTENILKVLKE

SEQ ID NO: 40710 - protein, 94 aa, Homo sapiens
  Payload ID: 8285
  Gene Symbol: INTS8
  Gene Name: integrator complex subunit 8
  ENSP ID: ENSP00000429056
MLLNELLCISKVPPGTKHVDMDLATLPPTTAMAVLLYNRWAIRTIVQSSFPVKQAKPGPPQLSVMNQMQQEKELTENILKVLKEQAADSILVLE

SEQ ID NO: 40711 - protein, 204 aa, Homo sapiens
  Payload ID: 8285
  Gene Symbol: INTS8
  Gene Name: integrator complex subunit 8
  ENSP ID: ENSP00000429340
MFDPAPVQLIVQFLEQASKPSVNEQNQVQPPPDNKRNRILKLLALKVAAHLKWDLDILEKSLSVPVLNMLLNELLCISKVPPGTKHVDMDLATLPPTTAMAVLLYNRWAIRTIVQSSFPVKQAKPGPPQLSVMNQMQQEKELTENILKVLKEQAADSILVLEAALKLNKDLYVHTMRTLDLLAMEPGMVNGETESSTAGLKVKT

SEQ ID NO: 40712 - protein, 291 aa, Homo sapiens; identical to SEQ ID NO: 40708
  Payload ID: 8285
  Gene Symbol: INTS8
  Gene Name: integrator complex subunit 8
  ENSP ID: ENSP00000429452

SEQ ID NO: 40713 - protein, 196 aa, Homo sapiens
  Payload ID: 8285
  Gene Symbol: INTS8
  Gene Name: integrator complex subunit 8
  ENSP ID: ENSP00000430033
MLPSVQEASGKLVFSAGRREHLRRGPRCEEISEMGTGKLKAQEINFAWVTTRTLRFAFTKILRPVATLDEVVSFSRWRTVREHGKPTRDPASCGAVSYGNREEAWFEDPAPVQLIVQFLEQASKPSVNEQNQVQPPPDNKRNRILKLLALKVAAHLKWDLDILEKSLSVPVLNMLLNELLCISKVPPGTKHVDMDL

SEQ ID NO: 40714 - protein, 183 aa, Homo sapiens
  Payload ID: 8285
  Gene Symbol: INTS8
  Gene Name: integrator complex subunit 8
  ENSP ID: ENSP00000430049
  MOD_RES (1)..(1): Any amino acid
XNNDWSEGAAVARGGGSRTAAPAGPRRHFGLYPAPVQLIVQFLEQASKPSVNEQNQVQPPPDNKRNRILKLLALKVAAHLKWDLDILEKSLSVPVLNMLLNELLCISKVPPGTKHVDMDLATLPPTTAMAVLLYNRWAIRTIVQSSFPVKQAKPGPPQLSVMNQMQQEKELTENILKVLKEQA

SEQ ID NO: 40715 - protein, 800 aa, Homo sapiens
  Payload ID: 8285
  Gene Symbol: INTS8
  Gene Name: integrator complex subunit 8
  ENSP ID: ENSP00000430180
  MOD_RES (1)..(1): Any amino acid
XEKELTENILKVLKEQAADSILVLEAALKLNKDLYVHTMRTLDLLAMEPGMVNGETESSTAGLKVKTEEMQCQVCYDLGAAYFQQGSTNSAVYENAREKFFRTKELIAEIGSLSLHCTIDEKRLAGYCQACDVLVPSSDSTSQQLTPYSQVHICLRSGNYQEVIQIFIEDNLTLSLPVQFRQSVLRELFKKAQQGNEALDEICFKVCACNTVRDILEGRTISVQFNQLFLRPNKEKIDFLLEVCSRSVNLEKASESLKGNMAAFLKNVCLGLEDLQYVFMISSHELFITLLKDEERKLLVDQMRKRSPRVNLCIKPVTSFYDIPASASVNIGQLEHQLILSVDPWRIRQILIELHGMTSERQFWTVSNKWEVPSVYSGVILGIKDNLTRDLVYILMAKGLHCSTVKDFSHAKQLFAACLELVTEFSPKLRQVMLNEMLLLDIHTHEAGTGQAGERPPSDLISRVRGYLEMRLPDIPLRQVIAEECVAFMLNWRENEYLTLQVPAFLLQSNPYVKLGQLLAATCKELPGPKESRRTAKDLWEVVVQICSVSSQHKRGNDGRVSLIKQRESTLGIMYRSELLSFIKKLREPLVLTIILSLFVKLHNVREDIVNDITAEHISIWPSSIPNLQSVDFEAVAITVKELVRYTLSINPNNHSWLIIQADIYFATNQYSAALHYYLQAGAVCSDFFNKAVPPDVYTDQVAILCQFLREIDYKTAFKSLQEQNSHDAMDSYYDYIWDVTILEYLTYLHHKRGETDKRQIAIKAIGQTELNASNPEEVLQLAAQRRKKKFLQAMAKLYF

SEQ ID NO: 40716 - protein, 995 aa, Homo sapiens
  Payload ID: 8285
  Gene Symbol: INTS8
  Gene Name: integrator complex subunit 8
  Uniprot ID: Q75QN2
  ENSP ID: ENSP00000430338
MSAEAADREAATSSRPCTPPQTCWFEFLLEESLLEKHLRKPCPDPAPVQLIVQFLEQASKPSVNEQNQVQPPPDNKRNRILKLLALKVAAHLKWDLDILEKSLSVPVLNMLLNELLCISKVPPGTKHVDMDLATLPPTTAMAVLLYNRWAIRTIVQSSFPVKQAKPGPPQLSVMNQMQQEKELTENILKVLKEQAADSILVLEAALKLNKDLYVHTMRTLDLLAMEPGMVNGETESSTAGLKVKTEEMQCQVCYDLGAAYFQQGSTNSAVYENAREKFFRTKELIAEIGSLSLHCTIDEKRLAGYCQACDVLVPSSDSTSQQLTPYSQVHICLRSGNYQEVIQIFIEDNLTLSLPVQFRQSVLRELFKKAQQGNEALDEICFKVCACNTVRDILEGRTISVQFNQLFLRPNKEKIDFLLEVCSRSVNLEKASESLKGNMAAFLKNVCLGLEDLQYVFMISSHELFITLLKDEERKLLVDQMRKRSPRVNLCIKPVTSFYDIPASASVNIGQLEHQLILSVDPWRIRQILIELHGMTSERQFWTVSNKWEVPSVYSGVILGIKDNLTRDLVYILMAKGLHCSTVKDFSHAKQLFAACLELVTEFSPKLRQVMLNEMLLLDIHTHEAGTGQAGERPPSDLISRVRGYLEMRLPDIPLRQVIAEECVAFMLNWRENEYLTLQVPAFLLQSNPYVKLGQLLAATCKELPGPKESRRTAKDLWEVVVQICSVSSQHKRGNDGRVSLIKQRESTLGIMYRSELLSFIKKLREPLVLTIILSLFVKLHNVREDIVNDITAEHISIWPSSIPNLQSVDFEAVAITVKELVRYTLSINPNNHSWLIIQADIYFATNQYSAALHYYLQAGAVCSDFFNKAVPPDVYTDQVIKRMIKCCSLLNCHTQVAILCQFLREIDYKTAFKSLQEQNSHDAMDSYYDYIWDVTILEYLTYLHHKRGETDKRQIAIKAIGQTELNASNPEEVLQLAAQRRKKKFLQAMAKLYF

SEQ ID NO: 40717 - protein, 131 aa, Homo sapiens
  Payload ID: 8285
  Gene Symbol: INTS8
  Gene Name: integrator complex subunit 8
  ENSP ID: ENSP00000430722
EMRLPDIPLRQVIAEECVAFMLNWRENEYLTLQVPAFLLQSNPYVKLGQLLAATCKELPGPKESRRTAKDLWEVVVQICSVSSQHKRGNDGRVSLIKQRESTLGIMYRSELLSFIKKLRGQGLDLSPKLEC

SEQ ID NO: 40718 - protein, 637 aa, Homo sapiens
  Payload ID: 8286
  Gene Symbol: INTS9
  Gene Name: integrator complex subunit 9
  Uniprot ID: Q9NV88
  ENSP ID: ENSP00000398208
MKLYCLSGHPTLPCNVLKFKSTTIMLDCGLDMTSTLNFLPLPLVQSPRLSNLPGWSLKDGNAFLDKTELIDLSTVDVILISNYHCMMALPYITEHTGFTGTVYATEPTVQIGRLLMEELVNFIERVPKAQSASLWKNKDIQRLLPSPLKDAVEVSTWRRCYTMQEVNSALSKIQLVGYSQKIELFGAVQVTPLSSGYALGSSNWIIQSHYEKVSYVSGSSLLTTHPQPMDQASLKNSDVLVLTGLTQIPTANPDGMVGEFCSNLALTVRNGGNVLVPCYPSGVIYDLLECLYQYIDSAGLSSVPLYFISPVANSSLEFSQIFAEWLCHNKQSKVYLPEPPFPHAELIQTNKLKHYPSIHGDFSNDFRQPCVVFTGHPSLRFGDVVHFMELWGKSSLNTVIFTEPDFSYLEALAPYQPLAMKCIYCPIDTRLNFIQVSKLLKEVQPLHVVCPEQYTQPPPAQSHRMDLMIDCQPPAMSYRRAEVLALPFKRRYEKIEIMPELADSLVPMEIKPGISLATVSAVLHTKDNKHLLQPPPRPAQPTSGKKRKRVSDDVPDCKVLKPLLSGSIPVEQFVQTLEKHGFSDIKVEDTAKGHIVLLQEAETLIQIEEDSTHIICDNDEMLRVRLRDLVLKFLQKF

SEQ ID NO: 40719 - protein, 300 aa, Homo sapiens
  Payload ID: 8286
  Gene Symbol: INTS9
  Gene Name: integrator complex subunit 9
  ENSP ID: ENSP00000427789
MKLYCLSGHPTLPCNVLKFKSTTIMLDCGLDMTSTLNFLPLPLVQSPRLSNLPGWSLKDGNAFLDKELKECSGHVFVDSVPEFCLPETELIDLSTVDVILISNYHCMMALPYITEHTGFTGTVYATEPTVQIGRLLMEELVNFIERVPKAQSASLWKNKDIQRLLPSPLKDAVEVSTWRRCYTMQEVNSALSKIQLVGYSQKIPMDQASLKNSDVLVLTGLTQIPTANPDGMVGEFCSNLALTVRNGGNVLVPCYPSGVIYDLLECLYQYIDSAGLSSVPLYFISPVANSSLEFSQIFAE

SEQ ID NO: 40720 - protein, 525 aa, Homo sapiens
  Payload ID: 8286
  Gene Symbol: INTS9
  Gene Name: integrator complex subunit 9
  ENSP ID: ENSP00000427952
MKLYCLSGHPTLPCNVLKFKSTTIMLDCGLDMTSTLNFLPLPLVQSPRLSNLPGWSLKDGNAFLDKELKECSGHVFVDSVPEFCLPETELIDLSTVDVILISNYHCMMALPYITEHTGFTGTVYATEPTVQIGRLLMEELVNFIERVPKAQSASLWKNKDIQRLLPSPLKDAVEVSTWRRCYTMQEVNSALSKIQLVGYSQKIELFGAVQVTPLSSGYALGSSNWIIQSHYEKVSYVSGSSLLTTHPQPMDQASLKNSDVLVLTGLTQIPTANPDGMVGEFCSNLALTVRNGGNVLVPCYPSGVIYDLLECLYQYIDSAGLSSVPLYFISPVANSSLEFSQIFAEWLCHNKQSKVYLPEPPFPHAELIQTNKLKHYPSIHGDFSNDFRQPCVVFTGHPSLRFGDVVHFMELWGKSSLNTVIFTEPDFSYLEALAPYQPLAMKCIYCPIDTRLNFIQVSKLLKEVQPLHVVCPEQYTQPPPAQSHRMDLMIDCQPPAMSYRRAEVLALPFKRRYEKIEIMPETAVM

SEQ ID NO: 40721 - protein, 170 aa, Homo sapiens
  Payload ID: 8286
  Gene Symbol: INTS9
  Gene Name: integrator complex subunit 9
  ENSP ID: ENSP00000428135
MKLYCLSGHPTLPCNVLKFKSTTIMLDCGLDMTSTLNFLPLPLVQSPRLSNLPGWSLKDGNAFLDKELKECSGHVFVDSVPEFCLPETELIDLSTVDVILISNYHCMMALPYITEHTGFTGTVYATEPTVQIGRLLMEELVNFIERVPKAQSASLWKNKDIQRSFLVRSR

SEQ ID NO: 40722 - protein, 658 aa, Homo sapiens
  Payload ID: 8286
  Gene Symbol: INTS9
  Gene Name: integrator complex subunit 9
  Uniprot ID: Q9NV88
  ENSP ID: ENSP00000429065
MKLYCLSGHPTLPCNVLKFKSTTIMLDCGLDMTSTLNFLPLPLVQSPRLSNLPGWSLKDGNAFLDKELKECSGHVFVDSVPEFCLPETELIDLSTVDVILISNYHCMMALPYITEHTGFTGTVYATEPTVQIGRLLMEELVNFIERVPKAQSASLWKNKDIQRLLPSPLKDAVEVSTWRRCYTMQEVNSALSKIQLVGYSQKIELFGAVQVTPLSSGYALGSSNWIIQSHYEKVSYVSGSSLLTTHPQPMDQASLKNSDVLVLTGLTQIPTANPDGMVGEFCSNLALTVRNGGNVLVPCYPSGVIYDLLECLYQYIDSAGLSSVPLYFISPVANSSLEFSQIFAEWLCHNKQSKVYLPEPPFPHAELIQTNKLKHYPSIHGDFSNDFRQPCVVFTGHPSLRFGDVVHFMELWGKSSLNTVIFTEPDFSYLEALAPYQPLAMKCIYCPIDTRLNFIQVSKLLKEVQPLHVVCPEQYTQPPPAQSHRMDLMIDCQPPAMSYRRAEVLALPFKRRYEKIEIMPELADSLVPMEIKPGISLATVSAVLHTKDNKHLLQPPPRPAQPTSGKKRKRVSDDVPDCKVLKPLLSGSIPVEQFVQTLEKHGFSDIKVEDTAKGHIVLLQEAETLIQIEEDSTHIICDNDEMLRVRLRDLVLKFLQKF

SEQ ID NO: 40723 - protein, 87 aa, Homo sapiens
  Payload ID: 8286
  Gene Symbol: INTS9
  Gene Name: integrator complex subunit 9
  ENSP ID: ENSP00000429188
MLDCGLDMTSTLNFLPLPLVQSPRLSNLPGWSLKDGNAFLDKELKECSGHVFVDSVPEFCLPETELIDLSTVDVILISNYHCMMALP

SEQ ID NO: 40724 - protein, 223 aa, Homo sapiens
  Payload ID: 8286
  Gene Symbol: INTS9
  Gene Name: integrator complex subunit 9
  ENSP ID: ENSP00000429539
  MOD_RES (1)..(1): Any amino acid
XPTLPCNVLKFKSTTIMLDCGLDMTSTLNFLPLPLVQSPRLSNLPGWSLKDGNAFLDKELKECSGHVFVDSVPEFCLPETELIDLSTVDVILISNYHCMMALPYITEHTGFTGTVYATEPTVQIGRLLPSPLKDAVEVSTWRRCYTMQEVNSALSKIQLVGYSQKIELFGAVQVTPLSSGYALGSSNWIIQSHYEKVSYVSGSSLLTTHPQPMDQASLKNSDV

SEQ ID NO: 40725 - protein, 150 aa, Homo sapiens
  Payload ID: 8286
  Gene Symbol: INTS9
  Gene Name: integrator complex subunit 9
  ENSP ID: ENSP00000429691
  MOD_RES (1)..(1): Any amino acid
XPMEIKPGISLATVSAVLHTKDNKHLLQPPPRPAQPTSGKKRKRVSDDVPDCKVLKPLLSGSIPVEQFVQTLEKISQMCSLPSPPLSFLLEQHGFSDIKVEDTAKGHIVLLQEAETLIQIEEDSTHIICDNDEMLRVRLRDLVLKFLQKF

SEQ ID NO: 40726 - protein, 25 aa, Homo sapiens
  Payload ID: 8286
  Gene Symbol: INTS9
  Gene Name: integrator complex subunit 9
  ENSP ID: ENSP00000430067
IMLDCGLDMTSTLNFLPLPLVQRRS

SEQ ID NO: 40727 - protein, 38 aa, Homo sapiens
  Payload ID: 8286
  Gene Symbol: INTS9
  Gene Name: integrator complex subunit 9
  ENSP ID: ENSP00000430083
MKLSQAVQSSWLVPEGWKCFLGQDGANRSVYSRCDSHL

SEQ ID NO: 40728 - protein, 634 aa, Homo sapiens
  Payload ID: 8286
  Gene Symbol: INTS9
  Gene Name: integrator complex subunit 9
  Uniprot ID: Q9NV88
  ENSP ID: ENSP00000430943
MLDCGLDMTSTLNFLPLPLVQSPRLSNLPGWSLKDGNAFLDKELKECSGHVFVDSVPEFCLPETELIDLSTVDVILISNYHCMMALPYITEHTGFTGTVYATEPTVQIGRLLMEELVNFIERVPKAQSASLWKNKDIQRLLPSPLKDAVEVSTWRRCYTMQEVNSALSKIQLVGYSQKIELFGAVQVTPLSSGYALGSSNWIIQSHYEKVSYVSGSSLLTTHPQPMDQASLKNSDVLVLTGLTQIPTANPDGMVGEFCSNLALTVRNGGNVLVPCYPSGVIYDLLECLYQYIDSAGLSSVPLYFISPVANSSLEFSQIFAEWLCHNKQSKVYLPEPPFPHAELIQTNKLKHYPSIHGDFSNDFRQPCVVFTGHPSLRFGDVVHFMELWGKSSLNTVIFTEPDFSYLEALAPYQPLAMKCIYCPIDTRLNFIQVSKLLKEVQPLHVVCPEQYTQPPPAQSHRMDLMIDCQPPAMSYRRAEVLALPFKRRYEKIEIMPELADSLVPMEIKPGISLATVSAVLHTKDNKHLLQPPPRPAQPTSGKKRKRVSDDVPDCKVLKPLLSGSIPVEQFVQTLEKHGFSDIKVEDTAKGHIVLLQEAETLIQIEEDSTHIICDNDEMLRVRLRDLVLKFLQKF

SEQ ID NO: 40729 - protein, 612 aa, Homo sapiens
  Payload ID: 8287
  Gene Symbol: ITFG1
  Gene Name: integrin alpha FG-GAP repeat containing 1
  Uniprot ID: Q8TB96
  ENSP ID: ENSP00000319918
MAAAGRLPSSWALFSPLLAGLALLGVGPVPARALHNVTAELFGAEAWGTLAAFGDLNSDKQTDLFVLRERNDLIVFLADQNAPYFKPKVKVSFKNHSALITSVVPGDYDGDSQMDVLLTYLPKNYAKSELGAVIFWGQNQTLDPNNMTILNRTFQDEPLIMDFNGDLIPDIFGITNESNQPQILLGGNLSWHPALTTTSKMRIPHSHAFIDLTEDFTADLFLTTLNATTSTFQFEIWENLDGNFSVSTILEKPQNMMVVGQSAFADFDGDGHMDHLLPGCEDKNCQKSTIYLVRSGMKQWVPVLQDFSNKGTLWGFVPFVDEQQPTEIPIPITLHIGDYNMDGYPDALVILKNTSGSNQQAFLLENVPCNNASCEEARRMFKVYWELTDLNQIKDAMVATFFDIYEDGILDIVVLSKGYTKNDFAIHTLKNNFEADAYFVKVIVLSGLCSNDCPRKITPFGVNQPGPYIMYTTVDANGYLKNGSAGQLSQSAHLALQLPYNVLGLGRSANFLDHLYVGIPRPSGEKSIRKQEWTAIIPNSQLIVIPYPHNVPRSWSAKLYLTPSNIVLLTAIALIGVCVFILAIIGILHWQEKKADDREKRQEAHRFHFDAM

SEQ ID NO: 40730 - protein, 464 aa, Homo sapiens
  Payload ID: 8287
  Gene Symbol: ITFG1
  Gene Name: integrin alpha FG-GAP repeat containing 1
  ENSP ID: ENSP00000441062
MDVLLTYLPKNYAKSELGAVIFWGQNQTLDPNNMTILNRTFQDEPLIMDFNGDLIPDIFGITNESNQPQILLGGNLSWHPALTTTSKMRIPHSHAFIDLTEDFTADLFLTTLNATTSTFQFEIWENLDGNFSVSTILEKPQNMMVVGQSAFADFDGDGHMDHLLPGCEDKNCQKSTIYLVRSGMKQWVPVLQDFSNKGTLWGFVPFVDEQQPTEIPIPITLHIGDYNMDGYPDALVILKNTSGSNQQAFLLENVPCNNASCEEARRMFKVYWELTDLNQIKDAMVATFFDIYEDGILDIVVLSKGYTKNDFAIHTLKNNFEADAYFVKVIVLSGLCSNDCPRKITPFGVNQPGPYIMYTTVDANGYLKNGSAGQLSQSAHLALQLPYNVLGLGRSANFLDHLYVGIPRPSGEKSIRKQEWTAIIPNSQLIVIPYPHNVPRSSHRCLCFHLGNNWHFTLAGKESR

SEQ ID NO: 40731 - protein, 73 aa, Homo sapiens
  Payload ID: 8287
  Gene Symbol: ITFG1
  Gene Name: integrin alpha FG-GAP repeat containing 1
  ENSP ID: ENSP00000455630
MDVLLTYLPKNYAKSELGAVIFWGQNQTLDPNNMTILNRTFQDEPLIMDFNGDLIPDIFGITNESNQPQILLG

SEQ ID NO: 40732 - protein, 178 aa, Homo sapiens
  Payload ID: 8287
  Gene Symbol: ITFG1
  Gene Name: integrin alpha FG-GAP repeat containing 1
  ENSP ID: ENSP00000457665
VLSKGYTKNDFAIHTLKNNFEADAYFVKVIVLSGLCSNDCPRKITPFGVNQPGPYIMYTTVDANGYLKNGSGRSANFLDHLYVGIPRPSGEKSIRKQEWTAIIPNSQLIVIPYPHNVPRSWSAKLYLTPSNIVLLTAIALIGVCVFILAIIGILHWQEKKADDREKRQEAHRFHFDAM

SEQ ID NO: 40733 - protein, 113 aa, Homo sapiens
  Payload ID: 8287
  Gene Symbol: ITFG1
  Gene Name: integrin alpha FG-GAP repeat containing 1
  ENSP ID: ENSP00000459192
  MOD_RES (1)..(1): Any amino acid
XKPKVKVSFKNHSALITSVVPGDYDGDSQMDVLLTYLPKNYAKSELGAVIFWGQNQTLDPNNMTILNRTFQDEPLIMDFNGDLIPDIFGITNESNQPQILLGGHTTLNAPHLF

SEQ ID NO: 40734 - protein, 447 aa, Homo sapiens
  Payload ID: 8288
  Gene Symbol: ITFG2
  Gene Name: integrin alpha FG-GAP repeat containing 2
  Uniprot ID: Q969R8
  ENSP ID: ENSP00000228799
MRSVSYVQRVALEFSGSLFPHAICLGDVDNDTLNELVVGDTSGKVSVYKNDDSRPWLTCSCQGMLTCVGVGDVCNKGKNLLVAVSAEGWFHLFDLTPAKVLDASGHHETLIGEEQRPVFKQHIPANTKVMLISDIDGDGCRELVVGYTDRVVRAFRWEELGEGPEHLTGQLVSLKKWMLEGQVDSLSVTLGPLGLPELMVSQPGCAYAILLCTWKKDTGSPPASEGPTDGSRETPAARDVVLHQTSGRIHNKNVSTHLIGNIKQGHGTESSGSGLFALCTLDGTLKLMEEMEEADKLLWSVQVDHQLFALEKLDVTGNGHEEVVACAWDGQTYIIDHNRTVVRFQVDENIRAFCAGLYACKEGRNSPCLVYVTFNQKIYVYWEVQLERMESTNLVKLLETKPEYHSLLQELGVDPDDLPVTRALLHQTLYHPDQPPQCAPSSLQDPT

SEQ ID NO: 40735 - protein, 131 aa, Homo sapiens
  Payload ID: 8288
  Gene Symbol: ITFG2
  Gene Name: integrin alpha FG-GAP repeat containing 2
  ENSP ID: ENSP00000439324
GNGHEEVVACAWDGQTYIIDHNRTVVRFQVDENIRAFCAGLYACKEGRNSPCLVYVTFNQKIYVYWEVQLERMESTNLVKLLETKPEYHSLLQELGVDPDDLPVTRALLHQTLYHPDQPPQCAPSSLQDPT

SEQ ID NO: 40736 - protein, 17 aa, Homo sapiens
  Payload ID: 8288
  Gene Symbol: ITFG2
  Gene Name: integrin alpha FG-GAP repeat containing 2
  ENSP ID: ENSP00000440015
  MOD_RES (1)..(1): Any amino acid
XLVVGDTSGKVSVVLAG

SEQ ID NO: 40737 - protein, 57 aa, Homo sapiens
  Payload ID: 8288
  Gene Symbol: ITFG2
  Gene Name: integrin alpha FG-GAP repeat containing 2
  ENSP ID: ENSP00000442023
  MOD_RES (1)..(1): Any amino acid
XTNLVKLLETKPEYHSLLQELGVDPDDLPVTRALLHQTLYHPDQPPQCAPSSLQDPT

SEQ ID NO: 40738 - protein, 147 aa, Homo sapiens
  Payload ID: 8288
  Gene Symbol: ITFG2
  Gene Name: integrin alpha FG-GAP repeat containing 2
  Uniprot ID: Q969R8
  ENSP ID: ENSP00000443329
MRSVSYVQRVALEFSGSLFPHAICLGDVDNDTLNELVVGDTSGKVSVYKNDDSRPWLTCSCQGMLTCVGVGDVCNKGKNLLVAVSAEGWFHLFDLTPAKVLDASGHHETLIGEEQRPVFKQHIPANTKVMLISDIGGHAYLCRQPGE

SEQ ID NO: 40739 - protein, 59 aa, Homo sapiens
  Payload ID: 8288
  Gene Symbol: ITFG2
  Gene Name: integrin alpha FG-GAP repeat containing 2
  ENSP ID: ENSP00000444331
  MOD_RES (1)..(1): Any amino acid
XYWEVQLERMESTNLVKLLETKPEYHSLLQELGVGESQKSQWPECPGDPQHAAGAGRGS

SEQ ID NO: 40740 - protein, 56 aa, Homo sapiens
  Payload ID: 8288
  Gene Symbol: ITFG2
  Gene Name: integrin alpha FG-GAP repeat containing 2
  ENSP ID: ENSP00000445769
MRSVSYVQRVALEFSGSLFPHAICLGDVDNDTMEMGVVSWWWATQTVWCELSAGRS

SEQ ID NO: 40741 - protein, 347 aa, Homo sapiens
  Payload ID: 8289
  Gene Symbol: ITGB1BP2
  Gene Name: integrin beta 1 binding protein (melusin) 2
  Uniprot ID: Q9UKP3
  ENSP ID: ENSP00000362935
MSLLCRNKGCGQHFDPNTNLPDSCCHHPGVPIFHDALKGWSCCRKRTVDFSEFLNIKGCTMGPHCAEKLPEAPQPEGPATSSSLQEQKPLNVIPKSAETLRRERPKSELPLKLLPLNISQALEMALEQKELDQEPGAGLDSLIRTGSSCQNPGCDAVYQGPESDATPCTYHPGAPRFHEGMKSWSCCGIQTLDFGAFLAQPGCRVGRHDWGKQLPASCRHDWHQTDSLVVVTVYGQIPLPAFNWVKASQTELHVHIVFDGNRVFQAQMKLWGVINVEQSSVFLMPSRVEISLVKADPGSWAQLEHPDALAKKARAGVVLEMDEEESDDSDDDLSWTEEEEEEEAMGE

SEQ ID NO: 40742 - protein, 329 aa, Homo sapiens
  Payload ID: 8289
  Gene Symbol: ITGB1BP2
  Gene Name: integrin beta 1 binding protein (melusin) 2
  Uniprot ID: Q9UKP3
  ENSP ID: ENSP00000440289
MSTDSCCHHPGVPIFHDALKGWSCCRKRTVDFSEFLNIKGCTMGPHCAEKLPEAPQPEGPATSSSLQEQKPLNVIPKSAETLRRERPKSELPLKLLPLNISQALEMALEQKELDQEPGAGLDSLIRTGSSCQNPGCDAVYQGPESDATPCTYHPGAPRFHEGMKSWSCCGIQTLDFGAFLAQPGCRVGRHDWGKQLPASCRHDWHQTDSLVVVTVYGQIPLPAFNWVKASQTELHVHIVFDGNRVFQAQMKLWGVINVEQSSVFLMPSRVEISLVKADPGSWAQLEHPDALAKKARAGVVLEMDEEESDDSDDDLSWTEEEEEEEAMGE

SEQ ID NO: 40743 - protein, 150 aa, Homo sapiens
  Payload ID: 8290
  Gene Symbol: ITGB1BP1
  Gene Name: integrin beta 1 binding protein 1
  Uniprot ID: O14713
  ENSP ID: ENSP00000238091
MFRKGKKRHSSSSSQSSEISTKSKSVDSSLGGLSRSSTVASLDTDSTKSSGQSNNNSDTCAEFRIKYVGAIEKLKLSEGKGLEGPLDLINYIDVAQQDGKLPFVPPEEEFIMGVSKYGIKVSTSDQYEQAQAICKVLSTAFDSVLTSEKP

SEQ ID NO: 40744 - protein, 200 aa, Homo sapiens
  Payload ID: 8290
  Gene Symbol: ITGB1BP1
  Gene Name: integrin beta 1 binding protein 1
  Uniprot ID: O14713
  ENSP ID: ENSP00000347504
MFRKGKKRHSSSSSQSSEISTKSKSVDSSLGGLSRSSTVASLDTDSTKSSGQSNNNSDTCAEFRIKYVGAIEKLKLSEGKGLEGPLDLINYIDVAQQDGKLPFVPPEEEFIMGVSKYGIKVSTSDQYDVLHRHALYLIIRMVCYDDGLGAGKSLLALKTTDASNEEYSLWVYQCNSLEQAQAICKVLSTAFDSVLTSEKP

SEQ ID NO: 40745 - protein, 184 aa, Homo sapiens
  Payload ID: 8290
  Gene Symbol: ITGB1BP1
  Gene Name: integrin beta 1 binding protein 1
  ENSP ID: ENSP00000352743
MFRKGKKRHSSSSSQSSEISTKSKSVDSSLGGLSRSSTVASLDTDSTKSSGQSNNNSDTCAEFRIKYVGAIEKLKLSEGKGLEGPLDLINYIDVAQQDGKLPFVPPEEEFIMGVSKYGIKVSTSDQYDVLHRHALYLIIRMVCYDDGLGAGKSLLALKTTDASNEEYSLWVYQCNSLVRLRYFG

SEQ ID NO: 40746 - protein, 200 aa, Homo sapiens; identical to SEQ ID NO: 40744
  Payload ID: 8290
  Gene Symbol: ITGB1BP1
  Gene Name: integrin beta 1 binding protein 1
  Uniprot ID: O14713
  ENSP ID: ENSP00000353850

SEQ ID NO: 40747 - protein, 184 aa, Homo sapiens; identical to SEQ ID NO: 40745
  Payload ID: 8290
  Gene Symbol: ITGB1BP1
  Gene Name: integrin beta 1 binding protein 1
  ENSP ID: ENSP00000389704

SEQ ID NO: 40748 - protein, 84 aa, Homo sapiens
  Payload ID: 8290
  Gene Symbol: ITGB1BP1
  Gene Name: integrin beta 1 binding protein 1
  ENSP ID: ENSP00000417850
MFRKGKKRHSSSSSQSSEISTKSKSVDSSLGGLSRSSTVASLDTDSTKSSGQSNNNSDTCAEFRIKYVGAIEKLKLSEGKGLEG

SEQ ID NO: 40749 - protein, 114 aa, Homo sapiens
  Payload ID: 8290
  Gene Symbol: ITGB1BP1
  Gene Name: integrin beta 1 binding protein 1
  ENSP ID: ENSP00000417940
MFRKGKKRHSSSSSQSSEISTKSKSVDSSLGGLSRSSTVASLDTDSTKSSGQSNNNSDTCAEFRIKYVGAIEKLKLSEGKGLEGPLDLINYIDVAQQDGKLPFVPPEEEFIMGV

SEQ ID NO: 40750 - protein, 86 aa, Homo sapiens
  Payload ID: 8290
  Gene Symbol: ITGB1BP1
  Gene Name: integrin beta 1 binding protein 1
  ENSP ID: ENSP00000418526
MFRKGKKRHSSSSSQSSEISTKSKSVDSSLGGLSRSSTVASLDTDSTKSSGQSNNNSDTCAEFRIKYVGAIEKLKLSEGKGLEGPL

SEQ ID NO: 40751 - protein, 65 aa, Homo sapiens
  Payload ID: 8290
  Gene Symbol: ITGB1BP1
  Gene Name: integrin beta 1 binding protein 1
  ENSP ID: ENSP00000418947
MFRKGKKRHSSSSSQSSEISTKSKSVDSSLGGLSRSSTVASLDTDSTKSSGQSNNNSDTCAEFRI

SEQ ID NO: 40752 - protein, 38 aa, Homo sapiens
  Payload ID: 8290
  Gene Symbol: ITGB1BP1
  Gene Name: integrin beta 1 binding protein 1
  ENSP ID: ENSP00000419452
MFRKGKKRHSSSSSQSSEISTKSKDKATIIQIPVQNFE

SEQ ID NO: 40753 - protein, 150 aa, Homo sapiens; identical to SEQ ID NO: 40743
  Payload ID: 8290
  Gene Symbol: ITGB1BP1
  Gene Name: integrin beta 1 binding protein 1
  Uniprot ID: O14713
  ENSP ID: ENSP00000419524

SEQ ID NO: 40754 - protein, 96 aa, Homo sapiens
  Payload ID: 8290
  Gene Symbol: ITGB1BP1
  Gene Name: integrin beta 1 binding protein 1
  ENSP ID: ENSP00000419814
MFRKGKKRHSSSSSQSSEISTKSKSVDSSLGGLSRSSTVASLDTDSTKSSGQSNNNSDTCAEFRIKYVGAIEKLKLSEGKGLEGPLDLINYIDVAQ

SEQ ID NO: 40755 - protein, 136 aa, Homo sapiens
  Payload ID: 8290
  Gene Symbol: ITGB1BP1
  Gene Name: integrin beta 1 binding protein 1
  ENSP ID: ENSP00000420770
MFRKGKKRHSSSSSQSSEISTKSKSVDSSLGGLSRSSTVASLDTDSTKSSGQSNNNSDTCAEFRIKYVGAIEKLKLSEGKGLEGPLDLINYIDVAQQDGKLPFVPPEEEFIMGVSKYGIKVSTSDQYDVLHRHALY

SEQ ID NO: 40756 - protein, 107 aa, Homo sapiens
  Payload ID: 8290
  Gene Symbol: ITGB1BP1
  Gene Name: integrin beta 1 binding protein 1
  ENSP ID: ENSP00000433814
MFRKGKKRHSSSSSQSSEISTKSKSVDSSLGGLSRSSTVASLDTDSTKSSGQSNNNSDTCAEFRIKYVGAIEKLKLSEGKGLEGPLDLINYIDVAQVKKKNSVTLWL

SEQ ID NO: 40757 - protein, 177 aa, Homo sapiens
  Payload ID: 8291
  Gene Symbol: ITGB3BP
  Gene Name: integrin beta 3 binding protein (beta3-endonexin)
  Uniprot ID: Q13352
  ENSP ID: ENSP00000271002
MPVKRSLKLDGLLEENSFDPSKITRKKSVITYSPTTGTCQMSLFASPTSSEEQKHRNGLSNEKRKKLNHPSLTESKESTTKDNDEFMMLLSKVEKLSEEIMEIMQNLSSIQALEGSRELENLIGISCASHFLKREMQKTKELMTKVNKQKLFEKSTGLPHKASRHLDSYEFLKAILN

SEQ ID NO: 40758 - protein, 216 aa, Homo sapiens
  Payload ID: 8291
  Gene Symbol: ITGB3BP
  Gene Name: integrin beta 3 binding protein (beta3-endonexin)
  Uniprot ID: Q13352
  ENSP ID: ENSP00000360133
MPFAPVAQARVQWHDFRSLQHLLPAFKRFSCLSLGSSWDYSVKRSLKLDGLLEENSFDPSKITRKKSVITYSPTTGTCQMSLFASPTSSEEQKHRNGLSNEKRKKLNHPSLTESKESTTKDNDEFMMLLSKVEKLSEEIMEIMQNLSSIQALEGSRELENLIGISCASHFLKREMQKTKELMTKVNKQKLFEKSTGLPHKASRHLDSYEFLKAILN

SEQ ID NO: 40759 - protein, 170 aa, Homo sapiens
  Payload ID: 8291
  Gene Symbol: ITGB3BP
  Gene Name: integrin beta 3 binding protein (beta3-endonexin)
  Uniprot ID: Q13352
  ENSP ID: ENSP00000432904
MPVKRSLKLDGLLEENSFDPSKITRKKSVITYSPTTGTCQMSLFASPTSSEEQKHRNGLSNEKRKKLNHPSLTESKESTTKDNDEFMMLLSKVEKLSEEIMEIMQNLSSIQALEGSRELENLIGISCASHFLKREMQKTKELMTKVNKQKLFEKSTGLPHKGQPQMSQPL

SEQ ID NO: 40760 - protein, 1179 aa, Homo sapiens
  Payload ID: 8292
  Gene Symbol: ITGA1
  Gene Name: integrin, alpha 1
  Uniprot ID: P56199
  ENSP ID: ENSP00000282588
MAPRPRARPGVAVACCWLLTVVLRCCVSFNVDVKNSMTFSGPVEDMFGYTVQQYENEEGKWVLIGSPLVGQPKNRTGDVYKCPVGRGESLPCVKLDLPVNTSIPNVTEVKENMTFGSTLVTNPNGGFLACGPLYAYRCGHLHYTTGICSDVSPTFQVVNSIAPVQECSTQLDIVIVLDGSNSIYPWDSVTAFLNDLLERMDIGPKQTQVGIVQYGENVTHEFNLNKYSSTEEVLVAAKKIVQRGGRQTMTALGIDTARKEAFTEARGARRGVKKVMVIVTDGESHDNHRLKKVIQDCEDENIQRFSIAILGSYNRGNLSTEKFVEEIKSIASEPTEKHFFNVSDELALVTIVKTLGERIFALEATADQSAASFEMEMSQTGFSAHYSQDWVMLGAVGAYDWNGTVVMQKASQIIIPRNTTFNVESTKKNEPLASYLGYTVNSATASSGDVLYIAGQPRYNHTGQVIIYRMEDGNIKILQTLSGEQIGSYFGSILTTTDIDKDSNTDILLVGAPMYMGTEKEEQGKVYVYALNQTRFEYQMSLEPIKQTCCSSRQHNSCTTENKNEPCGARFGTAIAAVKDLNLDGFNDIVIGAPLEDDHGGAVYIYHGSGKTIRKEYAQRIPSGGDGKTLKFFGQSIHGEMDLNGDGLTDVTIGGLGGAALFWSRDVAVVKVTMNFEPNKVNIQKKNCHMEGKETVCINATVCFDVKLKSKEDTIYEADLQYRVTLDSLRQISRSFFSGTQERKVQRNITVRKSECTKHSFYMLDKHDFQDSVRITLDFNLTDPENGPVLDDSLPNSVHEYIPFAKDCGNKEKCISDLSLHVATTEKDLLIVRSQNDKFNVSLTVKNTKDSAYNTRTIVHYSPNLVFSGIEAIQKDSCESNHNITCKVGYPFLRRGEMVTFKILFQFNTSYLMENVTIYLSATSDSEEPPETLSDNVVNISIPVKYEVGLQFYSSASEYHISIAANETVPEVINSTEDIGNEINIFYLIRKSGSFPMPELKLSISFPNMTSNGYPVLYPTGLSSSENANCRPHIFEDPFSINSGKKMTTSTDHLKRGTILDCNTCKFATITCNLTSSDISQVNVSLILWKPTFIKSYFSSLNLTIRGELRSENASLVLSSSNQKRELAIQISKDGLPGRVPLWVILLSAFAGLLLLMLLILALWKIGFFKRPLKKKMEK

SEQ ID NO: 40761 - protein, 1167 aa, Homo sapiens
  Payload ID: 8293
  Gene Symbol: ITGA10
  Gene Name: integrin, alpha 10
  Uniprot ID: O75578
  ENSP ID: ENSP00000358310
MELPFVTHLFLPLVFLTGLCSPFNLDEHHPRLFPGPPEAEFGYSVLQHVGGGQRWMLVGAPWDGPSGDRRGDVYRCPVGGAHNAPCAKGHLGDYQLGNSSHPAVNMHLGMSLLETDGDGGFMACAPLWSRACGSSVFSSGICARVDASFQPQGSLAPTAQRCPTYMDVVIVLDGSNSIYPWSEVQTFLRRLVGKLFIDPEQIQVGLVQYGESPVHEWSLGDFRTKEEVVRAAKNLSRREGRETKTAQAIMVACTEGFSQSHGGRPEAARLLVVVTDGESHDGEELPAALKACEAGRVTRYGIAVLGHYLRRQRDPSSFLREIRTIASDPDERFFFNVTDEAALTDIVDALGDRIFGLEGSHAENESSFGLEMSQIGFSTHRLKDGILFGMVGAYDWGGSVLWLEGGHRLFPPRMALEDEFPPALQNHAAYLGYSVSSMLLRGGRRLFLSGAPRFRHRGKVIAFQLKKDGAVRVAQSLQGEQIGSYFGSELCPLDTDRDGTTDVLLVAAPMFLGPQNKETGRVYVYLVGQQSLLTLQGTLQPEPPQDARFGFAMGALPDLNQDGFADVAVGAPLEDGHQGALYLYHGTQSGVRPHPAQRIAAASMPHALSYFGRSVDGRLDLDGDDLVDVAVGAQGAAILLSSRPIVHLTPSLEVTPQAISVVQRDCRRRGQEAVCLTAALCFQVTSRTPGRWDHQFYMRFTASLDEWTAGARAAFDGSGQRLSPRRLRLSVGNVTCEQLHFHVLDTSDYLRPVALTVTFALDNTTKPGPVLNEGSPTSIQKLVPFSKDCGPDNECVTDLVLQVNMDIRGSRKAPFVVRGGRRKVLVSTTLENRKENAYNTSLSLIFSRNLHLASLTPQRESPIKVECAAPSAHARLCSVGHPVFQTGAKVTFLLEFEFSCSSLLSQVFVKLTASSDSLERNGTLQDNTAQTSAYIQYEPHLLFSSESTLHRYEVHPYGTLPVGPGPEFKTTLRVQNLGCYVVSGLIISALLPAVAHGGNYFLSLSQVITNNASCIVQNLTEPPGPPVHPEELQHTNRLNGSNTQCQVVRCHLGQLAKGTEVSVGLLRLVHNEFFRRAKFKSLTVVSTFELGTEEGSVLQLTEASRWSESLLEVVQTRPILISLWILIGSVLGGLLLLALLVFCLWKLGFFAHKKIPEEEKREEKLEQ

SEQ ID NO: 40762 - protein, 1024 aa, Homo sapiens
  Payload ID: 8293
  Gene Symbol: ITGA10
  Gene Name: integrin, alpha 10
  Uniprot ID: O75578
  ENSP ID: ENSP00000439894
MELPFVTHLFLPLVFLTGCPTYMDVVIVLDGSNSIYPWSEVQTFLRRLVGKLFIDPEQIQVGLVQYGESPVHEWSLGDFRTKEEVVRAAKNLSRREGRETKTAQAIMVACTEGFSQSHGGRPEAARLLVVVTDGESHDGEELPAALKACEAGRVTRYGIAVLGHYLRRQRDPSSFLREIRTIASDPDERFFFNVTDEAALTDIVDALGDRIFGLEGSHAENESSFGLEMSQIGFSTHRLKDGILFGMVGAYDWGGSVLWLEGGHRLFPPRMALEDEFPPALQNHAAYLGYSVSSMLLRGGRRLFLSGAPRFRHRGKVIAFQLKKDGAVRVAQSLQGEQIGSYFGSELCPLDTDRDGTTDVLLVAAPMFLGPQNKETGRVYVYLVGQQSLLTLQGTLQPEPPQDARFGFAMGALPDLNQDGFADVAVGAPLEDGHQGALYLYHGTQSGVRPHPAQRIAAASMPHALSYFGRSVDGRLDLDGDDLVDVAVGAQGAAILLSSRPIVHLTPSLEVTPQAISVVQRDCRRRGQEAVCLTAALCFQVTSRTPGRWDHQFYMRFTASLDEWTAGARAAFDGSGQRLSPRRLRLSVGNVTCEQLHFHVLDTSDYLRPVALTVTFALDNTTKPGPVLNEGSPTSIQKLVPFSKDCGPDNECVTDLVLQVNMDIRGSRKAPFVVRGGRRKVLVSTTLENRKENAYNTSLSLIFSRNLHLASLTPQRESPIKVECAAPSAHARLCSVGHPVFQTGAKVTFLLEFEFSCSSLLSQVFVKLTASSDSLERNGTLQDNTAQTSAYIQYEPHLLFSSESTLHRYEVHPYGTLPVGPGPEFKTTLRVQNLGCYVVSGLIISALLPAVAHGGNYFLSLSQVITNNASCIVQNLTEPPGPPVHPEELQHTNRLNGSNTQCQVVRCHLGQLAKGTEVSVGLLRLVHNEFFRRAKFKSLTVVSTFELGTEEGSVLQLTEASRWSESLLEVVQTRPILISLWILIGSVLGGLLLLALLVFCLWKLGFFAHKKIPEEEKREEKLEQ

SEQ ID NO: 40763 - protein, 1188 aa, Homo sapiens
  Payload ID: 8294
  Gene Symbol: ITGA11
  Gene Name: integrin, alpha 11
  Uniprot ID: Q9UKX5
  ENSP ID: ENSP00000327290
MDLPRGLVVAWALSLWPGFTDTFNMDTRKPRVIPGSRTAFFGYTVQQHDISGNKWLVVGAPLETNGYQKTGDVYKCPVIHGNCTKLNLGRVTLSNVSERKDNMRLGLSLATNPKDNSFLACSPLWSHECGSSYYTTGMCSRVNSNFRFSKTVAPALQRCQTYMDIVIVLDGSNSIYPWVEVQHFLINILKKFYIGPGQIQVGVVQYGEDVVHEFHLNDYRSVKDVVEAASHIEQRGGTETRTAFGIEFARSEAFQKGGRKGAKKVMIVITDGESHDSPDLEKVIQQSERDNVTRYAVAVLGYYNRRGINPETFLNEIKYIASDPDDKHFFNVTDEAALKDIVDALGDRIFSLEGTNKNETSFGLEMSQTGFSSHVVEDGVLLGAVGAYDWNGAVLKETSAGKVIPLRESYLKEFPEELKNHGAYLGYTVTSVVSSRQGRVYVAGAPRFNHTGKVILFTMHNNRSLTIHQAMRGQQIGSYFGSEITSVDIDGDGVTDVLLVGAPMYFNEGRERGKVYVYELRQNLFVYNGTLKDSHSYQNARFGSSIASVRDLNQDSYNDVVVGAPLEDNHAGAIYIFHGFRGSILKTPKQRITASELATGLQYFGCSIHGQLDLNEDGLIDLAVGALGNAVILWSRPVVQINASLHFEPSKINIFHRDCKRSGRDATCLAAFLCFTPIFLAPHFQTTTVGIRYNATMDERRYTPRAHLDEGGDRFTNRAVLLSSGQELCERINFHVLDTADYVKPVTFSVEYSLEDPDHGPMLDDGWPTTLRVSVPFWNGCNEDEHCVPDLVLDARSDLPTAMEYCQRVLRKPAQDCSAYTLSFDTTVFIIESTRQRVAVEATLENRGENAYSTVLNISQSANLQFASLIQKEDSDGSIECVNEERRLQKQVCNVSYPFFRAKAKVAFRLDFEFSKSIFLHHLEIELAAGSDSNERDSTKEDNVAPLRFHLKYEADVLFTRSSSLSHYEVKPNSSLERYDGIGPPFSCIFRIQNLGLFPIHGMMMKITIPIATRSGNRLLKLRDFLTDEANTSCNIWGNSTEYRPTPVEEDLRRAPQLNHSNSDVVSINCNIRLVPNQEINFHLLGNLWLRSLKALKYKSMKIMVNAALQRQFHSPFIFREEDPSRQIVFEISKQEDWQVPIWIIVGSTLGGLLLLALLVLALWKLGFFRSARRRREPGLDPTPKVLE

SEQ ID NO: 40764 - protein, 1189 aa, Homo sapiens
  Payload ID: 8294
  Gene Symbol: ITGA11
  Gene Name: integrin, alpha 11
  Uniprot ID: Q9UKX5
  ENSP ID: ENSP00000403392
MDLPRGLVVAWALSLWPGFTDTFNMDTRKPRVIPGSRTAFFGYTVQQHDISGNKWLVVGAPLETNGYQKTGDVYKCPVIHGNCTKLNLGRVTLSNVSERKDNMRLGLSLATNPKDNSFLACSPLWSHECGSSYYTTGMCSRVNSNFRFSKTVAPALQRCQTYMDIVIVLDGSNSIYPWVEVQHFLINILKKFYIGPGQIQVGVVQYGEDVVHEFHLNDYRSVKDVVEAASHIEQRGGTETRTAFGIEFARSEAFQKGGRKGAKKVMIVITDGESHDSPDLEKVIQQSERDNVTRYAVAVLGYYNRRGINPETFLNEIKYIASDPDDKHFFNVTDEAALKDIVDALGDRIFSLEGTNKNETSFGLEMSQTGFSSHVVEDGVLLGAVGAYDWNGAVLKETSAGKVIPLRESYLKEFPEELKNHGAYLGYTVTSVVSSRQGRVYVAGAPRFNHTGKVILFTMHNNRSLTIHQAMRGQQIGSYFGSEITSVDIDGDGVTDVLLVGAPMYFNEGRERGKVYVYELRQNLFVYNGTLKDSHSYQNARFGSSIASVRDLNQDSYNDVVVGAPLEDNHAGAIYIFHGFRGSILKTPKQRITASELATGLQYFGCSIHGQLDLNEDGLIDLAVGALGNAVILWSRPVVQINASLHFEPSKINIFHRDCKRSGRDATCLAAFLCFTPIFLAPHFQTTTVGIRYNATMDERRYTPRAHLDEGGDRFTNRAVLLSSGQELCERINFHVLDTADYVKPVTFSVEYSLEDPDHGPMLDDGWPTTLRVSVPFWNGCNEDEHCVPDLVLDARSDLPTAMEYCQRVLRKPAQDCSAYTLSFDTTVFIIESTRQRVAVEATLENRGENAYSTVLNISQSANLQFASLIQKEDSDGSIECVNEERRLQKQVCNVSYPFFRAKAKVAFRLDFEFSKSIFLHHLEIELAAGSDSNERDSTKEDNVAPLRFHLKYEADVLFTRSSSLSHYEVKPNSSLERYDGIGPPFSCIFRIQNLGLFPIHGMMMKITIPIATRSGNRLLKLRDFLTDEVANTSCNIWGNSTEYRPTPVEEDLRRAPQLNHSNSDVVSINCNIRLVPNQEINFHLLGNLWLRSLKALKYKSMKIMVNAALQRQFHSPFIFREEDPSRQIVFEISKQEDWQVPIWIIVGSTLGGLLLLALLVLALWKLGFFRSARRRREPGLDPTPKVLE

SEQ ID NO: 40765 - protein, 1181 aa, Homo sapiens
  Payload ID: 8295
  Gene Symbol: ITGA2
  Gene Name: integrin, alpha 2 (CD49B, alpha 2 subunit of VLA-2 receptor)
  Uniprot ID: P17301
  ENSP ID: ENSP00000296585
MGPERTGAAPLPLLLVLALSQGILNCCLAYNVGLPEAKIFSGPSSEQFGYAVQQFINPKGNWLLVGSPWSGFPENRMGDVYKCPVDLSTATCEKLNLQTSTSIPNVTEMKTNMSLGLILTRNMGTGGFLTCGPLWAQQCGNQYYTTGVCSDISPDFQLSASFSPATQPCPSLIDVVVVCDESNSIYPWDAVKNFLEKFVQGLDIGPTKTQVGLIQYANNPRVVFNLNTYKTKEEMIVATSQTSQYGGDLTNTFGAIQYARKYAYSAASGGRRSATKVMVVVTDGESHDGSMLKAVIDQCNHDNILRFGIAVLGYLNRNALDTKNLIKEIKAIASIPTERYFFNVSDEAALLEKAGTLGEQIFSIEGTVQGGDNFQMEMSQVGFSADYSSQNDILMLGAVGAFGWSGTIVQKTSHGHLIFPKQAFDQILQDRNHSSYLGYSVAAISTGESTHFVAGAPRANYTGQIVLYSVNENGNITVIQAHRGDQIGSYFGSVLCSVDVDKDTITDVLLVGAPMYMSDLKKEEGRVYLFTIKEGILGQHQFLEGPEGIENTRFGSAIAALSDINMDGFNDVIVGSPLENQNSGAVYIYNGHQGTIRTKYSQKILGSDGAFRSHLQYFGRSLDGYGDLNGDSITDVSIGAFGQVVQLWSQSIADVAIEASFTPEKITLVNKNAQIILKLCFSAKFRPTKQNNQVAIVYNITLDADGFSSRVTSRGLFKENNERCLQKNMVVNQAQSCPEHIIYIQEPSDVVNSLDLRVDISLENPGTSPALEAYSETAKVFSIPFHKDCGEDGLCISDLVLDVRQIPAAQEQPFIVSNQNKRLTFSVTLKNKRESAYNTGIVVDFSENLFFASFSLPVDGTEVTCQVAASQKSVACDVGYPALKREQQVTFTINFDFNLQNLQNQASLSFQALSESQEENKADNLVNLKIPLLYDAEIHLTRSTNINFYEISSDGNVPSIVHSFEDVGPKFIFSLKVTTGSVPVSMATVIIHIPQYTKEKNPLMYLTGVQTDKAGDISCNADINPLKIGQTSSSVSFKSENFRHTKELNCRTASCSNVTCWLKDVHMKGEYFVNVTTRIWNGTFASSTFQTVQLTAAAEINTYNPEIYVIEDNTVTIPLMIMKPDEKAEVPTGVIIGSIIAGILLLLALVAILWKLGFFKRKYEKMTKNPDEIDETTELSS

SEQ ID NO: 40766 - protein, 54 aa, Homo sapiens
  Payload ID: 8295
  Gene Symbol: ITGA2
  Gene Name: integrin, alpha 2 (CD49B, alpha 2 subunit of VLA-2 receptor)
  ENSP ID: ENSP00000422095
MGPERTGAAPLPLLLVLALSQGYWLVHPGVAFLRTEWEMCINVLLTYPLPHVKN

SEQ ID NO: 40767 - protein, 942 aa, Homo sapiens
  Payload ID: 8295
  Gene Symbol: ITGA2
  Gene Name: integrin, alpha 2 (CD49B, alpha 2 subunit of VLA-2 receptor)
  ENSP ID: ENSP00000422145
MGPERTGAAPLPLLLVLALSQGILNCCLAYNVGLPEAKIFSGPSSEQFGYAVQQFINPKGNWLLVGSPWSGFPENRMGDVYKCPVDLSTATCEKLNLQTSTSIPNVTEMKTNMSLGLILTRNMGTGGFLTCGPLWAQQCGNQYYTTGVCSDISPDFQLSASFSPATQPCPSLIDVVVVCDESNSIYPWDAVKNFLEKFVQGLDIGPTKTQVGLIQYANNPRVVFNLNTYKTKEEMIVATSQTSQYGGDLTNTFGAIQYARKYAYSAASGGRRSATKVMVVVTDGESHDGSMLKAVIDQCNHDNILRFGIAVLGYLNRNALDTKNLIKEIKAIASIPTERYFFNVSDEAALLEKAGTLGEQIFSIEGTVQGGDNFQMEMSQVGFSADYSSQNDILMLGAVGAFGWSGTIVQKTSHGHLIFPKQAFDQILQDRNHSSYLGYSVAAISTGESTHFVAGAPRANYTGQIVLYSVNENGNITVIQAHRGDQIGSYFGSVLCSVDVDKDTITDVLLVGAPMYMSDLKKEEGRVYLFTIKEGILGQHQFLEGPEGIENTRFGSAIAALSDINMDGFNDVIVGSPLENQNSGAVYIYNGHQGTIRTKYSQKILGSDGAFRSHLQYFGRSLDGYGDLNGDSITDVSIGAFGQVVQLWSQSIADVAIEASFTPEKITLVNKNAQIILKLCFSAKFRPTKQNNQVAIVYNITLDADGFSSRVTSRGLFKENNERCLQKNMVVNQAQSCPEHIIYIQEPSDVVNSLDLRVDISLENPGTSPALEAYSETAKVFSIPFHKDCGEDGLCISDLVLDVRQIPAAQEQPFIVSNQNKRLTFSVTLKNKRESAYNTGIVVDFSENLFFASFSLPVDGTEVTCQVAASQKSVACDVGYPALKREQQVTFTINFDFNLQNLQNQASLSFQALSESQEENKADNLVNLKIPLLYDAEIHLTR

SEQ ID NO: 40768 - protein, 815 aa, Homo sapiens
  Payload ID: 8295
  Gene Symbol: ITGA2
  Gene Name: integrin, alpha 2 (CD49B, alpha 2 subunit of VLA-2 receptor)
  ENSP ID: ENSP00000424397
MGPERTGAAPLPLLLVLALSQGILNCCLAYNVGLPEAKIFSGPSSEQFGYAVQQFINPKGNWLLVGSPWSGFPENRMGDVYKCPVDLSTATCEKLNLQTSTSIPNVTEMKTNMSLGLILTRNMGTGGFLTCGPLWAQQCGNQYYTTGVCSDISPDFQLSASFSPATQPCPSLIDVVVVCDESNSIYPWDAVKNFLEKFVQGLDIGPTKTQVGLIQYANNPRVVFNLNTYKTKEEMIVATSQTSQYGGDLTNTFGAIQYARKYAYSAASGGRRSATKVMVVVTDGESHDGSMLKAVIDQCNHDNILRFGIAVLGYLNRNALDTKNLIKEIKAIASIPTERYFFNVSDEAALLEKAGTLGEQIFSIEGTVQGGDNFQMEMSQVGFSADYSSQNDILMLGAVGAFGWSGTIVQKTSHGHLIFPKQAFDQILQDRNHSSYLGYSVAAISTGESTHFVAGAPRANYTGQIVLYSVNENGNITVIQAHRGDQIGSYFGSVLCSVDVDKDTITDVLLVGAPMYMSDLKKEEGRVYLFTIKEGILGQHQFLEGPEGIENTRFGSAIAALSDINMDGFNDVIVGSPLENQNSGAVYIYNGHQGTIRTKYSQKILGSDGAFRSHLQYFGRSLDGYGDLNGDSITDVSIGAFGQVVQLWSQSIADVAIEASFTPEKITLVNKNAQIILKLCFSAKFRPTKQNNQVAIVYNITLDADGFSSRVTSRGLFKENNERCLQKNMVVNQAQSCPEHIIYIQEPSDVVNSLDLRVDISLENPGTSPALEAYSETAKVFSIPFHKDCGEDGLCISDLVLDVRQIPAAQLMGQK

SEQ ID NO: 40769 - protein, 641 aa, Homo sapiens
  Payload ID: 8295
  Gene Symbol: ITGA2
  Gene Name: integrin, alpha 2 (CD49B, alpha 2 subunit of VLA-2 receptor)
  ENSP ID: ENSP00000424642
MGPERTGAAPLPLLLVLALSQGILNCCLAYNVGLPEAKIFSGPSSEQFGYAVQQFINPKGNWLLVGSPWSGFPENRMGDVYKCPVDLSTATCEKLNLQTSTSIPNVTEMKTNMSLGLILTRNMGTGGFLTCGPLWAQQCGNQYYTTGVCSDISPDFQLSASFSPATQPCPSLIDVVVVCDESNSIYPWDAVKNFLEKFVQGLDIGPTKTQVGLIQYANNPRVVFNLNTYKTKEEMIVATSQTSQYGGDLTNTFGAIQYARKYAYSAASGGRRSATKVMVVVTDGESHDGSMLKAVIDQCNHDNILRFGIAVLGYLNRNALDTKNLIKEIKAIASIPTERYFFNVSDEAALLEKAGTLGEQIFSIEGTVQGGDNFQMEMSQVGFSADYSSQNDILMLGAVGAFGWSGTIVQKTSHGHLIFPKQAFDQILQDRNHSSYLGYSVAAISTGESTHFVAGAPRANYTGQIVLYSVNENGNITVIQAHRGDQIGSYFGSVLCSVDVDKDTITDVLLVGAPMYMSDLKKEEGRVYLFTIKEGILGQHQFLEGPEGIENTRFGSAIAALSDINMDGFNDVIVGSPLENQNSGAVYIYNGHQGTIRTKYSQLLCTIISCQTCSFRKSWDPMEPLGAISSTLGGPWMAMEI

SEQ ID NO: 40770 - protein, 175 aa, Homo sapiens
  Payload ID: 8295
  Gene Symbol: ITGA2
  Gene Name: integrin, alpha 2 (CD49B, alpha 2 subunit of VLA-2 receptor)
  ENSP ID: ENSP00000426489
MGPERTGAAPLPLLLVLALSQGILNCCLAYNVGLPEAKIFSGPSSEQFGYAVQQFINPKGNWLLVGSPWSGFPENRMGDVYKCPVDLSTATCEKLNLQTSTSIPNVTEMKTNMSLGLILTRNMGTGGFLTCGPLWAQQCGNQYYTTGVCSDISPDFQLSASFSPATQRGVNSVCQ

SEQ ID NO: 40771 - protein, 1039 aa, Homo sapiens
  Payload ID: 8296
  Gene Symbol: ITGA2B
  Gene Name: integrin, alpha 2b (platelet glycoprotein IIb of IIb/IIIa complex, antigen CD41)
  Uniprot ID: P08514
  ENSP ID: ENSP00000262407
MARALCPLQALWLLEWVLLLLGPCAAPPAWALNLDPVQLTFYAGPNGSQFGFSLDFHKDSHGRVAIVVGAPRTLGPSQEETGGVFLCPWRAEGGQCPSLLFDLRDETRNVGSQTLQTFKARQGLGASVVSWSDVIVACAPWQHWNVLEKTEEAEKTPVGSCFLAQPESGRRAEYSPCRGNTLSRIYVENDFSWDKRYCEAGFSSVVTQAGELVLGAPGGYYFLGLLAQAPVADIFSSYRPGILLWHVSSQSLSFDSSNPEYFDGYWGYSVAVGEFDGDLNTTEYVVGAPTWSWTLGAVEILDSYYQRLHRLRGEQMASYFGHSVAVTDVNGDGRHDLLVGAPLYMESRADRKLAEVGRVYLFLQPRGPHALGAPSLLLTGTQLYGRFGSAIAPLGDLDRDGYNDIAVAAPYGGPSGRGQVLVFLGQSEGLRSRPSQVLDSPFPTGSAFGFSLRGAVDIDDNGYPDLIVGAYGANQVAVYRAQPVVKASVQLLVQDSLNPAVKSCVLPQTKTPVSCFNIQMCVGATGHNIPQKLSLNAELQLDRQKPRQGRRVLLLGSQQAGTTLNLDLGGKHSPICHTTMAFLRDEADFRDKLSPIVLSLNVSLPPTEAGMAPAVVLHGDTHVQEQTRIVLDCGEDDVCVPQLQLTASVTGSPLLVGADNVLELQMDAANEGEGAYEAELAVHLPQGAHYMRALSNVEGFERLICNQKKENETRVVLCELGNPMKKNAQIGIAMLVSVGNLEEAGESVSFQLQIRSKNSQNPNSKIVLLDVPVRAEAQVELRGNSFPASLVVAAEEGEREQNSLDSWGPKVEHTYELHNNGPGTVNGLHLSIHLPGQSQPSDLLYILDIQPQGGLQCFPQPPVNPLKVDWGLPIPSPSPIHPAHHKRDRRQIFLPEPEQPSRLQDPVLVSCDSAPCTVVQCDLQEMARGQRAMVTVLAFLWLPSLYQRPLDQFVLQSHAWFNVSSLPYAVPPLSLPRGEAQVWTQLLRALEERAIPIWWVLVGVLGGLLLLTILVLAMWKVGFFKRNRPPLEEDDEEGE

SEQ ID NO: 40772 - protein, 32 aa, Homo sapiens
  Payload ID: 8296
  Gene Symbol: ITGA2B
  Gene Name: integrin, alpha 2b (platelet glycoprotein IIb of IIb/IIIa complex, antigen CD41)
  ENSP ID: ENSP00000465534
  MOD_RES (1)..(1): Any amino acid
XVPPLSLPRGEAQVGFFKRNRPPLEEDDEEGE

SEQ ID NO: 40773 - protein, 104 aa, Homo sapiens
  Payload ID: 8296
  Gene Symbol: ITGA2B
  Gene Name: integrin, alpha 2b (platelet glycoprotein IIb of IIb/IIIa complex, antigen CD41)
  ENSP ID: ENSP00000467269
  MOD_RES (1)..(1): Any amino acid
XNSFPASLVVAAEEGEREQNSLDSWGPKVEHTYELHNNGPGTVNGLHLSIHLPGQSQPSDLLYILDIQPQGGLQCFPQPPVNPLKVGFFKRNRPPLEEDDEEGE

SEQ ID NO: 40774 - protein, 1066 aa, Homo sapiens
  Payload ID: 8297
  Gene Symbol: ITGA3
  Gene Name: integrin, alpha 3 (antigen CD49C, alpha 3 subunit of VLA-3 receptor)
  Uniprot ID: P26006
  ENSP ID: ENSP00000007722
MGPGPSRAPRAPRLMLCALALMVAAGGCVVSAFNLDTRFLVVKEAGNPGSLFGYSVALHRQTERQQRYLLLAGAPRELAVPDGYTNRTGAVYLCPLTAHKDDCERMNITVKNDPGHHIIEDMWLGVTVASQGPAGRVLVCAHRYTQVLWSGSEDQRRMVGKCYVRGNDLELDSSDDWQTYHNEMCNSNTDYLETGMCQLGTSGGFTQNTVYFGAPGAYNWKGNSYMIQRKEWDLSEYSYKDPEDQGNLYIGYTMQVGSFILHPKNITIVTGAPRHRHMGAVFLLSQEAGGDLRRRQVLEGSQVGAYFGSAIALADLNNDGWQDLLVGAPYYFERKEEVGGAIYVFMNQAGTSFPAHPSLLLHGPSGSAFGLSVASIGDINQDGFQDIAVGAPFEGLGKVYIYHSSSKGLLRQPQQVIHGEKLGLPGLATFGYSLSGQMDVDENFYPDLLVGSLSDHIVLLRARPVINIVHKTLVPRPAVLDPALCTATSCVQVELCFAYNQSAGNPNYRRNITLAYTLEADRDRRPPRLRFAGSESAVFHGFFSMPEMRCQKLELLLMDNLRDKLRPIIISMNYSLPLRMPDRPRLGLRSLDAYPILNQAQALENHTEVQFQKECGPDNKCESNLQMRAAFVSEQQQKLSRLQYSRDVRKLLLSINVTNTRTSERSGEDAHEALLTLVVPPALLLSSVRPPGACQANETIFCELGNPFKRNQRMELLIAFEVIGVTLHTRDLQVQLQLSTSSHQDNLWPMILTLLVDYTLQTSLSMVNHRLQSFFGGTVMGESGMKTVEDVGSPLKYEFQVGPMGEGLVGLGTLVLGLEWPYEVSNGKWLLYPTEITVHGNGSWPCRPPGDLINPLNLTLSDPGDRPSSPQRRRRQLDPGGGQGPPPVTLAAAKKAKSETVLTCATGRAHCVWLECPIPDAPVVTNVTVKARVWNSTFIEDYRDFDRVRVNGWATLFLRTSIPTINMENKTTWFSVDIDSELVEELPAEIELWLVLVAVGAGLLLLGLIILLLWKCDFFKRTRYYQIMPKYHAVRIREEERYPPPGSTLPTKKHWVTSWQTRDQYY

SEQ ID NO: 40775 - protein, 1051 aa, Homo sapiens
  Payload ID: 8297
  Gene Symbol: ITGA3
  Gene Name: integrin, alpha 3 (antigen CD49C, alpha 3 subunit of VLA-3 receptor)
  Uniprot ID: P26006
  ENSP ID: ENSP00000315190
MGPGPSRAPRAPRLMLCALALMVAAGGCVVSAFNLDTRFLVVKEAGNPGSLFGYSVALHRQTERQQRYLLLAGAPRELAVPDGYTNRTGAVYLCPLTAHKDDCERMNITVKNDPGHHIIEDMWLGVTVASQGPAGRVLVCAHRYTQVLWSGSEDQRRMVGKCYVRGNDLELDSSDDWQTYHNEMCNSNTDYLETGMCQLGTSGGFTQNTVYFGAPGAYNWKGNSYMIQRKEWDLSEYSYKDPEDQGNLYIGYTMQVGSFILHPKNITIVTGAPRHRHMGAVFLLSQEAGGDLRRRQVLEGSQVGAYFGSAIALADLNNDGWQDLLVGAPYYFERKEEVGGAIYVFMNQAGTSFPAHPSLLLHGPSGSAFGLSVASIGDINQDGFQDIAVGAPFEGLGKVYIYHSSSKGLLRQPQQVIHGEKLGLPGLATFGYSLSGQMDVDENFYPDLLVGSLSDHIVLLRARPVINIVHKTLVPRPAVLDPALCTATSCVQVELCFAYNQSAGNPNYRRNITLAYTLEADRDRRPPRLRFAGSESAVFHGFFSMPEMRCQKLELLLMDNLRDKLRPIIISMNYSLPLRMPDRPRLGLRSLDAYPILNQAQALENHTEVQFQKECGPDNKCESNLQMRAAFVSEQQQKLSRLQYSRDVRKLLLSINVTNTRTSERSGEDAHEALLTLVVPPALLLSSVRPPGACQANETIFCELGNPFKRNQRMELLIAFEVIGVTLHTRDLQVQLQLSTSSHQDNLWPMILTLLVDYTLQTSLSMVNHRLQSFFGGTVMGESGMKTVEDVGSPLKYEFQVGPMGEGLVGLGTLVLGLEWPYEVSNGKWLLYPTEITVHGNGSWPCRPPGDLINPLNLTLSDPGDRPSSPQRRRRQLDPGGGQGPPPVTLAAAKKAKSETVLTCATGRAHCVWLECPIPDAPVVTNVTVKARVWNSTFIEDYRDFDRVRVNGWATLFLRTSIPTINMENKTTWFSVDIDSELVEELPAEIELWLVLVAVGAGLLLLGLIILLLWKCGFFKRARTRALYEAKRQKAEMKSQPSETERLTDDY

SEQ ID NO: 40776 - protein, 142 aa, Homo sapiens
  Payload ID: 8297
  Gene Symbol: ITGA3
  Gene Name: integrin, alpha 3 (antigen CD49C, alpha 3 subunit of VLA-3 receptor)
  ENSP ID: ENSP00000422826
MGPGPSRAPRAPRLMLCALALMVAAGGCVVSAFNLDTRFLVVKEAGNPGSLFGYSVALHRQTERQQRYLLLAGAPRELAVPDGYTNRTGAVYLCPLTAHKDDCERMNITVKNDPGHHIIEDMWLGVTVASQGPAGRVLETAT

SEQ ID NO: 40777 - protein, 84 aa, Homo sapiens
  Payload ID: 8297
  Gene Symbol: ITGA3
  Gene Name: integrin, alpha 3 (antigen CD49C, alpha 3 subunit of VLA-3 receptor)
  ENSP ID: ENSP00000425980
  MOD_RES (1)..(1): Any amino acid
XINQDGFQDIAVGAPFEGLGKVYIYHSSSKGLLRQPQQVIHGEKLGLPGLATFGYSLSGQMDVDENFYPDLLVGSLSDHIVLLR

SEQ ID NO: 40778 - protein, 221 aa, Homo sapiens
  Payload ID: 8297
  Gene Symbol: ITGA3
  Gene Name: integrin, alpha 3 (antigen CD49C, alpha 3 subunit of VLA-3 receptor)
  ENSP ID: ENSP00000426142
  MOD_RES (1)..(1): Any amino acid
XSNLQMRAAFVSEQQQKLSRLQYSRDVRKLLLSINVTNTRTSERSGEDAHEALLTLVVPPALLLSSVRPPGACQANETIFCELGNPFKRNQRMELLIAFEVIGVTLHTRDLQVQLQLSTSSHQDNLWPMILTLLVDYTLQTSLSMVNHRLQSFFGGTVMGESGMKTVEDVGSPLKYEFQPDPTLTMRQGPRGGVLSYPWLSEPAWLCPLPHGLCPKAHLRS

SEQ ID NO: 40779 - protein, 117 aa, Homo sapiens
  Payload ID: 8297
  Gene Symbol: ITGA3
  Gene Name: integrin, alpha 3 (antigen CD49C, alpha 3 subunit of VLA-3 receptor)
  ENSP ID: ENSP00000466652
WDLSEYSYKDPEDQGNLYIDIAVGAPFEGLGKVYIYHSSSKGLLRQPQQVIHGEKLGLPGLATFGYSLSGQMDVDENFYPDLLVGSLSDHIVLLRARPVINIVHKTLVPRPAVLDPA

SEQ ID NO: 40780 - protein, 29 aa, Homo sapiens
  Payload ID: 8297
  Gene Symbol: ITGA3
  Gene Name: integrin, alpha 3 (antigen CD49C, alpha 3 subunit of VLA-3 receptor)
  ENSP ID: ENSP00000467851
  MOD_RES (1)..(1): Any amino acid
XPVVTNVTVKARVWNSTFIEHPAQDLTQK

SEQ ID NO: 40781 - protein, 614 aa, Homo sapiens
  Payload ID: 8298
  Gene Symbol: ITGA4
  Gene Name: integrin, alpha 4 (antigen CD49D, alpha 4 subunit of VLA-4 receptor)
  ENSP ID: ENSP00000233573
MAWEARREPGPRRAAVRETVMLLLCLGVPTGRPYNVDTESALLYQGPHNTLFGYSVVLHSHGANRWLLVGAPTANWLANASVINPGAIYRCRIGKNPGQTCEQLQLGSPNGEPCGKTCLEERDNQWLGVTLSRQPGENGSIVTCGHRWKNIFYIKNENKLPTGGCYGVPPDLRTELSKRIAPCYQDYVKKFGENFASCQAGISSFYTKDLIVMGAPGSSYWTGSLFVYNITTNKYKAFLDKQNQVKFGSYLGYSVGAGHFRSQHTTEVVGGAPQHEQIGKAYIFSIDEKELNILHEMKGKKLGSYFGASVCAVDLNADGFSDLLVGAPMQSTIREEGRVFVYINSGSGAVMNAMETNLVGSDKYAARFGESIVNLGDIDNDGFEDVAIGAPQEDDLQGAIYIYNGRADGISSTFSQRIEGLQISKSLSMFGQSISGQIDADNNGYVDVAVGAFRSDSAVLLRTRPVVIVDASLSHPESVNRTKFDCVENGWPSVCIDLTLCFSYKGKEVPGYIVLFYNMSLDVNRKAESPPRFYFSSNGTSDVITGSIQVSSREANCRTHQAFMRKDVRDILTPIQIEAAYHLGPHVISKRSTEEFPPLQPILQQKKEKDIMKK

SEQ ID NO: 40782 - protein, 195 aa, Homo sapiens
  Payload ID: 8298
  Gene Symbol: ITGA4
  Gene Name: integrin, alpha 4 (antigen CD49D, alpha 4 subunit of VLA-4 receptor)
  Uniprot ID: P13612
  ENSP ID: ENSP00000340149
MAWEARREPGPRRAAVRETVMLLLCLGVPTGRPYNVDTESALLYQGPHNTLFGYSVVLHSHGANRWLLVGAPTANWLANASVINPGAIYRCRIGKNPGQTCEQLQLGSPNGEPCGKTCLEERDNQWLGVTLSRQPGENGSIVTCGHRWKNIFYIKNENKLPTGGCYGVPPDLRTELSKRIAPCYQGSISKYRART

SEQ ID NO: 40783 - protein, 1032 aa, Homo sapiens [sequence omitted]

SEQ ID NO: 40784 - protein, 1049 aa, Homo sapiens
  Payload ID: 8299
  Gene Symbol: ITGA5
  Gene Name: integrin, alpha 5 (fibronectin receptor, alpha polypeptide)
  Uniprot ID: P08648
  ENSP ID: ENSP00000293379
MGSRTPESPLHAVQLRWGPRRRPPLLPLLLLLLPPPPRVGGFNLDAEAPAVLSGPPGSFFGFSVEFYRPGTDGVSVLVGAPKANTSQPGVLQGGAVYLCPWGASPTQCTPIEFDSKGSRLLESSLSSSEGEEPVEYKSLQWFGATVRAHGSSILACAPLYSWRTEKEPLSDPVGTCYLSTDNFTRILEYAPCRSDFSWAAGQGYCQGGFSAEFTKTGRVVLGGPGSYFWQGQILSATQEQIAESYYPEYLINLVQGQLQTRQASSIYDDSYLGYSVAVGEFSGDDTEDFVAGVPKGNLTYGYVTILNGSDIRSLYNFSGEQMASYFGYAVAATDVNGDGLDDLLVGAPLLMDRTPDGRPQEVGRVYVYLQHPAGIEPTPTLTLTGHDEFGRFGSSLTPLGDLDQDGYNDVAIGAPFGGETQQGVVFVFPGGPGGLGSKPSQVLQPLWAASHTPDFFGSALRGGRDLDGNGYPDLIVGSFGVDKAVVYRGRPIVSASASLTIFPAMFNPEERSCSLEGNPVACINLSFCLNASGKHVADSIGFTVELQLDWQKQKGGVRRALFLASRQATLTQTLLIQNGAREDCREMKIYLRNESEFRDKLSPIHIALNFSLDPQAPVDSHGLRPALHYQSKSRIEDKAQILLDCGEDNICVPDLQLEVFGEQNHVYLGDKNALNLTFHAQNVGEGGAYEAELRVTAPPEAEYSGLVRHPGNFSSLSCDYFAVNQSRLLVCDLGNPMKAGASLWGGLRFTVPHLRDTKKTIQFDFQILSKNLNNSQSDVVSFRLSVEAQAQVTLNGVSKPEAVLFPVSDWHPRDQPQKEEDLGPAVHHVYELINQGPSSISQGVLELSCPQALEGQQLLYVTRVTGLNCTTNHPINPKGLELDPEGSLHHQQKREAPSRSSASSGPQILKCPEAECFRLRCELGPLHQQESQSLQLHFRVWAKTFLQREHQPFSLQCEAVYKALKMPYRILPRQLPQKERQVATAVQWTKAEGSYGVPLWIIILAILFGLLLLGLLIYILYKLGFFKRSLPYGTAMEKAQLKPPATSDA

SEQ ID NO: 40785 - protein, 137 aa, Homo sapiens
  Payload ID: 8299
  Gene Symbol: ITGA5
  Gene Name: integrin, alpha 5 (fibronectin receptor, alpha polypeptide)
  ENSP ID: ENSP00000405865
MGSRTPESPLHAVQLRWGPRRRPPLLPLLLLLLPPPPRVGGFNLDAEAPAVLSGPPGSFFGFSVEFYRPGTDGLSAPGVLTVQLRGRGACGVQVLAVVRGNSSSPWLLHLGMRSTVQLAHREGATERPRGHLLPLHR

SEQ ID NO: 40786 - protein, 120 aa, Homo sapiens
  Payload ID: 8299
  Gene Symbol: ITGA5
  Gene Name: integrin, alpha 5 (fibronectin receptor, alpha polypeptide)
  ENSP ID: ENSP00000447347
  MOD_RES (1)..(1): Any amino acid
XLLPLLLLLLPPPPRVGGFNLDAEAPAVLSGPPGSFFGFSVEFYRPGTDGVSVLVGAPKANTSQPGVLQGGAVYLCPWGASPTQCTPIEFDSKGMRSTVQLAHREGATERPRGHLLPLHR

SEQ ID NO: 40787 - protein, 119 aa, Homo sapiens
  Payload ID: 8299
  Gene Symbol: ITGA5
  Gene Name: integrin, alpha 5 (fibronectin receptor, alpha polypeptide)
  ENSP ID: ENSP00000450267
  MOD_RES (1)..(1): Any amino acid
XREAPSRSSASSGPQILREHQPFSLQCEAVYKALKMPYRILPRQLPQKERQVATAVQWTKAEGSYGVPLWIIILAILFGLLLLGLLIYILYKLGFFKRSLPYGTAMEKAQLKPPATSDA

SEQ ID NO: 40788 - protein, 1073 aa, Homo sapiens
  Payload ID: 8300
  Gene Symbol: ITGA6
  Gene Name: integrin, alpha 6
  Uniprot ID: P23229
  ENSP ID: ENSP00000264107
MAAAGQLCLLYLSAGLLSRLGAAFNLDTREDNVIRKYGDPGSLFGFSLAMHWQLQPEDKRLLLVGAPRAEALPLQRANRTGGLYSCDITARGPCTRIEFDNDADPTSESKEDQWMGVTVQSQGPGGKVVTCAHRYEKRQHVNTKQESRDIFGRCYVLSQNLRIEDDMDGGDWSFCDGRLRGHEKFGSCQQGVAATFTKDFHYIVFGAPGTYNWKGIVRVEQKNNTFFDMNIFEDGPYEVGGETEHDESLVPVPANSYLGFSLDSGKGIVSKDEITFVSGAPRANHSGAVVLLKRDMKSAHLLPEHIFDGEGLASSFGYDVAVVDLNKDGWQDIVIGAPQYFDRDGEVGGAVYVYMNQQGRWNNVKPIRLNGTKDSMFGIAVKNIGDINQDGYPDIAVGAPYDDLGKVFIYHGSANGINTKPTQVLKGISPYFGYSIAGNMDLDRNSYPDVAVGSLSDSVTIFRSRPVINIQKTITVTPNRIDLRQKTACGAPSGICLQVKSCFEYTANPAGYNPSISIVGTLEAEKERRKSGLSSRVQFRNQGSEPKYTQELTLKRQKQKVCMEETLWLQDNIRDKLRPIPITASVEIQEPSSRRRVNSLPEVLPILNSDEPKTAHIDVHFLKEGCGDDNVCNSNLKLEYKFCTREGNQDKFSYLPIQKGVPELVLKDQKDIALEITVTNSPSNPRNPTKDGDDAHEAKLIATFPDTLTYSAYRELRAFPEKQLSCVANQNGSQADCELGNPFKRNSNVTFYLVLSTTEVTFDTPDLDINLKLETTSNQDNLAPITAKAKVVIELLLSVSGVAKPSQVYFGGTVVGEQAMKSEDEVGSLIEYEFRVINLGKPLTNLGTATLNIQWPKEISNGKWLLYLVKVESKGLEKVTCEPQKEINSLNLTESHNSRKKREITEKQIDDNRKFSLFAERKYQTLNCSVNVNCVNIRCPLRGLDSKASLILRSRLWNSTFLEEYSKLNYLDILMRAFIDVTAAAENIRLPNAGTQVRVTVFPSKTVAQYSGVPWWIILVAILAGILMLALLVFILWKCGFFKRNKKDHYDATYHKAEIHAQPSDKERLTSDA

SEQ ID NO: 40789 - protein, 954 aa, Homo sapiens
  Payload ID: 8300
  Gene Symbol: ITGA6
  Gene Name: integrin, alpha 6
  Uniprot ID: P23229
  ENSP ID: ENSP00000386614
MGVTVQSQGPGGKVVTCAHRYEKRQHVNTKQESRDIFGRCYVLSQNLRIEDDMDGGDWSFCDGRLRGHEKFGSCQQGVAATFTKDFHYIVFGAPGTYNWKGLLFLTSVSYTDPDQFVYKTRPPREQPDTFPDVMMNSYLGFSLDSGKGIVSKDEITFVSGAPRANHSGAVVLLKRDMKSAHLLPEHIFDGEGLASSFGYDVAVVDLNKDGWQDIVIGAPQYFDRDGEVGGAVYVYMNQQGRWNNVKPIRLNGTKDSMFGIAVKNIGDINQDGYPDIAVGAPYDDLGKVFIYHGSANGINTKPTQVLKGISPYFGYSIAGNMDLDRNSYPDVAVGSLSDSVTIFRSRPVINIQKTITVTPNRIDLRQKTACGAPSGICLQVKSCFEYTANPAGYNPSISIVGTLEAEKERRKSGLSSRVQFRNQGSEPKYTQELTLKRQKQKVCMEETLWLQDNIRDKLRPIPITASVEIQEPSSRRRVNSLPEVLPILNSDEPKTAHIDVHFLKEGCGDDNVCNSNLKLEYKFCTREGNQDKFSYLPIQKGVPELVLKDQKDIALEITVTNSPSNPRNPTKDGDDAHEAKLIATFPDTLTYSAYRELRAFPEKQLSCVANQNGSQADCELGNPFKRNSNVTFYLVLSTTEVTFDTPDLDINLKLETTSNQDNLAPITAKAKVVIELLLSVSGVAKPSQVYFGGTVVGEQAMKSEDEVGSLIEYEFRVINLGKPLTNLGTATLNIQWPKEISNGKWLLYLVKVESKGLEKVTCEPQKEINSLNLTESHNSRKKREITEKQIDDNRKFSLFAERKYQTLNCSVNVNCVNIRCPLRGLDSKASLILRSRLWNSTFLEEYSKLNYLDILMRAFIDVTAAAENIRLPNAGTQVRVTVFPSKTVAQYSGVPWWIILVAILAGILMLALLVFILWKCGFFKRNKKDHYDATYHKAEIHAQPSDKERLTSDA

SEQ ID NO: 40790 - protein, 1091 aa, Homo sapiens
  Payload ID: 8300
  Gene Symbol: ITGA6
  Gene Name: integrin, alpha 6
  Uniprot ID: P23229
  ENSP ID: ENSP00000386896
MAAAGQLCLLYLSAGLLSRLGAAFNLDTREDNVIRKYGDPGSLFGFSLAMHWQLQPEDKRLLLVGAPRAEALPLQRANRTGGLYSCDITARGPCTRIEFDNDADPTSESKEDQWMGVTVQSQGPGGKVVTCAHRYEKRQHVNTKQESRDIFGRCYVLSQNLRIEDDMDGGDWSFCDGRLRGHEKFGSCQQGVAATFTKDFHYIVFGAPGTYNWKGIVRVEQKNNTFFDMNIFEDGPYEVGGETEHDESLVPVPANSYLGFSLDSGKGIVSKDEITFVSGAPRANHSGAVVLLKRDMKSAHLLPEHIFDGEGLASSFGYDVAVVDLNKDGWQDIVIGAPQYFDRDGEVGGAVYVYMNQQGRWNNVKPIRLNGTKDSMFGIAVKNIGDINQDGYPDIAVGAPYDDLGKVFIYHGSANGINTKPTQVLKGISPYFGYSIAGNMDLDRNSYPDVAVGSLSDSVTIFRSRPVINIQKTITVTPNRIDLRQKTACGAPSGICLQVKSCFEYTANPAGYNPSISIVGTLEAEKERRKSGLSSRVQFRNQGSEPKYTQELTLKRQKQKVCMEETLWLQDNIRDKLRPIPITASVEIQEPSSRRRVNSLPEVLPILNSDEPKTAHIDVHFLKEGCGDDNVCNSNLKLEYKFCTREGNQDKFSYLPIQKGVPELVLKDQKDIALEITVTNSPSNPRNPTKDGDDAHEAKLIATFPDTLTYSAYRELRAFPEKQLSCVANQNGSQADCELGNPFKRNSNVTFYLVLSTTEVTFDTPDLDINLKLETTSNQDNLAPITAKAKVVIELLLSVSGVAKPSQVYFGGTVVGEQAMKSEDEVGSLIEYEFRVINLGKPLTNLGTATLNIQWPKEISNGKWLLYLVKVESKGLEKVTCEPQKEINSLNLTESHNSRKKREITEKQIDDNRKFSLFAERKYQTLNCSVNVNCVNIRCPLRGLDSKASLILRSRLWNSTFLEEYSKLNYLDILMRAFIDVTAAAENIRLPNAGTQVRVTVFPSKTVAQYSGVPWWIILVAILAGILMLALLVFILWKCGFFKRSRYDDSVPRYHAVRIRKEEREIKDEKYIDNLEKKQWITKWNENESYS

SEQ ID NO: 40791 - protein, 258 aa, Homo sapiens
  Payload ID: 8300
  Gene Symbol: ITGA6
  Gene Name: integrin, alpha 6
  ENSP ID: ENSP00000388435
TSNQDNLAPITAKAKVVIELLLSVSGVAKPSQVYFGGTVVGEQAMKSEDEVGSLIEYEFRESHNSRKKREITEKQIDDNRKFSLFAERKYQTLNCSVNVNCVNIRCPLRGLDSKASLILRSRLWNSTFLEEYSKLNYLDILMRAFIDVTAAAENIRLPNAGTQVRVTVFPSKTVAQYSGVPWWIILVAILAGILMLALLVFILWKCGFFKRSRYDDSVPRYHAVRIRKEEREIKDEKYIDNLEKKQWITKWNENESYS

SEQ ID NO: 40792 - protein, 1086 aa, Homo sapiens
  Payload ID: 8300
  Gene Symbol: ITGA6
  Gene Name: integrin, alpha 6
  Uniprot ID: P23229
  ENSP ID: ENSP00000394169
MAAAGQLCLLYLSAGLLSRLGAAFNLDTREDNVIRKYGDPGSLFGFSLAMHWQLQPEDKRLLLVGAPRAEALPLQRANRTGGLYSCDITARGPCTRIEFDNDADPTSESKEDQWMGVTVQSQGPGGKVVTCAHRYEKRQHVNTKQESRDIFGRCYVLSQNLRIEDDMDGGDWSFCDGRLRGHEKFGSCQQGVAATFTKDFHYIVFGAPGTYNWKGLLFLTSVSYTDPDQFVYKTRPPREQPDTFPDVMMNSYLGFSLDSGKGIVSKDEITFVSGAPRANHSGAVVLLKRDMKSAHLLPEHIFDGEGLASSFGYDVAVVDLNKDGWQDIVIGAPQYFDRDGEVGGAVYVYMNQQGRWNNVKPIRLNGTKDSMFGIAVKNIGDINQDGYPDIAVGAPYDDLGKVFIYHGSANGINTKPTQVLKGISPYFGYSIAGNMDLDRNSYPDVAVGSLSDSVTIFRSRPVINIQKTITVTPNRIDLRQKTACGAPSGICLQVKSCFEYTANPAGYNPSISIVGTLEAEKERRKSGLSSRVQFRNQGSEPKYTQELTLKRQKQKVCMEETLWLQDNIRDKLRPIPITASVEIQEPSSRRRVNSLPEVLPILNSDEPKTAHIDVHFLKEGCGDDNVCNSNLKLEYKFCTREGNQDKFSYLPIQKGVPELVLKDQKDIALEITVTNSPSNPRNPTKDGDDAHEAKLIATFPDTLTYSAYRELRAFPEKQLSCVANQNGSQADCELGNPFKRNSNVTFYLVLSTTEVTFDTPDLDINLKLETTSNQDNLAPITAKAKVVIELLLSVSGVAKPSQVYFGGTVVGEQAMKSEDEVGSLIEYEFRVINLGKPLTNLGTATLNIQWPKEISNGKWLLYLVKVESKGLEKVTCEPQKEINSLNLTESHNSRKKREITEKQIDDNRKFSLFAERKYQTLNCSVNVNCVNIRCPLRGLDSKASLILRSRLWNSTFLEEYSKLNYLDILMRAFIDVTAAAENIRLPNAGTQVRVTVFPSKTVAQYSGVPWWIILVAILAGILMLALLVFILWKCGFFKRSRYDDSVPRYHAVRIRKEEREIKDEKYIDNLEKKQWITKWNENESYS

SEQ ID NO: 40793 - protein, 1130 aa, Homo sapiens
  Payload ID: 8300
  Gene Symbol: ITGA6
  Gene Name: integrin, alpha 6
  Uniprot ID: P23229
  ENSP ID: ENSP00000406694
MAAAGQLCLLYLSAGLLSRLGAAFNLDTREDNVIRKYGDPGSLFGFSLAMHWQLQPEDKRLLLVGAPRAEALPLQRANRTGGLYSCDITARGPCTRIEFDNDADPTSESKEDQWMGVTVQSQGPGGKVVTCAHRYEKRQHVNTKQESRDIFGRCYVLSQNLRIEDDMDGGDWSFCDGRLRGHEKFGSCQQGVAATFTKDFHYIVFGAPGTYNWKGIVRVEQKNNTFFDMNIFEDGPYEVGGETEHDESLVPVPANSYLGLLFLTSVSYTDPDQFVYKTRPPREQPDTFPDVMMNSYLGFSLDSGKGIVSKDEITFVSGAPRANHSGAVVLLKRDMKSAHLLPEHIFDGEGLASSFGYDVAVVDLNKDGWQDIVIGAPQYFDRDGEVGGAVYVYMNQQGRWNNVKPIRLNGTKDSMFGIAVKNIGDINQDGYPDIAVGAPYDDLGKVFIYHGSANGINTKPTQVLKGISPYFGYSIAGNMDLDRNSYPDVAVGSLSDSVTIFRSRPVINIQKTITVTPNRIDLRQKTACGAPSGICLQVKSCFEYTANPAGYNPSISIVGTLEAEKERRKSGLSSRVQFRNQGSEPKYTQELTLKRQKQKVCMEETLWLQDNIRDKLRPIPITASVEIQEPSSRRRVNSLPEVLPILNSDEPKTAHIDVHFLKEGCGDDNVCNSNLKLEYKFCTREGNQDKFSYLPIQKGVPELVLKDQKDIALEITVTNSPSNPRNPTKDGDDAHEAKLIATFPDTLTYSAYRELRAFPEKQLSCVANQNGSQADCELGNPFKRNSNVTFYLVLSTTEVTFDTPDLDINLKLETTSNQDNLAPITAKAKVVIELLLSVSGVAKPSQVYFGGTVVGEQAMKSEDEVGSLIEYEFRVINLGKPLTNLGTATLNIQWPKEISNGKWLLYLVKVESKGLEKVTCEPQKEINSLNLTESHNSRKKREITEKQIDDNRKFSLFAERKYQTLNCSVNVNCVNIRCPLRGLDSKASLILRSRLWNSTFLEEYSKLNYLDILMRAFIDVTAAAENIRLPNAGTQVRVTVFPSKTVAQYSGVPWWIILVAILAGILMLALLVFILWKCGFFKRSRYDDSVPRYHAVRIRKEEREIKDEKYIDNLEKKQWITKWNENESYS

SEQ ID NO: 40794 - protein, 231 aa, Homo sapiens
  Payload ID: 8300
  Gene Symbol: ITGA6
  Gene Name: integrin, alpha 6
  ENSP ID: ENSP00000413470
MGVTVQSQGPGGKVVTCAHRYEKRQHVNTKQESRDIFGRCYVLSQNLRIEDDMDGGDWSFCDGRLRGHEKFGSCQQGVAATFTKDFHYIVFGAPGTYNWKGIVRVEQKNNTFFDMNIFEDGPYEVGGETEHDESLVPVPANSYLGFSLDSGKGIVSKDEITFVSGAPRANHSGAVVLLKRDMKSAHLLPEHIFDGEGLASSFGYDVAVVDLNKDGWQDIVIGAPQYFDRDG

SEQ ID NO: 40795 - protein, 1137 aa, Homo sapiens
  Payload ID: 8301
  Gene Symbol: ITGA7
  Gene Name: integrin, alpha 7
  Uniprot ID: Q13683
  ENSP ID: ENSP00000257879
MAGARSRDPWGASGICYLFGSLLVELLFSRAVAFNLDVMGALRKEGEPGSLFGFSVALHRQLQPRPQSWLLVGAPQALALPGQQANRTGGLFACPLSLEETDCYRVDIDQGADMQKESKENQWLGVSVRSQGPGGKIVTCAHRYEARQRVDQILETRDMIGRCFVLSQDLAIRDELDGGEWKFCEGRPQGHEQFGFCQQGTAAAFSPDSHYLLFGAPGTYNWKGLLFVTNIDSSDPDQLVYKTLDPADRLPGPAGDLALNSYLGFSIDSGKGLVRAEELSFVAGAPRANHKGAVVILRKDSASRLVPEVMLSGERLTSGFGYSLAVADLNSDGWPDLIVGAPYFFERQEELGGAVYVYLNQGGHWAGISPLRLCGSPDSMFGISLAVLGDLNQDGFPDIAVGAPFDGDGKVFIYHGSSLGVVAKPSQVLEGEAVGIKSFGYSLSGSLDMDGNQYPDLLVGSLADTAVLFRARPILHVSHEVSIAPRSIDLEQPNCAGGHSVCVDLRVCFSYIAVPSSYSPTVALDYVLDADTDRRLRGQVPRVTFLSRNLEEPKHQASGTVWLKHQHDRVCGDAMFQLQENVKDKLRAIVVTLSYSLQTPRLRRQAPGQGLPPVAPILNAHQPSTQRAEIHFLKQGCGEDKICQSNLQLVRARFCTRVSDTEFQPLPMDVDGTTALFALSGQPVIGLELMVTNLPSDPAQPQADGDDAHEAQLLVMLPDSLHYSGVRALDPAEKPLCLSNENASHVECELGNPMKRGAQVTFYLILSTSGISIETTELEVELLLATISEQELHPVSARARVFIELPLSIAGMAIPQQLFFSGVVRGERAMQSERDVGSKVKYEVTVSNQGQSLRTLGSAFLNIMWPHEIANGKWLLYPMQVELEGGQGPGQKGLCSPRPNILHLDVDSRDRRRRELEPPEQQEPGERQEPSMSWWPVSSAEKKKNITLDCARGTANCVVFSCPLYSFDRAAVLHVWGRLWNSTFLEEYSAVKSLEVIVRANITVKSSIKNLMLRDASTVIPVMVYLDPMAVVAEGVPWWVILLAVLAGLLVLALLVLLLWKMGFFKRAKHPEATVPQYHAVKIPREDRQQFKEEKTGTILRNNWGSPRREGPDAHPILAADGHPELGPDGHPGPGTA

SEQ ID NO: 40796 - protein, 1131 aa, Homo sapiens
  Payload ID: 8301
  Gene Symbol: ITGA7
  Gene Name: integrin, alpha 7
  ENSP ID: ENSP00000343009
MAGARSRDPWGASGICYLFGSLLVELLFSRAVAFNLDVMGALRKEGEPGSLFGFSVALHRQLQPRPQSWLLVGAPQALALPGQQANRTGGLFACPLSLEETDCYRVDIDQGADMQKESKENQWLGVSVRSQGPGGKIVTCAHRYEARQRVDQILETRDMIGRCFVLSQDLAIRDELDGGEWKFCEGRPQGHEQFGFCQQGTAAAFSPDSHYLLFGAPGTYNWKGLLFVTNIDSSDPDQLVYKTLDPADRLPGPAGDLALNSYLGFSIDSGKGLVRAEELSFVAGAPRANHKGAVVILRKDSASRLVPEVMLSGERLTSGFGYSLAVADLNSDGWPDLIVGAPYFFERQEELGGAVYVYLNQGGHWAGISPLRLCGSPDSMFGISLAVLGDLNQDGFPDIAVGAPFDGDGKVFIYHGSSLGVVAKPSQVLEGEAVGIKSFGYSLSGSLDMDGNQYPDLLVGSLADTAVLFRARPILHVSHEVSIAPRSIDLEQPNCAGGHSVCVDLRVCFSYIAVPSSYSPTVDADTDRRLRGQVPRVTFLSRNLEEPKHQASGTVWLKHQHDRVCGDAMFQLQENVKDKLRAIVVTLSYSLQTPRLRRQAPGQGLPPVAPILNAHQPSTQRAEIHFLKQGCGEDKICQSNLQLVRARFCTRVSDTEFQPLPMDVDGTTALFALSGQPVIGLELMVTNLPSDPAQPQADGDDAHEAQLLVMLPDSLHYSGVRALDPAEKPLCLSNENASHVECELGNPMKRGAQVTFYLILSTSGISIETTELEVELLLATISEQELHPVSARARVFIELPLSIAGMAIPQQLFFSGVVRGERAMQSERDVGSKVKYEVTVSNQGQSLRTLGSAFLNIMWPHEIANGKWLLYPMQVELEGGQGPGQKGLCSPRPNILHLDVDSRDRRRRELEPPEQQEPGERQEPSMSWWPVSSAEKKKNITLDCARGTANCVVFSCPLYSFDRAAVLHVWGRLWNSTFLEEYSAVKSLEVIVRANITVKSSIKNLMLRDASTVIPVMVYLDPMAVVAEGVPWWVILLAVLAGLLVLALLVLLLWKMGFFKRAKHPEATVPQYHAVKIPREDRQQFKEEKTGTILRNNWGSPRREGPDAHPILAADGHPELGPDGHPGPGTA

SEQ ID NO: 40797 - protein, 1044 aa, Homo sapiens
  Payload ID: 8301
  Gene Symbol: ITGA7
  Gene Name: integrin, alpha 7
  Uniprot ID: Q13683
  ENSP ID: ENSP00000393844
MAPFATPMVQALTTTRIQRQAEGFQCWRECGTRRSPFEGKETCAHRYEARQRVDQILETRDMIGRCFVLSQDLAIRDELDGGEWKFCEGRPQGHEQFGFCQQGTAAAFSPDSHYLLFGAPGTYNWKGTARVELCAQGSADLAHLDDGPYEAGGEKEQDPRLIPVPANSYFGFSIDSGKGLVRAEELSFVAGAPRANHKGAVVILRKDSASRLVPEVMLSGERLTSGFGYSLAVADLNSDGWPDLIVGAPYFFERQEELGGAVYVYLNQGGHWAGISPLRLCGSPDSMFGISLAVLGDLNQDGFPDIAVGAPFDGDGKVFIYHGSSLGVVAKPSQVLEGEAVGIKSFGYSLSGSLDMDGNQYPDLLVGSLADTAVLFRARPILHVSHEVSIAPRSIDLEQPNCAGGHSVCVDLRVCFSYIAVPSSYSPTVALDYVLDADTDRRLRGQVPRVTFLSRNLEEPKHQASGTVWLKHQHDRVCGDAMFQLQENVKDKLRAIVVTLSYSLQTPRLRRQAPGQGLPPVAPILNAHQPSTQRAEIHFLKQGCGEDKICQSNLQLVRARFCTRVSDTEFQPLPMDVDGTTALFALSGQPVIGLELMVTNLPSDPAQPQADGDDAHEAQLLVMLPDSLHYSGVRALDPAEKPLCLSNENASHVECELGNPMKRGAQVTFYLILSTSGISIETTELEVELLLATISEQELHPVSARARVFIELPLSIAGMAIPQQLFFSGVVRGERAMQSERDVGSKVKYEVTVSNQGQSLRTLGSAFLNIMWPHEIANGKWLLYPMQVELEGGQGPGQKGLCSPRPNILHLDVDSRDRRRRELEPPEQQEPGERQEPSMSWWPVSSAEKKKNITLDCARGTANCVVFSCPLYSFDRAAVLHVWGRLWNSTFLEEYSAVKSLEVIVRANITVKSSIKNLMLRDASTVIPVMVYLDPMAVVAEGVPWWVILLAVLAGLLVLALLVLLLWKMGFFKRAKHPEATVPQYHAVKIPREDRQQFKEEKTGTILRNNWGSPRREGPDAHPILAADGHPELGPDGHPGPGTA

SEQ ID NO: 40798 - protein, 153 aa, Homo sapiens
  Payload ID: 8301
  Gene Symbol: ITGA7
  Gene Name: integrin, alpha 7
  ENSP ID: ENSP00000450578
MIGRCFVLSQDLAIRDELDGGEWKFCEGRPQGHEQFGFCQQGTAAAFSPDSHYLLFGAPGTYNWKGLLFVTNIDSSDPDQLVYKTLDPADRLPGPAGDLALNSYLGFSIDSGKGLVRAEELSFVAGAPRANHKGAVVILRKDSASRLVPEVML

SEQ ID NO: 40799 - protein, 98 aa, Homo sapiens
  Payload ID: 8301
  Gene Symbol: ITGA7
  Gene Name: integrin, alpha 7
  ENSP ID: ENSP00000450679
MVQALTTTRIQRQAEGFQCWRGFSIDSGKGLVRAEELSFVAGAPRANHKGAVVILRKDSASRLVPEVMLSGERLTSGFGYSLAVADLNSDGYCSGCPL

SEQ ID NO: 40800 - protein, 109 aa, Homo sapiens
  Payload ID: 8301
  Gene Symbol: ITGA7
  Gene Name: integrin, alpha 7
  ENSP ID: ENSP00000450693
  MOD_RES (1)..(1): Any amino acid
XVKDKLRAIVVTLSYSLQTPRLRRQAPGQGLPPVAPILNAHQPSTQRAEIHFLKQGCGEDKICQSNLQLVRARFCTRVSDTEFQPLPMRSHSACPMRMPPMLSVSWGTP

SEQ ID NO: 40801 - protein, 48 aa, Homo sapiens
  Payload ID: 8301
  Gene Symbol: ITGA7
  Gene Name: integrin, alpha 7
  ENSP ID: ENSP00000450798
MVQALTTTRIQRQAEGFQCWRGCWWVLPRPWLFLGSRRIALEASSLAR

SEQ ID NO: 40802 - protein, 205 aa, Homo sapiens
  Payload ID: 8301
  Gene Symbol: ITGA7
  Gene Name: integrin, alpha 7
  ENSP ID: ENSP00000451039
  MOD_RES (1)..(1): Any amino acid
XCAACLGPSLEQHLSGGVLSCEVPGSDCPGQHHSEVLHKELDAPRCLHSDPSDGILGPHGCGGRRSALVGHPPGCTGWAAGASTAGAAPVEVWLLPSEQPELIFSHQLSPGLSGCAAFSHGSWGSRDCGMGFFKRAKHPEATVPQYHAVKIPREDRQQFKEEKTGTILRNNWGSPRREGPDAHPILAADGHPELGPDGHPGPGTA

SEQ ID NO: 40803 - protein, 55 aa, Homo sapiens
  Payload ID: 8301
  Gene Symbol: ITGA7
  Gene Name: integrin, alpha 7
  ENSP ID: ENSP00000451311
MAPFATPMVQALTTTRIQRQAEGFQCWRGCWWVLPRPWLFLGSRRIALEASSLAR

SEQ ID NO: 40804 - protein, 35 aa, Homo sapiens
  Payload ID: 8301
  Gene Symbol: ITGA7
  Gene Name: integrin, alpha 7
  ENSP ID: ENSP00000452043
  MOD_RES (1)..(1): Any amino acid
XEGFQCWRGCWWVLPRPWLFLGSRRIALEASSLAR

SEQ ID NO: 40805 - protein, 1141 aa, Homo sapiens
  Payload ID: 8301
  Gene Symbol: ITGA7
  Gene Name: integrin, alpha 7
  Uniprot ID: Q13683
  ENSP ID: ENSP00000452120
MAGARSRDPWGASGICYLFGSLLVELLFSRAVAFNLDVMGALRKEGEPGSLFGFSVALHRQLQPRPQSWLLVGAPQALALPGQQANRTGGLFACPLSLEETDCYRVDIDQGADMQKESKENQWLGVSVRSQGPGGKIVTCAHRYEARQRVDQILETRDMIGRCFVLSQDLAIRDELDGGEWKFCEGRPQGHEQFGFCQQGTAAAFSPDSHYLLFGAPGTYNWKGTARVELCAQGSADLAHLDDGPYEAGGEKEQDPRLIPVPANSYFGFSIDSGKGLVRAEELSFVAGAPRANHKGAVVILRKDSASRLVPEVMLSGERLTSGFGYSLAVADLNSDGWPDLIVGAPYFFERQEELGGAVYVYLNQGGHWAGISPLRLCGSPDSMFGISLAVLGDLNQDGFPDIAVGAPFDGDGKVFIYHGSSLGVVAKPSQVLEGEAVGIKSFGYSLSGSLDMDGNQYPDLLVGSLADTAVLFRARPILHVSHEVSIAPRSIDLEQPNCAGGHSVCVDLRVCFSYIAVPSSYSPTVALDYVLDADTDRRLRGQVPRVTFLSRNLEEPKHQASGTVWLKHQHDRVCGDAMFQLQENVKDKLRAIVVTLSYSLQTPRLRRQAPGQGLPPVAPILNAHQPSTQRAEIHFLKQGCGEDKICQSNLQLVRARFCTRVSDTEFQPLPMDVDGTTALFALSGQPVIGLELMVTNLPSDPAQPQADGDDAHEAQLLVMLPDSLHYSGVRALDPAEKPLCLSNENASHVECELGNPMKRGAQVTFYLILSTSGISIETTELEVELLLATISEQELHPVSARARVFIELPLSIAGMAIPQQLFFSGVVRGERAMQSERDVGSKVKYEVTVSNQGQSLRTLGSAFLNIMWPHEIANGKWLLYPMQVELEGGQGPGQKGLCSPRPNILHLDVDSRDRRRRELEPPEQQEPGERQEPSMSWWPVSSAEKKKNITLDCARGTANCVVFSCPLYSFDRAAVLHVWGRLWNSTFLEEYSAVKSLEVIVRANITVKSSIKNLMLRDASTVIPVMVYLDPMAVVAEGVPWWVILLAVLAGLLVLALLVLLLWKMGFFKRAKHPEATVPQYHAVKIPREDRQQFKEEKTGTILRNNWGSPRREGPDAHPILAADGHPELGPDGHPGPGTA

SEQ ID NO: 40806 - protein, 1181 aa, Homo sapiens
  Payload ID: 8301
  Gene Symbol: ITGA7
  Gene Name: integrin, alpha 7
  Uniprot ID: Q13683
  ENSP ID: ENSP00000452387
MAGARSRDPWGASGICYLFGSLLVELLFSRAVAFNLDVMGALRKEGEPGSLFGFSVALHRQLQPRPQSWLLVGAPQALALPGQQANRTGGLFACPLSLEETDCYRVDIDQGADMQKESKENQWLGVSVRSQGPGGKIVTCAHRYEARQRVDQILETRDMIGRCFVLSQDLAIRDELDGGEWKFCEGRPQGHEQFGFCQQGTAAAFSPDSHYLLFGAPGTYNWKGTARVELCAQGSADLAHLDDGPYEAGGEKEQDPRLIPVPANSYFGLLFVTNIDSSDPDQLVYKTLDPADRLPGPAGDLALNSYLGFSIDSGKGLVRAEELSFVAGAPRANHKGAVVILRKDSASRLVPEVMLSGERLTSGFGYSLAVADLNSDGWPDLIVGAPYFFERQEELGGAVYVYLNQGGHWAGISPLRLCGSPDSMFGISLAVLGDLNQDGFPDIAVGAPFDGDGKVFIYHGSSLGVVAKPSQVLEGEAVGIKSFGYSLSGSLDMDGNQYPDLLVGSLADTAVLFRARPILHVSHEVSIAPRSIDLEQPNCAGGHSVCVDLRVCFSYIAVPSSYSPTVALDYVLDADTDRRLRGQVPRVTFLSRNLEEPKHQASGTVWLKHQHDRVCGDAMFQLQENVKDKLRAIVVTLSYSLQTPRLRRQAPGQGLPPVAPILNAHQPSTQRAEIHFLKQGCGEDKICQSNLQLVRARFCTRVSDTEFQPLPMDVDGTTALFALSGQPVIGLELMVTNLPSDPAQPQADGDDAHEAQLLVMLPDSLHYSGVRALDPAEKPLCLSNENASHVECELGNPMKRGAQVTFYLILSTSGISIETTELEVELLLATISEQELHPVSARARVFIELPLSIAGMAIPQQLFFSGVVRGERAMQSERDVGSKVKYEVTVSNQGQSLRTLGSAFLNIMWPHEIANGKWLLYPMQVELEGGQGPGQKGLCSPRPNILHLDVDSRDRRRRELEPPEQQEPGERQEPSMSWWPVSSAEKKKNITLDCARGTANCVVFSCPLYSFDRAAVLHVWGRLWNSTFLEEYSAVKSLEVIVRANITVKSSIKNLMLRDASTVIPVMVYLDPMAVVAEGVPWWVILLAVLAGLLVLALLVLLLWKMGFFKRAKHPEATVPQYHAVKIPREDRQQFKEEKTGTILRNNWGSPRREGPDAHPILAADGHPELGPDGHPGPGTA

SEQ ID NO: 40807 - protein, 48 aa, Homo sapiens; identical to SEQ ID NO: 40801
  Payload ID: 8301
  Gene Symbol: ITGA7
  Gene Name: integrin, alpha 7
  ENSP ID: ENSP00000452467

SEQ ID NO: 40808 - protein, 1063 aa, Homo sapiens
  Payload ID: 8302
  Gene Symbol: ITGA8
  Gene Name: integrin, alpha 8
  Uniprot ID: P53708
  ENSP ID: ENSP00000367316
MSPGASRGPRGSQAPLIAPLCCAAAALGMLLWSPACQAFNLDVEKLTVYSGPKGSYFGYAVDFHIPDARTASVLVGAPKANTSQPDIVEGGAVYYCPWPAEGSAQCRQIPFDTTNNRKIRVNGTKEPIEFKSNQWFGATVKAHKGKVVACAPLYHWRTLKPTPEKDPVGTCYVAIQNFSAYAEFSPCRNSNADPEGQGYCQAGFSLDFYKNGDLIVGGPGSFYWQGQVITASVADIIANYSFKDILRKLAGEKQTEVAPASYDDSYLGYSVAAGEFTGDSQQELVAGIPRGAQNFGYVSIINSTDMTFIQNFTGEQMASYFGYTVVVSDVNSDGLDDVLVGAPLFMEREFESNPREVGQIYLYLQVSSLLFRDPQILTGTETFGRFGSAMAHLGDLNQDGYNDIAIGVPFAGKDQRGKVLIYNGNKDGLNTKPSQVLQGVWASHAVPSGFGFTLRGDSDIDKNDYPDLIVGAFGTGKVAVYRARPVVTVDAQLLLHPMIINLENKTCQVPDSMTSAACFSLRVCASVTGQSIANTIVLMAEVQLDSLKQKGAIKRTLFLDNHQAHRVFPLVIKRQKSHQCQDFIVYLRDETEFRDKLSPINISLNYSLDESTFKEGLEVKPILNYYRENIVSEQAHILVDCGEDNLCVPDLKLSARPDKHQVIIGDENHLMLIINARNEGEGAYEAELFVMIPEEADYVGIERNNKGFRPLSCEYKMENVTRMVVCDLGNPMVSGTNYSLGLRFAVPRLEKTNMSINFDLQIRSSNKDNPDSNFVSLQINITAVAQVEIRGVSHPPQIVLPIHNWEPEEEPHKEEEVGPLVEHIYELHNIGPSTISDTILEVGWPFSARDEFLLYIFHIQTLGPLQCQPNPNINPQDIKPAASPEDTPELSAFLRNSTIPHLVRKRDVHVVEFHRQSPAKILNCTNIECLQISCAVGRLEGGESAVLKVRSRLWAHTFLQRKNDPYALASLVSFEVKKMPYTDQPAKLPEGSIVIKTSVIWATPNVSFSIPLWVIILAILLGLLVLAILTLALWKCGFFDRARPPQEDMTDREQLTNDKTPEA

SEQ ID NO: 40809 - protein, 1035 aa, Homo sapiens
  Payload ID: 8303
  Gene Symbol: ITGA9
  Gene Name: integrin, alpha 9
  Uniprot ID: Q13797
  ENSP ID: ENSP00000264741
MGGPAAPRGAGRLRALLLALVVAGIPAGAYNLDPQRPVHFQGPADSFFGYAVLEHFHDNTRWVLVGAPKADSKYSPSVKSPGAVFKCRVHTNPDRRCTELDMARGKNRGTSCGKTCREDRDDEWMGVSLARQPKADGRVLACAHRWKNIYYEADHILPHGFCYIIPSNLQAKGRTLIPCYEEYKKKYGEEHGSCQAGIAGFFTEELVVMGAPGSFYWAGTIKVLNLTDNTYLKLNDEVIMNRRYTYLGYAVTAGHFSHPSTIDVVGGAPQDKGIGKVYIFRADRRSGTLIKIFQASGKKMGSYFGSSLCAVDLNGDGLSDLLVGAPMFSEIRDEGQVTVYINRGNGALEEQLALTGDGAYNAHFGESIASLDDLDNDGFPDVAIGAPKEDDFAGAVYIYHGDAGGIVPQYSMKLSGQKINPVLRMFGQSISGGIDMDGNGYPDVTVGAFMSDSVVLLRARPVITVDVSIFLPGSINITAPQCHDGQQPVNCLNVTTCFSFHGKHVPGEIGLNYVLMADVAKKEKGQMPRVYFVLLGETMGQVTEKLQLTYMEETCRHYVAHVKRRVQDVISPIVFEAAYSLSEHVTGEEERELPPLTPVLRWKKGQKIAQKNQTVFERNCRSEDCAADLQLQGKLLLSSMDEKTLYLALGAVKNISLNISISNLGDDAYDANVSFNVSRELFFINMWQKEEMGISCELLESDFLKCSVGFPFMRSKSKYEFSVIFDTSHLSGEEEVLSFIVTAQSGNTERSESLHDNTLVLMVPLMHEVDTSITGIMSPTSFVYGESVDAANFIQLDDLECHFQPINITLQVYNTGPSTLPGSSVSISFPNRLSSGGAEMFHVQEMVVGQEKGNCSFQKNPTPCIIPQEQENIFHTIFAFFTKSGRKVLDCEKPGISCLTAHCNFSALAKEESRTIDIYMLLNTEILKKDSSSVIQFMSRAKVKVDPALRVVEIAHGNPEEVTVVFEALHNLEPRGYVVGWIIAISLLVGILIFLLLAVLLWKMGFFRRRYKEIIEAEKNRKENEDSWDWVQKNQ

SEQ ID NO: 40810 - protein, 632 aa, Homo sapiens
  Payload ID: 8303
  Gene Symbol: ITGA9
  Gene Name: integrin, alpha 9
  ENSP ID: ENSP00000397258
MGGPAAPRGAGRLRALLLALVVAGIPAGAYNLDPQRPVHFQGPADSFFGYAVLEHFHDNTRWVLVGAPKADSKYSPSVKSPGAVFKCRVHTNPDRRCTELDMARGKNRGTSCGKTCREDRDDEWMGVSLARQPKADGRVLACAHRWKNIYYEADHILPHGFCYIIPSNLQAKGRTLIPCYEEYKKKYGEEHGSCQAGIAGFFTEELVVMGAPGSFYWAGTIKVLNLTDNTYLKLNDEVIMNRRYTYLGYAVTAGHFSHPSTIDVVGGAPQDKGIGKVYIFRADRRSGTLIKIFQASGKKMGSYFGSSLCAVDLNGDGLSDLLVGAPMFSEIRDEGQVTVYINRGNGALEEQLALTGDGAYNAHFGESIASLDDLDNDGFPDVAIGAPKEDDFAGAVYIYHGDAGGIVPQYSMKLSGQKINPVLRMFGQSISGGIDMDGNGYPDVTVGAFMSDSVVLLRARPVITVDVSIFLPGSINITAPQCHDGQQPVNCLNVTTCFSFHGKHVPGEIGLNYVLMADVAKKEKGQMPRVYFVLLGETMGQVTEKLQLTYMEETCRHYVAHVKRRVQDVISPIVFEAAYSLSEHVTGEEERELPPLTPVLRWKKGQKIAQKNQVRTLKLILSTQGGSCTEQK

SEQ ID NO: 40811 - protein, 69 aa, Homo sapiens
  Payload ID: 8303
  Gene Symbol: ITGA9
  Gene Name: integrin, alpha 9
  ENSP ID: ENSP00000406533
  MOD_RES (1)..(1): Any amino acid
XKKDSSSVIQFMSRAKVKVDPALRVVEIAHGNPEEVTMGFFRRRYKEIIEAEKNRKENEDSWDWVQKNQ

SEQ ID NO: 40812 - protein, 1161 aa, Homo sapiens
  Payload ID: 8304
  Gene Symbol: ITGAD
  Gene Name: integrin, alpha D
  Uniprot ID: Q13349
  ENSP ID: ENSP00000373854
MTFGTVLLLSVLASYHGFNLDVEEPTIFQEDAGGFGQSVVQFGGSRLVVGAPLEVVAANQTGRLYDCAAATGMCQPIPLHIRPEAVNMSLGLTLAASTNGSRLLACGPTLHRVCGENSYSKGSCLLLGSRWEIIQTVPDATPECPHQEMDIVFLIDGSGSIDQNDFNQMKGFVQAVMGQFEGTDTLFALMQYSNLLKIHFTFTQFRTSPSQQSLVDPIVQLKGLTFTATGILTVVTQLFHHKNGARKSAKKILIVITDGQKYKDPLEYSDVIPQAEKAGIIRYAIGVGHAFQGPTARQELNTISSAPPQDHVFKVDNFAALGSIQKQLQEKIYAVEGTQSRASSSFQHEMSQEGFSTALTMDGLFLGAVGSFSWSGGAFLYPPNMSPTFINMSQENVDMRDSYLGYSTELALWKGVQNLVLGAPRYQHTGKAVIFTQVSRQWRKKAEVTGTQIGSYFGASLCSVDVDSDGSTDLILIGAPHYYEQTRGGQVSVCPLPRGRVQWQCDAVLRGEQGHPWGRFGAALTVLGDVNEDKLIDVAIGAPGEQENRGAVYLFHGASESGISPSHSQRIASSQLSPRLQYFGQALSGGQDLTQDGLMDLAVGARGQVLLLRSLPVLKVGVAMRFSPVEVAKAVYRCWEEKPSALEAGDATVCLTIQKSSLDQLGDIQSSVRFDLALDPGRLTSRAIFNETKNPTLTRRKTLGLGIHCETLKLLLPDCVEDVVSPIILHLNFSLVREPIPSPQNLRPVLAVGSQDLFTASLPFEKNCGQDGLCEGDLGVTLSFSGLQTLTVGSSLELNVIVTVWNAGEDSYGTVVSLYYPAGLSHRRVSGAQKQPHQSALRLACETVPTEDEGLRSSRCSVNHPIFHEGSNGTFIVTFDVSYKATLGDRMLMRASASSENNKASSSKATFQLELPVKYAVYTMISRQEESTKYFNFATSDEKKMKEAEHRYRVNNLSQRDLAISINFWVPVLLNGVAVWDVVMEAPSQSLPCVSERKPPQHSDFLTQISRSPMLDCSIADCLQFRCDVPSFSVQEELDFTLKGNLSFGWVRETLQKKVLVVSVAEITFDTSVYSQLPGQEAFMRAQMEMVLEEDEVYNAIPIIMGSSVGALLLLALITATLYKLGFFKRHYKEMLEDKPEDTATFSGDDFSCVAPNVPLS

SEQ ID NO: 40813 - protein, 1179 aa, Homo sapiens
  Payload ID: 8305
  Gene Symbol: ITGAE
  Gene Name: integrin, alpha E (antigen CD103, human mucosal lymphocyte antigen 1
  alpha polypeptide)
  Uniprot ID: P38570
  ENSP ID: ENSP00000263087
MWLFHTLLCIASLALLAAFNVDVARPWLTPKGGAPFVLSSLLHQDPSTNQTWLLVTSPRTKRTPGPLHRCSLVQDEILCHPVEHVPIPKGRHRGVTVVRSHHGVLICIQVLVRRPHSLSSELTGTCSLLGPDLRPQAQANFFDLENLLDPDARVDTGDCYSNKEGGGEDDVNTARQRRALEKEEEEDKEEEEDEEEEEAGTEIAIILDGSGSIDPPDFQRAKDFISNMMRNFYEKCFECNFALVQYGGVIQTEFDLRDSQDVMASLARVQNITQVGSVTKTASAMQHVLDSIFTSSHGSRRKASKVMVVLTDGGIFEDPLNLTTVINSPKMQGVERFAIGVGEEFKSARTARELNLIASDPDETHAFKVTNYMALDGLLSKLRYNIISMEGTVGDALHYQLAQIGFSAQILDERQVLLGAVGAFDWSGGALLYDTRSRRGRFLNQTAAAAADAEAAQYSYLGYAVAVLHKTCSLSYIAGAPRYKHHGAVFELQKEGREASFLPVLEGEQMGSYFGSELCPVDIDMDGSTDFLLVAAPFYHVHGEEGRVYVYRLSEQDGSFSLARILSGHPGFTNARFGFAMAAMGDLSQDKLTDVAIGAPLEGFGADDGASFGSVYIYNGHWDGLSASPSQRIRASTVAPGLQYFGMSMAGGFDISGDGLADITVGTLGQAVVFRSRPVVRLKVSMAFTPSALPIGFNGVVNVRLCFEISSVTTASESGLREALLNFTLDVDVGKQRRRLQCSDVRSCLGCLREWSSGSQLCEDLLLMPTEGELCEEDCFSNASVKVSYQLQTPEGQTDHPQPILDRYTEPFAIFQLPYEKACKNKLFCVAELQLATTVSQQELVVGLTKELTLNINLTNSGEDSYMTSMALNYPRNLQLKRMQKPPSPNIQCDDPQPVASVLIMNCRIGHPVLKRSSAHVSVVWQLEENAFPNRTADITVTVTNSNERRSLANETHTLQFRHGFVAVLSKPSIMYVNTGQGLSHHKEFLFHVHGENLFGAEYQLQICVPTKLRGLQVVAVKKLTRTQASTVCTWSQERACAYSSVQHVEEWHSVSCVIASDKENVTVAAEISWDHSEELLKDVTELQILGEISFNKSLYEGLNAENHRTKITVVFLKDEKYHSLPIIIKGSVGGLLVLIVILVILFKCGFFKRKYQQLNLESIRKAQLKSENLLEEEN

SEQ ID NO: 40814 - protein, 139 aa, Homo sapiens
  Payload ID: 8305
  Gene Symbol: ITGAE
  Gene Name: integrin, alpha E (antigen CD103, human mucosal lymphocyte antigen 1
  alpha polypeptide)
  ENSP ID: ENSP00000467977
  MOD_RES (1)..(1): Any amino acid
XHPQPILDRYTEPFAIFQLPYEKACKNKLFCVAELQLATTVSQQELVVGLTKELTLNINLTNSGEDSYMTSMALNYPRNLQLKRMQKAHVSVVWQLEENAFPNRTADITVTVTKPSIMYVNTGQGLSHHKEFLFHVHGE

SEQ ID NO: 40815 - protein, 1170 aa, Homo sapiens
  Payload ID: 8306
  Gene Symbol: ITGAL
  Gene Name: integrin, alpha L (antigen CD11A (p180), lymphocyte function-associated antigen 1
  alpha polypeptide)
  Uniprot ID: P20701
  ENSP ID: ENSP00000349252
MKDSCITVMAMALLSGFFFFAPASSYNLDVRGARSFSPPRAGRHFGYRVLQVGNGVIVGAPGEGNSTGSLYQCQSGTGHCLPVTLRGSNYTSKYLGMTLATDPTDGSILACDPGLSRTCDQNTYLSGLCYLFRQNLQGPMLQGRPGFQECIKGNVDLVFLFDGSMSLQPDEFQKILDFMKDVMKKLSNTSYQFAAVQFSTSYKTEFDFSDYVKRKDPDALLKHVKHMLLLTNTFGAINYVATEVFREELGARPDATKVLIIITDGEATDSGNIDAAKDIIRYIIGIGKHFQTKESQETLHKFASKPASEFVKILDTFEKLKDLFTELQKKIYVIEGTSKQDLTSFNMELSSSGISADLSRGHAVVGAVGAKDWAGGFLDLKADLQDDTFIGNEPLTPEVRAGYLGYTVTWLPSRQKTSLLASGAPRYQHMGRVLLFQEPQGGGHWSQVQTIHGTQIGSYFGGELCGVDVDQDGETELLLIGAPLFYGEQRGGRVFIYQRRQLGFEEVSELQGDPGYPLGRFGEAITALTDINGDGLVDVAVGAPLEEQGAVYIFNGRHGGLSPQPSQRIEGTQVLSGIQWFGRSIHGVKDLEGDGLADVAVGAESQMIVLSSRPVVDMVTLMSFSPAEIPVHEVECSYSTSNKMKEGVNITICFQIKSLIPQFQGRLVANLTYTLQLDGHRTRRRGLFPGGRHELRRNIAVTTSMSCTDFSFHFPVCVQDLISPINVSLNFSLWEEEGTPRDQRAQGKDIPPILRPSLHSETWEIPFEKNCGEDKKCEANLRVSFSPARSRALRLTAFASLSVELSLSNLEEDAYWVQLDLHFPPGLSFRKVEMLKPHSQIPVSCEELPEESRLLSRALSCNVSSPIFKAGHSVALQMMFNTLVNSSWGDSVELHANVTCNNEDSDLLEDNSATTIIPILYPINILIQDQEDSTLYVSFTPKGPKIHQVKHMYQVRIQPSIHDHNIPTLEAVVGVPQPPSEGPITHQWSVQMEPPVPCHYEDLERLPDAAEPCLPGALFRCPVVFRQEILVQVIGTLELVGEIEASSMFSLCSSLSISFNSSKHFHLYGSNASLAQVVMKVDVVYEKQMLYLYVLSGIGGLLLLLLIFIVLYKVGFFKRNLKEKMEAGRGVPNGIPAEDSEQLASGQEAGDPGCLKPLHEKDSESGGGKD

SEQ ID NO: 40816 - protein, 1086 aa, Homo sapiens
  Payload ID: 8306
  Gene Symbol: ITGAL
  Gene Name: integrin, alpha L (antigen CD11A (p180), lymphocyte function-associated antigen 1
  alpha polypeptide)
  Uniprot ID: P20701
  ENSP ID: ENSP00000350886
MKDSCITVMAMALLSGFFFFAPASSYNLDVRGARSFSPPRAGRHFGYRVLQVGNGVIVGAPGEGNSTGSLYQCQSGTGHCLPVTLRGSNYTSKYLGMTLATDPTDGSILFAAVQFSTSYKTEFDFSDYVKRKDPDALLKHVKHMLLLTNTFGAINYVATEVFREELGARPDATKVLIIITDGEATDSGNIDAAKDIIRYIIGIGKHFQTKESQETLHKFASKPASEFVKILDTFEKLKDLFTELQKKIYVIEGTSKQDLTSFNMELSSSGISADLSRGHAVVGAVGAKDWAGGFLDLKADLQDDTFIGNEPLTPEVRAGYLGYTVTWLPSRQKTSLLASGAPRYQHMGRVLLFQEPQGGGHWSQVQTIHGTQIGSYFGGELCGVDVDQDGETELLLIGAPLFYGEQRGGRVFIYQRRQLGFEEVSELQGDPGYPLGRFGEAITALTDINGDGLVDVAVGAPLEEQGAVYIFNGRHGGLSPQPSQRIEGTQVLSGIQWFGRSIHGVKDLEGDGLADVAVGAESQMIVLSSRPVVDMVTLMSFSPAEIPVHEVECSYSTSNKMKEGVNITICFQIKSLIPQFQGRLVANLTYTLQLDGHRTRRRGLFPGGRHELRRNIAVTTSMSCTDFSFHFPVCVQDLISPINVSLNFSLWEEEGTPRDQRAGKDIPPILRPSLHSETWEIPFEKNCGEDKKCEANLRVSFSPARSRALRLTAFASLSVELSLSNLEEDAYWVQLDLHFPPGLSFRKVEMLKPHSQIPVSCEELPEESRLLSRALSCNVSSPIFKAGHSVALQMMFNTLVNSSWGDSVELHANVTCNNEDSDLLEDNSATTIIPILYPINILIQDQEDSTLYVSFTPKGPKIHQVKHMYQVRIQPSIHDHNIPTLEAVVGVPQPPSEGPITHQWSVQMEPPVPCHYEDLERLPDAAEPCLPGALFRCPVVFRQEILVQVIGTLELVGEIEASSMFSLCSSLSISFNSSKHFHLYGSNASLAQVVMKVDVVYEKQMLYLYVLSGIGGLLLLLLIFIVLYKVGFFKRNLKEKMEAGRGVPNGIPAEDSEQLASGQEAGDPGCLKPLHEKDSESGGGKD

SEQ ID NO: 40817 - protein, 404 aa, Homo sapiens
  Payload ID: 8306
  Gene Symbol: ITGAL
  Gene Name: integrin, alpha L (antigen CD11A (p180), lymphocyte function-associated antigen 1
  alpha polypeptide)
  ENSP ID: ENSP00000409377
MKDSCITVMAMALLSGFFFFAPASSYNLDVRGARSFSPPRAGRHFGYRVLQIKSLIPQFQGRLVANLTYTLQLDGHRTRRRGLFPGGRHELRRNIAVTTSMSCTDFSFHFPMMFNTLVNSSWGDSVELHANVTCNNEDSDLLEDNSATTIIPILYPINILIQDQEDSTLYVSFTPKGPKIHQVKHMYQVRIQPSIHDHNIPTLEAVVGVPQPPSEGPITHQWSVQMEPPVPCHYEDLERLPDAAEPCLPGALFRCPVVFRQEILVQVIGTLELVGEIEASSMFSLCSSLSISFNSSKHFHLYGSNASLAQVVMKVDVVYEKQMLYLYVLSGIGGLLLLLLIFIVLYKVGFFKRNLKEKMEAGRGVPNGIPAEDSEQLASGQEAGDPGCLKPLHEKDSESGGGKD

SEQ ID NO: 40818 - protein, 162 aa, Homo sapiens
  Payload ID: 8306
  Gene Symbol: ITGAL
  Gene Name: integrin, alpha L (antigen CD11A (p180), lymphocyte function-associated antigen 1
  alpha polypeptide)
  ENSP ID: ENSP00000454342
MKDSCITVMAMALLSGFFFFAPASSYNLDVRGARSFSPPRAGRHFGYRVLQVGNGVIVGAPGEGNSTGSLYQCQSGTGHCLPVTLRGSNYTSKYLGMTLATDPTDGSILACDPGLSRTCDQNTYLSGLCYLFRQNLQGPMLQGRPGFQVCCCSVFHKLQNRI

SEQ ID NO: 40819 - protein, 55 aa, Homo sapiens
  Payload ID: 8306
  Gene Symbol: ITGAL
  Gene Name: integrin, alpha L (antigen CD11A (p180), lymphocyte function-associated antigen 1
  alpha polypeptide)
  ENSP ID: ENSP00000454908
MKDSCITVMAMALLSGFFFFAPASSYNLDVRGARSFSPPRAGRHFGYRVLQVGNG

SEQ ID NO: 40820 - protein, 90 aa, Homo sapiens
  Payload ID: 8306
  Gene Symbol: ITGAL
  Gene Name: integrin, alpha L (antigen CD11A (p180), lymphocyte function-associated antigen 1
  alpha polypeptide)
  ENSP ID: ENSP00000456521
MKDSCITVMAMALLSGFFFFERPNGKLYPQALGRAFRALGGPGVAPSIFPEVNALEGKRRVRVAWGATSGWAWDRPPAGHVQGRGSLGRS

SEQ ID NO: 40821 - protein, 203 aa, Homo sapiens
  Payload ID: 8306
  Gene Symbol: ITGAL
  Gene Name: integrin, alpha L (antigen CD11A (p180), lymphocyte function-associated antigen 1
  alpha polypeptide)
  ENSP ID: ENSP00000456888
MKDSCITVMAMALLSGFFFFAPASSYNLDVRGARSFSPPRAGRHFGYRVLQVGNGVIVGAPGEGNSTGSLYQCQSGTGHCLPVTLRGSNYTSKYLGMTLATDPTDGSILFAAVQFSTSYKTEFDFSDYVKRKDPDALLKHVKHMLLLTNTFGAINYVATEVFREELGARPDATKVLIIITDGEATDSGNIDAAKDIIRYIIGV

SEQ ID NO: 40822 - protein, 109 aa, Homo sapiens
  Payload ID: 8306
  Gene Symbol: ITGAL
  Gene Name: integrin, alpha L (antigen CD11A (p180), lymphocyte function-associated antigen 1
  alpha polypeptide)
  ENSP ID: ENSP00000457785
MKDSCITVMAMALLSGFFFFAPASSYNLDVRGARSFSPPRAGRHFGYRVLQLDGHRTRRRGLFPGGRHELRRNIAVTTSMSCTDFSFHFPIQSPASNCFCQPLCGAEPE

SEQ ID NO: 40823 - protein, 38 aa, Homo sapiens
  Payload ID: 8306
  Gene Symbol: ITGAL
  Gene Name: integrin, alpha L (antigen CD11A (p180), lymphocyte function-associated antigen 1
  alpha polypeptide)
  ENSP ID: ENSP00000458739
  MOD_RES (1)..(1): Any amino acid
XKEGVNITICFQIKSLIPQFQAGWPPDQKTGVVPRRET

SEQ ID NO: 40824 - protein, 41 aa, Homo sapiens
  Payload ID: 8306
  Gene Symbol: ITGAL
  Gene Name: integrin, alpha L (antigen CD11A (p180), lymphocyte function-associated antigen 1
  alpha polypeptide)
  ENSP ID: ENSP00000461006
MTLATDPTDGSILACDPGLSRTCDQNTYLSGLCYLFRQNLQ

SEQ ID NO: 40825 - protein, 1152 aa, Homo sapiens
  Payload ID: 8307
  Gene Symbol: ITGAM
  Gene Name: integrin, alpha M (complement component 3 receptor 3 subunit)
  Uniprot ID: P11215
  ENSP ID: ENSP00000287497
MALRVLLLTALTLCHGFNLDTENAMTFQENARGFGQSVVQLQGSRVVVGAPQEIVAANQRGSLYQCDYSTGSCEPIRLQVPVEAVNMSLGLSLAATTSPPQLLACGPTVHQTCSENTYVKGLCFLFGSNLRQQPQKFPEALRGCPQEDSDIAFLIDGSGSIIPHDFRRMKEFVSTVMEQLKKSKTLFSLMQYSEEFRIHFTFKEFQNNPNPRSLVKPITQLLGRTHTATGIRKVVRELFNITNGARKNAFKILVVITDGEKFGDPLGYEDVIPEADREGVIRYVIGVGDAFRSEKSRQELNTIASKPPRDHVFQVNNFEALKTIQNQLREKIFAIEGTQTGSSSSFEHEMSQEGFSAAITSNGPLLSTVGSYDWAGGVFLYTSKEKSTFINMTRVDSDMNDAYLGYAAAIILRNRVQSLVLGAPRYQHIGLVAMFRQNTGMWESNANVKGTQIGAYFGASLCSVDVDSNGSTDLVLIGAPHYYEQTRGGQVSVCPLPRGRARWQCDAVLYGEQGQPWGRFGAALTVLGDVNGDKLTDVAIGAPGEEDNRGAVYLFHGTSGSGISPSHSQRIAGSKLSPRLQYFGQSLSGGQDLTMDGLVDLTVGAQGHVLLLRSQPVLRVKAIMEFNPREVARNVFECNDQVVKGKEAGEVRVCLHVQKSTRDRLREGQIQSVVTYDLALDSGRPHSRAVFNETKNSTRRQTQVLGLTQTCETLKLQLPNCIEDPVSPIVLRLNFSLVGTPLSAFGNLRPVLAEDAQRLFTALFPFEKNCGNDNICQDDLSITFSFMSLDCLVVGGPREFNVTVTVRNDGEDSYRTQVTFFFPLDLSYRKVSTLQNQRSQRSWRLACESASSTEVSGALKSTSCSINHPIFPENSEVTFNITFDVDSKASLGNKLLLKANVTSENNMPRTNKTEFQLELPVKYAVYMVVTSHGVSTKYLNFTASENTSRVMQHQYQVSNLGQRSLPISLVFLVPVRLNQTVIWDRPQVTFSENLSSTCHTKERLPSHSDFLAELRKAPVVNCSIAVCQRIQCDIPFFGIQEEFNATLKGNLSFDWYIKTSHNHLLIVSTAEILFNDSVFTLLPGQGAFVRSQTETKVEPFEVPNPLPLIVGSSVGGLLLLALITAALYKLGFFKRQYKDMMSEGGPPGAEPQ

SEQ ID NO: 40826 - protein, 1153 aa, Homo sapiens
  Payload ID: 8307
  Gene Symbol: ITGAM
  Gene Name: integrin, alpha M (complement component 3 receptor 3 subunit)
  Uniprot ID: P11215
  ENSP ID: ENSP00000441691
MALRVLLLTALTLCHGFNLDTENAMTFQENARGFGQSVVQLQGSRVVVGAPQEIVAANQRGSLYQCDYSTGSCEPIRLQVPVEAVNMSLGLSLAATTSPPQLLACGPTVHQTCSENTYVKGLCFLFGSNLRQQPQKFPEALRGCPQEDSDIAFLIDGSGSIIPHDFRRMKEFVSTVMEQLKKSKTLFSLMQYSEEFRIHFTFKEFQNNPNPRSLVKPITQLLGRTHTATGIRKVVRELFNITNGARKNAFKILVVITDGEKFGDPLGYEDVIPEADREGVIRYVIGVGDAFRSEKSRQELNTIASKPPRDHVFQVNNFEALKTIQNQLREKIFAIEGTQTGSSSSFEHEMSQEGFSAAITSNGPLLSTVGSYDWAGGVFLYTSKEKSTFINMTRVDSDMNDAYLGYAAAIILRNRVQSLVLGAPRYQHIGLVAMFRQNTGMWESNANVKGTQIGAYFGASLCSVDVDSNGSTDLVLIGAPHYYEQTRGGQVSVCPLPRGQRARWQCDAVLYGEQGQPWGRFGAALTVLGDVNGDKLTDVAIGAPGEEDNRGAVYLFHGTSGSGISPSHSQRIAGSKLSPRLQYFGQSLSGGQDLTMDGLVDLTVGAQGHVLLLRSQPVLRVKAIMEFNPREVARNVFECNDQVVKGKEAGEVRVCLHVQKSTRDRLREGQIQSVVTYDLALDSGRPHSRAVFNETKNSTRRQTQVLGLTQTCETLKLQLPNCIEDPVSPIVLRLNFSLVGTPLSAFGNLRPVLAEDAQRLFTALFPFEKNCGNDNICQDDLSITFSFMSLDCLVVGGPREFNVTVTVRNDGEDSYRTQVTFFFPLDLSYRKVSTLQNQRSQRSWRLACESASSTEVSGALKSTSCSINHPIFPENSEVTFNITFDVDSKASLGNKLLLKANVTSENNMPRTNKTEFQLELPVKYAVYMVVTSHGVSTKYLNFTASENTSRVMQHQYQVSNLGQRSLPISLVFLVPVRLNQTVIWDRPQVTFSENLSSTCHTKERLPSHSDFLAELRKAPVVNCSIAVCQRIQCDIPFFGIQEEFNATLKGNLSFDWYIKTSHNHLLIVSTAEILFNDSVFTLLPGQGAFVRSQTETKVEPFEVPNPLPLIVGSSVGGLLLLALITAALYKLGFFKRQYKDMMSEGGPPGAEPQ

SEQ ID NO: 40827 - protein, 165 aa, Homo sapiens
  Payload ID: 8307
  Gene Symbol: ITGAM
  Gene Name: integrin, alpha M (complement component 3 receptor 3 subunit)
  ENSP ID: ENSP00000454568
  MOD_RES (1)..(1): Any amino acid
XTIASKPPRDHVFQVNNFEALKTIQNQLREKIFAIEGTQTGSSSSFEHEMSQEGFSAAITSNGPLLSTVGSYDWAGGVFLYTSKEKSTFINMTRVDSDMNDAYLDRRLLRGLPLLRGRGQQRQHRPGPHRGPPLLRADPRGPGVRVPLAQGGQIQSVVTYDLALD

SEQ ID NO: 40828 - protein, 117 aa, Homo sapiens
  Payload ID: 8307
  Gene Symbol: ITGAM
  Gene Name: integrin, alpha M (complement component 3 receptor 3 subunit)
  ENSP ID: ENSP00000461850
ATLKGNLSFDWYIKTSHNHLLIVSTAEILFNDSVFTLLPGQGAFVRSQTETKVEPFEVPNPLPLIVGSSVGGLLLLALITAALYKVLPAAPPPPPFILSGLALQLRASVSPAGLPAV

SEQ ID NO: 40829 - protein, 1048 aa, Homo sapiens
  Payload ID: 8308
  Gene Symbol: ITGAV
  Gene Name: integrin, alpha V
  Uniprot ID: P06756
  ENSP ID: ENSP00000261023
MAFPPRRRLRLGPRGLPLLLSGLLLPLCRAFNLDVDSPAEYSGPEGSYFGFAVDFFVPSASSRMFLLVGAPKANTTQPGIVEGGQVLKCDWSSTRRCQPIEFDATGNRDYAKDDPLEFKSHQWFGASVRSKQDKILACAPLYHWRTEMKQEREPVGTCFLQDGTKTVEYAPCRSQDIDADGQGFCQGGFSIDFTKADRVLLGGPGSFYWQGQLISDQVAEIVSKYDPNVYSIKYNNQLATRTAQAIFDDSYLGYSVAVGDFNGDGIDDFVSGVPRAARTLGMVYIYDGKNMSSLYNFTGEQMAAYFGFSVAATDINGDDYADVFIGAPLFMDRGSDGKLQEVGQVSVSLQRASGDFQTTKLNGFEVFARFGSAIAPLGDLDQDGFNDIAIAAPYGGEDKKGIVYIFNGRSTGLNAVPSQILEGQWAARSMPPSFGYSMKGATDIDKNGYPDLIVGAFGVDRAILYRARPVITVNAGLEVYPSILNQDNKTCSLPGTALKVSCFNVRFCLKADGKGVLPRKLNFQVELLLDKLKQKGAIRRALFLYSRSPSHSKNMTISRGGLMQCEELIAYLRDESEFRDKLTPITIFMEYRLDYRTAADTTGLQPILNQFTPANISRQAHILLDCGEDNVCKPKLEVSVDSDQKKIYIGDDNPLTLIVKAQNQGEGAYEAELIVSIPLQADFIGVVRNNEALARLSCAFKTENQTRQVVCDLGNPMKAGTQLLAGLRFSVHQQSEMDTSVKFDLQIQSSNLFDKVSPVVSHKVDLAVLAAVEIRGVSSPDHVFLPIPNWEHKENPETEEDVGPVVQHIYELRNNGPSSFSKAMLHLQWPYKYNNNTLLYILHYDIDGPMNCTSDMEINPLRIKISSLQTTEKNDTVAGQGERDHLITKRDLALSEGDIHTLGCGVAQCLKIVCQVGRLDRGKSAILYVKSLLWTETFMNKENQNHSYSLKSSASFNVIEFPYKNLPIEDITNSTLVTTNVTWGIQPAPMPVPVWVIILAVLAGLLLLAVLVFVMYRMGFFKRVRPPQEEQEREQLQPHENGEGNSET

SEQ ID NO: 40830 - protein, 1012 aa, Homo sapiens
  Payload ID: 8308
  Gene Symbol: ITGAV
  Gene Name: integrin, alpha V
  Uniprot ID: P06756
  ENSP ID: ENSP00000364042
MAFPPRRRLRLGPRGLPLLLSGLLLPLCRAFNLDVDSPAEYSGPEGSYFGFAVDFFVPSASSRMFLLVGAPKANTTQPGIVEGGQVLKCDWSSTRRCQPIEFDATGNRDYAKDDPLEFKSHQWFGASVRSKQDKILACAPLYHWRTEMKQEREPVGTCFLQDGTKTVEYAPCRSRQLISDQVAEIVSKYDPNVYSIKYNNQLATRTAQAIFDDSYLGYSVAVGDFNGDGIDDFVSGVPRAARTLGMVYIYDGKNMSSLYNFTGEQMAAYFGFSVAATDINGDDYADVFIGAPLFMDRGSDGKLQEVGQVSVSLQRASGDFQTTKLNGFEVFARFGSAIAPLGDLDQDGFNDIAIAAPYGGEDKKGIVYIFNGRSTGLNAVPSQILEGQWAARSMPPSFGYSMKGATDIDKNGYPDLIVGAFGVDRAILYRARPVITVNAGLEVYPSILNQDNKTCSLPGTALKVSCFNVRFCLKADGKGVLPRKLNFQVELLLDKLKQKGAIRRALFLYSRSPSHSKNMTISRGGLMQCEELIAYLRDESEFRDKLTPITIFMEYRLDYRTAADTTGLQPILNQFTPANISRQAHILLDCGEDNVCKPKLEVSVDSDQKKIYIGDDNPLTLIVKAQNQGEGAYEAELIVSIPLQADFIGVVRNNEALARLSCAFKTENQTRQVVCDLGNPMKAGTQLLAGLRFSVHQQSEMDTSVKFDLQIQSSNLFDKVSPVVSHKVDLAVLAAVEIRGVSSPDHVFLPIPNWEHKENPETEEDVGPVVQHIYELRNNGPSSFSKAMLHLQWPYKYNNNTLLYILHYDIDGPMNCTSDMEINPLRIKISSLQTTEKNDTVAGQGERDHLITKRDLALSEGDIHTLGCGVAQCLKIVCQVGRLDRGKSAILYVKSLLWTETFMNKENQNHSYSLKSSASFNVIEFPYKNLPIEDITNSTLVTTNVTWGIQPAPMPVPVWVIILAVLAGLLLLAVLVFVMYRMGFFKRVRPPQEEQEREQLQPHENGEGNSET

SEQ ID NO: 40831 - protein, 136 aa, Homo sapiens
  Payload ID: 8308
  Gene Symbol: ITGAV
  Gene Name: integrin, alpha V
  ENSP ID: ENSP00000389442
  MOD_RES (1)..(1): Any amino acid
XNCTSDMEINPLRIKISSLQTTEKNDTVAGQGERDHLITKRDLALSEGDIHTLGCGVAQCLKIVCQVGRLDRGKSAILYVKSLLWTETFMNKENQNHSYSLKSSASFNVIEFPYKNLPIEDITNSTLVSHWFRQIE

SEQ ID NO: 40832 - protein, 1002 aa, Homo sapiens
  Payload ID: 8308
  Gene Symbol: ITGAV
  Gene Name: integrin, alpha V
  Uniprot ID: P06756
  ENSP ID: ENSP00000404291
MLLGTLLLILYILMLCRMFLLVGAPKANTTQPGIVEGGQVLKCDWSSTRRCQPIEFDATGNRDYAKDDPLEFKSHQWFGASVRSKQDKILACAPLYHWRTEMKQEREPVGTCFLQDGTKTVEYAPCRSQDIDADGQGFCQGGFSIDFTKADRVLLGGPGSFYWQGQLISDQVAEIVSKYDPNVYSIKYNNQLATRTAQAIFDDSYLGYSVAVGDFNGDGIDDFVSGVPRAARTLGMVYIYDGKNMSSLYNFTGEQMAAYFGFSVAATDINGDDYADVFIGAPLFMDRGSDGKLQEVGQVSVSLQRASGDFQTTKLNGFEVFARFGSAIAPLGDLDQDGFNDIAIAAPYGGEDKKGIVYIFNGRSTGLNAVPSQILEGQWAARSMPPSFGYSMKGATDIDKNGYPDLIVGAFGVDRAILYRARPVITVNAGLEVYPSILNQDNKTCSLPGTALKVSCFNVRFCLKADGKGVLPRKLNFQVELLLDKLKQKGAIRRALFLYSRSPSHSKNMTISRGGLMQCEELIAYLRDESEFRDKLTPITIFMEYRLDYRTAADTTGLQPILNQFTPANISRQAHILLDCGEDNVCKPKLEVSVDSDQKKIYIGDDNPLTLIVKAQNQGEGAYEAELIVSIPLQADFIGVVRNNEALARLSCAFKTENQTRQVVCDLGNPMKAGTQLLAGLRFSVHQQSEMDTSVKFDLQIQSSNLFDKVSPVVSHKVDLAVLAAVEIRGVSSPDHVFLPIPNWEHKENPETEEDVGPVVQHIYELRNNGPSSFSKAMLHLQWPYKYNNNTLLYILHYDIDGPMNCTSDMEINPLRIKISSLQTTEKNDTVAGQGERDHLITKRDLALSEGDIHTLGCGVAQCLKIVCQVGRLDRGKSAILYVKSLLWTETFMNKENQNHSYSLKSSASFNVIEFPYKNLPIEDITNSTLVTTNVTWGIQPAPMPVPVWVIILAVLAGLLLLAVLVFVMYRMGFFKRVRPPQEEQEREQLQPHENGEGNSET

SEQ ID NO: 40833 - protein, 1163 aa, Homo sapiens
  Payload ID: 8309
  Gene Symbol: ITGAX
  Gene Name: integrin, alpha X (complement component 3 receptor 4 subunit)
  Uniprot ID: P20702
  ENSP ID: ENSP00000268296
MTRTRAALLLFTALATSLGFNLDTEELTAFRVDSAGFGDSVVQYANSWVVVGAPQKITAANQTGGLYQCGYSTGACEPIGLQVPPEAVNMSLGLSLASTTSPSQLLACGPTVHHECGRNMYLTGLCFLLGPTQLTQRLPVSRQECPRQEQDIVFLIDGSGSISSRNFATMMNFVRAVISQFQRPSTQFSLMQFSNKFQTHFTFEEFRRSSNPLSLLASVHQLQGFTYTATAIQNVVHRLFHASYGARRDAAKILIVITDGKKEGDSLDYKDVIPMADAAGIIRYAIGVGLAFQNRNSWKELNDIASKPSQEHIFKVEDFDALKDIQNQLKEKIFAIEGTETTSSSSFELEMAQEGFSAVFTPDGPVLGAVGSFTWSGGAFLYPPNMSPTFINMSQENVDMRDSYLGYSTELALWKGVQSLVLGAPRYQHTGKAVIFTQVSRQWRMKAEVTGTQIGSYFGASLCSVDVDSDGSTDLVLIGAPHYYEQTRGGQVSVCPLPRGWRRWWCDAVLYGEQGHPWGRFGAALTVLGDVNGDKLTDVVIGAPGEEENRGAVYLFHGVLGPSISPSHSQRIAGSQLSSRLQYFGQALSGGQDLTQDGLVDLAVGARGQVLLLRTRPVLWVGVSMQFIPAEIPRSAFECREQVVSEQTLVQSNICLYIDKRSKNLLGSRDLQSSVTLDLALDPGRLSPRATFQETKNRSLSRVRVLGLKAHCENFNLLLPSCVEDSVTPITLRLNFTLVGKPLLAFRNLRPMLAADAQRYFTASLPFEKNCGADHICQDNLGISFSFPGLKSLLVGSNLELNAEVMVWNDGEDSYGTTITFSHPAGLSYRYVAEGQKQGQLRSLHLTCDSAPVGSQGTWSTSCRINHLIFRGGAQITFLATFDVSPKAVLGDRLLLTANVSSENNTPRTSKTTFQLELPVKYAVYTVVSSHEQFTKYLNFSESEEKESHVAMHRYQVNNLGQRDLPVSINFWVPVELNQEAVWMDVEVSHPQNPSLRCSSEKIAPPASDFLAHIQKNPVLDCSIAGCLRFRCDVPSFSVQEELDFTLKGNLSFGWVRQILQKKVSVVSVAEITFDTSVYSQLPGQEAFMRAQTTTVLEKYKVHNPTPLIVGSSIGGLLLLALITAVLYKVGFFKRQYKEMMEEANGQIAPENGTQTPSPPSEK

SEQ ID NO: 40834 - protein, 1169 aa, Homo sapiens
  Payload ID: 8309
  Gene Symbol: ITGAX
  Gene Name: integrin, alpha X (complement component 3 receptor 4 subunit)
  ENSP ID: ENSP00000454623
MTRTRAALLLFTALATSLGFNLDTEELTAFRVDSAGFGDSVVQYANSWVVVGAPQKITAANQTGGLYQCGYSTGACEPIGLQVPPEAVNMSLGLSLASTTSPSQLLACGPTVHHECGRNMYLTGLCFLLGPTQLTQRLPVSRQECPRQEQDIVFLIDGSGSISSRNFATMMNFVRAVISQFQRPSTQFSLMQFSNKFQTHFTFEEFRRSSNPLSLLASVHQLQGFTYTATAIQNVVHRLFHASYGARRDAAKILIVITDGKKEGDSLDYKDVIPMADAAGIIRYAIGVGLAFQNRNSWKELNDIASKPSQEHIFKVEDFDALKDIQNQLKEKIFAIEGTETTSSSSFELEMAQEGFSAVFTPDGPVLGAVGSFTWSGGAFLYPPNMSPTFINMSQENVDMRDSYLGYSTELALWKGVQSLVLGAPRYQHTGKAVIFTQVSRQWRMKAEVTGTQIGSYFGASLCSVDVDSDGSTDLVLIGAPHYYEQTRGGQVSVCPLPRGWRRWWCDAVLYGEQGHPWGRFGAALTVLGDVNGDKLTDVVIGAPGEEENRGAVYLFHGVLGPSISPSHSQRIAGSQLSSRLQYFGQALSGGQDLTQDGLVDLAVGARGQVLLLRTRPVLWVGVSMQFIPAEIPRSAFECREQVVSEQTLVQSNICLYIDKRSKNLLGSRDLQSSVTLDLALDPGRLSPRATFQETKNRSLSRVRVLGLKAHCENFNLLLPSCVEDSVTPITLRLNFTLVGKPLLAFRNLRPMLAADAQRYFTASLPFEKNCGADHICQDNLGISFSFPGLKSLLVGSNLELNAEVMVWNDGEDSYGTTITFSHPAGLSYRYVAEGQKQGQLRSLHLTCDSAPVGSQGTWSTSCRINHLIFRGGAQITFLATFDVSPKAVLGDRLLLTANVSSENNTPRTSKTTFQLELPVKYAVYTVVSSHEQFTKYLNFSESEEKESHVAMHRYQVNNLGQRDLPVSINFWVPVELNQEAVWMDVEVSHPQNPSLRCSSEKIAPPASDFLAHIQKNPVLDCSIAGCLRFRCDVPSFSVQEELDFTLKGNLSFGWVRQILQKKVSVVSVAEITFDTSVYSQLPGQEAFMRAQTTTVLEKYKVHNPTPLIVGSSIGGLLLLALITAVLYKVGFFKRQYKEMMEEANGQIAPENGTQTPSPPTPHYPQDNV

SEQ ID NO: 40835 - protein, 181 aa, Homo sapiens
  Payload ID: 8309
  Gene Symbol: ITGAX
  Gene Name: integrin, alpha X (complement component 3 receptor 4 subunit)
  ENSP ID: ENSP00000483860
MTRTRAALLLFTALATSLGFNLDTEELTAFRVDSAGFGDSVVQYANSWVVVGAPQKITAANQTGGLYQCGYSTGACEPIGLQVPPEAVNMSLGLSLASTTSPSQLLLTQRLPVSRQGECRDHQGFEELTHIQLGVRWARDSLARVDQKEGIWKKSYHVLQWFLTLLPAHPADRPHAAGPFL

SEQ ID NO: 40836 - protein, 798 aa, Homo sapiens
  Payload ID: 8310
  Gene Symbol: ITGB1
  Gene Name: integrin, beta 1 (fibronectin receptor, beta polypeptide, antigen CD29 includes MDF2, MSK12)
  Uniprot ID: P05556
  ENSP ID: ENSP00000303351
MNLQPIFWIGLISSVCCVFAQTDENRCLKANAKSCGECIQAGPNCGWCTNSTFLQEGMPTSARCDDLEALKKKGCPPDDIENPRGSKDIKKNKNVTNRSKGTAEKLKPEDITQIQPQQLVLRLRSGEPQTFTLKFKRAEDYPIDLYYLMDLSYSMKDDLENVKSLGTDLMNEMRRITSDFRIGFGSFVEKTVMPYISTTPAKLRNPCTSEQNCTSPFSYKNVLSLTNKGEVFNELVGKQRISGNLDSPEGGFDAIMQVAVCGSLIGWRNVTRLLVFSTDAGFHFAGDGKLGGIVLPNDGQCHLENNMYTMSHYYDYPSIAHLVQKLSENNIQTIFAVTEEFQPVYKELKNLIPKSAVGTLSANSSNVIQLIIDAYNSLSSEVILENGKLSEGVTISYKSYCKNGVNGTGENGRKCSNISIGDEVQFEISITSNKCPKKDSDSFKIRPLGFTEEVEVILQYICECECQSEGIPESPKCHEGNGTFECGACRCNEGRVGRHCECSTDEVNSEDMDAYCRKENSSEICSNNGECVCGQCVCRKRDNTNEIYSGKFCECDNFNCDRSNGLICGGNGVCKCRVCECNPNYTGSACDCSLDTSTCEASNGQICNGRGICECGVCKCTDPKFQGQTCEMCQTCLGVCAEHKECVQCRAFNKGEKKDTCTQECSYFNITKVESRDKLPQPVQPDPVSHCKEKDVDDCWFYFTYSVNGNNEVMVHVVENPECPTGPDIIPIVAGVVAGIVLIGLALLLIWKLLMIIHDRREFAKFEKEKMNAKWDTGENPIYKSAVTTVVNPKYEGK

SEQ ID NO: 40837 - protein, 798 aa, Homo sapiens; identical to SEQ ID NO: 40836
  Payload ID: 8310
  Gene Symbol: ITGB1
  Gene Name: integrin, beta 1 (fibronectin receptor, beta polypeptide, antigen CD29 includes MDF2, MSK12)
  Uniprot ID: P05556
  ENSP ID: ENSP00000379350

SEQ ID NO: 40838 - protein, 801 aa, Homo sapiens
  Payload ID: 8310
  Gene Symbol: ITGB1
  Gene Name: integrin, beta 1 (fibronectin receptor, beta polypeptide, antigen CD29 includes MDF2, MSK12)
  Uniprot ID: P05556
  ENSP ID: ENSP00000388694
MNLQPIFWIGLISSVCCVFAQTDENRCLKANAKSCGECIQAGPNCGWCTNSTFLQEGMPTSARCDDLEALKKKGCPPDDIENPRGSKDIKKNKNVTNRSKGTAEKLKPEDITQIQPQQLVLRLRSGEPQTFTLKFKRAEDYPIDLYYLMDLSYSMKDDLENVKSLGTDLMNEMRRITSDFRIGFGSFVEKTVMPYISTTPAKLRNPCTSEQNCTSPFSYKNVLSLTNKGEVFNELVGKQRISGNLDSPEGGFDAIMQVAVCGSLIGWRNVTRLLVFSTDAGFHFAGDGKLGGIVLPNDGQCHLENNMYTMSHYYDYPSIAHLVQKLSENNIQTIFAVTEEFQPVYKELKNLIPKSAVGTLSANSSNVIQLIIDAYNSLSSEVILENGKLSEGVTISYKSYCKNGVNGTGENGRKCSNISIGDEVQFEISITSNKCPKKDSDSFKIRPLGFTEEVEVILQYICECECQSEGIPESPKCHEGNGTFECGACRCNEGRVGRHCECSTDEVNSEDMDAYCRKENSSEICSNNGECVCGQCVCRKRDNTNEIYSGKFCECDNFNCDRSNGLICGGNGVCKCRVCECNPNYTGSACDCSLDTSTCEASNGQICNGRGICECGVCKCTDPKFQGQTCEMCQTCLGVCAEHKECVQCRAFNKGEKKDTCTQECSYFNITKVESRDKLPQPVQPDPVSHCKEKDVDDCWFYFTYSVNGNNEVMVHVVENPECPTGPDIIPIVAGVVAGIVLIGLALLLIWKLLMIIHDRREFAKFEKEKMNAKWDTQENPIYKSPINNFKNPNYGRKAGL

SEQ ID NO: 40839 - protein, 136 aa, Homo sapiens
  Payload ID: 8310
  Gene Symbol: ITGB1
  Gene Name: integrin, beta 1 (fibronectin receptor, beta polypeptide, antigen CD29 includes MDF2, MSK12)
  ENSP ID: ENSP00000398029
MNLQPIFWIGLISSVCCVFAQTDENRCLKANAKSCGECIQAGPNCGWCTNSTFLQEGMPTSARCDDLEALKKKGCPPDDIENPRGSKDIKKNKNVTNRSKGTAEKLKPEDITQIQPQQLVLRLRSGEPQTFTLKFK

SEQ ID NO: 40840 - protein, 49 aa, Homo sapiens
  Payload ID: 8310
  Gene Symbol: ITGB1
  Gene Name: integrin, beta 1 (fibronectin receptor, beta polypeptide, antigen CD29 includes MDF2, MSK12)
  ENSP ID: ENSP00000400544
MNLQPIFWIGLISSVCCVFAQTDENRCLKANAKSCGECIQAGPNCGWCT

SEQ ID NO: 40841 - protein, 89 aa, Homo sapiens
  Payload ID: 8310
  Gene Symbol: ITGB1
  Gene Name: integrin, beta 1 (fibronectin receptor, beta polypeptide, antigen CD29 includes MDF2, MSK12)
  ENSP ID: ENSP00000404546
MNLQPIFWIGLISSVCCVFAQTDENRCLKANAKSCGECIQAGPNCGWCTNSTFLQEGMPTSARCDDLEALKKKGCPPDDIENPRGSKDI

SEQ ID NO: 40842 - protein, 124 aa, Homo sapiens
  Payload ID: 8310
  Gene Symbol: ITGB1
  Gene Name: integrin, beta 1 (fibronectin receptor, beta polypeptide, antigen CD29 includes MDF2, MSK12)
  ENSP ID: ENSP00000417243
MNLQPIFWIGLISSVCCVFAQTDENRCLKANAKSCGECIQAGPNCGWCTNSTFLQEGMPTSARCDDLEALKKKGCPPDDIENPRGSKDIKKNKNVTNRSKGTAEKLKPEDITQIQPQQLVLRLR

SEQ ID NO: 40843 - protein, 70 aa, Homo sapiens
  Payload ID: 8310
  Gene Symbol: ITGB1
  Gene Name: integrin, beta 1 (fibronectin receptor, beta polypeptide, antigen CD29 includes MDF2, MSK12)
  ENSP ID: ENSP00000417508
  MOD_RES (1)..(1): Any amino acid
XVAGVVAGIVLIGLALLLIWKLLMIIHDRREFAKFEKEKMNAKWDTQENPIYKSPINNFKNPNYGRKAGL

SEQ ID NO: 40844 - protein, 163 aa, Homo sapiens
  Payload ID: 8310
  Gene Symbol: ITGB1
  Gene Name: integrin, beta 1 (fibronectin receptor, beta polypeptide, antigen CD29 includes MDF2, MSK12)
  ENSP ID: ENSP00000417537
MNLQPIFWIGLISSVCCVFAQTDENRCLKANAKSCGECIQAGPNCGWCTNSTFLQEGMPTSARCDDLEALKKKGCPPDDIENPRGSKDIKKNKNVTNRSKGTAEKLKPEDITQIQPQQLVLRLRSGEPQTFTLKFKRAEDYPIDLYYLMDLSYSMKDDLENVK

SEQ ID NO: 40845 - protein, 108 aa, Homo sapiens
  Payload ID: 8310
  Gene Symbol: ITGB1
  Gene Name: integrin, beta 1 (fibronectin receptor, beta polypeptide, antigen CD29 includes MDF2, MSK12)
  ENSP ID: ENSP00000417799
  MOD_RES (1)..(1): Any amino acid
XDMDAYCRKENSSEICSNNGECVCGQCVCRKRDNTNEIYSGKFCECDNFNCDRSNGLICGGNGVCKCRVCECNPNYTGSACDCSLDTSTCEASNGQICNGRGICECGV

SEQ ID NO: 40846 - protein, 152 aa, Homo sapiens
  Payload ID: 8310
  Gene Symbol: ITGB1
  Gene Name: integrin, beta 1 (fibronectin receptor, beta polypeptide, antigen CD29 includes MDF2, MSK12)
  ENSP ID: ENSP00000418725
MNLQPIFWIGLISSVCCVFAQTDENRCLKANAKSCGECIQAGPNCGWCTNSVSKTFLQEGMPTSARCDDLEALKKKGCPPDDIENPRGSKDIKKNKNVTNRSKGTAEKLKPEDITQIQPQQLVLRLRSGEPQTFTLKFKRAEDYPIDLYYLM

SEQ ID NO: 40847 - protein, 98 aa, Homo sapiens
  Payload ID: 8310
  Gene Symbol: ITGB1
  Gene Name: integrin, beta 1 (fibronectin receptor, beta polypeptide, antigen CD29 includes MDF2, MSK12)
  ENSP ID: ENSP00000420282
MPTSARCDDLEALKKKGCPPDDIENPRGSKDIKKNKNVTNRSKGTAEKLKPEDITQIQPQQLVLRLRSGEPQTFTLKFKRAEDYPIDLYYLMDLSYSM

SEQ ID NO: 40848 - protein, 14 aa, Homo sapiens
  Payload ID: 8310
  Gene Symbol: ITGB1
  Gene Name: integrin, beta 1 (fibronectin receptor, beta polypeptide, antigen CD29 includes MDF2, MSK12)
  ENSP ID: ENSP00000420416
MPTSARCDDLEALK

SEQ ID NO: 40849 - protein, 31 aa, Homo sapiens
  Payload ID: 8310
  Gene Symbol: ITGB1
  Gene Name: integrin, beta 1 (fibronectin receptor, beta polypeptide, antigen CD29 includes MDF2, MSK12)
  ENSP ID: ENSP00000420792
MPTSARCDDLEALKKKGCPPDDIENPRGSKD

SEQ ID NO: 40850 - protein, 143 aa, Homo sapiens
  Payload ID: 8310
  Gene Symbol: ITGB1
  Gene Name: integrin, beta 1 (fibronectin receptor, beta polypeptide, antigen CD29 includes MDF2, MSK12)
  ENSP ID: ENSP00000431326
MNLQPIFWIGLISSVCCVFAQTDENRCLKANAKSCGECIQAGPNCGWCTNSTFLQEGMPTSARCDDLEALKKKGCPPDDIENPRGSKDIKKNKNVTNRSKGTAEKLKPEDITQIQPQQLVLRLRSGEPQTFTLKFKRAEDYPI

SEQ ID NO: 40851 - protein, 104 aa, Homo sapiens
  Payload ID: 8310
  Gene Symbol: ITGB1
  Gene Name: integrin, beta 1 (fibronectin receptor, beta polypeptide, antigen CD29 includes MDF2, MSK12)
  ENSP ID: ENSP00000436214
MNLQPIFWIGLISSVCCVFAQTDENRCLKANAKSCGECIQAGPNCGWCTNSTFLQEGMPTSARCDDLEALKKKGCPPDDIENPRGSKDIKKNKNVTNRSKGTAE

SEQ ID NO: 40852 - protein, 769 aa, Homo sapiens
  Payload ID: 8311
  Gene Symbol: ITGB2
  Gene Name: integrin, beta 2 (complement component 3 receptor 3 and 4 subunit)
  Uniprot ID: P05107
  ENSP ID: ENSP00000303242
MLGLRPPLLALVGLLSLGCVLSQECTKFKVSSCRECIESGPGCTWCQKLNFTGPGDPDSIRCDTRPQLLMRGCAADDIMDPTSLAETQEDHNGGQKQLSPQKVTLYLRPGQAAAFNVTFRRAKGYPIDLYYLMDLSYSMLDDLRNVKKLGGDLLRALNEITESGRIGFGSFVDKTVLPFVNTHPDKLRNPCPNKEKECQPPFAFRHVLKLTNNSNQFQTEVGKQLISGNLDAPEGGLDAMMQVAACPEEIGWRNVTRLLVFATDDGFHFAGDGKLGAILTPNDGRCHLEDNLYKRSNEFDYPSVGQLAHKLAENNIQPIFAVTSRMVKTYEKLTEIIPKSAVGELSEDSSNVVHLIKNAYNKLSSRVFLDHNALPDTLKVTYDSFCSNGVTHRNQPRGDCDGVQINVPITFQVKVTATECIQEQSFVIRALGFTDIVTVQVLPQCECRCRDQSRDRSLCHGKGFLECGICRCDTGYIGKNCECQTQGRSSQELEGSCRKDNNSIICSGLGDCVCGQCLCHTSDVPGKLIYGQYCECDTINCERYNGQVCGGPGRGLCFCGKCRCHPGFEGSACQCERTTEGCLNPRRVECSGRGRCRCNVCECHSGYQLPLCQECPGCPSPCGKYISCAECLKFEKGPFGKNCSAACPGLQLSNNPVKGRTCKERDSEGCWVAYTLEQQDGMDRYLIYVDESRECVAGPNIAAIVGGTVAGIVLIGILLLVIWKALIHLSDLREYRRFEKEKLKSQWNNDNPLFKSATTTVMNPKFAES

SEQ ID NO: 40853 - protein, 322 aa, Homo sapiens
  Payload ID: 8311
  Gene Symbol: ITGB2
  Gene Name: integrin, beta 2 (complement component 3 receptor 3 and 4 subunit)
  ENSP ID: ENSP00000317697
GRLGKDLATGVLSQECTKFKVSSCRECIESGPGCTWCQKLNFTGPGDPDSIRCDTRPQLLMRGCAADDIMDPTSLAETQEDHNGGQKQLSPQKVTLYLRPGQAAAFNVTFRRAKGYPIDLYYLMDLSYSMLDDLRNVKKLGGDLLRALNEITESGRIGFGSFVDKTVLPFVNTHPDKLRNPCPNKEKECQPPFAFRHVLKLTNNSNQFQTEVGKQLISGNLDAPEGGLDAMMQVAACPEEIGWRNVTRLLVFATDDGFHFAGDGKLGAILTPNDGRCHLEDNLYKRSNEFDYPSVGQLAHKLAENNIQPIFAVTSRMVKTYE

SEQ ID NO: 40854 - protein, 769 aa, Homo sapiens; identical to SEQ ID NO: 40852
  Payload ID: 8311
  Gene Symbol: ITGB2
  Gene Name: integrin, beta 2 (complement component 3 receptor 3 and 4 subunit)
  Uniprot ID: P05107
  ENSP ID: ENSP00000347279

SEQ ID NO: 40855 - protein, 108 aa, Homo sapiens
  Payload ID: 8311
  Gene Symbol: ITGB2
  Gene Name: integrin, beta 2 (complement component 3 receptor 3 and 4 subunit)
  ENSP ID: ENSP00000380944
MLGLRPPLLALVGLLSLGCVLSQECTKFKVSSCRECIESGPGCTWCQKLGAALGPPAHATAASSPRRRSRVAPVCPRTEQGGQAPGGNYLGQAGFFPSPFWRFSAPLK

SEQ ID NO: 40856 - protein, 769 aa, Homo sapiens; identical to SEQ ID NO: 40852
  Payload ID: 8311
  Gene Symbol: ITGB2
  Gene Name: integrin, beta 2 (complement component 3 receptor 3 and 4 subunit)
  Uniprot ID: P05107
  ENSP ID: ENSP00000380948

SEQ ID NO: 40857 - protein, 769 aa, Homo sapiens; identical to SEQ ID NO: 40852
  Payload ID: 8311
  Gene Symbol: ITGB2
  Gene Name: integrin, beta 2 (complement component 3 receptor 3 and 4 subunit)
  Uniprot ID: P05107
  ENSP ID: ENSP00000380950

SEQ ID NO: 40858 - protein, 712 aa, Homo sapiens
  Payload ID: 8311
  Gene Symbol: ITGB2
  Gene Name: integrin, beta 2 (complement component 3 receptor 3 and 4 subunit)
  ENSP ID: ENSP00000380952
MLGLRPPLLALVGLLSLGCVLSQECTKFKVSSCRECIESGPGCTWCQKLNFTGPGDPDSIRCDTRPQLLMRGCAADDIMDPTSLAETQEDHNGGQKQLSPQKVTLYLRPGFGSFVDKTVLPFVNTHPDKLRNPCPNKEKECQPPFAFRHVLKLTNNSNQFQTEVGKQLISGNLDAPEGGLDAMMQVAACPEEIGWRNVTRLLVFATDDGFHFAGDGKLGAILTPNDGRCHLEDNLYKRSNEFDYPSVGQLAHKLAENNIQPIFAVTSRMVKTYEKLTEIIPKSAVGELSEDSSNVVHLIKNAYNKLSSRVFLDHNALPDTLKVTYDSFCSNGVTHRNQPRGDCDGVQINVPITFQVKVTATECIQEQSFVIRALGFTDIVTVQVLPQCECRCRDQSRDRSLCHGKGFLECGICRCDTGYIGKNCECQTQGRSSQELEGSCRKDNNSIICSGLGDCVCGQCLCHTSDVPGKLIYGQYCECDTINCERYNGQVCGGPGRGLCFCGKCRCHPGFEGSACQCERTTEGCLNPRRVECSGRGRCRCNVCECHSGYQLPLCQECPGCPSPCGKYISCAECLKFEKGPFGKNCSAACPGLQLSNNPVKGRTCKERDSEGCWVAYTLEQQDGMDRYLIYVDESRECVAGPNIAAIVGGTVAGIVLIGILLLVIWKALIHLSDLREYRRFEKEKLKSQWNNDNPLFKSATTTVMNPKFAES

SEQ ID NO: 40859 - protein, 769 aa, Homo sapiens; identical to SEQ ID NO: 40852
  Payload ID: 8311
  Gene Symbol: ITGB2
  Gene Name: integrin, beta 2 (complement component 3 receptor 3 and 4 subunit)
  Uniprot ID: P05107
  ENSP ID: ENSP00000380955

SEQ ID NO: 40860 - protein, 71 aa, Homo sapiens
  Payload ID: 8311
  Gene Symbol: ITGB2
  Gene Name: integrin, beta 2 (complement component 3 receptor 3 and 4 subunit)
  ENSP ID: ENSP00000427732
MLGLRPPLLALVGLLSLGCGRPRAPTHQPASSLSPLSGVHEVQGQQLPGMHRVGARLHLVPEAELHRAGGS

SEQ ID NO: 40861 - protein, 49 aa, Homo sapiens
  Payload ID: 8311
  Gene Symbol: ITGB2
  Gene Name: integrin, beta 2 (complement component 3 receptor 3 and 4 subunit)
  ENSP ID: ENSP00000428125
MRGCAADDIMDPTSLAETQEDHNGGQKQLSPQKVTLYLRPGQAAAFNVT

SEQ ID NO: 40862 - protein, 120 aa, Homo sapiens
  Payload ID: 8311
  Gene Symbol: ITGB2
  Gene Name: integrin, beta 2 (complement component 3 receptor 3 and 4 subunit)
  ENSP ID: ENSP00000428413
MLGLRPPLLALVGLLSLGCVLSQECTKFKVSSCRECIESGPGCTWCQKLNFTGPGDPDSIRCDTRPQLLMRGCAADDIMDPTSLAETQEDHNGGQKQLSPQKVTLYLRPGQAAAFNVTFR

SEQ ID NO: 40863 - protein, 93 aa, Homo sapiens
  Payload ID: 8311
  Gene Symbol: ITGB2
  Gene Name: integrin, beta 2 (complement component 3 receptor 3 and 4 subunit)
  ENSP ID: ENSP00000428434
MLGLRPPLLALVGLLSLGCVLSQECTKFKVSSCRECIESGPGCTWCQKLGAALGPPAHATAASSPRRRSRVAPVCPRTEQGGQAPELHRAGGS

SEQ ID NO: 40864 - protein, 166 aa, Homo sapiens
  Payload ID: 8311
  Gene Symbol: ITGB2
  Gene Name: integrin, beta 2 (complement component 3 receptor 3 and 4 subunit)
  ENSP ID: ENSP00000428503
MLGLRPPLLALVGLLSLGCVLSQECTKFKVSSCRECIESGPGCTWCQKLNFTGPGDPDSIRCDTRPQLLMRGCAADDIMDPTSLAETQEDHNGGQKQLSPQKVTLYLRPGQAAAFNVTFRRAKGYPIDLYYLMDLSYSMLDDLRNVKKLGGDLLRALNEITESGRI

SEQ ID NO: 40865 - protein, 70 aa, Homo sapiens
  Payload ID: 8311
  Gene Symbol: ITGB2
  Gene Name: integrin, beta 2 (complement component 3 receptor 3 and 4 subunit)
  ENSP ID: ENSP00000428870
MLGLRPPLLALVGLLSLGCVLSQECTKFKVSSCRECIESGPGCTWCQKLNFTGPGDPDSIRCDTRPQLLM

SEQ ID NO: 40866 - protein, 160 aa, Homo sapiens
  Payload ID: 8311
  Gene Symbol: ITGB2
  Gene Name: integrin, beta 2 (complement component 3 receptor 3 and 4 subunit)
  ENSP ID: ENSP00000428979
MLGLRPPLLALVGLLSLGCVLSQECTKFKVSSCRECIESGPGCTWCQKLNFTGPGDPDSIRCDTRPQLLMRGCAADDIMDPTSLAETQEDHNGGQKQLSPQKVTLYLRPGQAAAFNVTFRRAKGYPIDLYYLMDLSYSMLDDLRNVKKLGGDLLRALNEI

SEQ ID NO: 40867 - protein, 49 aa, Homo sapiens
  Payload ID: 8311
  Gene Symbol: ITGB2
  Gene Name: integrin, beta 2 (complement component 3 receptor 3 and 4 subunit)
  ENSP ID: ENSP00000429683
MLGLRPPLLALVGLLSLGCVLSQECTKFKVSSCRECIESGPGCTWCQKL

SEQ ID NO: 40868 - protein, 37 aa, Homo sapiens
  Payload ID: 8311
  Gene Symbol: ITGB2
  Gene Name: integrin, beta 2 (complement component 3 receptor 3 and 4 subunit)
  ENSP ID: ENSP00000430901
MRGCAADDIMDPTSLAETQEDHNGGQKQLSPQKVTLY

SEQ ID NO: 40869 - protein, 378 aa, Homo sapiens
  Payload ID: 8311
  Gene Symbol: ITGB2
  Gene Name: integrin, beta 2 (complement component 3 receptor 3 and 4 subunit)
  ENSP ID: ENSP00000480700
MLGLRPPLLALVGLLSLGCVLSQECTKFKVSSCRECIESGPGCTWCQKLNFTGPGDPDSIRCDTRPQLLMRGCAADDIMDPTSLAETQEDHNGGQKQLSPQKVTLYLRPGFGSFVDKTVLPFVNTHPDKLRNPCPNKEKECQPPFAFRHVLKLTNNSNQFQTEVGKQLISGNLDAPEGGLDAMMQVAACPEEIGWRNVTRLLVFATDDGFHFAGDGKLGAILTPNDGRCHLEDNLYKRSNEFDYPSVGQLAHKLAENNIQPIFAVTSRMVKTYEKLTEIIPKSAVGELSEDSSNVVHLIKNAYNKLSSRVFLDHNALPDTLKVTYDSFCSNGVTHRNQPRGDCDGVQINVPITFQVKVTATECIQEQSFVIGRWASRT

SEQ ID NO: 40870 - protein, 788 aa, Homo sapiens
  Payload ID: 8312
  Gene Symbol: ITGB3
  Gene Name: integrin, beta 3 (platelet glycoprotein IIIa, antigen CD61)
  Uniprot ID: P05106
  ENSP ID: ENSP00000452786
MRARPRPRPLWATVLALGALAGVGVGGPNICTTRGVSSCQQCLAVSPMCAWCSDEALPLGSPRCDLKENLLKDNCAPESIEFPVSEARVLEDRPLSDKGSGDSSQVTQVSPQRIALRLRPDDSKNFSIQVRQVEDYPVDIYYLMDLSYSMKDDLWSIQNLGTKLATQMRKLTSNLRIGFGAFVDKPVSPYMYISPPEALENPCYDMKTTCLPMFGYKHVLTLTDQVTRFNEEVKKQSVSRNRDAPEGGFDAIMQATVCDEKIGWRNDASHLLVFTTDAKTHIALDGRLAGIVQPNDGQCHVGSDNHYSASTTMDYPSLGLMTEKLSQKNINLIFAVTENVVNLYQNYSELIPGTTVGVLSMDSSNVLQLIVDAYGKIRSKVELEVRDLPEELSLSFNATCLNNEVIPGLKSCMGLKIGDTVSFSIEAKVRGCPQEKEKSFTIKPVGFKDSLIVQVTFDCDCACQAQAEPNSHRCNNGNGTFECGVCRCGPGWLGSQCECSEEDYRPSQQDECSPREGQPVCSQRGECLCGQCVCHSSDFGKITGKYCECDDFSCVRYKGEMCSGHGQCSCGDCLCDSDWTGYYCNCTTRTDTCMSSNGLLCSGRGKCECGSCVCIQPGSYGDTCEKCPTCPDACTFKKECVECKKFDRGALHDENTCNRYCRDEIESVKELKDTGKDAVNCTYKNEDDCVVRFQYYEDSSGKSILYVVEEPECPKGPDILVVLLSVMGAILLIGLAALLIWKLLITIHDRKEFAKFEEERARAKWDTANNPLYKEATSTFTNITYRGT

SEQ ID NO: 40871 - protein, 443 aa, Homo sapiens
  Payload ID: 8312
  Gene Symbol: ITGB3
  Gene Name: integrin, beta 3 (platelet glycoprotein IIIa, antigen CD61)
  ENSP ID: ENSP00000461626
MRARPRPRPLWATVLALGALAGVGVGGPNICTTRGVSSCQQCLAVSPMCAWCSDEALPLGSPRCDLKENLLKDNCAPESIEFPVSEARVLEDRPLSDKGSGDSSQVTQVSPQRIALRLRPDDSKNFSIQVRQVEDYPVDIYYLMDLSYSMKDDLWSIQNLGTKLATQMRKLTSNLRIGFGAFVDKPVSPYMYISPPEALENPCYDMKTTCLPMFGYKHVLTLTDQVTRFNEEVKKQSVSRNRDAPEGGFDAIMQATVCDEKIGWRNDASHLLVFTTDAKTHIALDGRLAGIVQPNDGQCHVGSDNHYSASTTMDYPSLGLMTEKLSQKNINLIFAVTENVVNLYQNYSELIPGTTVGVLSMDSSNVLQLIVDAYGKIRSKVELEVRDLPEELSLSFNATCLNNEVIPGLKSCMGLKIGDTVRWAGQGLCPGASVGTQPPFFLL

SEQ ID NO: 40872 - protein, 35 aa, Homo sapiens
  Payload ID: 8312
  Gene Symbol: ITGB3
  Gene Name: integrin, beta 3 (platelet glycoprotein IIIa, antigen CD61)
  ENSP ID: ENSP00000465586
LKSCMGLKIGDTVRWAGQGLCPGASVGTQPPFFLL

SEQ ID NO: 40873 - protein, 1822 aa, Homo sapiens
  Payload ID: 8313
  Gene Symbol: ITGB4
  Gene Name: integrin, beta 4
  Uniprot ID: P16144
  ENSP ID: ENSP00000200181
MAGPRPSPWARLLLAALISVSLSGTLANRCKKAPVKSCTECVRVDKDCAYCTDEMFRDRRCNTQAELLAAGCQRESIVVMESSFQITEETQIDTTLRRSQMSPQGLRVRLRPGEERHFELEVFEPLESPVDLYILMDFSNSMSDDLDNLKKMGQNLARVLSQLTSDYTIGFGKFVDKVSVPQTDMRPEKLKEPWPNSDPPFSFKNVISLTEDVDEFRNKLQGERISGNLDAPEGGFDAILQTAVCTRDIGWRPDSTHLLVFSTESAFHYEADGANVLAGIMSRNDERCHLDTTGTYTQYRTQDYPSVPTLVRLLAKHNIIPIFAVTNYSYSYYEKLHTYFPVSSLGVLQEDSSNIVELLEEAFNRIRSNLDIRALDSPRGLRTEVTSKMFQKTRTGSFHIRRGEVGIYQVQLRALEHVDGTHVCQLPEDQKGNIHLKPSFSDGLKMDAGIICDVCTCELQKEVRSARCSFNGDFVCGQCVCSEGWSGQTCNCSTGSLSDIQPCLREGEDKPCSGRGECQCGHCVCYGEGRYEGQFCEYDNFQCPRTSGFLCNDRGRCSMGQCVCEPGWTGPSCDCPLSNATCIDSNGGICNGRGHCECGRCHCHQQSLYTDTICEINYSAIHPGLCEDLRSCVQCQAWGTGEKKGRTCEECNFKVKMVDELKRAEEVVVRCSFRDEDDDCTYSYTMEGDGAPGPNSTVLVHKKKDCPPGSFWWLIPLLLLLLPLLALLLLLCWKYCACCKACLALLPCCNRGHMVGFKEDHYMLRENLMASDHLDTPMLRSGNLKGRDVVRWKVTNNMQRPGFATHAASINPTELVPYGLSLRLARLCTENLLKPDTRECAQLRQEVEENLNEVYRQISGVHKLQQTKFRQQPNAGKKQDHTIVDTVLMAPRSAKPALLKLTEKQVEQRAFHDLKVAPGYYTLTADQDARGMVEFQEGVELVDVRVPLFIRPEDDDEKQLLVEAIDVPAGTATLGRRLVNITIIKEQARDVVSFEQPEFSVSRGDQVARIPVIRRVLDGGKSQVSYRTQDGTAQGNRDYIPVEGELLFQPGEAWKELQVKLLELQEVDSLLRGRQVRRFHVQLSNPKFGAHLGQPHSTTIIIRDPDELDRSFTSQMLSSQPPPHGDLGAPQNPNAKAAGSRKIHFNWLPPSGKPMGYRVKYWIQGDSESEAHLLDSKVPSVELTNLYPYCDYEMKVCAYGAQGEGPYSSLVSCRTHQEVPSEPGRLAFNVVSSTVTQLSWAEPAETNGEITAYEVCYGLVNDDNRPIGPMKKVLVDNPKNRMLLIENLRESQPYRYTVKARNGAGWGPEREAIINLATQPKRPMSIPIIPDIPIVDAQSGEDYDSFLMYSDDVLRSPSGSQRPSVSDDTGCGWKFEPLLGEELDLRRVTWRLPPELIPRLSASSGRSSDAEAPHGPPDDGGAGGKGGSLPRSATPGPPGEHLVNGRMDFAFPGSTNSLHRMTTTSAAAYGTHLSPHVPHRVLSTSSTLTRDYNSLTRSEHSHSTTLPRDYSTLTSVSSHDSRLTAGVPDTPTRLVFSALGPTSLRVSWQEPRCERPLQGYSVEYQLLNGGELHRLNIPNPAQTSVVVEDLLPNHSYVFRVRAQSQEGWGREREGVITIESQVHPQSPLCPLPGSAFTLSTPSAPGPLVFTALSPDSLQLSWERPRRPNGDIVGYLVTCEMAQGGGPATAFRVDGDSPESRLTVPGLSENVPYKFKVQARTTEGFGPEREGIITIESQDGGPFPQLGSRAGLFQHPLQSEYSSITTTHTSATEPFLVDGLTLGAQHLEAGGSLTRHVTQEFVSRTLTTSGTLSTHMDQQFFQT

SEQ ID NO: 40874 - protein, 1805 aa, Homo sapiens
  Payload ID: 8313
  Gene Symbol: ITGB4
  Gene Name: integrin, beta 4
  Uniprot ID: P16144
  ENSP ID: ENSP00000400217
MAGPRPSPWARLLLAALISVSLSGTLANRCKKAPVKSCTECVRVDKDCAYCTDEMFRDRRCNTQAELLAAGCQRESIVVMESSFQITEETQIDTTLRRSQMSPQGLRVRLRPGEERHFELEVFEPLESPVDLYILMDFSNSMSDDLDNLKKMGQNLARVLSQLTSDYTIGFGKFVDKVSVPQTDMRPEKLKEPWPNSDPPFSFKNVISLTEDVDEFRNKLQGERISGNLDAPEGGFDAILQTAVCTRDIGWRPDSTHLLVFSTESAFHYEADGANVLAGIMSRNDERCHLDTTGTYTQYRTQDYPSVPTLVRLLAKHNIIPIFAVTNYSYSYYEKLHTYFPVSSLGVLQEDSSNIVELLEEAFNRIRSNLDIRALDSPRGLRTEVTSKMFQKTRTGSFHIRRGEVGIYQVQLRALEHVDGTHVCQLPEDQKGNIHLKPSFSDGLKMDAGIICDVCTCELQKEVRSARCSFNGDFVCGQCVCSEGWSGQTCNCSTGSLSDIQPCLREGEDKPCSGRGECQCGHCVCYGEGRYEGQFCEYDNFQCPRTSGFLCNDRGRCSMGQCVCEPGWTGPSCDCPLSNATCIDSNGGICNGRGHCECGRCHCHQQSLYTDTICEINYSAIHPGLCEDLRSCVQCQAWGTGEKKGRTCEECNFKVKMVDELKRAEEVVVRCSFRDEDDDCTYSYTMEGDGAPGPNSTVLVHKKKDCPPGSFWWLIPLLLLLLPLLALLLLLCWKYCACCKACLALLPCCNRGHMVGFKEDHYMLRENLMASDHLDTPMLRSGNLKGRDVVRWKVTNNMQRPGFATHAASINPTELVPYGLSLRLARLCTENLLKPDTRECAQLRQEVEENLNEVYRQISGVHKLQQTKFRQQPNAGKKQDHTIVDTVLMAPRSAKPALLKLTEKQVEQRAFHDLKVAPGYYTLTADQDARGMVEFQEGVELVDVRVPLFIRPEDDDEKQLLVEAIDVPAGTATLGRRLVNITIIKEQARDVVSFEQPEFSVSRGDQVARIPVIRRVLDGGKSQVSYRTQDGTAQGNRDYIPVEGELLFQPGEAWKELQVKLLELQEVDSLLRGRQVRRFHVQLSNPKFGAHLGQPHSTTIIIRDPDELDRSFTSQMLSSQPPPHGDLGAPQNPNAKAAGSRKIHFNWLPPSGKPMGYRVKYWIQGDSESEAHLLDSKVPSVELTNLYPYCDYEMKVCAYGAQGEGPYSSLVSCRTHQEVPSEPGRLAFNVVSSTVTQLSWAEPAETNGEITAYEVCYGLVNDDNRPIGPMKKVLVDNPKNRMLLIENLRESQPYRYTVKARNGAGWGPEREAIINLATQPKRPMSIPIIPDIPIVDAQSGEDYDSFLMYSDDVLRSPSGSQRPSVSDDTEHLVNGRMDFAFPGSTNSLHRMTTTSAAAYGTHLSPHVPHRVLSTSSTLTRDYNSLTRSEHSHSTTLPRDYSTLTSVSSHGLPPIWEHGRSRLPLSWALGSRSRAQMKGFPPSRGPRDSIILAGRPAAPSWGPDSRLTAGVPDTPTRLVFSALGPTSLRVSWQEPRCERPLQGYSVEYQLLNGGELHRLNIPNPAQTSVVVEDLLPNHSYVFRVRAQSQEGWGREREGVITIESQVHPQSPLCPLPGSAFTLSTPSAPGPLVFTALSPDSLQLSWERPRRPNGDIVGYLVTCEMAQGGGPATAFRVDGDSPESRLTVPGLSENVPYKFKVQARTTEGFGPEREGIITIESQDGGPFPQLGSRAGLFQHPLQSEYSSITTTHTSATEPFLVDGLTLGAQHLEAGGSLTRHVTQEFVSRTLTTSGTLSTHMDQQFFQT

SEQ ID NO: 40875 - protein, 1752 aa, Homo sapiens
  Payload ID: 8313
  Gene Symbol: ITGB4
  Gene Name: integrin, beta 4
  Uniprot ID: P16144
  ENSP ID: ENSP00000405536
MAGPRPSPWARLLLAALISVSLSGTLANRCKKAPVKSCTECVRVDKDCAYCTDEMFRDRRCNTQAELLAAGCQRESIVVMESSFQITEETQIDTTLRRSQMSPQGLRVRLRPGEERHFELEVFEPLESPVDLYILMDFSNSMSDDLDNLKKMGQNLARVLSQLTSDYTIGFGKFVDKVSVPQTDMRPEKLKEPWPNSDPPFSFKNVISLTEDVDEFRNKLQGERISGNLDAPEGGFDAILQTAVCTRDIGWRPDSTHLLVFSTESAFHYEADGANVLAGIMSRNDERCHLDTTGTYTQYRTQDYPSVPTLVRLLAKHNIIPIFAVTNYSYSYYEKLHTYFPVSSLGVLQEDSSNIVELLEEAFNRIRSNLDIRALDSPRGLRTEVTSKMFQKTRTGSFHIRRGEVGIYQVQLRALEHVDGTHVCQLPEDQKGNIHLKPSFSDGLKMDAGIICDVCTCELQKEVRSARCSFNGDFVCGQCVCSEGWSGQTCNCSTGSLSDIQPCLREGEDKPCSGRGECQCGHCVCYGEGRYEGQFCEYDNFQCPRTSGFLCNDRGRCSMGQCVCEPGWTGPSCDCPLSNATCIDSNGGICNGRGHCECGRCHCHQQSLYTDTICEINYSAIHPGLCEDLRSCVQCQAWGTGEKKGRTCEECNFKVKMVDELKRAEEVVVRCSFRDEDDDCTYSYTMEGDGAPGPNSTVLVHKKKDCPPGSFWWLIPLLLLLLPLLALLLLLCWKYCACCKACLALLPCCNRGHMVGFKEDHYMLRENLMASDHLDTPMLRSGNLKGRDVVRWKVTNNMQRPGFATHAASINPTELVPYGLSLRLARLCTENLLKPDTRECAQLRQEVEENLNEVYRQISGVHKLQQTKFRQQPNAGKKQDHTIVDTVLMAPRSAKPALLKLTEKQVEQRAFHDLKVAPGYYTLTADQDARGMVEFQEGVELVDVRVPLFIRPEDDDEKQLLVEAIDVPAGTATLGRRLVNITIIKEQARDVVSFEQPEFSVSRGDQVARIPVIRRVLDGGKSQVSYRTQDGTAQGNRDYIPVEGELLFQPGEAWKELQVKLLELQEVDSLLRGRQVRRFHVQLSNPKFGAHLGQPHSTTIIIRDPDELDRSFTSQMLSSQPPPHGDLGAPQNPNAKAAGSRKIHFNWLPPSGKPMGYRVKYWIQGDSESEAHLLDSKVPSVELTNLYPYCDYEMKVCAYGAQGEGPYSSLVSCRTHQEVPSEPGRLAFNVVSSTVTQLSWAEPAETNGEITAYEVCYGLVNDDNRPIGPMKKVLVDNPKNRMLLIENLRESQPYRYTVKARNGAGWGPEREAIINLATQPKRPMSIPIIPDIPIVDAQSGEDYDSFLMYSDDVLRSPSGSQRPSVSDDTEHLVNGRMDFAFPGSTNSLHRMTTTSAAAYGTHLSPHVPHRVLSTSSTLTRDYNSLTRSEHSHSTTLPRDYSTLTSVSSHDSRLTAGVPDTPTRLVFSALGPTSLRVSWQEPRCERPLQGYSVEYQLLNGGELHRLNIPNPAQTSVVVEDLLPNHSYVFRVRAQSQEGWGREREGVITIESQVHPQSPLCPLPGSAFTLSTPSAPGPLVFTALSPDSLQLSWERPRRPNGDIVGYLVTCEMAQGGGPATAFRVDGDSPESRLTVPGLSENVPYKFKVQARTTEGFGPEREGIITIESQDGGPFPQLGSRAGLFQHPLQSEYSSITTTHTSATEPFLVDGLTLGAQHLEAGGSLTRHVTQEFVSRTLTTSGTLSTHMDQQFFQT

SEQ ID NO: 40876 - protein, 63 aa, Homo sapiens
  Payload ID: 8313
  Gene Symbol: ITGB4
  Gene Name: integrin, beta 4
  ENSP ID: ENSP00000462494
  MOD_RES (1)..(1): Any amino acid
XARTTEGFGPEREGIITIESQDGGPFPQLGSRAGLFQHPLQSEYSSITTTHTSATEPFLVGEH

SEQ ID NO: 40877 - protein, 1752 aa, Homo sapiens; identical to SEQ ID NO: 40875
  Payload ID: 8313
  Gene Symbol: ITGB4
  Gene Name: integrin, beta 4
  Uniprot ID: P16144
  ENSP ID: ENSP00000463651

SEQ ID NO: 40878 - protein, 114 aa, Homo sapiens
  Payload ID: 8313
  Gene Symbol: ITGB4
  Gene Name: integrin, beta 4
  ENSP ID: ENSP00000463788
SNSMSDDLDNLKKMGQNLARVLSQLTSDYTIGFGKFVDKVSVPQTDMRPEKLKEPWPNSDPPFSFKNVISLTEDVDEFRNKLQGERISATPSLHPWGPSPPACTEQGLGVSWEA

SEQ ID NO: 40879 - protein, 201 aa, Homo sapiens
  Payload ID: 8313
  Gene Symbol: ITGB4
  Gene Name: integrin, beta 4
  ENSP ID: ENSP00000464259
  MOD_RES (1)..(1): Any amino acid
XTNSLHRMTTTSAAAYGTHLSPHVPHRVLSTSSTLTRDYNSLTRSEHSHSTTLPRDYSTLTSVSSHGELHRLNIPNPAQTSVVVEDLLPNHSYVFRVRAQSQEGWGREREGVITIESQVHPQSPLCPLPGSAFTLSTPSAPGPLVFTALSPDSLQLSWERPRRPNGDIVGYLVTCEMAQGGGPATAFRVDGDSPESRLTVP

SEQ ID NO: 40880 - protein, 799 aa, Homo sapiens
  Payload ID: 8314
  Gene Symbol: ITGB5
  Gene Name: integrin, beta 5
  Uniprot ID: P18084
  ENSP ID: ENSP00000296181
MPRAPAPLYACLLGLCALLPRLAGLNICTSGSATSCEECLLIHPKCAWCSKEDFGSPRSITSRCDLRANLVKNGCGGEIESPASSFHVLRSLPLSSKGSGSAGWDVIQMTPQEIAVNLRPGDKTTFQLQVRQVEDYPVDLYYLMDLSLSMKDDLDNIRSLGTKLAEEMRKLTSNFRLGFGSFVDKDISPFSYTAPRYQTNPCIGYKLFPNCVPSFGFRHLLPLTDRVDSFNEEVRKQRVSRNRDAPEGGFDAVLQAAVCKEKIGWRKDALHLLVFTTDDVPHIALDGKLGGLVQPHDGQCHLNEANEYTASNQMDYPSLALLGEKLAENNINLIFAVTKNHYMLYKNFTALIPGTTVEILDGDSKNIIQLIINAYNSIRSKVELSVWDQPEDLNLFFTATCQDGVSYPGQRKCEGLKIGDTASFEVSLEARSCPSRHTEHVFALRPVGFRDSLEVGVTYNCTCGCSVGLEPNSARCNGSGTYVCGLCECSPGYLGTRCECQDGENQSVYQNLCREAEGKPLCSGRGDCSCNQCSCFESEFGKIYGPFCECDNFSCARNKGVLCSGHGECHCGECKCHAGYIGDNCNCSTDISTCRGRDGQICSERGHCLCGQCQCTEPGAFGEMCEKCPTCPDACSTKRDCVECLLLHSGKPDNQTCHSLCRDEVITWVDTIVKDDQEAVLCFYKTAKDCVMMFTYVELPSGKSNLTVLREPECGNTPNAMTILLAVVGSILLVGLALLAIWKLLVTIHDRREFAKFQSERSRARYEMASNPLYRKPISTHTVDFTFNKFNKSYNGTVD

SEQ ID NO: 40881 - protein, 40 aa, Homo sapiens
  Payload ID: 8314
  Gene Symbol: ITGB5
  Gene Name: integrin, beta 5
  ENSP ID: ENSP00000418079
MTPQEIAVNLRPEQWPRVPDGGLTRDAQCLGNGLTQCCMW

SEQ ID NO: 40882 - protein, 263 aa, Homo sapiens
  Payload ID: 8314
  Gene Symbol: ITGB5
  Gene Name: integrin, beta 5
  ENSP ID: ENSP00000418367
  MOD_RES (1)..(1): Any amino acid
XYKLFPNCVPSFGFRHLLPLTDRVDSFNEEVRKQRVSRNRDAPEGGFDAVLQAAVCKEKIGWRKDALHLLVFTTDDVPHIALDGKLGGLVQPHDGQCHLNEANEYTASNQMDYPSLALLGEKLAENNINLIFAVTKNHYMLYKSIRSKVELSVWDQPEDLNLFFTATCQDGVSYPGQRKCEGLKIGDTASFEVSLEARSCPSRHTEHVFALRPVGFRDSLEVGVTYNCTCGCSVGLEPNSARCNGSGTYVCGLCECSPGYLGT

SEQ ID NO: 40883 - protein, 79 aa, Homo sapiens
  Payload ID: 8314
  Gene Symbol: ITGB5
  Gene Name: integrin, beta 5
  ENSP ID: ENSP00000419198
MTPQEIAVNLRPGDKTTFQLQVRQVEDYPVDLYYLMDLSLSMKDDLDNIRSLGTKLAEEMRKLTSNFRLGFGSFVDKDI

SEQ ID NO: 40884 - protein, 401 aa, Homo sapiens
  Payload ID: 8314
  Gene Symbol: ITGB5
  Gene Name: integrin, beta 5
  ENSP ID: ENSP00000420814
  MOD_RES (1)..(1): Any amino acid
XKDALHLLVFTTDDVPHIALDGKLGGLVQPHDGQCHLNEANEYTASNQMDYPSLALLGEKLAENNINLIFAVTKNHYMLYKNFTALIPGTTVEILDGDSKNIIQLIINAYNASFEVSLEARSCPSRHTEHVFALRPVGFRDSLEVGVTYNCTCGCSVGLEPNSARCNGSGTYVCGLCECSPGYLGTRCECQDGENQSVYQNLCREAEGKPLCSGRGDCSCNQCSCFESEFGKIYGPFCECDNFSCARNKGVLCSGHGECHCGECKCHAGYIGDNCNCSTDISTCRGRDGQICSERGHCLCGQCQCTEPGAFGEMCEKCPTCPDACSTKRDCVECLLLHSGKPDNQTCHSLCRDEVITWVDTIVKDDQEAVLCFYKTAKDCVMMFTYVELPSGKSNLTVLRE

SEQ ID NO: 40885 - protein, 59 aa, Homo sapiens
  Payload ID: 8314
  Gene Symbol: ITGB5
  Gene Name: integrin, beta 5
  ENSP ID: ENSP00000476655
MTPQEIAVNLRPGDKTTFQLQVRQVEDYPVDLYYLMDLSLSMKDDLDNIRSLGTKLAEE

SEQ ID NO: 40886 - protein, 139 aa, Homo sapiens
  Payload ID: 8314
  Gene Symbol: ITGB5
  Gene Name: integrin, beta 5
  ENSP ID: ENSP00000477230
MTPQEIAVNLRPGDKTTFQLQVRQVEDYPVDLYYLMDLSLSMKDDLDNIRSLGTKLAEEMRKLTSNFRLGFGSFVDKDISPFSYTAPRYQTNPCIGYKLFPNCVPSFGFRHLLPLTDRVDSFNEEVRKQRVSRNRDAPE

SEQ ID NO: 40887 - protein, 323 aa, Homo sapiens
  Payload ID: 8314
  Gene Symbol: ITGB5
  Gene Name: integrin, beta 5
  ENSP ID: ENSP00000477446
IRSLGTKLAEEMRKLTSNFRLGFGSFVDKDISPFSYTAPRYQTNPCIGYKLFPNCVPSFGFRHLLPLTDRVDSFNEEVRKQRVSRNRDAPEGGFDAVLQAAVCKSIRSKVELSVWDQPEDLNLFFTATCQDGVSYPGQRKCEGLKIGDTASFEVSLEARSCPSRHTEHVFALRPVGFRDSLEVGVTYNCTCGCSVGLEPNSARCNGSGTYVCGLCECSPGYLGTRCECQDGENQSVYQNLCREAEGKPLCSGRGDCSCNQCSCFESEFGKIYGPFCECDNFSCARNKGVLCSGHGECHCGECKCHAGYIGDNCNCSTDISTCR

SEQ ID NO: 40888 - protein, 788 aa, Homo sapiens
  Payload ID: 8315
  Gene Symbol: ITGB6
  Gene Name: integrin, beta 6
  Uniprot ID: P18564
  ENSP ID: ENSP00000283249
MGIELLCLFFLFLGRNDHVQGGCALGGAETCEDCLLIGPQCAWCAQENFTHPSGVGERCDTPANLLAKGCQLNFIENPVSQVEILKNKPLSVGRQKNSSDIVQIAPQSLILKLRPGGAQTLQVHVRQTEDYPVDLYYLMDLSASMDDDLNTIKELGSRLSKEMSKLTSNFRLGFGSFVEKPVSPFVKTTPEEIANPCSSIPYFCLPTFGFKHILPLTNDAERFNEIVKNQKISANIDTPEGGFDAIMQAAVCKEKIGWRNDSLHLLVFVSDADSHFGMDSKLAGIVIPNDGLCHLDSKNEYSMSTVLEYPTIGQLIDKLVQNNVLLIFAVTQEQVHLYENYAKLIPGATVGLLQKDSGNILQLIISAYEELRSEVELEVLGDTEGLNLSFTAICNNGTLFQHQKKCSHMKVGDTASFSVTVNIPHCERRSRHIIIKPVGLGDALELLVSPECNCDCQKEVEVNSSKCHHGNGSFQCGVCACHPGHMGPRCECGEDMLSTDSCKEAPDHPSCSGRGDCYCGQCICHLSPYGNIYGPYCQCDNFSCVRHKGLLCGGNGDCDCGECVCRSGWTGEYCNCTTSTDSCVSEDGVLCSGRGDCVCGKCVCTNPGASGPTCERCPTCGDPCNSKRSCIECHLSAAGQAREECVDKCKLAGATISEEEDFSKDGSVSCSLQGENECLITFLITTDNEGKTIIHSINEKDCPKPPNIPMIMLGVSLAILLIGVVLLCIWKLLVSFHDRKEVAKFEAERSKAKWQTGTNPLYRGSTSTFKNVTYKHREKQKVDLSTDC

SEQ ID NO: 40889 - protein, 788 aa, Homo sapiens; identical to SEQ ID NO: 40888
  Payload ID: 8315
  Gene Symbol: ITGB6
  Gene Name: integrin, beta 6
  Uniprot ID: P18564
  ENSP ID: ENSP00000386367

SEQ ID NO: 40890 - protein, 70 aa, Homo sapiens
  Payload ID: 8315
  Gene Symbol: ITGB6
  Gene Name: integrin, beta 6
  ENSP ID: ENSP00000386477
MGIELLCLFFLFLGRNDHVQGGCALGGAETCEDCLLIGPQCAWCAQENFTHPSGVGERWCADSAGACPPD

SEQ ID NO: 40891 - protein, 681 aa, Homo sapiens
  Payload ID: 8315
  Gene Symbol: ITGB6
  Gene Name: integrin, beta 6
  Uniprot ID: P18564
  ENSP ID: ENSP00000386828
MGIELLCLFFLFLGRNDHVQGGCALGGAETCEDCLLIGPQCAWCAQENFTHPSGVGERCDTPANLLAKGCQLNFIENPVSQVEILKNKPLSVGRQKNSSDIVQIAPQSLILKLRPGGAQTLQVHVRQTEDYPVDLYYLMDLSASMDDDLNTIKELGSRLSKEMSKLTSNFRLGFGSFVEKPVSPFVKTTPEEIANPCSSIPYFCLPTFGFKHILPLTNDAERFNEIVKNQKISANIDTPEGGFDAIMQAAVCKEKIGWRNDSLHLLVFVSDADSHFGMDSKLAGIVIPNDGLCHLDSKNEYSMSTVLEYPTIGQLIDKLVQNNVLLIFAVTQEQVHLYENYAKLIPGATVGLLQKDSGNILQLIISAYEELRSEVELEVLGDTEGLNLSFTAICNNGTLFQHQKKCSHMKVGDTASFSVTVNIPHCERRSRHIIIKPVGLGDALELLVSPECNCDCQKEVEVNSSKCHHGNGSFQCGVCACHPGHMGPRCECGEDMLSTDSCKEAPDHPSCSGRGDCYCGQCICHLSPYGNIYGPYCQCDNFSCVRHKGLLCGDFSKDGSVSCSLQGENECLITFLITTDNEGKTIIHSINEKDCPKPPNIPMIMLGVSLAILLIGVVLLCIWKLLVSFHDRKEVAKFEAERSKAKWQTGTNPLYRGSTSTFKNVTYKHREKQKVDLSTDC

SEQ ID NO: 40892 - protein, 746 aa, Homo sapiens
  Payload ID: 8315
  Gene Symbol: ITGB6
  Gene Name: integrin, beta 6
  ENSP ID: ENSP00000408024
MITYKNFTHPSGVGERCDTPANLLAKGCQLNFIENPVSQVEILKNKPLSVGRQKNSSDIVQIAPQSLILKLRPGGAQTLQVHVRQTEDYPVDLYYLMDLSASMDDDLNTIKELGSRLSKEMSKLTSNFRLGFGSFVEKPVSPFVKTTPEEIANPCSSIPYFCLPTFGFKHILPLTNDAERFNEIVKNQKISANIDTPEGGFDAIMQAAVCKEKIGWRNDSLHLLVFVSDADSHFGMDSKLAGIVIPNDGLCHLDSKNEYSMSTVLEYPTIGQLIDKLVQNNVLLIFAVTQEQVHLYENYAKLIPGATVGLLQKDSGNILQLIISAYEELRSEVELEVLGDTEGLNLSFTAICNNGTLFQHQKKCSHMKVGDTASFSVTVNIPHCERRSRHIIIKPVGLGDALELLVSPECNCDCQKEVEVNSSKCHHGNGSFQCGVCACHPGHMGPRCECGEDMLSTDSCKEAPDHPSCSGRGDCYCGQCICHLSPYGNIYGPYCQCDNFSCVRHKGLLCGGNGDCDCGECVCRSGWTGEYCNCTTSTDSCVSEDGVLCSGRGDCVCGKCVCTNPGASGPTCERCPTCGDPCNSKRSCIECHLSAAGQAREECVDKCKLAGATISEEEDFSKDGSVSCSLQGENECLITFLITTDNEGKTIIHSINEKDCPKPPNIPMIMLGVSLAILLIGVVLLCIWKLLVSFHDRKEVAKFEAERSKAKWQTGTNPLYRGSTSTFKNVTYKHREKQKVDLSTDC

SEQ ID NO: 40893 - protein, 693 aa, Homo sapiens
  Payload ID: 8315
  Gene Symbol: ITGB6
  Gene Name: integrin, beta 6
  ENSP ID: ENSP00000481183
MGIELLCLFFLFLGRNDHVQGGAQTLQVHVRQTEDYPVDLYYLMDLSASMDDDLNTIKELGSRLSKEMSKLTSNFRLGFGSFVEKPVSPFVKTTPEEIANPCSSIPYFCLPTFGFKHILPLTNDAERFNEIVKNQKISANIDTPEGGFDAIMQAAVCKEKIGWRNDSLHLLVFVSDADSHFGMDSKLAGIVIPNDGLCHLDSKNEYSMSTVLEYPTIGQLIDKLVQNNVLLIFAVTQEQVHLYENYAKLIPGATVGLLQKDSGNILQLIISAYEELRSEVELEVLGDTEGLNLSFTAICNNGTLFQHQKKCSHMKVGDTASFSVTVNIPHCERRSRHIIIKPVGLGDALELLVSPECNCDCQKEVEVNSSKCHHGNGSFQCGVCACHPGHMGPRCECGEDMLSTDSCKEAPDHPSCSGRGDCYCGQCICHLSPYGNIYGPYCQCDNFSCVRHKGLLCGGNGDCDCGECVCRSGWTGEYCNCTTSTDSCVSEDGVLCSGRGDCVCGKCVCTNPGASGPTCERCPTCGDPCNSKRSCIECHLSAAGQAREECVDKCKLAGATISEEEDFSKDGSVSCSLQGENECLITFLITTDNEGKTIIHSINEKDCPKPPNIPMIMLGVSLAILLIGVVLLCIWKLLVSFHDRKEVAKFEAERSKAKWQTGTNPLYRGSTSTFKNVTYKHREKQKVDLSTDC

SEQ ID NO: 40894 - protein, 798 aa, Homo sapiens
  Payload ID: 8316
  Gene Symbol: ITGB7
  Gene Name: integrin, beta 7
  Uniprot ID: P26010
  ENSP ID: ENSP00000267082
MVALPMVLVLLLVLSRGESELDAKIPSTGDATEWRNPHLSMLGSCQPAPSCQKCILSHPSCAWCKQLNFTASGEAEARRCARREELLARGCPLEELEEPRGQQEVLQDQPLSQGARGEGATQLAPQRVRVTLRPGEPQQLQVRFLRAEGYPVDLYYLMDLSYSMKDDLERVRQLGHALLVRLQEVTHSVRIGFGSFVDKTVLPFVSTVPSKLRHPCPTRLERCQSPFSFHHVLSLTGDAQAFEREVGRQSVSGNLDSPEGGFDAILQAALCQEQIGWRNVSRLLVFTSDDTFHTAGDGKLGGIFMPSDGHCHLDSNGLYSRSTEFDYPSVGQVAQALSAANIQPIFAVTSAALPVYQELSKLIPKSAVGELSEDSSNVVQLIMDAYNSLSSTVTLEHSSLPPGVHISYESQCEGPEKREGKAEDRGQCNHVRINQTVTFWVSLQATHCLPEPHLLRLRALGFSEELIVELHTLCDCNCSDTQPQAPHCSDGQGHLQCGVCSCAPGRLGRLCECSVAELSSPDLESGCRAPNGTGPLCSGKGHCQCGRCSCSGQSSGHLCECDDASCERHEGILCGGFGRCQCGVCHCHANRTGRACECSGDMDSCISPEGGLCSGHGRCKCNRCQCLDGYYGALCDQCPGCKTPCERHRDCAECGAFRTGPLATNCSTACAHTNVTLALAPILDDGWCKERTLDNQLFFFLVEDDARGTVVLRVRPQEKGADHTQAIVLGCVGGIVAVGLGLVLAYRLSVEIYDRREYSRFEKEQQQLNWKQDSNPLYKSAITTTINPRFQEADSPTL

SEQ ID NO: 40895 - protein, 798 aa, Homo sapiens; identical to SEQ ID NO: 40894
  Payload ID: 8316
  Gene Symbol: ITGB7
  Gene Name: integrin, beta 7
  Uniprot ID: P26010
  ENSP ID: ENSP00000408741

SEQ ID NO: 40896 - protein, 471 aa, Homo sapiens
  Payload ID: 8316
  Gene Symbol: ITGB7
  Gene Name: integrin, beta 7
  ENSP ID: ENSP00000437375
MVALPMVLVLLLVLSRGESELDAKIPSTGDATEWRNPHLSMLGSCQPAPSCQKCILSHPSCAWCKQLNFTASGEAEARRCARREELLARGCPLEELEEPRGQQEVLQDQPLSQGARGEGATQLAPQRVRVTLRPGEPQQLQVRFLRAEGYPVDLYYLMDLSYSMKDDLERVRQLGHALLVRLQEVTHSVRIGFGSFVDKTVLPFVSTVPSKLRHPCPTRLERCQSPFSFHHVLSLTGDAQAFEREVGRQSVSGNLDSPEGGFDAILQAALCQEQIGWRNVSRLLVFTSDDTFHTAGDGKLGGIFMPSDGHCHLDSNGLYSRSTEFDYPSVGQVAQALSAANIQPIFAVTSAALPVYQELSKLIPKSAVGELSEDSSNVVQLIMDAYNSLSSTVTLEHSSLPPGVHISYESQCEGPEKREGKAEDRGQCNHVRINQTGLCRVWGLQDWPTGHQLQYSLCPYQCDPGLGPYLG

SEQ ID NO: 40897 - protein, 88 aa, Homo sapiens
  Payload ID: 8316
  Gene Symbol: ITGB7
  Gene Name: integrin, beta 7
  ENSP ID: ENSP00000446703
MVALPMVLVLLLVLSRGESELDAKIPSTGDATEWRNPHLSMLGSCQPAPSCQKCILSHPSCAWCKQLNFTASGEAEARRCARREELLA

SEQ ID NO: 40898 - protein, 158 aa, Homo sapiens
  Payload ID: 8316
  Gene Symbol: ITGB7
  Gene Name: integrin, beta 7
  ENSP ID: ENSP00000450366
MVALPMVLVLLLVLSRGESELDAKIPSTGDATEWRNPHLSMLGSCQPAPSCQKCILSHPSCAWCKQLNFTASGEAEARRCARREELLARGCPLEELEEPRGQQEVLQDQPLSQGARGEGATQLAPQRVRVTLRPGEPQQLQVRFLRAEGYPVDLYYLM

SEQ ID NO: 40899 - protein, 650 aa, Homo sapiens
  Payload ID: 8316
  Gene Symbol: ITGB7
  Gene Name: integrin, beta 7
  Uniprot ID: P26010
  ENSP ID: ENSP00000455374
MVALPMVLVLLLVLSRGESELDAKIPSTGDATEWRNPHLSMLGSCQPAPSCQKCILSHPSCAWCKQLNFTASGEAEARRCARREELLARGCPLEELEEPRGQQEVLQDQPLSQGARGEGATQLAPQRVRVTLRPGEPQQLQVRFLRAEGYPVDLYYLMDLSYSMKDDLERVRQLGHALLVRLQEVTHSVRIGFGSFVDKTVLPFVSTVPSKLRHPCPTRLERCQSPFSFHHVLSLTGDAQAFEREVGRQSVSGNLDSPEGGFDAILQAALCQEQIGWRNVSRLLVFTSDDTFHTAGDGKLGGIFMPSDGHCHLDSNGLYSRSTEFDYPSVGQVAQALSAANIQPIFAVTSAALPVYQELSKLIPKSAVGELSEDSSNVVQLIMDAYNSLSSTVTLEHSSLPPGVHISYESQCEGPEKREGKAEDRGQCNHVRINQTVTFWVSLQATHCLPEPHLLRLRALGFSEELIVELHTLCDCNCSDTQPQAPHCSDGQGHLQCGVCRDCAECGAFRTGPLATNCSTACAHTNVTLALAPILDDGWCKERTLDNQLFFFLVEDDARGTVVLRVRPQEKGADHTQAIVLGCVGGIVAVGLGLVLAYRLSVEIYDRREYSRFEKEQQQLNWKQDSNPLYKSAITTTINPRFQEADSPTL

SEQ ID NO: 40900 - protein, 93 aa, Homo sapiens
  Payload ID: 8316
  Gene Symbol: ITGB7
  Gene Name: integrin, beta 7
  ENSP ID: ENSP00000456305
MVALPMVLVLLLVLSRGESELDAKIPSTGDATEWRNPHLSMLGSCQPAPSCQKCILSHPSCAWCKQLNFTASGEAEARRCARREELLARGCPL

SEQ ID NO: 40901 - protein, 117 aa, Homo sapiens
  Payload ID: 8316
  Gene Symbol: ITGB7
  Gene Name: integrin, beta 7
  ENSP ID: ENSP00000456446
  MOD_RES (1)..(1): Any amino acid
XSTACAHTNVTLALAPILDDGWCKERTLDNQLFFFLVEDDARGTVVLRVRPQEKGADHTQAIVLGCVGGIVAVGLGLVLAYRLSVEIYDRREYSRFEKEQQQLNWKQLLGFGSRLAS

SEQ ID NO: 40902 - protein, 769 aa, Homo sapiens
  Payload ID: 8317
  Gene Symbol: ITGB8
  Gene Name: integrin, beta 8
  Uniprot ID: P26012
  ENSP ID: ENSP00000222573
MCGSALAFFTAAFVCLQNDRRGPASFLWAAWVFSLVLGLGQGEDNRCASSNAASCARCLALGPECGWCVQEDFISGGSRSERCDIVSNLISKGCSVDSIEYPSVHVIIPTENEINTQVTPGEVSIQLRPGAEANFMLKVHPLKKYPVDLYYLVDVSASMHNNIEKLNSVGNDLSRKMAFFSRDFRLGFGSYVDKTVSPYISIHPERIHNQCSDYNLDCMPPHGYIHVLSLTENITEFEKAVHRQKISGNIDTPEGGFDAMLQAAVCESHIGWRKEAKRLLLVMTDQTSHLALDSKLAGIVVPNDGNCHLKNNVYVKSTTMEHPSLGQLSEKLIDNNINVIFAVQGKQFHWYKDLLPLLPGTIAGEIESKAANLNNLVVEAYQKLISEVKVQVENQVQGIYFNITAICPDGSRKPGMEGCRNVTSNDEVLFNVTVTMKKCDVTGGKNYAIIKPIGFNETAKIHIHRNCSCQCEDNRGPKGKCVDETFLDSKCFQCDENKCHFDEDQFSSESCKSHKDQPVCSGRGVCVCGKCSCHKIKLGKVYGKYCEKDDFSCPYHHGNLCAGHGECEAGRCQCFSGWEGDRCQCPSAAAQHCVNSKGQVCSGRGTCVCGRCECTDPRSIGRFCEHCPTCYTACKENWNCMQCLHPHNLSQAILDQCKTSCALMEQQHYVDQTSECFSSPSYLRIFFIIFIVTFLIGLLKVLIIRQVILQWNSNKIKSSSDYRVSASKKDKLILQSVCTRAVTYRREKPEEIKMDISKLNAHETFRCNF

SEQ ID NO: 40903 - protein, 634 aa, Homo sapiens
  Payload ID: 8317
  Gene Symbol: ITGB8
  Gene Name: integrin, beta 8
  Uniprot ID: P26012
  ENSP ID: ENSP00000441561
MLKVHPLKKYPVDLYYLVDVSASMHNNIEKLNSVGNDLSRKMAFFSRDFRLGFGSYVDKTVSPYISIHPERIHNQCSDYNLDCMPPHGYIHVLSLTENITEFEKAVHRQKISGNIDTPEGGFDAMLQAAVCESHIGWRKEAKRLLLVMTDQTSHLALDSKLAGIVVPNDGNCHLKNNVYVKSTTMEHPSLGQLSEKLIDNNINVIFAVQGKQFHWYKDLLPLLPGTIAGEIESKAANLNNLVVEAYQKLISEVKVQVENQVQGIYFNITAICPDGSRKPGMEGCRNVTSNDEVLFNVTVTMKKCDVTGGKNYAIIKPIGFNETAKIHIHRNCSCQCEDNRGPKGKCVDETFLDSKCFQCDENKCHFDEDQFSSESCKSHKDQPVCSGRGVCVCGKCSCHKIKLGKVYGKYCEKDDFSCPYHHGNLCAGHGECEAGRCQCFSGWEGDRCQCPSAAAQHCVNSKGQVCSGRGTCVCGRCECTDPRSIGRFCEHCPTCYTACKENWNCMQCLHPHNLSQAILDQCKTSCALMEQQHYVDQTSECFSSPSYLRIFFIIFIVTFLIGLLKVLIIRQVILQWNSNKIKSSSDYRVSASKKDKLILQSVCTRAVTYRREKPEEIKMDISKLNAHETFRCNF

SEQ ID NO: 40904 - protein, 401 aa, Homo sapiens
  Payload ID: 8318
  Gene Symbol: ITGBL1
  Gene Name: integrin, beta-like 1 (with EGF-like repeat domains)
  Uniprot ID: O95965
  ENSP ID: ENSP00000365332
MNLVAVMGAFNKGHGKCDCGKCKCDQGWYGDACQYPTNCDLTKKKSNQMCKNSQDIICSNAGTCHCGRCKCDNSDGSGLVYGKFCECDDRECIDDETEEICGGHGKCYCGNCYCKAGWHGDKCEFQCDITPWESKRRCTSPDGKICSNRGTCVCGECTCHDVDPTGDWGDIHGDTCECDERDCRAVYDRYSDDFCSGHGQCNCGRCDCKAGWYGKKCEHPQSCTLSAEESIRKCQGSSDLPCSGRGKCECGKCTCYPPGDRRVYGKTCECDDRRCEDLDGVVCGGHGTCSCGRCVCERGWFGKLCQHPRKCNMTEEQSKNLCESADGILCSGKGSCHCGKCICSAEEWYISGEFCDCDDRDCDKHDGLICTGNGICSCGNCECWDGWNGNACEIWLGSEYP

SEQ ID NO: 40905 - protein, 494 aa, Homo sapiens
  Payload ID: 8318
  Gene Symbol: ITGBL1
  Gene Name: integrin, beta-like 1 (with EGF-like repeat domains)
  Uniprot ID: O95965
  ENSP ID: ENSP00000365351
MRPPGFRNFLLLASSLLFAGLSAVPQSFSPSLRSWPGAACRLSRAESERRCRAPGQPPGAALCHGRGRCDCGVCICHVTEPGMFFGPLCECHEWVCETYDGSTCAGHGKCDCGKCKCDQGWYGDACQYPTNCDLTKKKSNQMCKNSQDIICSNAGTCHCGRCKCDNSDGSGLVYGKFCECDDRECIDDETEEICGGHGKCYCGNCYCKAGWHGDKCEFQCDITPWESKRRCTSPDGKICSNRGTCVCGECTCHDVDPTGDWGDIHGDTCECDERDCRAVYDRYSDDFCSGHGQCNCGRCDCKAGWYGKKCEHPQSCTLSAEESIRKCQGSSDLPCSGRGKCECGKCTCYPPGDRRVYGKTCECDDRRCEDLDGVVCGGHGTCSCGRCVCERGWFGKLCQHPRKCNMTEEQSKNLCESADGILCSGKGSCHCGKCICSAEEWYISGEFCDCDDRDCDKHDGLICTGNGICSCGNCECWDGWNGNACEIWLGSEYP

SEQ ID NO: 40906 - protein, 353 aa, Homo sapiens
  Payload ID: 8318
  Gene Symbol: ITGBL1
  Gene Name: integrin, beta-like 1 (with EGF-like repeat domains)
  Uniprot ID: O95965
  ENSP ID: ENSP00000439903
MCKNSQDIICSNAGTCHCGRCKCDNSDGSGLVYGKFCECDDRECIDDETEEICGGHGKCYCGNCYCKAGWHGDKCEFQCDITPWESKRRCTSPDGKICSNRGTCVCGECTCHDVDPTGDWGDIHGDTCECDERDCRAVYDRYSDDFCSGHGQCNCGRCDCKAGWYGKKCEHPQSCTLSAEESIRKCQGSSDLPCSGRGKCECGKCTCYPPGDRRVYGKTCECDDRRCEDLDGVVCGGHGTCSCGRCVCERGWFGKLCQHPRKCNMTEEQSKNLCESADGILCSGKGSCHCGKCICSAEEWYISGEFCDCDDRDCDKHDGLICTGNGICSCGNCECWDGWNGNACEIWLGSEYP

SEQ ID NO: 40907 - protein, 208 aa, Homo sapiens
  Payload ID: 8318
  Gene Symbol: ITGBL1
  Gene Name: integrin, beta-like 1 (with EGF-like repeat domains)
  ENSP ID: ENSP00000475328
  MOD_RES (1)..(1): Any amino acid
XCEGHGQCNCGRCDCKAGWYGKKCEHPQSCTLSAEESIRKCQGSSDLPCSGRGKCECGKCTCYPPGDRRVYGKTCECDDRRCEDLDGVVCGGHGTCSCGRCVCERGWFGKLCQHPRKCNMTEEQSKNLCESADGILCSGKGSCHCGKCICSAEEWYISGEFCDCDDRDCDKHDGLICTGNGICSCGNCECWDGWNGNACEIWLGSEYP

SEQ ID NO: 40908 - protein, 401 aa, Homo sapiens
  Payload ID: 8318
  Gene Symbol: ITGBL1
  Gene Name: integrin, beta-like 1 (with EGF-like repeat domains)
  ENSP ID: ENSP00000481065
MSGCARPTTGAPVQAMVSVGKCKCDQGWYGDACQYPTNCDLTKKKSNQMCKNSQDIICSNAGTCHCGRCKCDNSDGSGLVYGKFCECDDRECIDDETEEICGGHGKCYCGNCYCKAGWHGDKCEFQCDITPWESKRRCTSPDGKICSNRGTCVCGECTCHDVDPTGDWGDIHGDTCECDERDCRAVYDRYSDDFCSGHGQCNCGRCDCKAGWYGKKCEHPQSCTLSAEESIRKCQGSSDLPCSGRGKCECGKCTCYPPGDRRVYGKTCECDDRRCEDLDGVVCGGHGTCSCGRCVCERGWFGKLCQHPRKCNMTEEQSKNLCESADGILCSGKGSCHCGKCICSAEEWYISGEFCDCDDRDCDKHDGLICTGNGICSCGNCECWDGWNGNACEIWLGSEYP

SEQ ID NO: 40909 - protein, 445 aa, Homo sapiens
  Payload ID: 8318
  Gene Symbol: ITGBL1
  Gene Name: integrin, beta-like 1 (with EGF-like repeat domains)
  ENSP ID: ENSP00000481484
MRPPGFRNFLLLASSLLFAGLSAVPQSFSPSLRSWPGAACRLSRAESERRCRAPGQPPGAALCHGRGRCDCGVCICHVTEPGMFFGPLCECHEWVCETYDGSTCAGTCHCGRCKCDNSDGSGLVYGKFCECDDRECIDDETEEICGGHGKCYCGNCYCKAGWHGDKCEFQCDITPWESKRRCTSPDGKICSNRGTCVCGECTCHDVDPTGDWGDIHGDTCECDERDCRAVYDRYSDDFCSGHGQCNCGRCDCKAGWYGKKCEHPQSCTLSAEESIRKCQGSSDLPCSGRGKCECGKCTCYPPGDRRVYGKTCECDDRRCEDLDGVVCGGHGTCSCGRCVCERGWFGKLCQHPRKCNMTEEQSKNLCESADGILCSGKGSCHCGKCICSAEEWYISGEFCDCDDRDCDKHDGLICTGNGICSCGNCECWDGWNGNACEIWLGSEYP

SEQ ID NO: 40910 - protein, 317 aa, Homo sapiens
  Payload ID: 8319
  Gene Symbol: IBSP
  Gene Name: integrin-binding sialoprotein
  Uniprot ID: P21815
  ENSP ID: ENSP00000226284
MKTALILLSILGMACAFSMKNLHRRVKIEDSEENGVFKYRPRYYLYKHAYFYPHLKRFPVQGSSDSSEENGDDSSEEEEEEEETSNEGENNEESNEDEDSEAENTTLSATTLGYGEDATPGTGYTGLAAIQLPKKAGDITNKATKEKESDEEEEEEEEGNENEESEAEVDENEQGINGTSTNSTEAENGNGSSGGDNGEEGEEESVTGANAEDTTETGRQGKGTSKTTTSPNGGFEPTTPPQVYRTTSPPFGKTTTVEYEGEYEYTGANEYDNGYEIYESENGEPRGDNYRAYEDEYSYFKGQGYDGYDGQNYYHHQ

SEQ ID NO: 40911 - protein, 452 aa, Homo sapiens
  Payload ID: 8320
  Gene Symbol: ILK
  Gene Name: integrin-linked kinase
  Uniprot ID: Q13418
  ENSP ID: ENSP00000299421
MDDIFTQCREGNAVAVRLWLDNTENDLNQGDDHGFSPLHWACREGRSAVVEMLIMRGARINVMNRGDDTPLHLAASHGHRDIVQKLLQYKADINAVNEHGNVPLHYACFWGQDQVAEDLVANGALVSICNKYGEMPVDKAKAPLRELLRERAEKMGQNLNRIPYKDTFWKGTTRTRPRNGTLNKHSGIDFKQLNFLTKLNENHSGELWKGRWQGNDIVVKVLKVRDWSTRKSRDFNEECPRLRIFSHPNVLPVLGACQSPPAPHPTLITHWMPYGSLYNVLHEGTNFVVDQSQAVKFALDMARGMAFLHTLEPLIPRHALNSRSVMIDEDMTARISMADVKFSFQCPGRMYAPAWVAPEALQKKPEDTNRRSADMWSFAVLLWELVTREVPFADLSNMEIGMKVALEGLRPTIPPGISPHVCKLMKICMNEDPAKRPKFDMIVPILEKMQDK

SEQ ID NO: 40912 - protein, 452 aa, Homo sapiens; identical to SEQ ID NO: 40911
  Payload ID: 8320
  Gene Symbol: ILK
  Gene Name: integrin-linked kinase
  Uniprot ID: Q13418
  ENSP ID: ENSP00000379975

SEQ ID NO: 40913 - protein, 452 aa, Homo sapiens; identical to SEQ ID NO: 40911
  Payload ID: 8320
  Gene Symbol: ILK
  Gene Name: integrin-linked kinase
  Uniprot ID: Q13418
  ENSP ID: ENSP00000403487

SEQ ID NO: 40914 - protein, 36 aa, Homo sapiens
  Payload ID: 8320
  Gene Symbol: ILK
  Gene Name: integrin-linked kinase
  ENSP ID: ENSP00000432617
MDDIFTQCREGNAVAVRLWLDNTENDLNQGIVLDAL

SEQ ID NO: 40915 - protein, 318 aa, Homo sapiens
  Payload ID: 8320
  Gene Symbol: ILK
  Gene Name: integrin-linked kinase
  Uniprot ID: Q13418
  ENSP ID: ENSP00000434492
MPVDKAKAPLRELLRERAEKMGQNLNRIPYKDTFWKGTTRTRPRNGTLNKHSGIDFKQLNFLTKLNENHSGELWKGRWQGNDIVVKVLKVRDWSTRKSRDFNEECPRLRIFSHPNVLPVLGACQSPPAPHPTLITHWMPYGSLYNVLHEGTNFVVDQSQAVKFALDMARGMAFLHTLEPLIPRHALNSRSVMIDEDMTARISMADVKFSFQCPGRMYAPAWVAPEALQKKPEDTNRRSADMWSFAVLLWELVTREVPFADLSNMEIGMKVALEGLRPTIPPGISPHVCKLMKICMNEDPAKRPKFDMIVPILEKMQDK

SEQ ID NO: 40916 - protein, 391 aa, Homo sapiens
  Payload ID: 8320
  Gene Symbol: ILK
  Gene Name: integrin-linked kinase
  Uniprot ID: Q13418
  ENSP ID: ENSP00000435323
MDDIFTQCREGNAVAVRLWLDNTENDLNQGDDHGFSPLHWACREGRSAVVEMLIMRGARINVMNRGDDTPLHLAASHGHRDIVQKLLQYKADINAVNEHGNVPLHYACFWGQDQVAESGQRRWARISTVFHTRTHSGRGPPALGPLWKGRWQGNDIVVKVLKVRDWSTRKSRDFNEECPRLRIFSHPNVLPVLGACQSPPAPHPTLITHWMPYGSLYNVLHEGTNFVVDQSQAVKFALDMARGMAFLHTLEPLIPRHALNSRSVMIDEDMTARISMADVKFSFQCPGRMYAPAWVAPEALQKKPEDTNRRSADMWSFAVLLWELVTREVPFADLSNMEIGMKVALEGLRPTIPPGISPHVCKLMKICMNEDPAKRPKFDMIVPILEKMQDK

SEQ ID NO: 40917 - protein, 36 aa, Homo sapiens; identical to SEQ ID NO: 40914
  Payload ID: 8320
  Gene Symbol: ILK
  Gene Name: integrin-linked kinase
  ENSP ID: ENSP00000436062

SEQ ID NO: 40918 - protein, 483 aa, Homo sapiens
  Payload ID: 8320
  Gene Symbol: ILK
  Gene Name: integrin-linked kinase
  ENSP ID: ENSP00000439606
MDDIFTQCREGNAVAVRLWLDNTENDLNQGDDHGFSPLHWACREGRSAVVEMLIMRGARINVMNRGDDTPLHLAASHGHRDIVQKLLQYKADINAVNEHGNVPLHYACFWGQDQVAEDLVANGALVSICNKYGEMPVDKAKAPLRELLRGPSPHPLACVLSSLPTCLLPLYHSLGCFSSLERAEKMGQNLNRIPYKDTFWKGTTRTRPRNGTLNKHSGIDFKQLNFLTKLNENHSGELWKGRWQGNDIVVKVLKVRDWSTRKSRDFNEECPRLRIFSHPNVLPVLGACQSPPAPHPTLITHWMPYGSLYNVLHEGTNFVVDQSQAVKFALDMARGMAFLHTLEPLIPRHALNSRSVMIDEDMTARISMADVKFSFQCPGRMYAPAWVAPEALQKKPEDTNRRSADMWSFAVLLWELVTREVPFADLSNMEIGMKVALEGLRPTIPPGISPHVCKLMKICMNEDPAKRPKFDMIVPILEKMQDK

SEQ ID NO: 40919 - protein, 40 aa, Homo sapiens
  Payload ID: 8320
  Gene Symbol: ILK
  Gene Name: integrin-linked kinase
  ENSP ID: ENSP00000479932
MDDIFTQCREGNAVAVRLWLDNTENDLNQGYCSTRQTSMQ

SEQ ID NO: 40920 - protein, 111 aa, Homo sapiens
  Payload ID: 8320
  Gene Symbol: ILK
  Gene Name: integrin-linked kinase
  ENSP ID: ENSP00000480597
REGNAVAVRLWLDNTENDLNQGDDHGFSPLHWACREGRSAVVEMLIMRGARINVMNRGDDTPLHLAASHGHRDIVQKLLQYKADINAVNEHGNVPLHYACFWGQDQVAEDK

SEQ ID NO: 40921 - protein, 36 aa, Homo sapiens; identical to SEQ ID NO: 40914
  Payload ID: 8320
  Gene Symbol: ILK
  Gene Name: integrin-linked kinase
  ENSP ID: ENSP00000487498

SEQ ID NO: 40922 - protein, 392 aa, Homo sapiens
  Payload ID: 8321
  Gene Symbol: ILKAP
  Gene Name: integrin-linked kinase-associated serine/threonine phosphatase
  Uniprot ID: Q9H0C8
  ENSP ID: ENSP00000254654
MDLFGDLPEPERSPRPAAGKEAQKGPLLFDDLPPASSTDSGSGGPLLFDDLPPASSGDSGSLATSISQMVKTEGKGAKRKTSEEEKNGSEELVEKKVCKASSVIFGLKGYVAERKGEREEMQDAHVILNDITEECRPPSSLITRVSYFAVFDGHGGIRASKFAAQNLHQNLIRKFPKGDVISVEKTVKRCLLDTFKHTDEEFLKQASSQKPAWKDGSTATCVLAVDNILYIANLGDSRAILCRYNEESQKHAALSLSKEHNPTQYEERMRIQKAGGNVRDGRVLGVLEVSRSIGDGQYKRCGVTSVPDIRRCQLTPNDRFILLACDGLFKVFTPEEAVNFILSCLEDEKIQTREGKSAADARYEAACNRLANKAVQRGSADNVTVMVVRIGH

SEQ ID NO: 40923 - protein, 212 aa, Homo sapiens
  Payload ID: 8321
  Gene Symbol: ILKAP
  Gene Name: integrin-linked kinase-associated serine/threonine phosphatase
  ENSP ID: ENSP00000395301
MDLFGDLPEPERSPRPAAGKEAQKGPLLFDDLPPASSTDSGSGGPLLFDDLPPASSGDSGSLATSISQMVKTEGKGAKRKTSEEEKNGSEELVEKKVSSSVIFGLKGYVAERKGEREEMQDAHVILNDITEECRPPSSLITRVSYFAVFDGHGGIRASKFAAQNLHQNLIRKFPKGDVISVEKTVKRCLLDTFKHTDEEFLKQASSQKPAWK

SEQ ID NO: 40924 - protein, 203 aa, Homo sapiens
  Payload ID: 8321
  Gene Symbol: ILKAP
  Gene Name: integrin-linked kinase-associated serine/threonine phosphatase
  ENSP ID: ENSP00000406254
EKTVKRCLLDTFKHTDEEFLKQASSQKPAWKDGSTATCVLAVDNILYIANLGDSRAILCRYNEESQKHAALSLSKEHNPTQYEERMRIQKAGGNVRDGRVLGVLEVSRSIGDGQYKRCGVTSVPDIRRCQLTPNDRFILLACDGLFKVFTPEEAVNFILSCLEVRNLTRGWWLSQLCLSFQRSRSSETPFPPIVGQPLCPFSV

SEQ ID NO: 40925 - protein, 162 aa, Homo sapiens
  Payload ID: 8321
  Gene Symbol: ILKAP
  Gene Name: integrin-linked kinase-associated serine/threonine phosphatase
  ENSP ID: ENSP00000477533
MDLFGDLPEPERSPRPAAGKEAQKGPLLFDDLPPASSTDSGSGGPLLFDDLPPASSGDSGSLATSISQMVKTEGKGAKRKTSEEEKNGSEELVEKKVCKASSVIFGLKGYVAERKGEREEMQDAHVILNDITEECRPPSSLMRCNQCRENREEMPFGHFQAY

SEQ ID NO: 40926 - protein, 274 aa, Homo sapiens
  Payload ID: 8321
  Gene Symbol: ILKAP
  Gene Name: integrin-linked kinase-associated serine/threonine phosphatase
  ENSP ID: ENSP00000477542
MDLFGDLPEPERSPRPAAGKEAQKGPLLFDDLPPASSTDSGSGGPLLFDDLPPASSGDSGDVISVEKTVKRCLLDTFKHTDEEFLKQASSQKPAWKDGSTATCVLAVDNILYIANLGDSRAILCRYNEESQKHAALSLSKEHNPTQYEERMRIQKAGGNVRDGRVLGVLEVSRSIGDGQYKRCGVTSVPDIRRCQLTPNDRFILLACDGLFKVFTPEEAVNFILSCLEDEKIQTREGKSAADARYEAACNRLANKAVQRGSADNVTVMVVRIGH

SEQ ID NO: 40927 - protein, 313 aa, Homo sapiens
  Payload ID: 8322
  Gene Symbol: ITLN1
  Gene Name: intelectin 1 (galactofuranose binding)
  Uniprot ID: Q8WWA0
  ENSP ID: ENSP00000323587
MNQLSFLLFLIATTRGWSTDEANTYFKEWTCSSSPSLPRSCKEIKDECPSAFDGLYFLRTENGVIYQTFCDMTSGGGGWTLVASVHENDMRGKCTVGDRWSSQQGSKAVYPEGDGNWANYNTFGSAEAATSDDYKNPGYYDIQAKDLGIWHVPNKSPMQHWRNSSLLRYRTDTGFLQTLGHNLFGIYQKYPVKYGEGKCWTDNGPVIPVVYDFGDAQKTASYYSPYGQREFTAGFVQFRVFNNERAANALCAGMRVTGCNTEHHCIGGGGYFPEASPQQCGDFSGFDWSGYGTHVGYSSSREITEAAVLLFYR

SEQ ID NO: 40928 - protein, 325 aa, Homo sapiens
  Payload ID: 8323
  Gene Symbol: ITLN2
  Gene Name: intelectin 2
  Uniprot ID: Q8WWU7
  ENSP ID: ENSP00000357008
MLSMLRTMTRLCFLLFFSVATSGCSAAAASSLEMLSREFETCAFSFSSLPRSCKEIKERCHSAGDGLYFLRTKNGVVYQTFCDMTSGGGGWTLVASVHENDMRGKCTVGDRWSSQQGNKADYPEGDGNWANYNTFGSAEAATSDDYKNPGYYDIQAKDLGIWHVPNKSPMQHWRNSALLRYRTNTGFLQRLGHNLFGIYQKYPVKYRSGKCWNDNGPAIPVVYDFGDAKKTASYYSPYGQREFVAGFVQFRVFNNERAANALCAGIKVTGCNTEHHCIGGGGFFPQGKPRQCGDFSAFDWDGYGTHVKSSCSREITEAAVLLFYR

SEQ ID NO: 40929 - protein, 437 aa, Homo sapiens
  Payload ID: 8324
  Gene Symbol: IPCEF1
  Gene Name: interaction protein for cytohesin exchange factors 1
  Uniprot ID: Q8WWN9
  ENSP ID: ENSP00000265198
MTSYMAIDGSALVPLRQKPRRKTQGFLTMSRRRISCKDLGHADCQGWLYKKKEKGSFLSNKWKKFWVILKGSSLYWYSNQMAEKADGFVNLPDFTVERASECKKKHAFKISHPQIKTFYFAAENVQEMNVWLNKLGSAVIHQESTTKDEECYSESEQEDPEIAAETPPPPHASQTQSLTAQQASSSSPSLSGTSYSFSSLENTVKTPSSFPSSLSKERQSLPDTVNSLSAAEDEGQPITFAVQVHSPVPSEAGIHKALENSFVTSESGFLNSLSSDDTSSLSSNHDHLTVPDKPAGSKIMDKEETKVSEDDEMEKLYKSLEQASLSPLGDRRPSTKKELRKSFVKRCKNPSINEKLHKIRTLNSTLKCKEHDLAMINQLLDDPKLTARKYREWKVMNTLLIQDIYQQQRASPAPDDTDDTPQELKKSPSSPSVENSI

SEQ ID NO: 40930 - protein, 438 aa, Homo sapiens
  Payload ID: 8324
  Gene Symbol: IPCEF1
  Gene Name: interaction protein for cytohesin exchange factors 1
  Uniprot ID: Q8WWN9
  ENSP ID: ENSP00000356189
MTSYMAIDGSALQVPLRQKPRRKTQGFLTMSRRRISCKDLGHADCQGWLYKKKEKGSFLSNKWKKFWVILKGSSLYWYSNQMAEKADGFVNLPDFTVERASECKKKHAFKISHPQIKTFYFAAENVQEMNVWLNKLGSAVIHQESTTKDEECYSESEQEDPEIAAETPPPPHASQTQSLTAQQASSSSPSLSGTSYSFSSLENTVKTPSSFPSSLSKERQSLPDTVNSLSAAEDEGQPITFAVQVHSPVPSEAGIHKALENSFVTSESGFLNSLSSDDTSSLSSNHDHLTVPDKPAGSKIMDKEETKVSEDDEMEKLYKSLEQASLSPLGDRRPSTKKELRKSFVKRCKNPSINEKLHKIRTLNSTLKCKEHDLAMINQLLDDPKLTARKYREWKVMNTLLIQDIYQQQRASPAPDDTDDTPQELKKSPSSPSVENSI

SEQ ID NO: 40931 - protein, 438 aa, Homo sapiens; identical to SEQ ID NO: 40930
  Payload ID: 8324
  Gene Symbol: IPCEF1
  Gene Name: interaction protein for cytohesin exchange factors 1
  Uniprot ID: Q8WWN9
  ENSP ID: ENSP00000394751

SEQ ID NO: 40932 - protein, 128 aa, Homo sapiens
  Payload ID: 8324
  Gene Symbol: IPCEF1
  Gene Name: interaction protein for cytohesin exchange factors 1
  ENSP ID: ENSP00000428767
MSRRRISCKDLGHADCQGWLYKKKEKGSFLSNKWKKFWVILKGSSLYWYSNQMAEKADGFVNLPDFTVERASECKKKHAFKISHPQIKTFYFAAENVQEMNVWLNKLGSAVIHQESTTKDEECYSESE

SEQ ID NO: 40933 - protein, 108 aa, Homo sapiens
  Payload ID: 8324
  Gene Symbol: IPCEF1
  Gene Name: interaction protein for cytohesin exchange factors 1
  ENSP ID: ENSP00000429972
MSRRRISCKDLGHADCQGWLYKKKEKGSFLSNKWKKFWVILKGSSLYWYSNQMAEKADGFVNLPDFTVERASECKKKHAFKISHPQIKTFYFAAENVQEMNVWLNKLG

SEQ ID NO: 40934 - protein, 409 aa, Homo sapiens
  Payload ID: 8324
  Gene Symbol: IPCEF1
  Gene Name: interaction protein for cytohesin exchange factors 1
  ENSP ID: ENSP00000430287
MSRRRISCKDLGHADCQGWLYKKKEKGSFLSNKWKKFWVILKGSSLYWYSNQMAEKADGFVNLPDFTVERASECKKKHAFKISHPQIKTFYFAAENVQEMNVWLNKLGSAVIHQESTTKDEECYSESEQEDPEIAAETPPPPHASQTQSLTAQQASSSSPSLSGTSYSFSSLENTVKTPSSFPSSLSKERQSLPDTVNSLSAAEDEGQPITFAVQVHSPVPSEAGIHKALENSFVTSESGFLNSLSSDDTSSLSSNHDHLTVPDKPAGSKIMDKEETKVSEDDEMEKLYKSLEQASLSPLGDRRPSTKKELRKSFVKRCKNPSINEKLHKIRTLNSTLKCKEHDLAMINQLLDDPKLTARKYREWKVMNTLLIQDIYQQQRASPAPDDTDDTPQELKKSPSSPSVENSI

SEQ ID NO: 40935 - protein, 78 aa, Homo sapiens
  Payload ID: 8324
  Gene Symbol: IPCEF1
  Gene Name: interaction protein for cytohesin exchange factors 1
  ENSP ID: ENSP00000431004
MTSYMAIDGSALVPLRQKPRRKTQGFLTMSRRRISCKDLGHADCQGWLYKKKEKGSFLSNKWKKFWVILKGSSLYWYS

SEQ ID NO: 40936 - protein, 157 aa, Homo sapiens
  Payload ID: 8324
  Gene Symbol: IPCEF1
  Gene Name: interaction protein for cytohesin exchange factors 1
  ENSP ID: ENSP00000431092
MSRRRISCKDLGHADCQGWLYKKKEKGSFLSNKWKKFWVILKGSSLYWYSNQMAEKADGFVNLPDFTVERASECKKKHAFKISHPQIKTFYFAAENVQEMNVWLNKLGSAVIHQESTTKDEECYSESEQEDPEIAAETPPPPHASQTQSLTAQQASS

SEQ ID NO: 40937 - protein, 2266 aa, Homo sapiens
  Payload ID: 8325
  Gene Symbol: ICE1
  Gene Name: interactor of little elongation complex ELL subunit 1
  Uniprot ID: Q9Y2F5
  ENSP ID: ENSP00000296564
MMPGETHSAAPGTAADLSRCQGCASLQQNLNEYVEALITLKQKIINTDNLLTEYQKKCDELQFARRENSNLHHQVEEMLQKISPLQKCQEELGSLKAELEEKKSSLKLYQDTHQEYARVKEECLKSDAQKKKLEAKVKKLQEAAVKQTQDFKQLRNEKKILEKEFKKTQERLDEFSKQKNEKELRHIGTQISSDSYGSIDKRKVKLLLKELWLCVNTTHRLPGEGSRCVPEKPAKAITSSRVPGEDGTLPPTQGSPLRTSNVQTCLTKLSMEIKEDFLCQNVEKQSSSGTNCSSDHVFNENGNLEVLVQSHRDGGSTEFVDHDHFFDEDLQAAIDFFKLPPPLLSPVPSPPPMSSPHPGSLPSSFAPETYFGEYTDSSDNDSVQLRNSAECVSEDDTTESQNYFGSLRKNKGSGTWEEKPKSHEAIQALNTWEVNKVTTSGLETFTATLRESSATHSLVGEKHWTTASRSMSDRKRDILHETKTQMEVREMDKSVQTEKTIHKLTRGLCIERLSASPAQEKEAAPGKSELCSSPLGKRPLNELMESEGKTVLSKMMGSPKSEFTKWTRINEITSEPDRITVSGHFHRLSRELEKEKEDTQGFTLGESPESEDDDSGDGMDVAGLDIETSFSSSSTLVALSVGSNPQSSSGLDCGNDTDITTKVFSTEPHHSEHKLQTKTLNTLHLQSEPPECSIGGNNLENSLCALSPELGASNFNDQKSSGIEYTKVVKGLTKIHSLPRSVFMKATKDGQCESQDPRIELTLNKPDFTSLIGSQAALIKSGLGFVKSTSWHHSDLLRKGGEESLRAKSEHEQKTSHQLQKAMPFLQNRGPTPKPDLLRENNNPVEFKTTASVLPNQVSVITKQTRPEKVQSAKLEHLRPHRVEPTLVTENSGNKTGMSTVAKCDGERDDTTQNITEVAAVKSISPEVSASRRKLDFNSPGGSSPVENSDCSTNSRLSFSPENILIQNQDIVREAAVQGDGQKQRQPQATDLDSSGTHGSEMLPATEVTVSGGFSVEETSCGDTGRSGGEALAVANDSTSTPQNANGLWKLKSTTPGGALPECFGTTDTTFSSAFCRKHGETQDTSQSSLPGTLHCYTGIREGGDDTEVESEAFSCSEGSEQQDAPDDSQKNLGDTDAAVAEVRPSLEVGYLTSALQDFNISTFSELDRLSTSEVVMFLESCQLGDYSSGDSVSECSSKGTLSKEMNKELKASEIGEKYRKQPCEEETLGTCEEWIESEEDDYSLKNTSQLTQCSLETLSEVLTKIRQELQTNSEDCNGKDTGSLLLLNVNNNMTTENLKEKSPFRETTGSSSHASEPTPQAAALDTEGSSPISGMPQNENPQSRPEARSDAGRQTDGGEEDLPEPVEPSALCSDSVMEPSIEQSSNCEAETTFQCQIATVTSEVINVLINKDQNLVIEKGDNWTIISGVAVLPHVDQVTLCDIPGDIPISQDQGELEAGCIPVTSAEKSPEASHTGPAFQEAPCGNNLSCPQEDVSSSGQSTNFDKSRLRNRPVKPSIWISSQIYDQNFETQIVASDHTYYNSKLEPSGKNKNRSKISNKDQSNKPVKTSASSRVETHQSEVAQSFSGEKANTKTQRSQTQTILANADTSTPTDCSPDTLSKIRQEVGPPLPPLLAPLIATPPRTSQPLSPLISSSSPSSPASPVGQVSPFRETPVPPAMSPWPEDPRRASPPDPSPSPSAASASERVVPSPLQFCAATPKHALPVPGRLPPCASGHAAVGGPQENSVKILDTMYPELSARARTLNILKGNIQLTRGPPADCKNLPGPASAMIGFKTITSAATAFVKTGSSSGGDCNQDKSRDLGTQQDSSGKRTLSTSTLRSAKRLRLDTGSPEPETRGVTAEGIHKNLPGNLPPAEVATTNEERSCSSPAVSAVSQLPLSPKETVESHDKAIANALKKIAEFSFDLLPVIRSHVYVGNISKKPVMRDQEKEVVYEFSTTKKHLAECLLHSILSELKIQKISMDHNYIHALCRVYVGICRQLGDLERARLFCYSLLKEDFPESEKLTLFIANMWHDIFLSQSVINKAMQLVARQRAKGEVLNCLRAFLNWEKNAPVDVGFMVSKLLLTIQLCPKTEFQPSEKFGEDLSDNTWEYIFAIDLLCCHQKWIWTHDNIISKELWPVMDKWIKYRKGHANIAYTPDIIIASILRLIGRLGQLGLKEGFPSAVKNISSVIGMFIQHAHDEDIPWGIQLAAVYALCDLSPSNPAEISKILEAWRREASKSVPSAIVSCLEEVSALSTEELG

SEQ ID NO: 40938 - protein, 145 aa, Homo sapiens
  Payload ID: 8325
  Gene Symbol: ICE1
  Gene Name: interactor of little elongation complex ELL subunit 1
  ENSP ID: ENSP00000485617
MLQKISPLQKCQEELGSLKAELEEKKSSLKLYQDTHQEYARVKEECLKSDAQKKKLEAKVKKLQEAAVKQTQDFKQLRNEKKILEKEFKKTQERLDEFSKQKNEKELRHIGTQISSDSYGSIDKRKVKLLLKELWLCVNTTHRLP

SEQ ID NO: 40939 - protein, 982 aa, Homo sapiens
  Payload ID: 8326
  Gene Symbol: ICE2
  Gene Name: interactor of little elongation complex ELL subunit 2
  Uniprot ID: Q659A1
  ENSP ID: ENSP00000261520
MSSKMVISEPGLNWDISPKNGLKTFFSRENYKDHSMAPSLKELRVLSNRRIGENLNASASSVENEPAVSSATQAKEKVKTTIGMVLLPKPRVPYPRFSRFSQREQRSYVDLLVKYAKIPANSKAVGINKNDYLQYLDMKKHVNEEVTEFLKFLQNSAKKCAQDYNMLSDDARLFTEKILRACIEQVKKYSEFYTLHEVTSLMGFFPFRVEMGLKLEKTLLALGSVKYVKTVFPSMPIKLQLSKDDIATIETSEQTAEAMHYDISKDPNAEKLVSRYHPQIALTSQSLFTLLNNHGPTYKEQWEIPVCIQVIPVAGSKPVKVIYINSPLPQKKMTMRERNQIFHEVPLKFMMSKNTSVPVSAVFMDKPEEFISEMDMSCEVNECRKIESLENLYLDFDDDVTELETFGVTTTKVSKSPSPASTSTVPNMTDAPTAPKAGTTTVAPSAPDISANSRSLSQILMEQLQKEKQLVTGMDGGPEECKNKDDQGFESCEKVSNSDKPLIQDSDLKTSDALQLENSQEIETSNKNDMTIDILHADGERPNVLENLDNSKEKTVGSEAAKTEDTVLCSSDTDEECLIIDTECKNNSDGKTAVVGSNLSSRPASPNSSSGQASVGNQTNTACSPEESCVLKKPIKRVYKKFDPVGEILKMQDELLKPISRKVPELPLMNLENSKQPSVSEQLSGPSDSSSWPKSGWPSAFQKPKGRLPYELQDYVEDTSEYLAPQEGNFVYKLFSLQDLLLLVRCSVQRIETRPRSKKRKKIRRQFPVYVLPKVEYQACYGVEALTESELCRLWTESLLHSNSSFYVGHIDAFTSKLFLLEEITSEELKEKLSALKISNLFNILQHILKKLSSLQEGSYLLSHAAEDSSLLIYKASDGKVTRTAYNLYKTHCGLPGVPSSLSVPWVPLDPSLLLPYHIHHGRIPCTFPPKSLDTTTQQKIGGTRMPTRSHRNPVSMETKSSCLPAQQVETEGVAPHKRKIT

SEQ ID NO: 40940 - protein, 94 aa, Homo sapiens
  Payload ID: 8326
  Gene Symbol: ICE2
  Gene Name: interactor of little elongation complex ELL subunit 2
  ENSP ID: ENSP00000452618
MSSKMVISEPGLNWDISPKNGLKTFFSRENYKDHSMAPSLKELRVLSNRRIGENLNASASSVENEPAVSSATQAKEKVKTTIGMVLLPKPRVPY

SEQ ID NO: 40941 - protein, 61 aa, Homo sapiens
  Payload ID: 8326
  Gene Symbol: ICE2
  Gene Name: interactor of little elongation complex ELL subunit 2
  ENSP ID: ENSP00000452713
MRDISPKNGLKTFFSRENYKDHSMAPSLKELRVLSNRESRGVMWTCWLNTQRFLQIPKLLE

SEQ ID NO: 40942 - protein, 338 aa, Homo sapiens
  Payload ID: 8326
  Gene Symbol: ICE2
  Gene Name: interactor of little elongation complex ELL subunit 2
  ENSP ID: ENSP00000452714
MSSKMVISEPGLNWDISPKNGLKTFFSRENYKDHSMAPSLKELRVLSNRRIGENLNASASSVENEPAVSSATQAKEKVKTTIGMVLLPKPRVPYPRFSRFSQREQRSYVDLLVKYAKIPANSKAVGINKNDYLQYLDMKKHVNEEVTEFLKFLQNSAKKCAQDYNMLSDDARLFTEKILRACIEQVKKYSEFYTLHEVTSLMGFFPFRVEMGLKLEKTLLALGSVKYVKTVFPSMPIKLQLSKDDIATIETSEQTAEAMHYDISKDPNAEKLVSRYHPQIALTSQSLFTLLNNHGPTYKEQWEIPVCIQVIPVAGSKPVKVIYINSPLPQKKMTMRER

SEQ ID NO: 40943 - protein, 145 aa, Homo sapiens
  Payload ID: 8326
  Gene Symbol: ICE2
  Gene Name: interactor of little elongation complex ELL subunit 2
  ENSP ID: ENSP00000453041
MSSKMVISEPGLNWDISPKNGLKTFFSRENYKDHSMAPSLKELRVLSNRRIGENLNASASSVENEPAVSSATQAKEKVKTTIGMVLLPKPRVPYPRFSRFSQREQRSYVDLLVKYAKIPANSKAVGINKNDYLQYLDMKKHVNEE

SEQ ID NO: 40944 - protein, 73 aa, Homo sapiens
  Payload ID: 8326
  Gene Symbol: ICE2
  Gene Name: interactor of little elongation complex ELL subunit 2
  Uniprot ID: Q659A1
  ENSP ID: ENSP00000453303
MSSKMVISEPGLNWDISPKNGLKTFFSRENYKDHSMAPSLKELRVLSNRESRGVMWTCWLNTQRFLQIPKLLE

SEQ ID NO: 40945 - protein, 73 aa, Homo sapiens; identical to SEQ ID NO: 40944
  Payload ID: 8326
  Gene Symbol: ICE2
  Gene Name: interactor of little elongation complex ELL subunit 2
  Uniprot ID: Q659A1
  ENSP ID: ENSP00000453593

SEQ ID NO: 40946 - protein, 99 aa, Homo sapiens
  Payload ID: 8326
  Gene Symbol: ICE2
  Gene Name: interactor of little elongation complex ELL subunit 2
  ENSP ID: ENSP00000453783
MSSKMVISEPGLNWDISPKNGLKTFFSRENYKDHSMAPSLKELRVLSNRRIGENLNASASSVENEPAVSSATQAKEKVKTTIGMVLLPKPRVPYPRFSR

SEQ ID NO: 40947 - protein, 51 aa, Homo sapiens
  Payload ID: 8326
  Gene Symbol: ICE2
  Gene Name: interactor of little elongation complex ELL subunit 2
  ENSP ID: ENSP00000453820
MSSKMVISEPGLNWDISPKNGLKTFFSRENYKDHSMAPSLKELRVLSNRKF

SEQ ID NO: 40948 - protein, 383 aa, Homo sapiens
  Payload ID: 8326
  Gene Symbol: ICE2
  Gene Name: interactor of little elongation complex ELL subunit 2
  ENSP ID: ENSP00000454162
MSSKMVISEPGLNWDISPKNGLKTFFSRENYKDHSMAPSLKELRVLSNRRIGENLNASASSVENEPAVSSATQAKEKVKTTIGMVLLPKPRVPYPRFSRFSQREQRSYVDLLVKYAKIPANSKAVGINKNDYLQYLDMKKHVNEEVTEFLKFLQNSAKKCAQDYNMLSDDARLFTEKILRACIEQVKKYSEFYTLHEVTSLMGFFPFRVEMGLKLEKTLLALGSVKYVKTVFPSMPIKLQLSKDDIATIETSEQTAEAMHYDISKDPNAEKLVSRYHPQIALTSQSLFTLLNNHGPTYKEQWEIPVCIQVIPVAGSKPVKVIYINSPLPQKKMTMRERNQIFHEVPLKFMMSKNTSVPVSAVFMDKPEEFISEMDVCNAFFFP

SEQ ID NO: 40949 - protein, 911 aa, Homo sapiens
  Payload ID: 8327
  Gene Symbol: ITIH1
  Gene Name: inter-alpha-trypsin inhibitor heavy chain 1
  Uniprot ID: P19827
  ENSP ID: ENSP00000273283
MDGAMGPRGLLLCMYLVSLLILQAMPALGSATGRSKSSEKRQAVDTAVDGVFIRSLKVNCKVTSRFAHYVVTSQVVNTANEAREVAFDLEIPKTAFISDFAVTADGNAFIGDIKDKVTAWKQYRKAAISGENAGLVRASGRTMEQFTIHLTVNPQSKVTFQLTYEEVLKRNHMQYEIVIKVKPKQLVHHFEIDVDIFEPQGISKLDAQASFLPKELAAQTIKKSFSGKKGHVLFRPTVSQQQSCPTCSTSLLNGHFKVTYDVSRDKICDLLVANNHFAHFFAPQNLTNMNKNVVFVIDISGSMRGQKVKQTKEALLKILGDMQPGDYFDLVLFGTRVQSWKGSLVQASEANLQAAQDFVRGFSLDEATNLNGGLLRGIEILNQVQESLPELSNHASILIMLTDGDPTEGVTDRSQILKNVRNAIRGRFPLYNLGFGHNVDFNFLEVMSMENNGRAQRIYEDHDATQQLQGFYSQVAKPLLVDVDLQYPQDAVLALTQNHHKQYYEGSEIVVAGRIADNKQSSFKADVQAHGEGQEFSITCLVDEEEMKKLLRERGHMLENHVERLWAYLTIQELLAKRMKVDREERANLSSQALQMSLDYGFVTPLTSMSIRGMADQDGLKPTIDKPSEDSPPLEMLGPRRTFVLSALQPSPTHSSSNTQRLPDRVTGVDTDPHFIIHVPQKEDTLCFNINEEPGVILSLVQDPNTGFSVNGQLIGNKARSPGQHDGTYFGRLGIANPATDFQLEVTPQNITLNPGFGGPVFSWRDQAVLRQDGVVVTINKKRNLVVSVDDGGTFEVVLHRVWKGSSVHQDFLGFYVLDSHRMSARTHGLLGQFFHPIGFEVSDIHPGSDPTKPDATMVVRNRRLTVTRGLQKDYSKDPWHGAEVSCWFIHNNGAGLIDGAYTDYIVPDIF

SEQ ID NO: 40950 - protein, 277 aa, Homo sapiens
  Payload ID: 8327
  Gene Symbol: ITIH1
  Gene Name: inter-alpha-trypsin inhibitor heavy chain 1
  ENSP ID: ENSP00000384589
MPLPLPSAFVLSALQPSPTHSSSNTQRLPDRVTGVDTDPHFIIHVPQKEDTLCFNINEEPGVILSLVQDPNTGFSVNGQLIGNKARSPGQHDGTYFGRLGIANPATDFQLEVTPQNITLNPGFGGPVFSWRDQAVLRQDGVVVTINKKRNLVVSVDDGGTFEVVLHRVWKGSSVHQDFLGFYVLDSHRMSARTHGLLGQFFHPIGFEVSDIHPGSDPTKPDATMVVRNRRLTVTRGLQKDYSKDPWHGAEVSCWFIHNNGAGLIDGAYTDYIVPDIF

SEQ ID NO: 40951 - protein, 464 aa, Homo sapiens
  Payload ID: 8327
  Gene Symbol: ITIH1
  Gene Name: inter-alpha-trypsin inhibitor heavy chain 1
  ENSP ID: ENSP00000395836
SMENNGRAQRIYEDHDATQQLQGFYSQVAKPLLVDVDLQYPQDAVLALTQNHHKQYYEGSEIVVAGRIADNKQSSFKADVQAHGEGQEFSITCLVDEEEMKKLLRERGHMLENHVERLWAYLTIQELLAKRMKVDREERANLSSQALQMSLDYGFVTPLTSMSIRGMADQDGLKPTIDKPSEGIGCREMLGPRRTFVLSALQPSPTHSSSNTQRLPDRVTGVDTDPHFIIHVPQKEDTLCFNINEEPGVILSLVQDPNTGFSVNGQLIGNKARSPGQHDGTYFGRLGIANPATDFQLEVTPQNITLNPGFGGPVFSWRDQAVLRQDGVVVTINKKRNLVVSVDDGGTFEVVLHRVWKGSSVHQDFLGFYVLDSHRMSARTHGLLGQFFHPIGFEVSDIHPGSDPTKPDATMVVRNRRLTVTRGLQKDYSKDPWHGAEVSCWFIHNNGAGLIDGAYTDYIVPDIF

SEQ ID NO: 40952 - protein, 213 aa, Homo sapiens
  Payload ID: 8327
  Gene Symbol: ITIH1
  Gene Name: inter-alpha-trypsin inhibitor heavy chain 1
  ENSP ID: ENSP00000417340
MDGAMGPRGLLLCMYLVSLLILQAMPALGSATGRSKSSEKRQAVDTAVDGVFIRSLKVNCKVTSRFAHYVVTSQVVNTANEAREVAFDLEIPKTAFISDFAVTADGNAFIGDIKDKVTAWKQYRKAAISGENAGLVRASGRTMEQFTIHLTVNPQSKVTFQLTYEEVLKRNHMQYEIVIKVKPKQLVHHFEVDHRSRGRGPAPLSVTMAPNTG

SEQ ID NO: 40953 - protein, 74 aa, Homo sapiens
  Payload ID: 8327
  Gene Symbol: ITIH1
  Gene Name: inter-alpha-trypsin inhibitor heavy chain 1
  ENSP ID: ENSP00000419957
  MOD_RES (1)..(1): Any amino acid
XMKVDREERANLSSQALQMSLDYGFVTPLTSMSIRGMADQDGLKPTIDKPSEDSPPLEMLGPRRTPIPSGCQTE

SEQ ID NO: 40954 - protein, 623 aa, Homo sapiens
  Payload ID: 8327
  Gene Symbol: ITIH1
  Gene Name: inter-alpha-trypsin inhibitor heavy chain 1
  Uniprot ID: P19827
  ENSP ID: ENSP00000443847
MNKNVVFVIDISGSMRGQKVKQTKEALLKILGDMQPGDYFDLVLFGTRVQSWKGSLVQASEANLQAAQDFVRGFSLDEATNLNGGLLRGIEILNQVQESLPELSNHASILIMLTDGDPTEGVTDRSQILKNVRNAIRGRFPLYNLGFGHNVDFNFLEVMSMENNGRAQRIYEDHDATQQLQGFYSQVAKPLLVDVDLQYPQDAVLALTQNHHKQYYEGSEIVVAGRIADNKQSSFKADVQAHGEGQEFSITCLVDEEEMKKLLRERGHMLENHVERLWAYLTIQELLAKRMKVDREERANLSSQALQMSLDYGFVTPLTSMSIRGMADQDGLKPTIDKPSEDSPPLEMLGPRRTFVLSALQPSPTHSSSNTQRLPDRVTGVDTDPHFIIHVPQKEDTLCFNINEEPGVILSLVQDPNTGFSVNGQLIGNKARSPGQHDGTYFGRLGIANPATDFQLEVTPQNITLNPGFGGPVFSWRDQAVLRQDGVVVTINKKRNLVVSVDDGGTFEVVLHRVWKGSSVHQDFLGFYVLDSHRMSARTHGLLGQFFHPIGFEVSDIHPGSDPTKPDATMVVRNRRLTVTRGLQKDYSKDPWHGAEVSCWFIHNNGAGLIDGAYTDYIVPDIF

SEQ ID NO: 40955 - protein, 946 aa, Homo sapiens
  Payload ID: 8328
  Gene Symbol: ITIH2
  Gene Name: inter-alpha-trypsin inhibitor heavy chain 2
  Uniprot ID: P19823
  ENSP ID: ENSP00000351190
MKRLTCFFICFFLSEVSGFEIPINGLSEFVDYEDLVELAPGKFQLVAENRRYQRSLPGESEEMMEEVDQVTLYSYKVQSTITSRMATTMIQSKVVNNSPQPQNVVFDVQIPKGAFISNFSMTVDGKTFRSSIKEKTVGRALYAQARAKGKTAGLVRSSALDMENFRTEVNVLPGAKVQFELHYQEVKWRKLGSYEHRIYLQPGRLAKHLEVDVWVIEPQGLRFLHVPDTFEGHFDGVPVISKGQQKAHVSFKPTVAQQRICPNCRETAVDGELVVLYDVKREEKAGELEVFNGYFVHFFAPDNLDPIPKNILFVIDVSGSMWGVKMKQTVEAMKTILDDLRAEDHFSVIDFNQNIRTWRNDLISATKTQVADAKRYIEKIQPSGGTNINEALLRAIFILNEANNLGLLDPNSVSLIILVSDGDPTVGELKLSKIQKNVKENIQDNISLFSLGMGFDVDYDFLKRLSNENHGIAQRIYGNQDTSSQLKKFYNQVSTPLLRNVQFNYPHTSVTDVTQNNFHNYFGGSEIVVAGKFDPAKLDQIESVITATSANTQLVLETLAQMDDLQDFLSKDKHADPDFTRKLWAYLTINQLLAERSLAPTAAAKRRITRSILQMSLDHHIVTPLTSLVIENEAGDERMLADAPPQDPSCCSGALYYGSKVVPDSTPSWANPSPTPVISMLAQGSQVLESTPPPHVMRVENDPHFIIYLPKSQKNICFNIDSEPGKILNLVSDPESGIVVNGQLVGAKKPNNGKLSTYFGKLGFYFQSEDIKIEISTETITLSHGSSTFSLSWSDTAQVTNQRVQISVKKEKVVTITLDKEMSFSVLLHRVWKKHPVNVDFLGIYIPPTNKFSPKAHGLIGQFMQEPKIHIFNERPGKDPEKPEASMEVKGQKLIITRGLQKDYRTDLVFGTDVTCWFVHNSGKGFIDGHYKDYFVPQLYSFLKRP

SEQ ID NO: 40956 - protein, 935 aa, Homo sapiens
  Payload ID: 8328
  Gene Symbol: ITIH2
  Gene Name: inter-alpha-trypsin inhibitor heavy chain 2
  ENSP ID: ENSP00000368906
MKRLTCFFICFFLSEVSGFEIPINGLSEFVDYEDLVELAPGKFQLVAENRRYQEEVDQVTLYSYKVQSTITSRMATTMIQSKVVNNSPQPQNVVFDVQIPKGAFISNFSMTVDGKTFRSSIKEKTVGRALYAQARAKGKTAGLVRSSALDMENFRTEVNVLPGAKVQFELHYQEVKWRKLGSYEHRIYLQPGRLAKHLEVDVWVIEPQGLRFLHVPDTFEGHFDGVPVISKGQQKAHVSFKPTVAQQRICPNCRETAVDGELVVLYDVKREEKAGELEVFNGYFVHFFAPDNLDPIPKNILFVIDVSGSMWGVKMKQTVEAMKTILDDLRAEDHFSVIDFNQNIRTWRNDLISATKTQVADAKRYIEKIQPSGGTNINEALLRAIFILNEANNLGLLDPNSVSLIILVSDGDPTVGELKLSKIQKNVKENIQDNISLFSLGMGFDVDYDFLKRLSNENHGIAQRIYGNQDTSSQLKKFYNQVSTPLLRNVQFNYPHTSVTDVTQNNFHNYFGGSEIVVAGKFDPAKLDQIESVITATSANTQLVLETLAQMDDLQDFLSKDKHADPDFTRKLWAYLTINQLLAERSLAPTAAAKRRITRSILQMSLDHHIVTPLTSLVIENEAGDERMLADAPPQDPSCCSGALYYGSKVVPDSTPSWANPSPTPVISMLAQGSQVLESTPPPHVMRVENDPHFIIYLPKSQKNICFNIDSEPGKILNLVSDPESGIVVNGQLVGAKKPNNGKLSTYFGKLGFYFQSEDIKIEISTETITLSHGSSTFSLSWSDTAQVTNQRVQISVKKEKVVTITLDKEMSFSVLLHRVWKKHPVNVDFLGIYIPPTNKFSPKAHGLIGQFMQEPKIHIFNERPGKDPEKPEASMEVKGQKLIITRGLQKDYRTDLVFGTDVTCWFVHNSGKGFIDGHYKDYFVPQLYSFLKRP

SEQ ID NO: 40957 - protein, 237 aa, Homo sapiens
  Payload ID: 8328
  Gene Symbol: ITIH2
  Gene Name: inter-alpha-trypsin inhibitor heavy chain 2
  ENSP ID: ENSP00000388826
MKRLTCFFICFFLSEVSGFEIPINGLSERSLPGESEEMMEEVDQVTLYSYKVQSTITSRMATTMIQSKVVNNSPQPQNVVFDVQIPKGAFISNFSMTVDGKTFRSSIKEKTVGRALYAQARAKGKTAGLVRSSALDMENFRTEVNVLPGAKVQFELHYQEVKWRKLGSYEHRIYLQPGRLAKHLEVDVWVIEPQGLRFLHVPDTFEGHFDGVPVISKGQQKAHVSFKPTVAQQRICP

SEQ ID NO: 40958 - protein, 945 aa, Homo sapiens
  Payload ID: 8328
  Gene Symbol: ITIH2
  Gene Name: inter-alpha-trypsin inhibitor heavy chain 2
  ENSP ID: ENSP00000477794
MKRLTCFFICFFLSEVSGFEIPINGLSEFVDYEDLVELAPGKFQLVAENRRYQRSLPGESEEMMEEVDQVTLYSYKVQSTITSRMATTMIQSKVVNNSPQPQNVVFDVQIPKGAFISNFSMTVDGKTFRSSIKEKTVGRALYAQARAKGKTAGLVRSSALDMENFRTEVNVLPGAKVQFELHYQEVKWRKLGSYEHRIYLQPGRLAKHLEVDVWVIEPQGLRFLHVPDTFEGHFDGVPVISKGQQKAHVSFKPTVAQQRICPNCRETAVDGELVVLYDVKREEKAGELEVFNGYFVHFFAPDNLDPIPKNILFVIDVSGSMWGVKMKQTVEAMKTILDDLRAEDHFSVIDFNQNIRTWRNDLFQLQKHRLQMPRYIEKIQPSGGTNINEALLRAIFILNEANNLGLLDPNSVSLIILVSDGDPTVGELKLSKIQKNVKENIQDNISLFSLGMGFDVDYDFLKRLSNENHGIAQRIYGNQDTSSQLKKFYNQVSTPLLRNVQFNYPHTSVTDVTQNNFHNYFGGSEIVVAGKFDPAKLDQIESVITATSANTQLVLETLAQMDDLQDFLSKDKHADPDFTRKLWAYLTINQLLAERSLAPTAAAKRRITRSILQMSLDHHIVTPLTSLVIENEAGDERMLADAPPQDPSCCSGALYYGSKVVPDSTPSWANPSPTPVISMLAQGSQVLESTPPPHVMRVENDPHFIIYLPKSQKNICFNIDSEPGKILNLVSDPESGIVVNGQLVGAKKPNNGKLSTYFGKLGFYFQSEDIKIEISTETITLSHGSSTFSLSWSDTAQVTNQRVQISVKKEKVVTITLDKEMSFSVLLHRVWKKHPVNVDFLGIYIPPTNKFSPKAHGLIGQFMQEPKIHIFNERPGKDPEKPEASMEVKGQKLIITRGLQKDYRTDLVFGTDVTCWFVHNSGKGFIDGHYKDYFVPQLYSFLKRP

SEQ ID NO: 40959 - protein, 698 aa, Homo sapiens
  Payload ID: 8329
  Gene Symbol: ITIH3
  Gene Name: inter-alpha-trypsin inhibitor heavy chain 3
  ENSP ID: ENSP00000413922
MAFAWWPCLILALLSSLAASGFPRSPFRLLGKRSLPEGVANGIEVYSTKINSKVTSRFAHNVVTMRAVNRADTAKEVSFDVELPKTAFITNFTLTIDGVTYPGNVKEKEVAKKQYEKAVSQGKTAGLVKASGRKLEKFTVSVNVAAGSKVTFELTYEELLKRHKGKYEMYLKVQPKQLVKHFEIEVDIFEPQGISMLDAEASFITNDLLGSALTKSFSGKKGHVSFKPSLDQQRSCPTCTDSLLNGDFTITYDVNRESPGNVQIVNGYFVHFFAPQGLPVVPKNVAFVIDISGSMAGRKLEQTKEALLRILEDMQEEDYLNFILFSGDVSTWKEHLVQATPENLQEARTFVKSMEDKGMTNINDGLLRGISMLNKAREEHRIPERSTSIVIMLTDGDANVGESRPEKIQENVRNAIGGKFPLYNLGFGNNLNYNFLENMALENHGFARRIYEDSDADLQLQGFYEEVANPLLTGVEMEYPENAILDLTQNTYQHFYDGSEIVVAGRLVDEDMNSFKADVKGHGATNDLTFTEEVTTEKITLWNRAVPSTFSWLDTVTVTQDGLSMMINRKNMVVSFGDGVTFVVVLHQVWKKHPVHRDFLGFYVVDSHRMSAQTHGLLGQFFQPFDFKVSDIRPGSDPTKPDATLVVKNHQLIVTRGSQKDYRKDASIGTKVVCWFVHNNGEGLIDGVHTDYIVPNLF

SEQ ID NO: 40960 - protein, 890 aa, Homo sapiens
  Payload ID: 8329
  Gene Symbol: ITIH3
  Gene Name: inter-alpha-trypsin inhibitor heavy chain 3
  Uniprot ID: Q06033
  ENSP ID: ENSP00000415769
MAFAWWPCLILALLSSLAASGFPRSPFRLLGKRSLPEGVANGIEVYSTKINSKVTSRFAHNVVTMRAVNRADTAKEVSFDVELPKTAFITNFTLTIDGVTYPGNVKEKEVAKKQYEKAVSQGKTAGLVKASGRKLEKFTVSVNVAAGSKVTFELTYEELLKRHKGKYEMYLKVQPKQLVKHFEIEVDIFEPQGISMLDAEASFITNDLLGSALTKSFSGKKGHVSFKPSLDQQRSCPTCTDSLLNGDFTITYDVNRESPGNVQIVNGYFVHFFAPQGLPVVPKNVAFVIDISGSMAGRKLEQTKEALLRILEDMQEEDYLNFILFSGDVSTWKEHLVQATPENLQEARTFVKSMEDKGMTNINDGLLRGISMLNKAREEHRIPERSTSIVIMLTDGDANVGESRPEKIQENVRNAIGGKFPLYNLGFGNNLNYNFLENMALENHGFARRIYEDSDADLQLQGFYEEVANPLLTGVEMEYPENAILDLTQNTYQHFYDGSEIVVAGRLVDEDMNSFKADVKGHGATNDLTFTEEVDMKEMEKALQERDYIFGNYIERLWAYLTIEQLLEKRKNAHGEEKENLTARALDLSLKYHFVTPLTSMVVTKPEDNEDERAIADKPGEDAEATPVSPAMSYLTSYQPPQNPYYYVDGDPHFIIQIPEKDDALCFNIDEAPGTVLRLIQDAVTGLTVNGQITGDKRGSPDSKTRKTYFGKLGIANAQMDFQVEVTTEKITLWNRAVPSTFSWLDTVTVTQDGLSMMINRKNMVVSFGDGVTFVVVLHQVWKKHPVHRDFLGFYVVDSHRMSAQTHGLLGQFFQPFDFKVSDIRPGSDPTKPDATLVVKNHQLIVTRGSQKDYRKDASIGTKVVCWFVHNNGEGLIDGVHTDYIVPNLF

SEQ ID NO: 40961 - protein, 670 aa, Homo sapiens [sequence omitted]

SEQ ID NO: 40962 - protein, 930 aa, Homo sapiens
  Payload ID: 8330
  Gene Symbol: ITIH4
  Gene Name: inter-alpha-trypsin inhibitor heavy chain family, member 4
  Uniprot ID: Q14624
  ENSP ID: ENSP00000266041
MKPPRPVRTCSKVLVLLSLLAIHQTTTAEKNGIDIYSLTVDSRVSSRFAHTVVTSRVVNRANTVQEATFQMELPKKAFITNFSMIIDGMTYPGIIKEKAEAQAQYSAAVAKGKSAGLVKATGRNMEQFQVSVSVAPNAKITFELVYEELLKRRLGVYELLLKVRPQQLVKHLQMDIHIFEPQGISFLETESTFMTNQLVDALTTWQNKTKAHIRFKPTLSQQQKSPEQQETVLDGNLIIRYDVDRAISGGSIQIENGYFVHYFAPEGLTTMPKNVVFVIDKSGSMSGRKIQQTREALIKILDDLSPRDQFNLIVFSTEATQWRPSLVPASAENVNKARSFAAGIQALGGTNINDAMLMAVQLLDSSNQEERLPEGSVSLIILLTDGDPTVGETNPRSIQNNVREAVSGRYSLFCLGFGFDVSYAFLEKLALDNGGLARRIHEDSDSALQLQDFYQEVANPLLTAVTFEYPSNAVEEVTQNNFRLLFKGSEMVVAGKLQDRGPDVLTATVSGKLPTQNITFQTESSVAEQEAEFQSPKYIFHNFMERLWAYLTIQQLLEQTVSASDADQQALRNQALNLSLAYSFVTPLTSMVVTKPDDQEQSQVAEKPMEGESRNRNVHSGSTFFKYYLQGAKIPKPEASFSPRRGWNRQAGAAGSRMNFRPGVLSSRQLGLPGPPDVPDHAAYHPFRRLAILPASAPPATSNPDPAVSRVMNMKIEETTMTTQTPAPIQAPSAILPLPGQSVERLCVDPRHRQGPVNLLSDPEQGVEVTGQYEREKAGFSWIEVTFKNPLVWVHASPEHVVVTRNRRSSAYKWKETLFSVMPGLKMTMDKTGLLLLSDPDKVTIGLLFWDGRGEGLRLLLRDTDRFSSHVGGTLGQFYQEVLWGSPAASDDGRRTLRVQGNDHSATRERRLDYQEGPPGVEISCWSVEL

SEQ ID NO: 40963 - protein, 900 aa, Homo sapiens
  Payload ID: 8330
  Gene Symbol: ITIH4
  Gene Name: inter-alpha-trypsin inhibitor heavy chain family, member 4
  Uniprot ID: Q14624
  ENSP ID: ENSP00000384425
MKPPRPVRTCSKVLVLLSLLAIHQTTTAEKNGIDIYSLTVDSRVSSRFAHTVVTSRVVNRANTVQEATFQMELPKKAFITNFSMIIDGMTYPGIIKEKAEAQAQYSAAVAKGKSAGLVKATGRNMEQFQVSVSVAPNAKITFELVYEELLKRRLGVYELLLKVRPQQLVKHLQMDIHIFEPQGISFLETESTFMTNQLVDALTTWQNKTKAHIRFKPTLSQQQKSPEQQETVLDGNLIIRYDVDRAISGGSIQIENGYFVHYFAPEGLTTMPKNVVFVIDKSGSMSGRKIQQTREALIKILDDLSPRDQFNLIVFSTEATQWRPSLVPASAENVNKARSFAAGIQALGGTNINDAMLMAVQLLDSSNQEERLPEGSVSLIILLTDGDPTVGETNPRSIQNNVREAVSGRYSLFCLGFGFDVSYAFLEKLALDNGGLARRIHEDSDSALQLQDFYQEVANPLLTAVTFEYPSNAVEEVTQNNFRLLFKGSEMVVAGKLQDRGPDVLTATVSGKLPTQNITFQTESSVAEQEAEFQSPKYIFHNFMERLWAYLTIQQLLEQTVSASDADQQALRNQALNLSLAYSFVTPLTSMVVTKPDDQEQSQVAEKPMEGESRNRNVHSAGAAGSRMNFRPGVLSSRQLGLPGPPDVPDHAAYHPFRRLAILPASAPPATSNPDPAVSRVMNMKIEETTMTTQTPAPIQAPSAILPLPGQSVERLCVDPRHRQGPVNLLSDPEQGVEVTGQYEREKAGFSWIEVTFKNPLVWVHASPEHVVVTRNRRSSAYKWKETLFSVMPGLKMTMDKTGLLLLSDPDKVTIGLLFWDGRGEGLRLLLRDTDRFSSHVGGTLGQFYQEVLWGSPAASDDGRRTLRVQGNDHSATRERRLDYQEGPPGVEISCWSVEL

SEQ ID NO: 40964 - protein, 719 aa, Homo sapiens
  Payload ID: 8330
  Gene Symbol: ITIH4
  Gene Name: inter-alpha-trypsin inhibitor heavy chain family, member 4
  ENSP ID: ENSP00000395634
  MOD_RES (1)..(1): Any amino acid
XVSVAPNAKITFELVYEELLKRRLGVYELLLKVRPQQLVKHLQMDIHIFEPQGISFLETESTFMTNQLVDALTTWQNKTKQKSPEQQETVLDGNLIIRYDVDRAISGGSIQIENGYFVHYFAPEGLTTMPKNVVFVIDKSGSMSGRKIQQTREALIKILDDLSPRDQFNLIVFSTEATQWRPSLVPASAENVNKARSFAAGIQALGGTNINDAMLMAVQLLDSSNQEERLPEGSVSLIILLTDGDPTVGETNPRSIQNNVREAVSGRYSLFCLGFGFDVSYAFLEKLALDNGGLARRIHEDSDSALQLQDFYQEVANPLLTAVTFEYPSNAVEEVTQNNFRLLFKGSEMVVAGKLQDRGPDVLTATVSGKLPTQNITFQTESSVAEQEAEFQSPKYIFHNFMERLWAYLTIQQLLEQTVSASDADQQALRNQALNLSLAYSFVTPLTSMVVTKPDDQEQSQVAEKPMEGESRNRNVHSAGAAGSRMNFRPGVLSSRQLGLPGPPDVPDHAAYHPFRRLAILPASAPPATSNPDPAVSRVMNMKIEETTMTTQTPGVEVTGQYEREKAGFSWIEVTFKNPLVWVHASPEHVVVTRNRRSSAYKWKETLFSVMPGLKMTMDKTGLLLLSDPDKVTIGLLFWDGRGEGLRLLLRDTDRFSSHVGGTLGQFYQEVLWGSPAASDDGRRTLRVQGNDHSATRERRLDYQEGPPGVEISCWSVEL

SEQ ID NO: 40965 - protein, 935 aa, Homo sapiens
  Payload ID: 8330
  Gene Symbol: ITIH4
  Gene Name: inter-alpha-trypsin inhibitor heavy chain family, member 4
  ENSP ID: ENSP00000417824
MKPPRPVRTCSKVLVLLSLLAIHQTTTAEKNGIDIYSLTVDSRVSSRFAHTVVTSRVVNRANTVQEATFQMELPKKAFITNFSMIIDGMTYPGIIKEKAEAQAQYSAAVAKGKSAGLVKATGRNMEQFQVSVSVAPNAKITFELVYEELLKRRLGVYELLLKVRPQQLVKHLQMDIHIFEPQGISFLETESTFMTNQLVDALTTWQNKTKAHIRFKPTLSQQQKSPEQQETVLDGNLIIRYDVDRAISGGSIQIENGYFVHYFAPEGLTTMPKNVVFVIDKSGSMSGRKIQQTREALIKILDDLSPRDQFNLIVFSTEATQWRPSLVPASAENVNKARSFAAGIQALGGTNINDAMLMAVQLLDSSNQEERLPEGSVSLIILLTDGDPTVGETNPRSIQNNVREAVSGRYSLFCLGFGFDVSYAFLEKLALDNGGLARRIHEDSDSALQLQDFYQEVANPLLTAVTFEYPSNAVEEVTQNNFRLLFKGSEMVVAGKLQDRGPDVLTATVSGKLPTQNITFQTESSVAEQEAEFQSPKYIFHNFMERLWAYLTIQQLLEQTVSASDADQQALRNQALNLSLAYSFVTPLTSMVVTKPDDQEQSQVAEKPMEGESRNRNVHSGSTFFKYYLQGAKIPKPGLDHTEASFSPRRGWNRQAGAAGSRMNFRPGVLSSRQLGLPGPPDVPDHAAYHPFRRLAILPASAPPATSNPDPAVSRVMNMKIEETTMTTQTPAPIQAPSAILPLPGQSVERLCVDPRHRQGPVNLLSDPEQGVEVTGQYEREKAGFSWIEVTFKNPLVWVHASPEHVVVTRNRRSSAYKWKETLFSVMPGLKMTMDKTGLLLLSDPDKVTIGLLFWDGRGEGLRLLLRDTDRFSSHVGGTLGQFYQEVLWGSPAASDDGRRTLRVQGNDHSATRERRLDYQEGPPGVEISCWSVEL

SEQ ID NO: 40966 - protein, 702 aa, Homo sapiens
  Payload ID: 8331
  Gene Symbol: ITIH5
  Gene Name: inter-alpha-trypsin inhibitor heavy chain family, member 5
  ENSP ID: ENSP00000380332
MLLLLGLCLGLSLCVGSQEEAQSWGHSSEQDGLRVPRQVRLLQRLKTKPLMTEFSVKSTIISRYAFTTVSCRMLNRASEDQDIEFQMQIPAAAFITNFTMLIGDKVYQGEITEREKKSGDRVKEKRNKTTEENGEKGTEIFRASAVIPSKDKAAFFLSYEELLQRRLGKYEHSISVRPQQLSGRLSVDVNILESAGIASLEVLPLHNSRQRGSGRGEDDSGPPPSTVINQNETFANIIFKPTVVQQARIAQNGILGDFIIRYDVNREQSIGDIQVLNGYFVHYFAPKDLPPLPKNVVFVLDSSASMVGTKLRQTKDALFTILHDLRPQDRFSIIGFSNRIKVWKDHLISVTPDSIRDGKVYIHHMSPTGGTDINGALQRAIRLLNKYVAHSGIGDRSVSLIVFLTDGKPTVGETHTLKILNNTREAARGQVCIFTIGIGNDVDFRLLEKLSLENCGLTRRVHEEEDAGSQLIGFYDEIRTPLLSDIRIDYPPSSVVQATKTLFPNYFNGSEIIIAGKLVDRKLDHLHVEVTASNSKKFIILKTDVPVRPQKAGKDVTGSPRPGGDGEGDTNHIERLWSYLTTKELLSSWLQSDDEPEKERLRQRAQALAVSYRFLTPFTSMKLRGPVPRMDGLEEAHGMSAAMGPEPVVQSVRGAGTQPGPLLKKPYQPRIKISKTSVRGFRREEQIFSNVMKFPFASILEL

SEQ ID NO: 40967 - protein, 942 aa, Homo sapiens
  Payload ID: 8331
  Gene Symbol: ITIH5
  Gene Name: inter-alpha-trypsin inhibitor heavy chain family, member 5
  ENSP ID: ENSP00000380333
MLLLLGLCLGLSLCVGSQEEAQSWGHSSEQDGLRVPRQVRLLQRLKTKPLMTEFSVKSTIISRYAFTTVSCRMLNRASEDQDIEFQMQIPAAAFITNFTMLIGDKVYQGEITEREKKSGDRVKEKRNKTTEENGEKGTEIFRASAVIPSKDKAAFFLSYEELLQRRLGKYEHSISVRPQQLSGRLSVDVNILESAGIASLEVLPLHNSRQRGSGRGEDDSGPPPSTVINQNETFANIIFKPTVVQQARIAQNGILGDFIIRYDVNREQSIGDIQVLNGYFVHYFAPKDLPPLPKNVVFVLDSSASMVGTKLRQTKDALFTILHDLRPQDRFSIIGFSNRIKVWKDHLISVTPDSIRDGKVYIHHMSPTGGTDINGALQRAIRLLNKYVAHSGIGDRSVSLIVFLTDGKPTVGETHTLKILNNTREAARGQVCIFTIGIGNDVDFRLLEKLSLENCGLTRRVHEEEDAGSQLIGFYDEIRTPLLSDIRIDYPPSSVVQATKTLFPNYFNGSEIIIAGKLVDRKLDHLHVEVTASNSKKFIILKTDVPVRPQKAGKDVTGSPRPGGDGEGDTNHIERLWSYLTTKELLSSWLQSDDEPEKERLRQRAQALAVSYRFLTPFTSMKLRGPVPRMDGLEEAHGMSAAMGPEPVVQSVRGAGTQPGPLLKKPYQPRIKISKTSVDGDPHFVVDFPLSRLTVCFNIDGQPGDILRLVSDHRDSGVTVNGELIGAPAPPNGHKKQRTYLRTITILINKPERSYLEITPSRVILDGGDRLVLPCNQSVVVGSWGLEVSVSANANVTVTIQGSIAFVILIHLYKKPAPFQRHHLGFYIANSEGLSSNCHGLLGQFLNQDARLTEDPAGPSQNLTHPLLLQVGEGPEAVLTVKGHQVPVVWKQRKIYNGEEQIDCWFARNNAAKLIDGEYKDYLASHPFDTGMTLGRGMSREL

SEQ ID NO: 40968 - protein, 119 aa, Homo sapiens
  Payload ID: 8331
  Gene Symbol: ITIH5
  Gene Name: inter-alpha-trypsin inhibitor heavy chain family, member 5
  ENSP ID: ENSP00000419386
  MOD_RES (1)..(1): Any amino acid
XPSTVINQNETFANIIFKPTVVQQARIAQNGILGDFIIRYDVNREQSIGDIQVLNGYFVHYFAPKDLPPLPKNVVFVLDSSASMVGTKLRQDIGFSLAVQNWVPKGYLDISCVTLQVHV

SEQ ID NO: 40969 - protein, 728 aa, Homo sapiens
  Payload ID: 8331
  Gene Symbol: ITIH5
  Gene Name: inter-alpha-trypsin inhibitor heavy chain family, member 5
  ENSP ID: ENSP00000485414
MRNYDSGPPPSTVINQNETFANIIFKPTVVQQARIAQNGILGDFIIRYDVNREQSIGDIQVLNGYFVHYFAPKDLPPLPKNVVFVLDSSASMVGTKLRQTKDALFTILHDLRPQDRFSIIGFSNRIKVWKDHLISVTPDSIRDGKVYIHHMSPTGGTDINGALQRAIRLLNKYVAHSGIGDRSVSLIVFLTDGKPTVGETHTLKILNNTREAARGQVCIFTIGIGNDVDFRLLEKLSLENCGLTRRVHEEEDAGSQLIGFYDEIRTPLLSDIRIDYPPSSVVQATKTLFPNYFNGSEIIIAGKLVDRKLDHLHVEVTASNSKKFIILKTDVPVRPQKAGKDVTGSPRPGGDGEGDTNHIERLWSYLTTKELLSSWLQSDDEPEKERLRQRAQALAVSYRFLTPFTSMKLRGPVPRMDGLEEAHGMSAAMGPEPVVQSVRGAGTQPGPLLKKPYQPRIKISKTSVDGDPHFVVDFPLSRLTVCFNIDGQPGDILRLVSDHRDSGVTVNGELIGAPAPPNGHKKQRTYLRTITILINKPERSYLEITPSRVILDGGDRLVLPCNQSVVVGSWGLEVSVSANANVTVTIQGSIAFVILIHLYKKPAPFQRHHLGFYIANSEGLSSNCHGLLGQFLNQDARLTEDPAGPSQNLTHPLLLQVGEGPEAVLTVKGHQVPVVWKQRKIYNGEEQIDCWFARNNAAKLIDGEYKDYLASHPFDTGMTLGRGMSREL

SEQ ID NO: 40970 - protein, 1313 aa, Homo sapiens
  Payload ID: 8332
  Gene Symbol: ITIH6
  Gene Name: inter-alpha-trypsin inhibitor heavy chain family, member 6
  Uniprot ID: Q6UXX5
  ENSP ID: ENSP00000218436
MSGWRYLICVSFLLTILLELTYQGPPVPASSSTKLLMTSYSMRSTVVSRYAHTLVTSVLFNPHAEAHEAIFDLDLPHLAFISNFTMTINNKVYIAEVKEKHQAKKIYEEAHQQGKTAAHVGIRDRESEKFRISTSLAAGTEVTFSLAYEELLQRHQGQYQLVVSLRPGQLVKRLSIEVTVSERTGISYVHIPPLRTGRLRTNAHASEVDSPPSTRIERGETCVRITYCPTLQDQSSISGSGIMADFLVQYDVVMEDIIGDVQIYDDYFIHYFAPRGLPPMEKNVVFVIDVSSSMFGTKMEQTKTAMNVILSDLQANDYFNIISFSDTVNVWKAGGSIQATIQNVHSAKDYLHCMEADGWTDVNSALLAAASVLNHSNQEPGRGPSVGRIPLIIFLTDGEPTAGVTTPSVILSNVRQALGHRVSLFSLAFGDDADFTLLRRLSLENRGIARRIYEDTDAALQLKGLYEEISMPLLADVRLNYLGGLVGASPWAVFPNYFGGSELVVAGQVQPGKQELGIHLAARGPKDQLLVAHHSEGATNNSQKAFGCPGEPAPNVAHFIRRLWAYVTIGELLDAHFQARDTTTRHLLAAKVLNLSLEYNFVTPLTSLVMVQPKQASEETRRQTSTSAGPDTIMPSSSSRHGLGVSTAQPALVPKVISPKSRPVKPKFYLSSTTTASTKKMLSSKELEPLGESPHTLSMPTYPKAKIPAQQDSGTLAQPTLRTKPTILVPSNSGTLLPLKPGSLSHQNPDILPTNSRTQVPPVKPGIPASPKADTVKCVTPLHSKPGAPSHPQLGALTSQAPKGLPQSRPGVSTLQVPKYPLHTRPRVPAPKTRNNMPHLGPGILLSKTPKILLSLKPSAPPHQISTSISLSKPETPNPHMPQTPLPPRPDRPRPPLPESLSTFPNTISSSTGPSSTTTTSVLGEPLPMPFTPTLPPGRFWHQYDLLPGPQRTRQVLGPSRPGVPTMSLLNSSRPTPEGSPPNLPILLPSSILPEAISLLLLPEELELLSESMVESKFVESLNPPAFYTFLTPDEDGSPNWDGNSEEILGGAGGSMESQGSSVGLAKGTLPSIFTFSSSVDGDPHFVIQIPHSEEKICFTLNGHPGDLLQLIEDPKAGLHVSGKLLGAPPRPGHKDQTRTYFQIITVTTDKPRAYTITISRSSISLRGEGTLRLSWDQPALLKRPQLELYVAAAARLTLRLGPYLEFLVLRHRYRHPSTLQLPHLGFYVANGSGLSPSARGLIGQFQHADIRLVTGPMGPCLRRHHGPDVPVILGKRLLKDSPRLLPRWASCWLVKRSHVELLLGHPYLSYVL

SEQ ID NO: 40971 - protein, 532 aa, Homo sapiens
  Payload ID: 8333
  Gene Symbol: ICAM1
  Gene Name: intercellular adhesion molecule 1
  Uniprot ID: P05362
  ENSP ID: ENSP00000264832
MAPSSPRPALPALLVLLGALFPGPGNAQTSVSPSKVILPRGGSVLVTCSTSCDQPKLLGIETPLPKKELLLPGNNRKVYELSNVQEDSQPMCYSNCPDGQSTAKTFLTVYWTPERVELAPLPSWQPVGKNLTLRCQVEGGAPRANLTVVLLRGEKELKREPAVGEPAEVTTTVLVRRDHHGANFSCRTELDLRPQGLELFENTSAPYQLQTFVLPATPPQLVSPRVLEVDTQGTVVCSLDGLFPVSEAQVHLALGDQRLNPTVTYGNDSFSAKASVSVTAEDEGTQRLTCAVILGNQSQETLQTVTIYSFPAPNVILTKPEVSEGTEVTVKCEAHPRAKVTLNGVPAQPLGPRAQLLLKATPEDNGRSFSCSATLEVAGQLIHKNQTRELRVLYGPRLDERDCPGNWTWPENSQQTPMCQAWGNPLPELKCLKDGTFPLPIGESVTVTRDLEGTYLCRARSTQGEVTRKVTVNVLSPRYEIVIITVVAAAVIMGTAGLSTYLYNRQRKIKKYRLQQAQKGTPMKPNTQATPP

SEQ ID NO: 40972 - protein, 310 aa, Homo sapiens
  Payload ID: 8333
  Gene Symbol: ICAM1
  Gene Name: intercellular adhesion molecule 1
  ENSP ID: ENSP00000413124
MAPSSPRPALPALLVLLGALFPVSEAQVHLALGDQRLNPTVTYGNDSFSAKASVSVTAEDEGTQRLTCAVILGNQSQETLQTVTIYSFPAPNVILTKPEVSEGTEVTVKCEAHPRAKVTLNGVPAQPLGPRAQLLLKATPEDNGRSFSCSATLEVAGQLIHKNQTRELRVLYGPRLDERDCPGNWTWPENSQQTPMCQAWGNPLPELKCLKDGTFPLPIGESVTVTRDLEGTYLCRARSTQGEVTRKVTVNVLSPRYEIVIITVVAAAVIMGTAGLSTYLYNRQRKIKKYRLQQAQKGTPMKPNTQATPP

SEQ ID NO: 40973 - protein, 180 aa, Homo sapiens
  Payload ID: 8333
  Gene Symbol: ICAM1
  Gene Name: intercellular adhesion molecule 1
  ENSP ID: ENSP00000465680
MAPSSPRPALPALLVLLGALFPGPGNAQTSVSPSKVILPRGGSVLVTCSTSCDQPKLLGIETPLPKKELLLPGNNRKVYELSNVQEDSQPMCYSNCPDGQSTAKTFLTVYWTPERVEGGAPRANLTVVLLRGEKELKREPAVGEPAEVTTTVLVRRDHHGANFSCRTELDLRPQGLELFE

SEQ ID NO: 40974 - protein, 275 aa, Homo sapiens
  Payload ID: 8334
  Gene Symbol: ICAM2
  Gene Name: intercellular adhesion molecule 2
  Uniprot ID: P13598
  ENSP ID: ENSP00000388666
MSSFGYRTLTVALFTLICCPGSDEKVFEVHVRPKKLAVEPKGSLEVNCSTTCNQPEVGGLETSLDKILLDEQAQWKHYLVSNISHDTVLQCHFTCSGKQESMNSNVSVYQPPRQVILTLQPTLVAVGKSFTIECRVPTVEPLDSLTLFLFRGNETLHYETFGKAAPAPQEATATFNSTADREDGHRNFSCLAVLDLMSRGGNIFHKHSAPKMLEIYEPVSDSQMVIIVTVVSVLLSLFVTSVLLCFIFGQHLRQQRMGTYGVRAAWRRLPQAFRP

SEQ ID NO: 40975 - protein, 275 aa, Homo sapiens; identical to SEQ ID NO: 40974
  Payload ID: 8334
  Gene Symbol: ICAM2
  Gene Name: intercellular adhesion molecule 2
  Uniprot ID: P13598
  ENSP ID: ENSP00000392634

SEQ ID NO: 40976 - protein, 275 aa, Homo sapiens; identical to SEQ ID NO: 40974
  Payload ID: 8334
  Gene Symbol: ICAM2
  Gene Name: intercellular adhesion molecule 2
  Uniprot ID: P13598
  ENSP ID: ENSP00000415283

SEQ ID NO: 40977 - protein, 275 aa, Homo sapiens; identical to SEQ ID NO: 40974
  Payload ID: 8334
  Gene Symbol: ICAM2
  Gene Name: intercellular adhesion molecule 2
  Uniprot ID: P13598
  ENSP ID: ENSP00000462579

SEQ ID NO: 40978 - protein, 53 aa, Homo sapiens
  Payload ID: 8334
  Gene Symbol: ICAM2
  Gene Name: intercellular adhesion molecule 2
  ENSP ID: ENSP00000462617
MSSFGYRTLTVALFTLICCPGVNEFQRQRVPASKAGHPDTATHFGGCGQVLHH

SEQ ID NO: 40979 - protein, 174 aa, Homo sapiens
  Payload ID: 8334
  Gene Symbol: ICAM2
  Gene Name: intercellular adhesion molecule 2
  ENSP ID: ENSP00000463199
MNSNVSVYQPPRQVILTLQPTLVAVGKSFTIECRVPTVEPLDSLTLFLFRGNETLHYETFGKAAPAPQEATATFNSTADREDGHRNFSCLAVLDLMSRGGNIFHKHSAPKMLEIYEPVSDSQMVIIVTVVSVLLSLFVTSVLLCFIFGQHLRQQRMGTYGVRAAWRRLPQAFRP

SEQ ID NO: 40980 - protein, 166 aa, Homo sapiens
  Payload ID: 8334
  Gene Symbol: ICAM2
  Gene Name: intercellular adhesion molecule 2
  ENSP ID: ENSP00000463862
MSSFGYRTLTVALFTLICCPGSDEKVFEVHVRPKKLAVEPKGSLEVNCSTTCNQPEVGGLETSLDKILLDEQAQWKHYLVSNISHDTVLQCHFTCSGKQESMNSNVSVYQPPRQVILTLQPTLVAVGKSFTIECRVPTVEPLDSLTLFLFRGNETLHYETFGKAAP

SEQ ID NO: 40981 - protein, 214 aa, Homo sapiens
  Payload ID: 8334
  Gene Symbol: ICAM2
  Gene Name: intercellular adhesion molecule 2
  ENSP ID: ENSP00000463945
MSSFGYRTLTVALFTLICCPGSDEKVFEVHVRPKKLAVEPKGSLEVNCSTTCNQPEVGGLETSLDKILLDEQAQWKHYLVSNISHDTVLQCHFTCSGKQESMNSNVSVYQPPRQVILTLQPTLVAVGKSFTIECRVPTVEPLDSLTLFLFRGNETLHYETFGKAAPAPQEATATFNSTADREDGHRNFSCLAVLDLMSRGGNIFHKHSAPKMLE

SEQ ID NO: 40982 - protein, 216 aa, Homo sapiens
  Payload ID: 8334
  Gene Symbol: ICAM2
  Gene Name: intercellular adhesion molecule 2
  ENSP ID: ENSP00000464331
MSSFGYRTLTVALFTLICCPGSDEKVFEVHVRPKKLAVEPKGSLEVNCSTTCNQPEVGGLETSLDKILLDEQAQWKHYLVSNISHDTVLQCHFTCSGKQESMNSNVSVYQPPRQVILTLQPTLVAVGKSFTIECRVPTVEPLDSLTLFLFRGNETLHYETFGKAAPAPQEATATFNSTADREDGHRNFSCLAVLDLMSRGGNIFHKHSAPKMLEIY

SEQ ID NO: 40983 - protein, 251 aa, Homo sapiens
  Payload ID: 8334
  Gene Symbol: ICAM2
  Gene Name: intercellular adhesion molecule 2
  ENSP ID: ENSP00000464372
MSSFGYRTLTVALFTLICCPGSDEKVFEVHVRPKKLATSLDKILLDEQAQWKHYLVSNISHDTVLQCHFTCSGKQESMNSNVSVYQPPRQVILTLQPTLVAVGKSFTIECRVPTVEPLDSLTLFLFRGNETLHYETFGKAAPAPQEATATFNSTADREDGHRNFSCLAVLDLMSRGGNIFHKHSAPKMLEIYEPVSDSQMVIIVTVVSVLLSLFVTSVLLCFIFGQHLRQQRMGTYGVRAAWRRLPQAFRP

SEQ ID NO: 40984 - protein, 275 aa, Homo sapiens; identical to SEQ ID NO: 40974
  Payload ID: 8334
  Gene Symbol: ICAM2
  Gene Name: intercellular adhesion molecule 2
  Uniprot ID: P13598
  ENSP ID: ENSP00000464665

SEQ ID NO: 40985 - protein, 547 aa, Homo sapiens
  Payload ID: 8335
  Gene Symbol: ICAM3
  Gene Name: intercellular adhesion molecule 3
  Uniprot ID: P32942
  ENSP ID: ENSP00000160262
MATMVPSVLWPRACWTLLVCCLLTPGVQGQEFLLRVEPQNPVLSAGGSLFVNCSTDCPSSEKIALETSLSKELVASGMGWAAFNLSNVTGNSRILCSVYCNGSQITGSSNITVYRLPERVELAPLPPWQPVGQNFTLRCQVEDGSPRTSLTVVLLRWEEELSRQPAVEEPAEVTATVLASRDDHGAPFSCRTELDMQPQGLGLFVNTSAPRQLRTFVLPVTPPRLVAPRFLEVETSWPVDCTLDGLFPASEAQVYLALGDQMLNATVMNHGDTLTATATATARADQEGAREIVCNVTLGGERREARENLTVFSFLGPIVNLSEPTAHEGSTVTVSCMAGARVQVTLDGVPAAAPGQPAQLQLNATESDDGRSFFCSATLEVDGEFLHRNSSVQLRVLYGPKIDRATCPQHLKWKDKTRHVLQCQARGNPYPELRCLKEGSSREVPVGIPFFVNVTHNGTYQCQASSSRGKYTLVVVMDIEAGSSHFVPVFVAVLLTLGVVTIVLALMYVFREHQRSGSYHVREESTYLPLTSMQPTEAMGEEPSRAE

SEQ ID NO: 40986 - protein, 40 aa, Homo sapiens
  Payload ID: 8335
  Gene Symbol: ICAM3
  Gene Name: intercellular adhesion molecule 3
  ENSP ID: ENSP00000466081
MGWAAFNLSNVTGNSRILCSVYCNGSQITGSSNITVYRLP

SEQ ID NO: 40987 - protein, 59 aa, Homo sapiens
  Payload ID: 8335
  Gene Symbol: ICAM3
  Gene Name: intercellular adhesion molecule 3
  ENSP ID: ENSP00000466501
MATMVPSVLWPRACWTLLVCCLLTPVLIVPALRKSPWRRPYQRSWWPVAWAGQPSISAT

SEQ ID NO: 40988 - protein, 301 aa, Homo sapiens
  Payload ID: 8335
  Gene Symbol: ICAM3
  Gene Name: intercellular adhesion molecule 3
  ENSP ID: ENSP00000467232
DHGAPFSCRTELDMQPQGLGLFVNTSAPRQLRTFVLPVTPPRLVAPRFLEVETSWPVDCTLDGLFPASEAQVYLALGDQMLNATVMNHGDTLTATATATARADQEGFLGPIVNLSEPTAHEGSTVTVSCMAGARVQVTLDGVPAAAPGQPAQLQLNATESDDGRSFFCSATLEVDGEFLHRNSSVQLRVLYGPKIDRATCPQHLKWKDKTRHVLQCQARGNPYPELRCLKEGSSREVPVGIPFFVNVTHNGTYQCQASSSRGKYTLVVVMDIEAGSSHFVPVFVAVLLTLGVVTIVLALMY

SEQ ID NO: 40989 - protein, 132 aa, Homo sapiens
  Payload ID: 8335
  Gene Symbol: ICAM3
  Gene Name: intercellular adhesion molecule 3
  ENSP ID: ENSP00000467770
MLDQSLFWPPSEFSPVSDGFYLSHWTMKAGTLLSRHKERGVKCTDCPSSEKIALETSLSKELVASGMGWAAFNLSNVTGNSRILCSVYCNGSQITGSSNITVYRLPERVELAPLPPWQPVGQNFTLRCQVED

SEQ ID NO: 40990 - protein, 192 aa, Homo sapiens
  Payload ID: 8335
  Gene Symbol: ICAM3
  Gene Name: intercellular adhesion molecule 3
  ENSP ID: ENSP00000468230
TVSCMAGARVQVTLDGVPAAAPGQPAQLQLNATESDDGRSFFCSATLEVDGEFLHRNSSVQLRVLYGPKIDRATCPQHLKWKDKTRHVLQCQARGNPYPELRCLKEGSSREVPVGIPFFVNVTHNAGSSHFVPVFVAVLLTLGVVTIVLALMYVFREHQRSGSYHVREESTYLPLTSMQPTEAMGEEPSRAE

SEQ ID NO: 40991 - protein, 23 aa, Homo sapiens
  Payload ID: 8335
  Gene Symbol: ICAM3
  Gene Name: intercellular adhesion molecule 3
  ENSP ID: ENSP00000468282
MGWAAFNLSNVTGNSRILCSVYC

SEQ ID NO: 40992 - protein, 470 aa, Homo sapiens
  Payload ID: 8335
  Gene Symbol: ICAM3
  Gene Name: intercellular adhesion molecule 3
  ENSP ID: ENSP00000468333
MGWAAFNLSNVTGNSRILCSVYCNGSQITGSSNITVYRLPERVELAPLPPWQPVGQNFTLRCQVEDGSPRTSLTVVLLRWEEELSRQPAVEEPAEVTATVLASRDDHGAPFSCRTELDMQPQGLGLFVNTSAPRQLRTFVLPVTPPRLVAPRFLEVETSWPVDCTLDGLFPASEAQVYLALGDQMLNATVMNHGDTLTATATATARADQEGAREIVCNVTLGGERREARENLTVFSFLGPIVNLSEPTAHEGSTVTVSCMAGARVQVTLDGVPAAAPGQPAQLQLNATESDDGRSFFCSATLEVDGEFLHRNSSVQLRVLYGPKIDRATCPQHLKWKDKTRHVLQCQARGNPYPELRCLKEGSSREVPVGIPFFVNVTHNGTYQCQASSSRGKYTLVVVMDIEAGSSHFVPVFVAVLLTLGVVTIVLALMYVFREHQRSGSYHVREESTYLPLTSMQPTEAMGEEPSRAE

SEQ ID NO: 40993 - protein, 272 aa, Homo sapiens
  Payload ID: 8336
  Gene Symbol: ICAM4
  Gene Name: intercellular adhesion molecule 4 (Landsteiner-Wiener blood group)
  Uniprot ID: Q14773
  ENSP ID: ENSP00000342114
MGSLFPLSLLFFLAAAYPGVGSALGRRTKRAQSPKGSPLAPSGTSVPFWVRMSPEFVAVQPGKSVQLNCSNSCPQPQNSSLRTPLRQGKTLRGPGWVSYQLLDVRAWSSLAHCLVTCAGKTRWATSRITAYSVPGGLLGGDPEAWKPGHLFRKPGALHRPGSGQRDLDLRVCCWTPRLLAARDLPRAPQSRRPGGPQQLGTHYTDARLEPRAHSFGLRFHRCPCRDPPHCGRCVPMQVPSYEVPGVKGDVLCRLSEKKRNMKQSGEMAIHGG

SEQ ID NO: 40994 - protein, 271 aa, Homo sapiens
  Payload ID: 8336
  Gene Symbol: ICAM4
  Gene Name: intercellular adhesion molecule 4 (Landsteiner-Wiener blood group)
  Uniprot ID: Q14773
  ENSP ID: ENSP00000370147
MGSLFPLSLLFFLAAAYPGVGSALGRRTKRAQSPKGSPLAPSGTSVPFWVRMSPEFVAVQPGKSVQLNCSNSCPQPQNSSLRTPLRQGKTLRGPGWVSYQLLDVRAWSSLAHCLVTCAGKTRWATSRITAYKPPHSVILEPPVLKGRKYTLRCHVTQVFPVGYLVVTLRHGSRVIYSESLERFTGLDLANVTLTYEFAAGPRDFWQPVICHARLNLDGLVVRNSSAPITLMLAWSPAPTALASGSIAALVGILLTVGAAYLCKCLAMKSQA

SEQ ID NO: 40995 - protein, 237 aa, Homo sapiens
  Payload ID: 8336
  Gene Symbol: ICAM4
  Gene Name: intercellular adhesion molecule 4 (Landsteiner-Wiener blood group)
  Uniprot ID: Q14773
  ENSP ID: ENSP00000377320
MGSLFPLSLLFFLAAAYPGVGSALGRRTKRAQSPKGSPLAPSGTSVPFWVRMSPEFVAVQPGKSVQLNCSNSCPQPQNSSLRTPLRQGKTLRGPGWVSYQLLDVRAWSSLAHCLVTCAGKTRWATSRITAYKPPHSVILEPPVLKGRKYTLRCHVTQVFPVGYLVVTLRHGSRVIYSESLERFTGLDLANVTLTYEFAAGPRDFWQPVICHARLNLDGLVVRNSSAPITLMLGEAPL

SEQ ID NO: 40996 - protein, 924 aa, Homo sapiens
  Payload ID: 8337
  Gene Symbol: ICAM5
  Gene Name: intercellular adhesion molecule 5, telencephalin
  Uniprot ID: Q9UMF0
  ENSP ID: ENSP00000221980
MPGPSPGLRRALLGLWAALGLGLFGLSAVSQEPFWADLQPRVAFVERGGSLWLNCSTNCPRPERGGLETSLRRNGTQRGLRWLARQLVDIREPETQPVCFFRCARRTLQARGLIRTFQRPDRVELMPLPPWQPVGENFTLSCRVPGAGPRASLTLTLLRGAQELIRRSFAGEPPRARGAVLTATVLARREDHGANFSCRAELDLRPHGLGLFENSSAPRELRTFSLSPDAPRLAAPRLLEVGSERPVSCTLDGLFPASEARVYLALGDQNLSPDVTLEGDAFVATATATASAEQEGARQLVCNVTLGGENRETRENVTIYSFPAPLLTLSEPSVSEGQMVTVTCAAGAQALVTLEGVPAAVPGQPAQLQLNATENDDRRSFFCDATLDVDGETLIKNRSAELRVLYAPRLDDSDCPRSWTWPEGPEQTLRCEARGNPEPSVHCARSDGGAVLALGLLGPVTRALSGTYRCKAANDQGEAVKDVTLTVEYAPALDSVGCPERITWLEGTEASLSCVAHGVPPPDVICVRSGELGAVIEGLLRVAREHAGTYRCEATNPRGSAAKNVAVTVEYGPRFEEPSCPSNWTWVEGSGRLFSCEVDGKPQPSVKCVGSGGATEGVLLPLAPPDPSPRAPRIPRVLAPGIYVCNATNRHGSVAKTVVVSAESPPEMDESTCPSHQTWLEGAEASALACAARGRPSPGVRCSREGIPWPEQQRVSREDAGTYHCVATNAHGTDSRTVTVGVEYRPVVAELAASPPGGVRPGGNFTLTCRAEAWPPAQISWRAPPGALNIGLSSNNSTLSVAGAMGSHGGEYECAATNAHGRHARRITVRVAGPWLWVAVGGAAGGAALLAAGAGLAFYVQSTACKKGEYNVQEAESSGEAVCLNGAGGGAGGAAGAEGGPEAAGGAAESPAEGEVFAIQLTSA

SEQ ID NO: 40997 - protein, 78 aa, Homo sapiens
  Payload ID: 8337
  Gene Symbol: ICAM5
  Gene Name: intercellular adhesion molecule 5, telencephalin
  ENSP ID: ENSP00000464796
MPLPPWQPVGENFTLSCRVPGAGPRASLTLTLLRGAQELIRRSFAGEPPRARGAVLTATVLARREDHGANFSCRAELD

SEQ ID NO: 40998 - protein, 557 aa, Homo sapiens
  Payload ID: 8338
  Gene Symbol: IFNAR1
  Gene Name: interferon (alpha, beta and omega) receptor 1
  Uniprot ID: P17181
  ENSP ID: ENSP00000270139
MMVVLLGATTLVLVAVAPWVLSAAAGGKNLKSPQKVEVDIIDDNFILRWNRSDESVGNVTFSFDYQKTGMDNWIKLSGCQNITSTKCNFSSLKLNVYEEIKLRIRAEKENTSSWYEVDSFTPFRKAQIGPPEVHLEAEDKAIVIHISPGTKDSVMWALDGLSFTYSLVIWKNSSGVEERIENIYSRHKIYKLSPETTYCLKVKAALLTSWKIGVYSPVHCIKTTVENELPPPENIEVSVQNQNYVLKWDYTYANMTFQVQWLHAFLKRNPGNHLYKWKQIPDCENVKTTQCVFPQNVFQKGIYLLRVQASDGNNTSFWSEEIKFDTEIQAFLLPPVFNIRSLSDSFHIYIGAPKQSGNTPVIQDYPLIYEIIFWENTSNAERKIIEKKTDVTVPNLKPLTVYCVKARAHTMDEKLNKSSVFSDAVCEKTKPGNTSKIWLIVGICIALFALPFVIYAAKVFLRCINYVFFPSLKPSSSIDEYFSEQPLKNLLLSTSEEQIEKCFIIENISTIATVEETNQTDEDHKKYSSQTSQDSGNYSNEDESESKTSEELQQDFV

SEQ ID NO: 40999 - protein, 136 aa, Homo sapiens
  Payload ID: 8338
  Gene Symbol: IFNAR1
  Gene Name: interferon (alpha, beta and omega) receptor 1
  ENSP ID: ENSP00000400161
MMVVLLGATTLVLVAVAPWVLSAAAGGKNLKSPQKVEVDIIDDNFILRWNRSDESVGNVTFSFDYQKTGMDNWIKLSGCQNITSTKCNFSSLKLNVYEEIKLRIRAEKENTSSWYEVDSFTPFRKVENELPPPENI

SEQ ID NO: 41000 - protein, 239 aa, Homo sapiens
  Payload ID: 8339
  Gene Symbol: IFNAR2
  Gene Name: interferon (alpha, beta and omega) receptor 2
  Uniprot ID: P48551
  ENSP ID: ENSP00000343289
MLLSQNAFIFRSLNLVLMVYISLVFGISYDSPDYTDESCTFKISLRNFRSILSWELKNHSIVPTHYTLLYTIMSKPEDLKVVKNCANTTRSFCDLTDEWRSTHEAYVTVLEGFSGNTTLFSCSHNFWLAIDMSFEPPEFEIVGFTNHINVMVKFPSIVEEELQFDLSLVIEEQSEGIVKKHKPEIKGNMSGNFTYIIDKLIPNTNYCVSVYLEHSDEQAVIKSPLKCTLLPPGQESEFS

SEQ ID NO: 41001 - protein, 515 aa, Homo sapiens [sequence omitted]

SEQ ID NO: 41002 - protein, 197 aa, Homo sapiens
  Payload ID: 8339
  Gene Symbol: IFNAR2
  Gene Name: interferon (alpha, beta and omega) receptor 2
  ENSP ID: ENSP00000371673
MLLSQNAFIFRSLNLVLMVYISLVFGISYDSPDYTDESCTFKISLRNFRSILSWELKNHSIVPTHYTLLYTIMSKPEDLKVVKNCANTTRSFCDLTDEWRSTHEAYVTVLEGFSGNTTLFSCSHNFWLAIDMSFEPPEFEIVGFTNHINVMVKFPSIVEEELQFDLSLVIEEQSEGIVKKGEDEKLDISQFCHRQAL

SEQ ID NO: 41003 - protein, 331 aa, Homo sapiens
  Payload ID: 8339
  Gene Symbol: IFNAR2
  Gene Name: interferon (alpha, beta and omega) receptor 2
  Uniprot ID: P48551
  ENSP ID: ENSP00000371699
MLLSQNAFIFRSLNLVLMVYISLVFGISYDSPDYTDESCTFKISLRNFRSILSWELKNHSIVPTHYTLLYTIMSKPEDLKVVKNCANTTRSFCDLTDEWRSTHEAYVTVLEGFSGNTTLFSCSHNFWLAIDMSFEPPEFEIVGFTNHINVMVKFPSIVEEELQFDLSLVIEEQSEGIVKKHKPEIKGNMSGNFTYIIDKLIPNTNYCVSVYLEHSDEQAVIKSPLKCTLLPPGQESESAESAKIGGIITVFLIALVLTSTIVTLKWIGYICLRNSLPKVLRQGLAKGWNAVAIHRCSHNALQSETPELKQSSCLSFPSSWDYKRASLCPSD

SEQ ID NO: 41004 - protein, 331 aa, Homo sapiens; identical to SEQ ID NO: 41003
  Payload ID: 8339
  Gene Symbol: IFNAR2
  Gene Name: interferon (alpha, beta and omega) receptor 2
  Uniprot ID: P48551
  ENSP ID: ENSP00000384309

SEQ ID NO: 41005 - protein, 54 aa, Homo sapiens
  Payload ID: 8339
  Gene Symbol: IFNAR2
  Gene Name: interferon (alpha, beta and omega) receptor 2
  ENSP ID: ENSP00000398799
FTNHINVMVKFPSIVEEELQFDLSLVIEEQSEGIVKKGEDEKLDISQFCHRQAL

SEQ ID NO: 41006 - protein, 204 aa, Homo sapiens
  Payload ID: 8339
  Gene Symbol: IFNAR2
  Gene Name: interferon (alpha, beta and omega) receptor 2
  ENSP ID: ENSP00000402311
MPRIPGICHCKICKSQEKTLKIAKMLLSQNAFIFRSLNLVLMVYISLVFGISYDSPDYTDESCTFKISLRNFRSILSWELKNHSIVPTHYTLLYTIMSKPEDLKVVKNCANTTRSFCDLTDEWRSTHEAYVTVLEGFSGNTTLFSCSHNFWLAIDMSFEPPEFEIVGFTNHINVMVKFPSIVEEELQFDLSLVIEEQSEGIVKK

SEQ ID NO: 41007 - protein, 229 aa, Homo sapiens
  Payload ID: 8339
  Gene Symbol: IFNAR2
  Gene Name: interferon (alpha, beta and omega) receptor 2
  ENSP ID: ENSP00000403569
MSKPEDLKVVKNCANTTRSFCDLTDEWRSTHEAYVTVLEGFSGNTTLFSCSHNFWLAIDMSFEPPEFEIVGFTNHINVMVKFPSIVEEELQFDLSLVIEEQSEGIVKKHKPEIKGNMSGNFTYIIDKLIPNTNYCVSVYLEHSDEQAVIKSPLKCTLLPPGQESESAESAKIGGIITVFLIALVLTSTIVTLKWIGYICLRNSLPKVLNFHNFLAWPFPNLPPLEAMDM

SEQ ID NO: 41008 - protein, 167 aa, Homo sapiens
  Payload ID: 8339
  Gene Symbol: IFNAR2
  Gene Name: interferon (alpha, beta and omega) receptor 2
  ENSP ID: ENSP00000413160
MSKPEDLKVVKNCANTTRSFCDLTDEWRSTHEAYVTVLEGFSGNTTLFSCSHNFWLAIDMSFEPPEFEIVGFTNHINVMVKFPSIVEEELQFDLSLVIEEQSEGIVKKHKPEIKGNMSGNFTYIIDKLIPNTNYCVSVYLEHSDEQAVIKSPLKCTLLPPGQESEFS

SEQ ID NO: 41009 - protein, 489 aa, Homo sapiens
  Payload ID: 8340
  Gene Symbol: IFNGR1
  Gene Name: interferon gamma receptor 1
  Uniprot ID: P15260
  ENSP ID: ENSP00000356713
MALLFLLPLVMQGVSRAEMGTADLGPSSVPTPTNVTIESYNMNPIVYWEYQIMPQVPVFTVEVKNYGVKNSEWIDACINISHHYCNISDHVGDPSNSLWVRVKARVGQKESAYAKSEEFAVCRDGKIGPPKLDIRKEEKQIMIDIFHPSVFVNGDEQEVDYDPETTCYIRVYNVYVRMNGSEIQYKILTQKEDDCDEIQCQLAIPVSSLNSQYCVSAEGVLHVWGVTTEKSKEVCITIFNSSIKGSLWIPVVAALLLFLVLSLVFICFYIKKINPLKEKSIILPKSLISVVRSATLETKPESKYVSLITSYQPFSLEKEVVCEEPLSPATVPGMHTEDNPGKVEHTEELSSITEVVTTEENIPDVVPGSHLTPIERESSSPLSSNQSEPGSIALNSYHSRNCSESDHSRNGFDTDSSCLESHSSLSDSEFPPNNKGEIKTEGQELITVIKAPTSFGYDKPHVLVDLLVDDSGKESLIGYRPTEDSKEFS

SEQ ID NO: 41010 - protein, 210 aa, Homo sapiens
  Payload ID: 8340
  Gene Symbol: IFNGR1
  Gene Name: interferon gamma receptor 1
  ENSP ID: ENSP00000389249
MALLFLLPLVMQGVSRAEMGTADLGPSSVPTPTNVTIESYNMNPIVYWEYQIMPQVPVFTVEVKNYGVKARVGQKESAYAKSEEFAVCRDGKIGPPKLDIRKEEKQIMIDIFHPSVFVNGDEQEVDYDPETTCYIRVYNVYVRMNGSEIQYKILTQKEDDCDEIQCQLAIPVSSLNSQYCVSAEGVLHVWGVTTEKSKEVCITIFNSSIK

SEQ ID NO: 41011 - protein, 161 aa, Homo sapiens
  Payload ID: 8340
  Gene Symbol: IFNGR1
  Gene Name: interferon gamma receptor 1
  ENSP ID: ENSP00000394230
MLLKSPENSLLQFQFKYGVPTPTNVTIESYNMNPIVYWEYQIMPQVPVFTVEVKNYGVKNSEWIDACINISHHYCNISDHVGDPSNSLWVRVKARVGQKESAYAKSEEFAVCRDGKIGPPKLDIRKEEKQIMIDIFHPSVFVNGDEQEVDYDPETTCYIRV

SEQ ID NO: 41012 - protein, 274 aa, Homo sapiens
  Payload ID: 8340
  Gene Symbol: IFNGR1
  Gene Name: interferon gamma receptor 1
  ENSP ID: ENSP00000443282
MALLFLLPLVMQGVSRAEMGTADLGPSSVPTPTNVTIESYNMNPIVYWEYQIMPQVPVFTVEVKNYGVKNSEWIDACINISHHYCNISDHVGDPSNSLWVRVKARVGQKESAYAKSEEFAVCRDGKIGPPKLDIRKEEKQIMIDIFHPSVFVNGDEQEVDYDPETTCYIRVYNVYVRMNGSEIQYKILTQKEDDCDEIQCQLAIPVSSLNSQYCVSAEGVLHVWGVTTEKSKEVCITIFNSSIKGSLWIPVVAALLLFCLAWYSSVFILRKLIH

SEQ ID NO: 41013 - protein, 337 aa, Homo sapiens
  Payload ID: 8341
  Gene Symbol: IFNGR2
  Gene Name: interferon gamma receptor 2 (interferon gamma transducer 1)
  Uniprot ID: P38484
  ENSP ID: ENSP00000290219
MRPTLLWSLLLLLGVFAAAAAAPPDPLSQLPAPQHPKIRLYNAEQVLSWEPVALSNSTRPVVYQVQFKYTDSKWFTADIMSIGVNCTQITATECDFTAASPSAGFPMDFNVTLRLRAELGALHSAWVTMPWFQHYRNVTVGPPENIEVTPGEGSLIIRFSSPFDIADTSTAFFCYYVHYWEKGGIQQVKGPFRSNSISLDNLKPSRVYCLQVQAQLLWNKSNIFRVGHLSNISCYETMADASTELQQVILISVGTFSLLSVLAGACFFLVLKYRGLIKYWFHTPPSIPLQIEEYLKDPTQPILEALDKDSSPKDDVWDSVSIISFPEKEQEDVLQTL

SEQ ID NO: 41014 - protein, 356 aa, Homo sapiens
  Payload ID: 8341
  Gene Symbol: IFNGR2
  Gene Name: interferon gamma receptor 2 (interferon gamma transducer 1)
  ENSP ID: ENSP00000371425
MRPTLLWSLLLLLGVFAAAAAAPPAQLTLETYQEWCNDSAATHDPLSQLPAPQHPKIRLYNAEQVLSWEPVALSNSTRPVVYQVQFKYTDSKWFTADIMSIGVNCTQITATECDFTAASPSAGFPMDFNVTLRLRAELGALHSAWVTMPWFQHYRNVTVGPPENIEVTPGEGSLIIRFSSPFDIADTSTAFFCYYVHYWEKGGIQQVKGPFRSNSISLDNLKPSRVYCLQVQAQLLWNKSNIFRVGHLSNISCYETMADASTELQQVILISVGTFSLLSVLAGACFFLVLKYRGLIKYWFHTPPSIPLQIEEYLKDPTQPILEALDKDSSPKDDVWDSVSIISFPEKEQEDVLQTL

SEQ ID NO: 41015 - protein, 258 aa, Homo sapiens
  Payload ID: 8341
  Gene Symbol: IFNGR2
  Gene Name: interferon gamma receptor 2 (interferon gamma transducer 1)
  ENSP ID: ENSP00000385044
MSIGVNCTQITATECDFTAASPSAGFPMDFNVTLRLRAELGALHSAWVTMPWFQHYRNVTVGPPENIEVTPGEGSLIIRFSSPFDIADTSTAFFCYYVHYWEKGGIQQVKGPFRSNSISLDNLKPSRVYCLQVQAQLLWNKSNIFRVGHLSNISCYETMADASTELQQVILISVGTFSLLSVLAGACFFLVLKYRGLIKYWFHTPPSIPLQIEEYLKDPTQPILEALDKDSSPKDDVWDSVSIISFPEKEQEDVLQTL

SEQ ID NO: 41016 - protein, 60 aa, Homo sapiens
  Payload ID: 8341
  Gene Symbol: IFNGR2
  Gene Name: interferon gamma receptor 2 (interferon gamma transducer 1)
  ENSP ID: ENSP00000402629
  MOD_RES (1)..(1): Any amino acid
XETMADASTELQQVILISVGTFSLLSVLAGACFFLVLKYRGLIKYWFHTPPSIPLQIEEV

SEQ ID NO: 41017 - protein, 70 aa, Homo sapiens
  Payload ID: 8341
  Gene Symbol: IFNGR2
  Gene Name: interferon gamma receptor 2 (interferon gamma transducer 1)
  ENSP ID: ENSP00000407541
MRPTLLWSLLLLLGVFAAAAAAPPAQLTLETYQEWCNDSAATHEMGDGEQACGGRNNGPQRCPRPHPQSP

SEQ ID NO: 41018 - protein, 37 aa, Homo sapiens
  Payload ID: 8341
  Gene Symbol: IFNGR2
  Gene Name: interferon gamma receptor 2 (interferon gamma transducer 1)
  ENSP ID: ENSP00000442735
MRPTLLWSLLLLLGVFAAAAAAPPAPTVNGSRPTSCP

SEQ ID NO: 41019 - protein, 313 aa, Homo sapiens
  Payload ID: 8341
  Gene Symbol: IFNGR2
  Gene Name: interferon gamma receptor 2 (interferon gamma transducer 1)
  Uniprot ID: P38484
  ENSP ID: ENSP00000458487
  MOD_RES (1)..(1): Any amino acid
XPLSQLPAPQHPKIRLYNAEQVLSWEPVALSNSTRPVVYQVQFKYTDSKWFTADIMSIGVNCTQITATECDFTAASPSAGFPMDFNVTLRLRAELGALHSAWVTMPWFQHYRNVTVGPPENIEVTPGEGSLIIRFSSPFDIADTSTAFFCYYVHYWEKGGIQQVKGPFRSNSISLDNLKPSRVYCLQVQAQLLWNKSNIFRVGHLSNISCYETMADASTELQQVILISVGTFSLLSVLAGACFFLVLKYRGLIKYWFHTPPSIPLQIEEYLKDPTQPILEALDKDSSPKDDVWDSVSIISFPEKEQEDVLQTL

SEQ ID NO: 41020 - protein, 46 aa, Homo sapiens
  Payload ID: 8341
  Gene Symbol: IFNGR2
  Gene Name: interferon gamma receptor 2 (interferon gamma transducer 1)
  ENSP ID: ENSP00000459355
  MOD_RES (1)..(1): Any amino acid
XQLTLETYQEWCNDSAATHEMGDGEQACGGRNNGPQRCPRPHPQSP

SEQ ID NO: 41021 - protein, 60 aa, Homo sapiens; identical to SEQ ID NO: 41016
  Payload ID: 8341
  Gene Symbol: IFNGR2
  Gene Name: interferon gamma receptor 2 (interferon gamma transducer 1)
  ENSP ID: ENSP00000459791
  MOD_RES (1)..(1): Any amino acid

SEQ ID NO: 41022 - protein, 332 aa, Homo sapiens
  Payload ID: 8341
  Gene Symbol: IFNGR2
  Gene Name: interferon gamma receptor 2 (interferon gamma transducer 1)
  ENSP ID: ENSP00000459965
  MOD_RES (1)..(1): Any amino acid
XQLTLETYQEWCNDSAATHDPLSQLPAPQHPKIRLYNAEQVLSWEPVALSNSTRPVVYQVQFKYTDSKWFTADIMSIGVNCTQITATECDFTAASPSAGFPMDFNVTLRLRAELGALHSAWVTMPWFQHYRNVTVGPPENIEVTPGEGSLIIRFSSPFDIADTSTAFFCYYVHYWEKGGIQQVKGPFRSNSISLDNLKPSRVYCLQVQAQLLWNKSNIFRVGHLSNISCYETMADASTELQQVILISVGTFSLLSVLAGACFFLVLKYRGLIKYWFHTPPSIPLQIEEYLKDPTQPILEALDKDSSPKDDVWDSVSIISFPEKEQEDVLQTL

SEQ ID NO: 41023 - protein, 13 aa, Homo sapiens
  Payload ID: 8341
  Gene Symbol: IFNGR2
  Gene Name: interferon gamma receptor 2 (interferon gamma transducer 1)
  ENSP ID: ENSP00000460732
  MOD_RES (1)..(1): Any amino acid
XPTVNGSRPTSCP

SEQ ID NO: 41024 - protein, 330 aa, Homo sapiens
  Payload ID: 8341
  Gene Symbol: IFNGR2
  Gene Name: interferon gamma receptor 2 (interferon gamma transducer 1)
  ENSP ID: ENSP00000461231
LTLETYQEWCNDSAATHDPLSQLPAPQHPKIRLYNAEQVLSWEPVALSNSTRPVVYQVQFKYTDSKWFTADIMSIGVNCTQITATECDFTAASPSAGFPMDFNVTLRLRAELGALHSAWVTMPWFQHYRNVTVGPPENIEVTPGEGSLIIRFSSPFDIADTSTAFFCYYVHYWEKGGIQQVKGPFRSNSISLDNLKPSRVYCLQVQAQLLWNKSNIFRVGHLSNISCYETMADASTELQQVILISVGTFSLLSVLAGACFFLVLKYRGLIKYWFHTPPSIPLQIEEYLKDPTQPILEALDKDSSPKDDVWDSVSIISFPEKEQEDVLQTL

SEQ ID NO: 41025 - protein, 125 aa, Homo sapiens
  Payload ID: 8342
  Gene Symbol: IFITM1
  Gene Name: interferon induced transmembrane protein 1
  Uniprot ID: P13164
  ENSP ID: ENSP00000330825
MHKEEHEVAVLGPPPSTILPRSTVINIHSETSVPDHVVWSLFNTLFLNWCCLGFIAFAYSVKSRDRKMVGDVTGAQAYASTAKCLNIWALILGILMTIGFILLLVFGSVTVYHIMLQIIQEKRGY

SEQ ID NO: 41026 - protein, 125 aa, Homo sapiens; identical to SEQ ID NO: 41025
  Payload ID: 8342
  Gene Symbol: IFITM1
  Gene Name: interferon induced transmembrane protein 1
  Uniprot ID: P13164
  ENSP ID: ENSP00000386187

SEQ ID NO: 41027 - protein, 125 aa, Homo sapiens; identical to SEQ ID NO: 41025
  Payload ID: 8342
  Gene Symbol: IFITM1
  Gene Name: interferon induced transmembrane protein 1
  Uniprot ID: P13164
  ENSP ID: ENSP00000437057

SEQ ID NO: 41028 - protein, 228 aa, Homo sapiens
  Payload ID: 8343
  Gene Symbol: IFITM10
  Gene Name: interferon induced transmembrane protein 10
  Uniprot ID: A6NMD0
  ENSP ID: ENSP00000344430
MREGKRGPPCILSFRGTLERVEAQWELEAQGPGQCPAPLGDPASTTDGAQEARVPLDGAFWIPRPPAGSPKGCFACVSKPPALQAPAAPAPEPSASPPMAPTLFPMESKSSKTDSVRAAGAPPACKHLAEKKTMTNPTTVIEVYPDTTEVNDYYLWSIFNFVYLNFCCLGFIALAYSLKVRDKKLLNDLNGAVEDAKTARLFNITSSALAASCIILVFIFLRYPLTDY

SEQ ID NO: 41029 - protein, 128 aa, Homo sapiens
  Payload ID: 8343
  Gene Symbol: IFITM10
  Gene Name: interferon induced transmembrane protein 10
  ENSP ID: ENSP00000371557
MREGKRGPPCILSFRGTLERVEAQWELEVGPLGGGSVDRQRPAGRRKDARTEAQGVRPRAEESLVGPGPRPVPSPAGRPGQHHGRRPGSPSPPGRGLLDSEAPGRFAQGLLRLRVQAPCPAGSGGPCP

SEQ ID NO: 41030 - protein, 49 aa, Homo sapiens
  Payload ID: 8343
  Gene Symbol: IFITM10
  Gene Name: interferon induced transmembrane protein 10
  ENSP ID: ENSP00000486449
VRDKKLLNDLNGAVEDAKTARLFNITSSALAASCIILVFIFLRYPLTDY

SEQ ID NO: 41031 - protein, 74 aa, Homo sapiens
  Payload ID: 8344
  Gene Symbol: IFITM2
  Gene Name: interferon induced transmembrane protein 2
  ENSP ID: ENSP00000382712
  MOD_RES (1)..(1): Any amino acid
XGFIAFAYSVKSRDRKMVGDVTGAQAYASTAKCLNIWALILGILMTIGFILLLVFGSVTVYHIMLQIIQEKRGY

SEQ ID NO: 41032 - protein, 132 aa, Homo sapiens
  Payload ID: 8344
  Gene Symbol: IFITM2
  Gene Name: interferon induced transmembrane protein 2
  Uniprot ID: Q01629
  ENSP ID: ENSP00000382714
MNHIVQTFSPVNSGQPPNYEMLKEEQEVAMLGVPHNPAPPMSTVIHIRSETSVPDHVVWSLFNTLFMNTCCLGFIAFAYSVKSRDRKMVGDVTGAQAYASTAKCLNIWALILGIFMTILLIIIPVLVVQAQR

SEQ ID NO: 41033 - protein, 55 aa, Homo sapiens
  Payload ID: 8344
  Gene Symbol: IFITM2
  Gene Name: interferon induced transmembrane protein 2
  ENSP ID: ENSP00000431850
  MOD_RES (1)..(1): Any amino acid
XVIHIRSETSVPDHVVWSLFNTLFMNTCCLGFIAFAYSVKTGTQALPESEKGTHR

SEQ ID NO: 41034 - protein, 112 aa, Homo sapiens
  Payload ID: 8344
  Gene Symbol: IFITM2
  Gene Name: interferon induced transmembrane protein 2
  ENSP ID: ENSP00000434443
MLKEEQEVAMLGVPHNPAPPMSTVIHIRSETSVPDHVVWSLFNTLFMNTCCLGFIAFAYSVKSRDRKMVGDVTGAQAYASTAKCLNIWALILGIFMTILLIIIPVLVVQAQR

SEQ ID NO: 41035 - protein, 112 aa, Homo sapiens; identical to SEQ ID NO: 41034
  Payload ID: 8344
  Gene Symbol: IFITM2
  Gene Name: interferon induced transmembrane protein 2
  ENSP ID: ENSP00000473587

SEQ ID NO: 41036 - protein, 132 aa, Homo sapiens; identical to SEQ ID NO: 41032
  Payload ID: 8344
  Gene Symbol: IFITM2
  Gene Name: interferon induced transmembrane protein 2
  Uniprot ID: Q01629
  ENSP ID: ENSP00000484689

SEQ ID NO: 41037 - protein, 133 aa, Homo sapiens
  Payload ID: 8345
  Gene Symbol: IFITM3
  Gene Name: interferon induced transmembrane protein 3
  Uniprot ID: Q01628
  ENSP ID: ENSP00000382707
MNHTVQTFFSPVNSGQPPNYEMLKEEHEVAVLGAPHNPAPPTSTVIHIRSETSVPDHVVWSLFNTLFMNPCCLGFIAFAYSVKSRDRKMVGDVTGAQAYASTAKCLNIWALILGILMTILLIVIPVLIFQAYG

SEQ ID NO: 41038 - protein, 112 aa, Homo sapiens
  Payload ID: 8345
  Gene Symbol: IFITM3
  Gene Name: interferon induced transmembrane protein 3
  ENSP ID: ENSP00000432108
MLKEEHEVAVLGAPHNPAPPTSTVIHIRSETSVPDHVVWSLFNTLFMNPCCLGFIAFAYSVKSRDRKMVGDVTGAQAYASTAKCLNIWALILGILMTILLIVIPVLIFQAYG

SEQ ID NO: 41039 - protein, 112 aa, Homo sapiens; identical to SEQ ID NO: 41038
  Payload ID: 8345
  Gene Symbol: IFITM3
  Gene Name: interferon induced transmembrane protein 3
  ENSP ID: ENSP00000473544

SEQ ID NO: 41040 - protein, 55 aa, Homo sapiens
  Payload ID: 8345
  Gene Symbol: IFITM3
  Gene Name: interferon induced transmembrane protein 3
  ENSP ID: ENSP00000473645
  MOD_RES (1)..(1): Any amino acid
XVIHIRSETSVPDHVVWSLFNTLFMNPCCLGFIAFAYSVKTGTQALPESEKGTHR

SEQ ID NO: 41041 - protein, 132 aa, Homo sapiens
  Payload ID: 8346
  Gene Symbol: IFITM5
  Gene Name: interferon induced transmembrane protein 5
  Uniprot ID: A6NNB3
  ENSP ID: ENSP00000372059
MDTAYPREDTRAPTPSKAGAHTALTLGAPHPPPRDHLIWSVFSTLYLNLCCLGFLALAYSIKARDQKVVGDLEAARRFGSKAKCYNILAAMWTLVPPLLLLGLVVTGALHLARLAKDSAAFFSTKFDDADYD

SEQ ID NO: 41042 - protein, 1025 aa, Homo sapiens
  Payload ID: 8347
  Gene Symbol: IFIH1
  Gene Name: interferon induced with helicase C domain 1
  Uniprot ID: Q9BYX4
  ENSP ID: ENSP00000263642
MSNGYSTDENFRYLISCFRARVKMYIQVEPVLDYLTFLPAEVKEQIQRTVATSGNMQAVELLLSTLEKGVWHLGWTREFVEALRRTGSPLAARYMNPELTDLPSPSFENAHDEYLQLLNLLQPTLVDKLLVRDVLDKCMEEELLTIEDRNRIAAAENNGNESGVRELLKRIVQKENWFSAFLNVLRQTGNNELVQELTGSDCSESNAEIENLSQVDGPQVEEQLLSTTVQPNLEKEVWGMENNSSESSFADSSVVSESDTSLAEGSVSCLDESLGHNSNMGSDSGTMGSDSDEENVAARASPEPELQLRPYQMEVAQPALEGKNIIICLPTGSGKTRVAVYIAKDHLDKKKKASEPGKVIVLVNKVLLVEQLFRKEFQPFLKKWYRVIGLSGDTQLKISFPEVVKSCDIIISTAQILENSLLNLENGEDAGVQLSDFSLIIIDECHHTNKEAVYNNIMRHYLMQKLKNNRLKKENKPVIPLPQILGLTASPGVGGATKQAKAEEHILKLCANLDAFTIKTVKENLDQLKNQIQEPCKKFAIADATREDPFKEKLLEIMTRIQTYCQMSPMSDFGTQPYEQWAIQMEKKAAKEGNRKERVCAEHLRKYNEALQINDTIRMIDAYTHLETFYNEEKDKKFAVIEDDSDEGGDDEYCDGDEDEDDLKKPLKLDETDRFLMTLFFENNKMLKRLAENPEYENEKLTKLRNTIMEQYTRTEESARGIIFTKTRQSAYALSQWITENEKFAEVGVKAHHLIGAGHSSEFKPMTQNEQKEVISKFRTGKINLLIATTVAEEGLDIKECNIVIRYGLVTNEIAMVQARGRARADESTYVLVAHSGSGVIEHETVNDFREKMMYKAIHCVQNMKPEEYAHKILELQMQSIMEKKMKTKRNIAKHYKNNPSLITFLCKNCSVLACSGEDIHVIEKMHHVNMTPEFKELYIVRENKALQKKCADYQINGEIICKCGQAWGTMMVHKGLDLPCLKIRNFVVVFKNNSTKKQYKKWVELPITFPNLDYSECCLFSDED

SEQ ID NO: 41043 - protein, 221 aa, Homo sapiens
  Payload ID: 8347
  Gene Symbol: IFIH1
  Gene Name: interferon induced with helicase C domain 1
  Uniprot ID: Q9BYX4
  ENSP ID: ENSP00000408450
MSNGYSTDENFRYLISCFRARVKMYIQVEPVLDYLTFLPAEVKEQIQRTVATSGNMQAVELLLSTLEKGVWHLGWTREFVEALRRTGSPLAARYMNPELTDLPSPSFENAHDEYLQLLNLLQPTLVDKLLVRDVLDKCMEEELLTIEDRNRIAAAENNGNESGVRELLKRIVQKENWFSAFLNVLRQTGNNELVQELTGSDCSESNAGICNFTEEDSSNSA

SEQ ID NO: 41044 - protein, 325 aa, Homo sapiens
  Payload ID: 8348
  Gene Symbol: IRF1
  Gene Name: interferon regulatory factor 1
  Uniprot ID: P10914
  ENSP ID: ENSP00000245414
MPITRMRMRPWLEMQINSNQIPGLIWINKEEMIFQIPWKHAAKHGWDINKDACLFRSWAIHTGRYKAGEKEPDPKTWKANFRCAMNSLPDIEEVKDQSRNKGSSAVRVYRMLPPLTKNQRKERKSKSSRDAKSKAKRKSCGDSSPDTFSDGLSSSTLPDDHSSYTVPGYMQDLEVEQALTPALSPCAVSSTLPDWHIPVEVVPDSTSDLYNFQVSPMPSTSEATTDEDEEGKLPEDIMKLLEQSEWQPTNVDGKGYLLNEPGVQPTSVYGDFSCKEEPEIDSPGGDIGLSLQRVFTDLKNMDATWLDSLLTPVRLPSIQAIPCAP

SEQ ID NO: 41045 - protein, 325 aa, Homo sapiens; identical to SEQ ID NO: 41044
  Payload ID: 8348
  Gene Symbol: IRF1
  Gene Name: interferon regulatory factor 1
  Uniprot ID: P10914
  ENSP ID: ENSP00000384406

SEQ ID NO: 41046 - protein, 51 aa, Homo sapiens
  Payload ID: 8348
  Gene Symbol: IRF1
  Gene Name: interferon regulatory factor 1
  ENSP ID: ENSP00000392455
MPITRMRMRPWLEMQINSNQIPGLIWINKADTKQGKRSQIPRRGRPTFAVP

SEQ ID NO: 41047 - protein, 192 aa, Homo sapiens
  Payload ID: 8348
  Gene Symbol: IRF1
  Gene Name: interferon regulatory factor 1
  ENSP ID: ENSP00000396318
MPITRMRMRPWLEMQINSNQIPGLIWINKEEMIFQIPWKHAAKHGWDINKDACLFRSWAIHTGRYKAGEKEPDPKTWKANFRCAMNSLPDIEEVKDQSRNKGSSAVRVYRMLPPLTKNQRKERKSKSSRDAKSKAKRKSCGDSSPDTFSDGLSSSTLPDDHSSYTVPGYMQDLEVEQALTPALSPCAVSSTL

SEQ ID NO: 41048 - protein, 198 aa, Homo sapiens
  Payload ID: 8348
  Gene Symbol: IRF1
  Gene Name: interferon regulatory factor 1
  ENSP ID: ENSP00000405655
MPITRMRMRPWLEMQINSNQIPGLIWINKEEMIFQIPWKHAAKHGWDINKDACLFRSWAIHTGRYKAGEKEPDPKTWKANFRCAMNSLPDIEEVKDQSRNKGSSAVRVYRMLPPLTKNQRKERKSKSSRDAKSKAKRKSCGDSSPDTFSDGLSSSTLPDDHSSYTVPGYMQDLEVEQALTPATTDEDEEGKLPEDIMK

SEQ ID NO: 41049 - protein, 118 aa, Homo sapiens
  Payload ID: 8348
  Gene Symbol: IRF1
  Gene Name: interferon regulatory factor 1
  ENSP ID: ENSP00000473661
MPITRMRMRPWLEMQINSNQIPGLIWINKEEMIFQIPWKHAAKHGWDINKDACLFRSWAIHTGRYKAGEKEPDPKTWKANFRCAMNSLPDIEEVKDQSRNKGSSAVRVYRMLPPLTKN

SEQ ID NO: 41050 - protein, 201 aa, Homo sapiens
  Payload ID: 8348
  Gene Symbol: IRF1
  Gene Name: interferon regulatory factor 1
  ENSP ID: ENSP00000480887
MPITRMRMRPWLEMQINSNQIPGLIWINKEEMIFQIPWKHAAKHGWDINKDACLFRSWAIHTGRYKAGEKEPDPKTWKANFRCAMNSLPDIEEVKDQSRNKGSSAVRVYRMLPPLTKNQRKERKSKSSRDAKSKAKRKSCGDSSPDTFSDGLSSSTLPDDHSSYTVPGYMQDLEVEQALTPALGAVGVAANKRGWEGVPTQ

SEQ ID NO: 41051 - protein, 349 aa, Homo sapiens
  Payload ID: 8349
  Gene Symbol: IRF2
  Gene Name: interferon regulatory factor 2
  Uniprot ID: P14316
  ENSP ID: ENSP00000377218
MPVERMRMRPWLEEQINSNTIPGLKWLNKEKKIFQIPWMHAARHGWDVEKDAPLFRNWAIHTGKHQPGVDKPDPKTWKANFRCAMNSLPDIEEVKDKSIKKGNNAFRVYRMLPLSERPSKKGKKPKTEKEDKVKHIKQEPVESSLGLSNGVSDLSPEYAVLTSTIKNEVDSTVNIIVVGQSHLDSNIENQEIVTNPPDICQVVEVTTESDEQPVSMSELYPLQISPVSSYAESETTDSVPSDEESAEGRPHWRKRNIEGKQYLSNMGTRGSYLLPGMASFVTSNKPDLQVTIKEESNPVPYNSSWPPFQDLPLSSSMTPASSSSRPDRETRASVIKKTSDITQARVKSC

SEQ ID NO: 41052 - protein, 196 aa, Homo sapiens
  Payload ID: 8349
  Gene Symbol: IRF2
  Gene Name: interferon regulatory factor 2
  ENSP ID: ENSP00000421927
  MOD_RES (1)..(1): Any amino acid
XNNAFRVYRMLPLSERPSKKGKKPKTEKEDKVKHIKQEPVESSLGLSNGVSDLSPEYAVLTSTIKNEVDSTVNIIALNFCCVYGDFCFWETEEASSMLNCPDRPPLASCRVVGQSHLDSNIENQEIVTNPPDICQVVEVTTESDEQPVSMSELYPLQISPVSSYAESETTDSVPSDEESAEGRPHWRKRNIEGKQY

SEQ ID NO: 41053 - protein, 137 aa, Homo sapiens
  Payload ID: 8349
  Gene Symbol: IRF2
  Gene Name: interferon regulatory factor 2
  ENSP ID: ENSP00000422860
MPVERMRMRPWLEEQINSNTIPGLKWLNKEKKIFQIPWMHAARHGWDVEKDAPLFRNWAIHTGKHQPGVDKPDPKTWKANFRCAMNSLPDIEEVKDKSIKKGNNAFRVYRMLPLSERPSKKGKKPKTEKEDKVKHIK

SEQ ID NO: 41054 - protein, 113 aa, Homo sapiens
  Payload ID: 8349
  Gene Symbol: IRF2
  Gene Name: interferon regulatory factor 2
  ENSP ID: ENSP00000423074
PDIEEVKDKSIKKGNNAFRVYRMLPLSERPSKKVVGQSHLDSNIENQEIVTNPPDICQVVEVTTESDEQPVSMSELYPLQISPVSSYAESETTDSVPSDEESAEGRPHWRKRN

SEQ ID NO: 41055 - protein, 160 aa, Homo sapiens
  Payload ID: 8349
  Gene Symbol: IRF2
  Gene Name: interferon regulatory factor 2
  ENSP ID: ENSP00000424552
MPVERMRMRPWLEEQINSNTIPGLKWLNKEKKIFQIPWMHAARHGWDVEKDAPLFRNWAIHTGKHQPGVDKPDPKTWKANFRCAMNSLPDIEEVKDKSIKKGNNAFRVYRMLPLSERPSKKGKKPKTEKEDKVKHIKQEPVESSLGLSNGVSDLSPEYAV

SEQ ID NO: 41056 - protein, 83 aa, Homo sapiens
  Payload ID: 8349
  Gene Symbol: IRF2
  Gene Name: interferon regulatory factor 2
  ENSP ID: ENSP00000425037
MPVERMRMRPWLEEQINSNTIPGLKWLNKRQGLTIWPTLECSGAVITHCSLDLLGSSDPPTSASRVAGTTGKEDFSDPLDACG

SEQ ID NO: 41057 - protein, 176 aa, Homo sapiens
  Payload ID: 8349
  Gene Symbol: IRF2
  Gene Name: interferon regulatory factor 2
  ENSP ID: ENSP00000427204
MPVERMRMRPWLEEQINSNTIPGLKWLNKEKKIFQIPWMHAARHGWDVEKDAPLFRNWAIHTGKHQPGVDKPDPKTWKANFRCAMNSLPDIEEVKDKSIKKGNNAFRVYRMLPLSERPSKKGKKPKTEKEDKVKHIKQEPVESSLGLSNGVSDLSPEYAVLTSTIKNEVDSTVNII

SEQ ID NO: 41058 - protein, 584 aa, Homo sapiens
  Payload ID: 8350
  Gene Symbol: IRF2BP1
  Gene Name: interferon regulatory factor 2 binding protein 1
  Uniprot ID: Q8IU81
  ENSP ID: ENSP00000307265
MASVQASRRQWCYLCDLPKMPWAMVWDFSEAVCRGCVNFEGADRIELLIDAARQLKRSHVLPEGRSPGPPALKHPATKDLAAAAAQGPQLPPPQAQPQPSGTGGGVSGQDRYDRATSSGRLPLPSPALEYTLGSRLANGLGREEAVAEGARRALLGSMPGLMPPGLLAAAVSGLGSRGLTLAPGLSPARPLFGSDFEKEKQQRNADCLAELNEAMRGRAEEWHGRPKAVREQLLALSACAPFNVRFKKDHGLVGRVFAFDATARPPGYEFELKLFTEYPCGSGNVYAGVLAVARQMFHDALREPGKALASSGFKYLEYERRHGSGEWRQLGELLTDGVRSFREPAPAEALPQQYPEPAPAALCGPPPRAPSRNLAPTPRRRKASPEPEGEAAGKMTTEEQQQRHWVAPGGPYSAETPGVPSPIAALKNVAEALGHSPKDPGGGGGPVRAGGASPAASSTAQPPTQHRLVARNGEAEVSPTAGAEAVSGGGSGTGATPGAPLCCTLCRERLEDTHFVQCPSVPGHKFCFPCSREFIKAQGPAGEVYCPSGDKCPLVGSSVPWAFMQGEIATILAGDIKVKKERDP

SEQ ID NO: 41059 - protein, 587 aa, Homo sapiens
  Payload ID: 8351
  Gene Symbol: IRF2BP2
  Gene Name: interferon regulatory factor 2 binding protein 2
  Uniprot ID: Q7Z5L9
  ENSP ID: ENSP00000355568
MAAAVAVAAASRRQSCYLCDLPRMPWAMIWDFTEPVCRGCVNYEGADRVEFVIETARQLKRAHGCFPEGRSPPGAAASAAAKPPPLSAKDILLQQQQQLGHGGPEAAPRAPQALERYPLAAAAERPPRLGSDFGSSRPAASLAQPPTPQPPPVNGILVPNGFSKLEEPPELNRQSPNPRRGHAVPPTLVPLMNGSATPLPTALGLGGRAAASLAAVSGTAAASLGSAQPTDLGAHKRPASVSSSAAVEHEQREAAAKEKQPPPPAHRGPADSLSTAAGAAELSAEGAGKSRGSGEQDWVNRPKTVRDTLLALHQHGHSGPFESKFKKEPALTAGRLLGFEANGANGSKAVARTARKRKPSPEPEGEVGPPKINGEAQPWLSTSTEGLKIPMTPTSSFVSPPPPTASPHSNRTTPPEAAQNGQSPMAALILVADNAGGSHASKDANQVHSTTRRNSNSPPSPSSMNQRRLGPREVGGQGAGNTGGLEPVHPASLPDSSLATSAPLCCTLCHERLEDTHFVQCPSVPSHKFCFPCSRQSIKQQGASGEVYCPSGEKCPLVGSNVPWAFMQGEIATILAGDVKVKKERDS

SEQ ID NO: 41060 - protein, 571 aa, Homo sapiens
  Payload ID: 8351
  Gene Symbol: IRF2BP2
  Gene Name: interferon regulatory factor 2 binding protein 2
  Uniprot ID: Q7Z5L9
  ENSP ID: ENSP00000355569
MAAAVAVAAASRRQSCYLCDLPRMPWAMIWDFTEPVCRGCVNYEGADRVEFVIETARQLKRAHGCFPEGRSPPGAAASAAAKPPPLSAKDILLQQQQQLGHGGPEAAPRAPQALERYPLAAAAERPPRLGSDFGSSRPAASLAQPPTPQPPPVNGILVPNGFSKLEEPPELNRQSPNPRRGHAVPPTLVPLMNGSATPLPTALGLGGRAAASLAAVSGTAAASLGSAQPTDLGAHKRPASVSSSAAVEHEQREAAAKEKQPPPPAHRGPADSLSTAAGAAELSAEGAGKSRGSGEQDWVNRPKTVRDTLLALHQHGHSGPFESKFKKEPALTAVARTARKRKPSPEPEGEVGPPKINGEAQPWLSTSTEGLKIPMTPTSSFVSPPPPTASPHSNRTTPPEAAQNGQSPMAALILVADNAGGSHASKDANQVHSTTRRNSNSPPSPSSMNQRRLGPREVGGQGAGNTGGLEPVHPASLPDSSLATSAPLCCTLCHERLEDTHFVQCPSVPSHKFCFPCSRQSIKQQGASGEVYCPSGEKCPLVGSNVPWAFMQGEIATILAGDVKVKKERDS

SEQ ID NO: 41061 - protein, 796 aa, Homo sapiens
  Payload ID: 8352
  Gene Symbol: IRF2BPL
  Gene Name: interferon regulatory factor 2 binding protein-like
  Uniprot ID: Q9H1B7
  ENSP ID: ENSP00000238647
MSAAQVSSSRRQSCYLCDLPRMPWAMIWDFSEPVCRGCVNYEGADRIEFVIETARQLKRAHGCFQDGRSPGPPPPVGVKTVALSAKEAAAAAAAAAAAAAAAQQQQQQQQQQQQQQQQQQQQQQQQQLNHVDGSSKPAVLAAPSGLERYGLSAAAAAAAAAAAAVEQRSRFEYPPPPVSLGSSSHTARLPNGLGGPNGFPKPTPEEGPPELNRQSPNSSSAAASVASRRGTHGGLVTGLPNPGGGGGPQLTVPPNLLPQTLLNGPASAAVLPPPPPHALGSRGPPTPAPPGAPGGPACLGGTPGVSATSSSASSSTSSSVAEVGVGAGGKRPGSVSSTDQERELKEKQRNAEALAELSESLRNRAEEWASKPKMVRDTLLTLAGCTPYEVRFKKDHSLLGRVFAFDAVSKPGMDYELKLFIEYPTGSGNVYSSASGVAKQMYQDCMKDFGRGLSSGFKYLEYEKKHGSGDWRLLGDLLPEAVRFFKEGVPGADMLPQPYLDASCPMLPTALVSLSRAPSAPPGTGALPPAAPSGRGAAASLRKRKASPEPPDSAEGALKLGEEQQRQQWMANQSEALKLTMSAGGFAAPGHAAGGPPPPPPPLGPHSNRTTPPESAPQNGPSPMAALMSVADTLGTAHSPKDGSSVHSTTASARRNSSSPVSPASVPGQRRLASRNGDLNLQVAPPPPSAHPGMDQVHPQNIPDSPMANSGPLCCTICHERLEDTHFVQCPSVPSHKFCFPCSRESIKAQGATGEVYCPSGEKCPLVGSNVPWAFMQGEIATILAGDVKVKKERDP

SEQ ID NO: 41062 - protein, 427 aa, Homo sapiens
  Payload ID: 8353
  Gene Symbol: IRF3
  Gene Name: interferon regulatory factor 3
  Uniprot ID: Q14653
  ENSP ID: ENSP00000310127
MGTPKPRILPWLVSQLDLGQLEGVAWVNKSRTRFRIPWKHGLRQDAQQEDFGIFQAWAEATGAYVPGRDKPDLPTWKRNFRSALNRKEGLRLAEDRSKDPHDPHKIYEFVNSGVGDFSQPDTSPDTNGGGSTSDTQEDILDELLGNMVLAPLPDPGPPSLAVAPEPCPQPLRSPSLDNPTPFPNLGPSENPLKRLLVPGEEWEFEVTAFYRGRQVFQQTISCPEGLRLVGSEVGDRTLPGWPVTLPDPGMSLTDRGVMSYVRHVLSCLGGGLALWRAGQWLWAQRLGHCHTYWAVSEELLPNSGHGPDGEVPKDKEGGVFDLGPFIVDLITFTEGSGRSPRYALWFCVGESWPQDQPWTKRLVMVKVVPTCLRALVEMARVGGASSLENTVDLHISNSHPLSLTSDQYKAYLQDLVEGMDFQGPGES

SEQ ID NO: 41063 - protein, 281 aa, Homo sapiens
  Payload ID: 8353
  Gene Symbol: IRF3
  Gene Name: interferon regulatory factor 3
  ENSP ID: ENSP00000366339
MVLAPLPDPGPPSLAVAPEPCPQPLRSPSLDNPTPFPNLGPSENPLKRLLVPGEEWEFEVTAFYRGRQVFQQTISCPEGLRLVGSEVGDRTLPGWPVTLPDPGMSLTDRGVMSYVRHVLSCLGGGLALWRAGQWLWAQRLGHCHTYWAVSEELLPNSGHGPDGEVPKDKEGGVFDLGPFIVDLITFTEGSGRSPRYALWFCVGESWPQDQPWTKRLVMVKVVPTCLRALVEMARVGGASSLENTVDLHISNSHPLSLTSDQYKAYLQDLVEGMDFQGPGES

SEQ ID NO: 41064 - protein, 427 aa, Homo sapiens; identical to SEQ ID NO: 41062
  Payload ID: 8353
  Gene Symbol: IRF3
  Gene Name: interferon regulatory factor 3
  Uniprot ID: Q14653
  ENSP ID: ENSP00000366344

SEQ ID NO: 41065 - protein, 104 aa, Homo sapiens
  Payload ID: 8353
  Gene Symbol: IRF3
  Gene Name: interferon regulatory factor 3
  Uniprot ID: Q14653
  ENSP ID: ENSP00000400378
MGTPKPRILPWLVSQLDLGQLEGVAWVNKSRTRFRIPWKHGLRQDAQQEDFGIFQELGTFPSQTPLRTPMVEAVLLIPRKTFWMSYWVTWCWPHSQIRDPQAWL

SEQ ID NO: 41066 - protein, 135 aa, Homo sapiens
  Payload ID: 8353
  Gene Symbol: IRF3
  Gene Name: interferon regulatory factor 3
  ENSP ID: ENSP00000468911
MVLAPLPDPGPPSLAVAPEPCPQPLRSPSLDNPTPFPNLGPSENPLKRLLVPGEGCAHVPQGLGRNGPGRGCLLPGEYCGPAHFQQPPTLPHLRPVQGLPAGLGGGHGFPGPWGELSPRSSWCASNPPVPHHLNQ

SEQ ID NO: 41067 - protein, 119 aa, Homo sapiens
  Payload ID: 8353
  Gene Symbol: IRF3
  Gene Name: interferon regulatory factor 3
  ENSP ID: ENSP00000469067
MVLAPLPDPGPPSLAVAPEPCPQPLRSPSLDNPTPFPNLGPSENPLKRLLVPGEEWEFEVTAFYRGRQVFQQTISCPEGLRLVGSEVGDRTLPGWPVTLPDPGMSLTDRGVMSYVRHVL

SEQ ID NO: 41068 - protein, 427 aa, Homo sapiens; identical to SEQ ID NO: 41062
  Payload ID: 8353
  Gene Symbol: IRF3
  Gene Name: interferon regulatory factor 3
  Uniprot ID: Q14653
  ENSP ID: ENSP00000469113

SEQ ID NO: 41069 - protein, 281 aa, Homo sapiens; identical to SEQ ID NO: 41063
  Payload ID: 8353
  Gene Symbol: IRF3
  Gene Name: interferon regulatory factor 3
  ENSP ID: ENSP00000470069

SEQ ID NO: 41070 - protein, 190 aa, Homo sapiens
  Payload ID: 8353
  Gene Symbol: IRF3
  Gene Name: interferon regulatory factor 3
  ENSP ID: ENSP00000470140
MGTPKPRILPWLVSQLDLGQLEGVAWVNKSRTRFRIPWKHGLRQDAQQEDFGIFQAWAEATGAYVPGRDKPDLPTWKRNFRSALNRKEGLRLAEDRSKDPHDPHKIYEFVNSGVGDFSQPDTSPDTNGGGSTSDTQEDILDELLGNMVLAPLPDPGPPSLAVAPEPCPQPLRSPSLDNPTPFPNLGPSEN

SEQ ID NO: 41071 - protein, 408 aa, Homo sapiens
  Payload ID: 8353
  Gene Symbol: IRF3
  Gene Name: interferon regulatory factor 3
  ENSP ID: ENSP00000470431
MGTPKPRILPWLVSQLDLGQLEGVAWVNKSRTRFRIPWKHGLRQDAQQEDFGIFQAWAEATGAYVPGRDKPDLPTWKRNFRSALNRKEGLRLAEDRSKDPHDPHKIYEFVNSGVGDFSQPDTSPDTNGGGSTSDTQEDILDELLGNMVLAPLPDPGPPSLAVAPEPCPQPLRSPSLDNPTPFPNLGPSENPLKRLLVPGEEWEFEVTAFYRGRQVFQQTISCPEGLRLVGSEVGDRTLPGWPVTLPDPGMSLTDRGVMSYVRHVLSCLGGGLALWRAGQWLWAQRLGHCHTYWAVSEELLPNSGHGPDGEVPKDKEGGVFDLGPFIVGCAHVPQGLGRNGPGRGCLLPGEYCGPAHFQQPPTLPHLRPVQGLPAGLGGGHGFPGPWGELSPRSSWCASNPPVPHHLNQ

SEQ ID NO: 41072 - protein, 329 aa, Homo sapiens
  Payload ID: 8353
  Gene Symbol: IRF3
  Gene Name: interferon regulatory factor 3
  ENSP ID: ENSP00000470436
MGTPKPRILPWLVSQLDLGQLEGVAWVNKSRTRFRIPWKHGLRQDAQQEDFGIFQAWAEATGAYVPGRDKPDLPTWKRNFRSALNRKEGLRLAEDRSKDPHDPHKIYEFVNSGVGDFSQPDTSPDTNGGGSTSDTQEDILDELLGNMVLAPLPDPGPPSLAVAPEPCPQPLRSPSLDNPTPFPNLGPSENPLKRLLVPGEEWEFEVTAFYRGRQVFQQTISCPEGLRLVGSEVGDRTLPGWPVTLPDPGMSLTDRGVMSYVRHVLSCLGGGLALWRAGQWLWAQRLGHCHTYWAVSEELLPNSGHGPDGEVPKDKEGGVFDLGPFIVGE

SEQ ID NO: 41073 - protein, 154 aa, Homo sapiens
  Payload ID: 8353
  Gene Symbol: IRF3
  Gene Name: interferon regulatory factor 3
  Uniprot ID: Q14653
  ENSP ID: ENSP00000470512
MVLAPLPDPGPPSLAVAPEPCPQPLRSPSLDNPTPFPNLGPSENPLKRLLVPGEDLITFTEGSGRSPRYALWFCVGESWPQDQPWTKRLVMVKVVPTCLRALVEMARVGGASSLENTVDLHISNSHPLSLTSDQYKAYLQDLVEGMDFQGPGES

SEQ ID NO: 41074 - protein, 102 aa, Homo sapiens
  Payload ID: 8353
  Gene Symbol: IRF3
  Gene Name: interferon regulatory factor 3
  ENSP ID: ENSP00000470905
MGTPKPRILPWLVSQLDLGQLEGVAWVNKSRTRFRIPWKHGLRQDAQQEDFGIFQAWAEATGAYVPGRDKPDLPTWKRNFRSALNRKEGLRLAEDRSKDPHD

SEQ ID NO: 41075 - protein, 300 aa, Homo sapiens
  Payload ID: 8353
  Gene Symbol: IRF3
  Gene Name: interferon regulatory factor 3
  Uniprot ID: Q14653
  ENSP ID: ENSP00000471358
MGTPKPRILPWLVSQLDLGQLEGVAWVNKSRTRFRIPWKHGLRQDAQQEDFGIFQAWAEATGAYVPGRDKPDLPTWKRNFRSALNRKEGLRLAEDRSKDPHDPHKIYEFVNSGVGDFSQPDTSPDTNGGGSTSDTQEDILDELLGNMVLAPLPDPGPPSLAVAPEPCPQPLRSPSLDNPTPFPNLGPSENPLKRLLVPGEDLITFTEGSGRSPRYALWFCVGESWPQDQPWTKRLVMVKVVPTCLRALVEMARVGGASSLENTVDLHISNSHPLSLTSDQYKAYLQDLVEGMDFQGPGES

SEQ ID NO: 41076 - protein, 84 aa, Homo sapiens
  Payload ID: 8353
  Gene Symbol: IRF3
  Gene Name: interferon regulatory factor 3
  ENSP ID: ENSP00000471402
MVLAPLPDPGPPSLAVAPEPCPQPLRSPSLDNPTPFPNLGPSENPLKRLLVPGEEWEFEVTAFYRGRQVFQQTISCPEGLRLVG

SEQ ID NO: 41077 - protein, 105 aa, Homo sapiens
  Payload ID: 8353
  Gene Symbol: IRF3
  Gene Name: interferon regulatory factor 3
  ENSP ID: ENSP00000471517
MVLAPLPDPGPPSLAVAPEPCPQPLRSPSLDNPTPFPNLGPSENPLKRLLVPGEEWEFEVTAFYRGRQVFQQTISCPEGLRLVGSEVGDRTLPGWPVTLPDPGMS

SEQ ID NO: 41078 - protein, 452 aa, Homo sapiens
  Payload ID: 8353
  Gene Symbol: IRF3
  Gene Name: interferon regulatory factor 3
  Uniprot ID: Q14653
  ENSP ID: ENSP00000471896
MGTPKPRILPWLVSQLDLGQLEGVAWVNKSRTRFRIPWKHGLRQDAQQEDFGIFQAWAEATGAYVPGRDKPDLPTWKRNFRSALNRKEGLRLAEDRSKDPHDPHKIYEFVNSGVGDFSQPDTSPDTNGGGSTSDTQEDILDELLGNMVLAPLPDPGPPSLAVAPEPCPQPLRSPSLDNPTPFPNLGPSENPLKRLLVPGEEWEFEVTAFYRGRQVFQQTISCPEGLRLVGSEVGDRTLPGWPVTLPDPGMSLTDRGVMSYVRHVLSCLGGGLALWRAGQWLWAQRLGHCHTYWAVSEELLPNSGHGPDGEVPKDKEGGVFDLGPFIVGSWAPRSDYLHGRKRTLTTLCPLVLCGGVMAPGPAVDQEARDGQGCAHVPQGLGRNGPGRGCLLPGEYCGPAHFQQPPTLPHLRPVQGLPAGLGGGHGFPGPWGELSPRSSWCASNPPVPHHLNQ

SEQ ID NO: 41079 - protein, 287 aa, Homo sapiens
  Payload ID: 8353
  Gene Symbol: IRF3
  Gene Name: interferon regulatory factor 3
  ENSP ID: ENSP00000472223
MGTPKPRILPWLVSQLDLGQLEGVAWVNKSRTRFRIPWKHGLRQDAQQEDFGIFQAWAEATGAYVPGRDKPDLPTWKRNFRSALNRKEGLRLAEDRSKDPHDPHKIYEFVNSGVGDFSQPDTSPDTNGGGSTSDTQEDILDELLGNMVLAPLPDPGPPSLAVAPEPCPQPLRSPSLDNPTPFPNLGPSENPLKRLLVPGEEWEFEVTAFYRGRQVFQQTISCPEGLRLVGSEVGDRTLPGWPVTLPDPGMSLTDRGVMSYVRHVLSCLGGGLALWRAGQWLWAQRLG

SEQ ID NO: 41080 - protein, 281 aa, Homo sapiens; identical to SEQ ID NO: 41063
  Payload ID: 8353
  Gene Symbol: IRF3
  Gene Name: interferon regulatory factor 3
  ENSP ID: ENSP00000472582

SEQ ID NO: 41081 - protein, 281 aa, Homo sapiens; identical to SEQ ID NO: 41063
  Payload ID: 8353
  Gene Symbol: IRF3
  Gene Name: interferon regulatory factor 3
  ENSP ID: ENSP00000472601

SEQ ID NO: 41082 - protein, 154 aa, Homo sapiens; identical to SEQ ID NO: 41073
  Payload ID: 8353
  Gene Symbol: IRF3
  Gene Name: interferon regulatory factor 3
  Uniprot ID: Q14653
  ENSP ID: ENSP00000472700

SEQ ID NO: 41083 - protein, 264 aa, Homo sapiens
  Payload ID: 8353
  Gene Symbol: IRF3
  Gene Name: interferon regulatory factor 3
  ENSP ID: ENSP00000473128
MGTPKPRILPWLVSQLDLGQLEGVAWVNKSRTRFRIPWKHGLRQDAQQEDFGIFQAWAEATGAYVPGRDKPDLPTWKRNFRSALNRKEGLRLAEDRSKDPHDPHKIYEFVNSGVGDFSQPDTSPDTNGGGSTSDTQEDILDELLGNMVLAPLPDPGPPSLAVAPEPCPQPLRSPSLDNPTPFPNLGPSENPLKRLLVPGEDLITFTEGSGRSPRYALWFCVGESWPQDQPWTKRLVMVKVVPTCLRALVEMARVGGASSLENTV

SEQ ID NO: 41084 - protein, 153 aa, Homo sapiens
  Payload ID: 8353
  Gene Symbol: IRF3
  Gene Name: interferon regulatory factor 3
  ENSP ID: ENSP00000473176
MGTPKPRILPWLVSQLDLGQLEGVAWVNKSRTRFRIPWKHGLRQDAQQEDFGIFQAWAEATGAYVPGRDKPDLPTWKRNFRSALNRKEGLRLAEDRSKDPHDPHKIYEFVNSGVGDFSQPDTSPDTNGGGSTSDTQEDILDELLEWEFEVTAF

SEQ ID NO: 41085 - protein, 71 aa, Homo sapiens
  Payload ID: 8353
  Gene Symbol: IRF3
  Gene Name: interferon regulatory factor 3
  ENSP ID: ENSP00000473232
  MOD_RES (1)..(1): Any amino acid
XHGLRQDAQQEDFGIFQVRATTWDAGNPELRAGRKGLLVGPAEKAEVAREGRARANAGLGRGHWCICSREG

SEQ ID NO: 41086 - protein, 451 aa, Homo sapiens
  Payload ID: 8354
  Gene Symbol: IRF4
  Gene Name: interferon regulatory factor 4
  Uniprot ID: Q15306
  ENSP ID: ENSP00000370343
MNLEGGGRGGEFGMSAVSCGNGKLRQWLIDQIDSGKYPGLVWENEEKSIFRIPWKHAGKQDYNREEDAALFKAWALFKGKFREGIDKPDPPTWKTRLRCALNKSNDFEELVERSQLDISDPYKVYRIVPEGAKKGAKQLTLEDPQMSMSHPYTMTTPYPSLPAQQVHNYMMPPLDRSWRDYVPDQPHPEIPYQCPMTFGPRGHHWQGPACENGCQVTGTFYACAPPESQAPGVPTEPSIRSAEALAFSDCRLHICLYYREILVKELTTSSPEGCRISHGHTYDASNLDQVLFPYPEDNGQRKNIEKLLSHLERGVVLWMAPDGLYAKRLCQSRIYWDGPLALCNDRPNKLERDQTCKLFDTQQFLSELQAFAHHGRSLPRFQVTLCFGEEFPDPQRQRKLITAHVEPLLARQLYYFAQQNSGHFLRGYDLPEHISNPEDYHRSIRHSSIQE

SEQ ID NO: 41087 - protein, 410 aa, Homo sapiens
  Payload ID: 8354
  Gene Symbol: IRF4
  Gene Name: interferon regulatory factor 4
  ENSP ID: ENSP00000436094
MNLEGGGRGGEFGMSAVSCGNGKLRQWLIDQIDSGKYPGLVWENEEKSIFRIPWKHAGKQDYNREEDAALFKAWALFKGKFREGIDKPDPPTWKTRLRCALNKSNDFEELVERSQLDISDPYKVYRIVPEGAKKGAKQLTLEDPQMSMSHPYTMTTPYPSLPAQQVHNYMMPPLDRSWRDYVPDQPHPEIPYQCPMTFGPRGHHWQGPACENGCQVTGTFYACAPPESQAPGVPTEPSIRSAEALAFSDCRLHICLYYREILVKELTTSSPEGCRISHGHTYDASNLDQVLFPYPEDNGQRKNIEKLLSHLERGVVLWMAPDGLYAKRLCQSRIYWDGPLALCNDRPNKLERDQTCKLFDTQQFLSELQAFAHHGRSLPRFQVTLCFGEEFPDPQRQRKLITAHVLRSLA

SEQ ID NO: 41088 - protein, 498 aa, Homo sapiens
  Payload ID: 8355
  Gene Symbol: IRF5
  Gene Name: interferon regulatory factor 5
  Uniprot ID: Q13568
  ENSP ID: ENSP00000249375
MNQSIPVAPTPPRRVRLKPWLVAQVNSCQYPGLQWVNGEKKLFCIPWRHATRHGPSQDGDNTIFKAWAKETGKYTEGVDEADPAKWKANLRCALNKSRDFRLIYDGPRDMPPQPYKIYEVCSNGPAPTDSQPPEDYSFGAGEEEEEEEELQRMLPSLSLTEDVKWPPTLQPPTLRPPTLQPPTLQPPVVLGPPAPDPSPLAPPPGNPAGFRELLSEVLEPGPLPASLPPAGEQLLPDLLISPHMLPLTDLEIKFQYRGRPPRALTISNPHGCRLFYSQLEATQEQVELFGPISLEQVRFPSPEDIPSDKQRFYTNQLLDVLDRGLILQLQGQDLYAIRLCQCKVFWSGPCASAHDSCPNPIQREVKTKLFSLEHFLNELILFQKGQTNTPPPFEIFFCFGEEWPDRKPREKKLITVQVVPVAARLLLEMFSGELSWSADSIRLQISNPDLKDRMVEQFKELHHIWQSQQRLQPVAQAPPGAGLGVGQGPWPMHPAGMQ

SEQ ID NO: 41089 - protein, 514 aa, Homo sapiens
  Payload ID: 8355
  Gene Symbol: IRF5
  Gene Name: interferon regulatory factor 5
  Uniprot ID: Q13568
  ENSP ID: ENSP00000349770
MNQSIPVAPTPPRRVRLKPWLVAQVNSCQYPGLQWVNGEKKLFCIPWRHATRHGPSQDGDNTIFKAWAKETGKYTEGVDEADPAKWKANLRCALNKSRDFRLIYDGPRDMPPQPYKIYEVCSNGPAPTDSQPPEDYSFGAGEEEEEEEELQRMLPSLSLTDAVQSGPHMTPYSLLKEDVKWPPTLQPPTLRPPTLQPPTLQPPVVLGPPAPDPSPLAPPPGNPAGFRELLSEVLEPGPLPASLPPAGEQLLPDLLISPHMLPLTDLEIKFQYRGRPPRALTISNPHGCRLFYSQLEATQEQVELFGPISLEQVRFPSPEDIPSDKQRFYTNQLLDVLDRGLILQLQGQDLYAIRLCQCKVFWSGPCASAHDSCPNPIQREVKTKLFSLEHFLNELILFQKGQTNTPPPFEIFFCFGEEWPDRKPREKKLITVQVVPVAARLLLEMFSGELSWSADSIRLQISNPDLKDRMVEQFKELHHIWQSQQRLQPVAQAPPGAGLGVGQGPWPMHPAGMQ

SEQ ID NO: 41090 - protein, 498 aa, Homo sapiens; identical to SEQ ID NO: 41088
  Payload ID: 8355
  Gene Symbol: IRF5
  Gene Name: interferon regulatory factor 5
  Uniprot ID: Q13568
  ENSP ID: ENSP00000385352

SEQ ID NO: 41091 - protein, 59 aa, Homo sapiens
  Payload ID: 8355
  Gene Symbol: IRF5
  Gene Name: interferon regulatory factor 5
  ENSP ID: ENSP00000417454
MNQSIPVAPTPPRRVRLKPWLVAQVNSCQYPGLQWVNGEKKLFCIPWRHATRHGPSQDG

SEQ ID NO: 41092 - protein, 141 aa, Homo sapiens
  Payload ID: 8355
  Gene Symbol: IRF5
  Gene Name: interferon regulatory factor 5
  ENSP ID: ENSP00000417770
MNQSIPVAPTPPRRVRLKPWLVAQVNSCQYPGLQWVNGEKKLFCIPWRHATRHGPSQDGDNTIFKAWAKETGKYTEGVDEADPAKWKANLRCALNKSRDFRLIYDGPRDMPPQPYKIYEVCSNGPAPTDSQPPEDYSFGAG

SEQ ID NO: 41093 - protein, 151 aa, Homo sapiens
  Payload ID: 8355
  Gene Symbol: IRF5
  Gene Name: interferon regulatory factor 5
  ENSP ID: ENSP00000418037
MNQSIPVAPTPPRRVRLKPWLVAQVNSCQYPGLQWVNGEKKLFCIPWRHATRHGPSQDGDNTIFKAWAKETGKYTEGVDEADPAKWKANLRCALNKSRDFRLIYDGPRDMPPQPYKIYEVCSNGPAPTDSQPPEDYSFGAGEEEEEEEEVS

SEQ ID NO: 41094 - protein, 147 aa, Homo sapiens
  Payload ID: 8355
  Gene Symbol: IRF5
  Gene Name: interferon regulatory factor 5
  Uniprot ID: Q13568
  ENSP ID: ENSP00000418534
MNQSIPVAPTPPRRVRLKPWLVAQVNSCQYPGLQWVNGEKKLFCIPWRHATRHGPSQDGDNTIFKAWAKETGKYTEGVDEADPAKWKANLRCALNKSRDFRLIYDGPRDMPPQPYKIYETPSPLRITLLVQERRRKKRKSCRGCCQA

SEQ ID NO: 41095 - protein, 106 aa, Homo sapiens
  Payload ID: 8355
  Gene Symbol: IRF5
  Gene Name: interferon regulatory factor 5
  ENSP ID: ENSP00000419056
MNQSIPVAPTPPRRVRLKPWLVAQVNSCQYPGLQWVNGEKKLFCIPWRHATRHGPSQDGDNTIFKAWAKETGKYTEGVDEADPAKWKANLRCALNKSRDFRLIYDG

SEQ ID NO: 41096 - protein, 498 aa, Homo sapiens; identical to SEQ ID NO: 41088
  Payload ID: 8355
  Gene Symbol: IRF5
  Gene Name: interferon regulatory factor 5
  Uniprot ID: Q13568
  ENSP ID: ENSP00000419149

SEQ ID NO: 41097 - protein, 412 aa, Homo sapiens
  Payload ID: 8355
  Gene Symbol: IRF5
  Gene Name: interferon regulatory factor 5
  Uniprot ID: Q13568
  ENSP ID: ENSP00000419950
MNQSIPVAPTPPRRVRLKPWLVAQVNSCQYPGLQWVNGEKKLFCIPWRHATRHGPSQDGDNTIFKAWAKETGKYTEGVDEADPAKWKANLRCALNKSRDFRLIYDGPRDMPPQPYKIYEVCSNGPAPTDSQPPEDYSFGAGEEEEEEEELQRMLPSLSLTVTDLEIKFQYRGRPPRALTISNPHGCRLFYSQLEATQEQVELFGPISLEQVRFPSPEDIPSDKQRFYTNQLLDVLDRGLILQLQGQDLYAIRLCQCKVFWSGPCASAHDSCPNPIQREVKTKLFSLEHFLNELILFQKGQTNTPPPFEIFFCFGEEWPDRKPREKKLITVQVVPVAARLLLEMFSGELSWSADSIRLQISNPDLKDRMVEQFKELHHIWQSQQRLQPVAQAPPGAGLGVGQGPWPMHPAGMQ

SEQ ID NO: 41098 - protein, 104 aa, Homo sapiens
  Payload ID: 8355
  Gene Symbol: IRF5
  Gene Name: interferon regulatory factor 5
  ENSP ID: ENSP00000420274
MNQSIPVAPTPPRRVRLKPWLVAQVNSCQYPGLQWVNGEKKLFCIPWRHATRHGPSQDGDNTIFKGLTLSPRLECSGLISAHCSLDLPGSGLGQGDREIHRRRG

SEQ ID NO: 41099 - protein, 157 aa, Homo sapiens
  Payload ID: 8355
  Gene Symbol: IRF5
  Gene Name: interferon regulatory factor 5
  ENSP ID: ENSP00000480058
MNQSIPVAPTPPRRVRLKPWLVAQVNSCQYPGLQWVNGEKKLFCIPWRHATRHGPSQDGDNTIFKAWAKETGKYTEGVDEADPAKWKANLRCALNKSRDFRLIYDGPRDMPPQPYKIYEVCSNGPAPTDSQPPEDYSFGAGEEEEEEEEMQCSLAPT

SEQ ID NO: 41100 - protein, 147 aa, Homo sapiens; identical to SEQ ID NO: 41094
  Payload ID: 8355
  Gene Symbol: IRF5
  Gene Name: interferon regulatory factor 5
  Uniprot ID: Q13568
  ENSP ID: ENSP00000483292

SEQ ID NO: 41101 - protein, 467 aa, Homo sapiens
  Payload ID: 8356
  Gene Symbol: IRF6
  Gene Name: interferon regulatory factor 6
  Uniprot ID: O14896
  ENSP ID: ENSP00000355988
MALHPRRVRLKPWLVAQVDSGLYPGLIWLHRDSKRFQIPWKHATRHSPQQEEENTIFKAWAVETGKYQEGVDDPDPAKWKAQLRCALNKSREFNLMYDGTKEVPMNPVKIYQVCDIPQPQGSIINPGSTGSAPWDEKDNDVDEEDEEDELDQSQHHVPIQDTFPFLNINGSPMAPASVGNCSVGNCSPEAVWPKTEPLEMEVPQAPIQPFYSSPELWISSLPMTDLDIKFQYRGKEYGQTMTVSNPQGCRLFYGDLGPMPDQEELFGPVSLEQVKFPGPEHITNEKQKLFTSKLLDVMDRGLILEVSGHAIYAIRLCQCKVYWSGPCAPSLVAPNLIERQKKVKLFCLETFLSDLIAHQKGQIEKQPPFEIYLCFGEEWPDGKPLERKLILVQVIPVVARMIYEMFSGDFTRSFDSGSVRLQISTPDIKDNIVAQLKQLYRILQTQESWQPMQPTPSMQLPPALPPQ

SEQ ID NO: 41102 - protein, 276 aa, Homo sapiens
  Payload ID: 8356
  Gene Symbol: IRF6
  Gene Name: interferon regulatory factor 6
  ENSP ID: ENSP00000403855
MALHPRRVRLKPWLVAQVDSGLYPGLIWLHRDSKRFQIPWKHATRHSPQQEEENTIFKAWAVETGKYQEGVDDPDPAKWKAQLRCALNKSREFNLMYDGTKEVPMNPVKIYQVCDIPQPQGSIINPGSTGSAPWDEKDNDVDEEDEEDELDQSQHHVPIQDTFPFLNINGSPMAPASVGNCSVGNCSPEAVWPKTEPLEMEVPQAPIQPFYSSPELWISSLPMTDLDIKFQYRGKEYGQTMTVSNPQGCRLFYGDLGPMPDQEELFGPVSLEQVKF

SEQ ID NO: 41103 - protein, 372 aa, Homo sapiens
  Payload ID: 8356
  Gene Symbol: IRF6
  Gene Name: interferon regulatory factor 6
  Uniprot ID: O14896
  ENSP ID: ENSP00000440532
MYDGTKEVPMNPVKIYQVCDIPQPQGSIINPGSTGSAPWDEKDNDVDEEDEEDELDQSQHHVPIQDTFPFLNINGSPMAPASVGNCSVGNCSPEAVWPKTEPLEMEVPQAPIQPFYSSPELWISSLPMTDLDIKFQYRGKEYGQTMTVSNPQGCRLFYGDLGPMPDQEELFGPVSLEQVKFPGPEHITNEKQKLFTSKLLDVMDRGLILEVSGHAIYAIRLCQCKVYWSGPCAPSLVAPNLIERQKKVKLFCLETFLSDLIAHQKGQIEKQPPFEIYLCFGEEWPDGKPLERKLILVQVIPVVARMIYEMFSGDFTRSFDSGSVRLQISTPDIKDNIVAQLKQLYRILQTQESWQPMQPTPSMQLPPALPPQ

SEQ ID NO: 41104 - protein, 516 aa, Homo sapiens
  Payload ID: 8357
  Gene Symbol: IRF7
  Gene Name: interferon regulatory factor 7
  Uniprot ID: Q92985
  ENSP ID: ENSP00000329411
MPVPERPAAGPDSPRPGTRRAAPRVLFGEWLLGEISSGCYEGLQWLDEARTCFRVPWKHFARKDLSEADARIFKAWAVARGRWPPSSRGGGPPPEAETAERAGWKTNFRCALRSTRRFVMLRDNSGDPADPHKVYALSRELCWREGPGTDQTEAEAPAAVPPPQGGPPGPFLAHTHAGLQAPGPLPAPAGDKGDLLLQAVQQSCLADHLLTASWGADPVPTKAPGEGQEGLPLTGACAGGPGLPAGELYGWAVETTPSPGPQPAALTTGEAAAPESPHQAEPYLSPSPSACTAVQEPSPGALDVTIMYKGRTVLQKVVGHPSCTFLYGPPDPAVRATDPQQVAFPSPAELPDQKQLRYTEELLRHVAPGLHLELRGPQLWARRMGKCKVYWEVGGPPGSASPSTPACLLPRNCDTPIFDFRVFFQELVEFRARQRRGSPRYTIYLGFGQDLSAGRPKEKSLVLVKLEPWLCRVHLEGTQREGVSSLDSSSLSLCLSSANSLYDDIECFLMELEQPA

SEQ ID NO: 41105 - protein, 474 aa, Homo sapiens
  Payload ID: 8357
  Gene Symbol: IRF7
  Gene Name: interferon regulatory factor 7
  Uniprot ID: Q92985
  ENSP ID: ENSP00000331803
MALAPERAAPRVLFGEWLLGEISSGCYEGLQWLDEARTCFRVPWKHFARKDLSEADARIFKAWAVARGRWPPSSRGGGPPPEAETAERAGWKTNFRCALRSTRRFVMLRDNSGDPADPHKVYALSRELCWREGPGTDQTEAEAPAAVPPPQGGPPGPFLAHTHAGLQAPGPLPAPAGDKGDLLLQAVQQSCLADHLLTASWGADPVPTKAPGEGQEGLPLTGACAGGEAAAPESPHQAEPYLSPSPSACTAVQEPSPGALDVTIMYKGRTVLQKVVGHPSCTFLYGPPDPAVRATDPQQVAFPSPAELPDQKQLRYTEELLRHVAPGLHLELRGPQLWARRMGKCKVYWEVGGPPGSASPSTPACLLPRNCDTPIFDFRVFFQELVEFRARQRRGSPRYTIYLGFGQDLSAGRPKEKSLVLVKLEPWLCRVHLEGTQREGVSSLDSSSLSLCLSSANSLYDDIECFLMELEQPA

SEQ ID NO: 41106 - protein, 516 aa, Homo sapiens; identical to SEQ ID NO: 41104
  Payload ID: 8357
  Gene Symbol: IRF7
  Gene Name: interferon regulatory factor 7
  Uniprot ID: Q92985
  ENSP ID: ENSP00000380697

SEQ ID NO: 41107 - protein, 487 aa, Homo sapiens
  Payload ID: 8357
  Gene Symbol: IRF7
  Gene Name: interferon regulatory factor 7
  ENSP ID: ENSP00000380700
MPVPERPAAGPDSPRPGTRRAAPRVLFGEWLLGEISSGCYEGLQWLDEARTCFRVPWKHFARKDLSEADARIFKAWAVARGRWPPSSRGGGPPPEAETAERAGWKTNFRCALRSTRRFVMLRDNSGDPADPHKVYALSRELCWREGPGTDQTEAEAPAAVPPPQGGPPGPFLAHTHAGLQAPGPLPAPAGDKGDLLLQAVQQSCLADHLLTASWGADPVPTKAPGEGQEGLPLTGACAGGEAAAPESPHQAEPYLSPSPSACTAVQEPSPGALDVTIMYKGRTVLQKVVGHPSCTFLYGPPDPAVRATDPQQVAFPSPAELPDQKQLRYTEELLRHVAPGLHLELRGPQLWARRMGKCKVYWEVGGPPGSASPSTPACLLPRNCDTPIFDFRVFFQELVEFRARQRRGSPRYTIYLGFGQDLSAGRPKEKSLVLVKLEPWLCRVHLEGTQREGVSSLDSSSLSLCLSSANSLYDDIECFLMELEQPA

SEQ ID NO: 41108 - protein, 503 aa, Homo sapiens
  Payload ID: 8357
  Gene Symbol: IRF7
  Gene Name: interferon regulatory factor 7
  Uniprot ID: Q92985
  ENSP ID: ENSP00000380704
MALAPERAAPRVLFGEWLLGEISSGCYEGLQWLDEARTCFRVPWKHFARKDLSEADARIFKAWAVARGRWPPSSRGGGPPPEAETAERAGWKTNFRCALRSTRRFVMLRDNSGDPADPHKVYALSRELCWREGPGTDQTEAEAPAAVPPPQGGPPGPFLAHTHAGLQAPGPLPAPAGDKGDLLLQAVQQSCLADHLLTASWGADPVPTKAPGEGQEGLPLTGACAGGPGLPAGELYGWAVETTPSPGPQPAALTTGEAAAPESPHQAEPYLSPSPSACTAVQEPSPGALDVTIMYKGRTVLQKVVGHPSCTFLYGPPDPAVRATDPQQVAFPSPAELPDQKQLRYTEELLRHVAPGLHLELRGPQLWARRMGKCKVYWEVGGPPGSASPSTPACLLPRNCDTPIFDFRVFFQELVEFRARQRRGSPRYTIYLGFGQDLSAGRPKEKSLVLVKLEPWLCRVHLEGTQREGVSSLDSSSLSLCLSSANSLYDDIECFLMELEQPA

SEQ ID NO: 41109 - protein, 177 aa, Homo sapiens
  Payload ID: 8357
  Gene Symbol: IRF7
  Gene Name: interferon regulatory factor 7
  ENSP ID: ENSP00000432403
MPVPERPAAGPDSPRPGTRRAAPRVLFGEWLLGEISSGCYEGLQWLDEARTCFRVPWKHFARKDLSEADARIFKAWAVARGRWPPSSRGGGPPPEAETAERAGWKTNFRCALRSTRRFVMLRDNSGDPADPHKVYALSRELCWREGPGTDQTEAEAPAAVPPPQAQGSLLGSCTGGQ

SEQ ID NO: 41110 - protein, 164 aa, Homo sapiens
  Payload ID: 8357
  Gene Symbol: IRF7
  Gene Name: interferon regulatory factor 7
  Uniprot ID: Q92985
  ENSP ID: ENSP00000433903
MALAPERAAPRVLFGEWLLGEISSGCYEGLQWLDEARTCFRVPWKHFARKDLSEADARIFKAWAVARGRWPPSSRGGGPPPEAETAERAGWKTNFRCALRSTRRFVMLRDNSGDPADPHKVYALSRELCWREGPGTDQTEAEAPAAVPPPQAQGSLLGSCTGGQ

SEQ ID NO: 41111 - protein, 397 aa, Homo sapiens
  Payload ID: 8357
  Gene Symbol: IRF7
  Gene Name: interferon regulatory factor 7
  ENSP ID: ENSP00000434009
MLRDNSGDPADPHKVYALSRELCWREGPGTDQTEAEAPAAVPPPQGGPPGPFLAHTHAGLQAPGPLPAPAGDKGDLLLQAVQQSCLADHLLTASWGADPVPTKAPGEGQEGLPLTGACAGGPGLPAGELYGWAVETTPSPGPQPAALTTGEAAAPESPHQAEPYLSPSPSACTAVQEPSPGALDVTIMYKGRTVLQKVVGHPSCTFLYGPPDPAVRATDPQQVAFPSPAELPDQKQLRYTEELLRHVAPGLHLELRGPQLWARRMGKCKVYWEVGGPPGSASPSTPACLLPRNCDTPIFDFRVFFQELVEFRARQRRGSPRYTIYLGFGQDLSAGRPKEKSLVLVKLEPWLCRVHLEGTQREGVSSLDSSSLSLCLSSANSLYDDIECFLMELEQPA

SEQ ID NO: 41112 - protein, 135 aa, Homo sapiens
  Payload ID: 8357
  Gene Symbol: IRF7
  Gene Name: interferon regulatory factor 7
  ENSP ID: ENSP00000434524
MALAPERAAPRVLFGEWLLGEISSGCYEGLQWLDEARTCFRVPWKHFARKDLSEADARIFKVGTPAPPRPGWESPPRTPRARHTCSVPLFRPGLWPAAGGRLAAGEVARPPRLRLRSAPAGKPTSAAHCAARVAS

SEQ ID NO: 41113 - protein, 164 aa, Homo sapiens; identical to SEQ ID NO: 41110
  Payload ID: 8357
  Gene Symbol: IRF7
  Gene Name: interferon regulatory factor 7
  Uniprot ID: Q92985
  ENSP ID: ENSP00000434607

SEQ ID NO: 41114 - protein, 185 aa, Homo sapiens
  Payload ID: 8357
  Gene Symbol: IRF7
  Gene Name: interferon regulatory factor 7
  ENSP ID: ENSP00000436696
MALAPERAAPRVLFGEWLLGEISSGCYEGLQWLDEARTCFRVPWKHFARKDLSEADARIFKAWAVARGRWPPSSRGGGPPPEAETAERAGWKTNFRCALRSTRRFVMLRDNSGDPADPHKVYALSRELCWRGPGTDQTEAEAPAAVPPPQARPRPQSPRTRQSRTCHPPQAPAPRCKSPAQGRWT

SEQ ID NO: 41115 - protein, 487 aa, Homo sapiens; identical to SEQ ID NO: 41107
  Payload ID: 8357
  Gene Symbol: IRF7
  Gene Name: interferon regulatory factor 7
  ENSP ID: ENSP00000479277

SEQ ID NO: 41116 - protein, 516 aa, Homo sapiens; identical to SEQ ID NO: 41104
  Payload ID: 8357
  Gene Symbol: IRF7
  Gene Name: interferon regulatory factor 7
  Uniprot ID: Q92985
  ENSP ID: ENSP00000479615

SEQ ID NO: 41117 - protein, 503 aa, Homo sapiens; identical to SEQ ID NO: 41108
  Payload ID: 8357
  Gene Symbol: IRF7
  Gene Name: interferon regulatory factor 7
  Uniprot ID: Q92985
  ENSP ID: ENSP00000480358

SEQ ID NO: 41118 - protein, 185 aa, Homo sapiens; identical to SEQ ID NO: 41114
  Payload ID: 8357
  Gene Symbol: IRF7
  Gene Name: interferon regulatory factor 7
  ENSP ID: ENSP00000487875

SEQ ID NO: 41119 - protein, 516 aa, Homo sapiens; identical to SEQ ID NO: 41104
  Payload ID: 8357
  Gene Symbol: IRF7
  Gene Name: interferon regulatory factor 7
  Uniprot ID: Q92985
  ENSP ID: ENSP00000488039

SEQ ID NO: 41120 - protein, 397 aa, Homo sapiens; identical to SEQ ID NO: 41111
  Payload ID: 8357
  Gene Symbol: IRF7
  Gene Name: interferon regulatory factor 7
  ENSP ID: ENSP00000488372

SEQ ID NO: 41121 - protein, 164 aa, Homo sapiens; identical to SEQ ID NO: 41110
  Payload ID: 8357
  Gene Symbol: IRF7
  Gene Name: interferon regulatory factor 7
  Uniprot ID: Q92985
  ENSP ID: ENSP00000488581

SEQ ID NO: 41122 - protein, 164 aa, Homo sapiens; identical to SEQ ID NO: 41110
  Payload ID: 8357
  Gene Symbol: IRF7
  Gene Name: interferon regulatory factor 7
  Uniprot ID: Q92985
  ENSP ID: ENSP00000488591

SEQ ID NO: 41123 - protein, 474 aa, Homo sapiens; identical to SEQ ID NO: 41105
  Payload ID: 8357
  Gene Symbol: IRF7
  Gene Name: interferon regulatory factor 7
  Uniprot ID: Q92985
  ENSP ID: ENSP00000488666

SEQ ID NO: 41124 - protein, 426 aa, Homo sapiens
  Payload ID: 8358
  Gene Symbol: IRF8
  Gene Name: interferon regulatory factor 8
  Uniprot ID: Q02556
  ENSP ID: ENSP00000268638
MCDRNGGRRLRQWLIEQIDSSMYPGLIWENEEKSMFRIPWKHAGKQDYNQEVDASIFKAWAVFKGKFKEGDKAEPATWKTRLRCALNKSPDFEEVTDRSQLDISEPYKVYRIVPEEEQKCKLGVATAGCVNEVTEMECGRSEIDELIKEPSVDDYMGMIKRSPSPPEACRSQLLPDWWAQQPSTGVPLVTGYTTYDAHHSAFSQMVISFYYGGKLVGQATTTCPEGCRLSLSQPGLPGTKLYGPEGLELVRFPPADAIPSERQRQVTRKLFGHLERGVLLHSSRQGVFVKRLCQGRVFCSGNAVVCKGRPNKLERDEVVQVFDTSQFFRELQQFYNSQGRLPDGRVVLCFGEEFPDMAPLRSKLILVQIEQLYVRQLAEEAGKSCGAGSVMQAPEEPPPDQVFRMFPDICASHQRSFFRENQQITV

SEQ ID NO: 41125 - protein, 152 aa, Homo sapiens
  Payload ID: 8358
  Gene Symbol: IRF8
  Gene Name: interferon regulatory factor 8
  ENSP ID: ENSP00000455048
  MOD_RES (1)..(1): Any amino acid
XAWAVFKGKFKEGDKAEPATWKTRLRCALNKSPDFEEVTDRSQLDISEPYKVYRIVPEEEQKCKLGVATAGCVNEVTEMECGRSEIDELIKESCSSSITARAGFLTAGWCCALGKSFRIWPPCAPNSFSCRLSSCMSGNWQKRLGRAVEPAL

SEQ ID NO: 41126 - protein, 222 aa, Homo sapiens
  Payload ID: 8358
  Gene Symbol: IRF8
  Gene Name: interferon regulatory factor 8
  ENSP ID: ENSP00000455452
MVISFYYGGKLVGQATTTCPEGCRLSLSQPGLPGTKLYGPEGLELVRFPPADAIPSERQRQVTRKLFGHLERGVLLHSSRQGVFVKRLCQGRVFCSGNAVVCKGRPNKLERDEVVQVFDTSQFFRELQQFYNSQGRLPDGRVVLCFGEEFPDMAPLRSKLILVQIEQLYVRQLAEEAGKSCGAGSVMQAPEEPPPDQVFRMFPDICASHQRSFFRENQQITV

SEQ ID NO: 41127 - protein, 14 aa, Homo sapiens
  Payload ID: 8358
  Gene Symbol: IRF8
  Gene Name: interferon regulatory factor 8
  ENSP ID: ENSP00000455760
MGASWWARPPPPAP

SEQ ID NO: 41128 - protein, 159 aa, Homo sapiens
  Payload ID: 8358
  Gene Symbol: IRF8
  Gene Name: interferon regulatory factor 8
  ENSP ID: ENSP00000455784
MCDRNGGRRLRQWLIEQIDSSMYPGLIWENEEKSMFRIPWKHAGKQDYNQEVDASIFKAWAVFKGKFKEGDKAEPATWKTRLRCALNKSPDFEEVTDRSQLDISEPYKVYRIVPEEEQKCKLGVATAGCVNEVTEMECGRSEIDELIKEPSVDDYMGMI

SEQ ID NO: 41129 - protein, 47 aa, Homo sapiens
  Payload ID: 8358
  Gene Symbol: IRF8
  Gene Name: interferon regulatory factor 8
  ENSP ID: ENSP00000455816
MCDRNGGRRLRQWLIEQIDSSMYPGLIWENEEKSMFRIPWKHAGKQD

SEQ ID NO: 41130 - protein, 220 aa, Homo sapiens
  Payload ID: 8358
  Gene Symbol: IRF8
  Gene Name: interferon regulatory factor 8
  ENSP ID: ENSP00000456395
MVISFYYGGKLVGQATTTCPEGCRLSLSQPGLPGTKLYGPEGLELVRFPPADAIPSERQRQVTRKLFGHLERGVLLHSSRQGVFVKRLCQGRVFCSGNAVVCKGRPNKLERDEVVQVFDTSQFFRELQQFYNSQGRLPDGRVVLCFGEEFPDMAPLRSKLILVQIEQLYVRQLAEEAGKSCGAGSVMQAPEEPPPDQVFRMFPDICASHQRSFFRENQQI

SEQ ID NO: 41131 - protein, 328 aa, Homo sapiens
  Payload ID: 8358
  Gene Symbol: IRF8
  Gene Name: interferon regulatory factor 8
  ENSP ID: ENSP00000456992
MCDRNGGRRLRQWLIEQIDSSMYPGLIWENEEKSMFRIPWKHAGKQDYNQEVDASIFKAWAVFKGKFKEGDKAEPATWKTRLRCALNKSPDFEEVTDRSQLDISEPYKVYRIVPEEEQKCKLGVATAGCVNEVTEMECGRSEIDELIKEPSVDDYMGMIKRSPSPPEACRSQLLPDWWAQQPSTGVPLVTGYTTYDAHHSAFSQMVISFYYGGKLVGQATTTCPEGCRLSLSQPGLPGTKLYGPEGLELVRFPPADAIPSERQRQVTRKLFGHLERGVLLHSSRQGVFVKRLCQGRVFCSGNAVVCKGRPNKLERDEVVQVFDTSQFF

SEQ ID NO: 41132 - protein, 126 aa, Homo sapiens
  Payload ID: 8358
  Gene Symbol: IRF8
  Gene Name: interferon regulatory factor 8
  ENSP ID: ENSP00000458047
MCDRNGGRRLRQWLIEQIDSSMYPGLIWENEEKSMFRIPWKHAGKQDYNQEVDASIFKAWAVFKGKFKEGDKAEPATWKTRLRCALNKSPDFEEVTDRSQLDISEPYKVYRIVPEEEQKCNYPLWA

SEQ ID NO: 41133 - protein, 209 aa, Homo sapiens
  Payload ID: 8359
  Gene Symbol: IRF9
  Gene Name: interferon regulatory factor 9
  ENSP ID: ENSP00000313529
EGDTGGPAVWKTRLRCALNKSSEFKEVPERGRMDVAEPYKVYQLLPPGIVSGQPGTQKVPSKRQHSSVSSERKEEEDAMQNCTLSPSVLQDSLNNEEEGASGGAVHSDIGSSSSSSSPEPQEVTDTTEAPFQGDQRSLEFLLPPEPDLVRYFQGLGPPPKFQVTLNFWEESHGSSHTPQNLITVKMEQAFARYLLEQTPEQQAAILSLV

SEQ ID NO: 41134 - protein, 393 aa, Homo sapiens
  Payload ID: 8359
  Gene Symbol: IRF9
  Gene Name: interferon regulatory factor 9
  Uniprot ID: Q00978
  ENSP ID: ENSP00000380073
MASGRARCTRKLRNWVVEQVESGQFPGVCWDDTAKTMFRIPWKHAGKQDFREDQDAAFFKAWAIFKGKYKEGDTGGPAVWKTRLRCALNKSSEFKEVPERGRMDVAEPYKVYQLLPPGIVSGQPGTQKVPSKRQHSSVSSERKEEEDAMQNCTLSPSVLQDSLNNEEEGASGGAVHSDIGSSSSSSSPEPQEVTDTTEAPFQGDQRSLEFLLPPEPDYSLLLTFIYNGRVVGEAQVQSLDCRLVAEPSGSESSMEQVLFPKPGPLEPTQRLLSQLERGILVASNPRGLFVQRLCPIPISWNAPQAPPGPGPHLLPSNECVELFRTAYFCRDLVRYFQGLGPPPKFQVTLNFWEESHGSSHTPQNLITVKMEQAFARYLLEQTPEQQAAILSLV

SEQ ID NO: 41135 - protein, 353 aa, Homo sapiens
  Payload ID: 8359
  Gene Symbol: IRF9
  Gene Name: interferon regulatory factor 9
  ENSP ID: ENSP00000453534
MDVAEPYKVYQLLPPGIVSGQPGTQKVPSKRQHSSVSSERKEEEDAMQNCTLSPSVLQDSLNNEEEGASGGAVHSDIGSSSSSSSPEPQEVTDTTEAPFQGDQRSLEFLLPPEPDYSLLLTFIYNGRVVGEAQVQSLDCRLVAEPSGSESSMEQVLFPKPGPLEPTQRLLSQLERGILVASNPRGLFVQRLCPIPISWNAPQAPPGPGPHLLPSNECVELFRTAYFCRDPPCSLCMALLRLCVAYPVWPYAQPGSYLAALLQPRQWKRWFRLGQVLSGPGPPTEVPGNTEFLGREPWLQPYSTESYHSEDGAGLCPILAGADSRAAGSHSVPGVEPGGPIFHLTSLFFLSPLK

SEQ ID NO: 41136 - protein, 178 aa, Homo sapiens
  Payload ID: 8359
  Gene Symbol: IRF9
  Gene Name: interferon regulatory factor 9
  ENSP ID: ENSP00000453540
MASGRARCTRKLRNWVVEQVESGQFPGVCWDDTAKTMFRIPWKHAGKQDFREDQDAAFFKAWAIFKGKYKEGDTGGPAVWKTRLRCALNKSSEFKEVPERGRMDVAEPYKVYQLLPPGIVSGQPGTQKVPSKRQHSSVSSERKEEEDAMQNCTLSPSVLQDSLNNLQTQLRPPFKGIR

SEQ ID NO: 41137 - protein, 50 aa, Homo sapiens
  Payload ID: 8359
  Gene Symbol: IRF9
  Gene Name: interferon regulatory factor 9
  ENSP ID: ENSP00000453974
MASGRARCTRKLRNWVVEQVESGQFPGVCWDDTAKTMFRIPWKHAGLGNI

SEQ ID NO: 41138 - protein, 50 aa, Homo sapiens; identical to SEQ ID NO: 41137
  Payload ID: 8359
  Gene Symbol: IRF9
  Gene Name: interferon regulatory factor 9
  ENSP ID: ENSP00000454078

SEQ ID NO: 41139 - protein, 267 aa, Homo sapiens
  Payload ID: 8359
  Gene Symbol: IRF9
  Gene Name: interferon regulatory factor 9
  ENSP ID: ENSP00000454095
MASGRARCTRKLRNWVVEQVESGQFPGVCWDDTAKTMFRIPWKHAGKQDFREDQDAAFFKAWAIFKGKYKEGDTGGPAVWKTRLRCALNKSSEFKEVPERGRMDVAEPYKVYQLLPPGIVSGQPGTQKVPSKRQHSSVSSERKEEEDAMQNCTLSPSVLQDSLNNEEEGASGGAVHSDIGSSSSSSSPEPQEVTDTTEAPFQGDQRSLEFLLPPEPAPGRAVLSPDYSLLLTFIYNGRVVGEAQVQSLDCRLVAEPSGSESSMEQVL

SEQ ID NO: 41140 - protein, 181 aa, Homo sapiens
  Payload ID: 8360
  Gene Symbol: ISG20
  Gene Name: interferon stimulated exonuclease gene 20kDa
  Uniprot ID: Q96AZ6
  ENSP ID: ENSP00000306565
MAGSREVVAMDCEMVGLGPHRESGLARCSLVNVHGAVLYDKFIRPEGEITDYRTRVSGVTPQHMVGATPFAVARLEILQLLKGKLVVGHDLKHDFQALKEDMSGYTIYDTSTDRLLWREAKLDHCRRVSLRVLSERLLHKSIQNSLLGHSSVEDARATMELYQISQRIRARRGLPRLAVSD

SEQ ID NO: 41141 - protein, 87 aa, Homo sapiens
  Payload ID: 8360
  Gene Symbol: ISG20
  Gene Name: interferon stimulated exonuclease gene 20kDa
  ENSP ID: ENSP00000368526
MAGSREVVAMDCEMVGLGPHRESGLARCSLVNVHGAVLYDKFIRPEGEITDYRTRVSGVTPQHMVGATPFAVARLEVPFPSSPTAAE

SEQ ID NO: 41142 - protein, 181 aa, Homo sapiens; identical to SEQ ID NO: 41140
  Payload ID: 8360
  Gene Symbol: ISG20
  Gene Name: interferon stimulated exonuclease gene 20kDa
  Uniprot ID: Q96AZ6
  ENSP ID: ENSP00000453638

SEQ ID NO: 41143 - protein, 155 aa, Homo sapiens
  Payload ID: 8360
  Gene Symbol: ISG20
  Gene Name: interferon stimulated exonuclease gene 20kDa
  ENSP ID: ENSP00000453666
MAGSREVVAMDCEMVGLGPHRESGLARCSLVNVHGAVLYDKFIRPEGEITDYRTRVSGVTPQHMVGATPFAVARLEALKEDMSGYTIYDTSTDRLLWREAKLDHCRRVSLRVLSERLLHKSIQNSLLGHSSVEDARATMELYQISQRIRARRGLP

SEQ ID NO: 41144 - protein, 353 aa, Homo sapiens
  Payload ID: 8361
  Gene Symbol: ISG20L2
  Gene Name: interferon stimulated exonuclease gene 20kDa-like 2
  Uniprot ID: Q9H9L3
  ENSP ID: ENSP00000323424
MSTLLLNLDFGEPPPKKALEGNAKHRNFVKKRRLLERRGFLSKKNQPPSKAPKLHSEPSKKGETPTVDGTWKTPSFPKKKTAASSNGSGQPLDKKAAVSWLTPAPSKKADSVAAKVDLLGEFQSALPKINSHPTRSQKKSSQKKSSKKNHPQKNAPQNSTQAHSENKCSGASQKLPRKMVAIDCEMVGTGPKGHVSSLARCSIVNYNGDVLYDEYILPPCHIVDYRTRWSGIRKQHMVNATPFKIARGQILKILTGKIVVGHAIHNDFKALQYFHPKSLTRDTSHIPPLNRKADCPENATMSLKHLTKKLLNRDIQVGKSGHSSVEDAQATMELYKLVEVEWEEHLARNPPTD

SEQ ID NO: 41145 - protein, 353 aa, Homo sapiens; identical to SEQ ID NO: 41144
  Payload ID: 8361
  Gene Symbol: ISG20L2
  Gene Name: interferon stimulated exonuclease gene 20kDa-like 2
  Uniprot ID: Q9H9L3
  ENSP ID: ENSP00000357202

SEQ ID NO: 41146 - protein, 189 aa, Homo sapiens
  Payload ID: 8362
  Gene Symbol: IFNA1
  Gene Name: interferon, alpha 1
  Uniprot ID: P01562
  ENSP ID: ENSP00000276927
MASPFALLMVLVVLSCKSSCSLGCDLPETHSLDNRRTLMLLAQMSRISPSSCLMDRHDFGFPQEEFDGNQFQKAPAISVLHELIQQIFNLFTTKDSSAAWDEDLLDKFCTELYQQLNDLEACVMQEERVGETPLMNADSILAVKKYFRRITLYLTEKKYSPCAWEVVRAEIMRSLSLSTNLQERLRRKE

SEQ ID NO: 41147 - protein, 189 aa, Homo sapiens
  Payload ID: 8362
  Gene Symbol: IFNA1
  Gene Name: interferon, alpha 1
  ENSP ID: ENSP00000485003
MALTFYLLVALVVLSYKSFSSLGCDLPQTHSLGNRRALILLAQMRRISPFSCLKDRHDFEFPQEEFDDKQFQKAQAISVLHEMIQQTFNLFSTKDSSAAWDEDLLDKFCTELYQQLNDLEACVMQEERVGETPLMNADSILAVKKYFRRITLYLTEKKYSPCAWEVVRAEIMRSLSLSTNLQERLRRKE

SEQ ID NO: 41148 - protein, 189 aa, Homo sapiens
  Payload ID: 8363
  Gene Symbol: IFNA10
  Gene Name: interferon, alpha 10
  Uniprot ID: P01566
  ENSP ID: ENSP00000369566
MALSFSLLMAVLVLSYKSICSLGCDLPQTHSLGNRRALILLGQMGRISPFSCLKDRHDFRIPQEEFDGNQFQKAQAISVLHEMIQQTFNLFSTEDSSAAWEQSLLEKFSTELYQQLNDLEACVIQEVGVEETPLMNEDSILAVRKYFQRITLYLIERKYSPCAWEVVRAEIMRSLSFSTNLQKRLRRKD

SEQ ID NO: 41149 - protein, 189 aa, Homo sapiens
  Payload ID: 8364
  Gene Symbol: IFNA13
  Gene Name: interferon, alpha 13
  Uniprot ID: P01562
  ENSP ID: ENSP00000394494
MASPFALLMALVVLSCKSSCSLGCDLPETHSLDNRRTLMLLAQMSRISPSSCLMDRHDFGFPQEEFDGNQFQKAPAISVLHELIQQIFNLFTTKDSSAAWDEDLLDKFCTELYQQLNDLEACVMQEERVGETPLMNADSILAVKKYFRRITLYLTEKKYSPCAWEVVRAEIMRSLSLSTNLQERLRRKE

SEQ ID NO: 41150 - protein, 190 aa, Homo sapiens
  Payload ID: 8364
  Gene Symbol: IFNA13
  Gene Name: interferon, alpha 13
  ENSP ID: ENSP00000480467
MMASPFALLMALVVLSCKSSCSLGCDLPETHSLDNRRTLMLLAQMSRISPSSCLMDRHDFGFPQEEFDGNQFQKAPAISVLHELIQQIFNLFTTKDSSAAWDEDLLDKFCTELYQQLNDLEACVMQEERVGETPLMNADSILAVKKYFRRITLYLTEKKYSPCAWEVVRAEIMRSLSLSTNLQERLRRKE

SEQ ID NO: 41151 - protein, 189 aa, Homo sapiens
  Payload ID: 8365
  Gene Symbol: IFNA14
  Gene Name: interferon, alpha 14
  Uniprot ID: P01570
  ENSP ID: ENSP00000369571
MALPFALMMALVVLSCKSSCSLGCNLSQTHSLNNRRTLMLMAQMRRISPFSCLKDRHDFEFPQEEFDGNQFQKAQAISVLHEMMQQTFNLFSTKNSSAAWDETLLEKFYIELFQQMNDLEACVIQEVGVEETPLMNEDSILAVKKYFQRITLYLMEKKYSPCAWEVVRAEIMRSLSFSTNLQKRLRRKD

SEQ ID NO: 41152 - protein, 189 aa, Homo sapiens
  Payload ID: 8366
  Gene Symbol: IFNA16
  Gene Name: interferon, alpha 16
  Uniprot ID: P05015
  ENSP ID: ENSP00000369564
MALSFSLLMAVLVLSYKSICSLGCDLPQTHSLGNRRALILLAQMGRISHFSCLKDRYDFGFPQEVFDGNQFQKAQAISAFHEMIQQTFNLFSTKDSSAAWDETLLDKFYIELFQQLNDLEACVTQEVGVEEIALMNEDSILAVRKYFQRITLYLMGKKYSPCAWEVVRAEIMRSFSFSTNLQKGLRRKD

SEQ ID NO: 41153 - protein, 189 aa, Homo sapiens
  Payload ID: 8367
  Gene Symbol: IFNA17
  Gene Name: interferon, alpha 17
  Uniprot ID: P01571
  ENSP ID: ENSP00000411940
MALSFSLLMAVLVLSYKSICSLGCDLPQTHSLGNRRALILLAQMGRISPFSCLKDRHDFGLPQEEFDGNQFQKTQAISVLHEMIQQTFNLFSTEDSSAAWEQSLLEKFSTELYQQLNNLEACVIQEVGMEETPLMNEDSILAVRKYFQRITLYLTEKKYSPCAWEVVRAEIMRSLSFSTNLQKILRRKD

SEQ ID NO: 41154 - protein, 188 aa, Homo sapiens
  Payload ID: 8368
  Gene Symbol: IFNA2
  Gene Name: interferon, alpha 2
  Uniprot ID: P01563
  ENSP ID: ENSP00000369554
MALTFALLVALLVLSCKSSCSVGCDLPQTHSLGSRRTLMLLAQMRRISLFSCLKDRHDFGFPQEEFGNQFQKAETIPVLHEMIQQIFNLFSTKDSSAAWDETLLDKFYTELYQQLNDLEACVIQGVGVTETPLMKEDSILAVRKYFQRITLYLKEKKYSPCAWEVVRAEIMRSFSLSTNLQESLRSKE

SEQ ID NO: 41155 - protein, 189 aa, Homo sapiens
  Payload ID: 8369
  Gene Symbol: IFNA21
  Gene Name: interferon, alpha 21
  Uniprot ID: P01568
  ENSP ID: ENSP00000369574
MALSFSLLMAVLVLSYKSICSLGCDLPQTHSLGNRRALILLAQMGRISPFSCLKDRHDFGFPQEEFDGNQFQKAQAISVLHEMIQQTFNLFSTKDSSATWEQSLLEKFSTELNQQLNDLEACVIQEVGVEETPLMNVDSILAVKKYFQRITLYLTEKKYSPCAWEVVRAEIMRSFSLSKIFQERLRRKE

SEQ ID NO: 41156 - protein, 189 aa, Homo sapiens
  Payload ID: 8370
  Gene Symbol: IFNA4
  Gene Name: interferon, alpha 4
  Uniprot ID: P05014
  ENSP ID: ENSP00000412897
MALSFSLLMAVLVLSYKSICSLGCDLPQTHSLGNRRALILLAQMGRISHFSCLKDRHDFGFPEEEFDGHQFQKAQAISVLHEMIQQTFNLFSTEDSSAAWEQSLLEKFSTELYQQLNDLEACVIQEVGVEETPLMNEDSILAVRKYFQRITLYLTEKKYSPCAWEVVRAEIMRSLSFSTNLQKRLRRKD

SEQ ID NO: 41157 - protein, 189 aa, Homo sapiens
  Payload ID: 8370
  Gene Symbol: IFNA4
  Gene Name: interferon, alpha 4
  ENSP ID: ENSP00000482906
MALSFSLLMAVLVLSYKSICSLGCDLPQTHSLGNRRALILLAQMGRISPFSCLKDRHDFGLPQEEFDGNQFQKAQAISVLHEMIQQTFNLFSTEDSSAAWEQSLLEKFSTELYQQLNDLEACVIQEVGVEETPLMNEDSILAVRKYFQRITLYLTEKKYSPCAWEVVRAEIMRSLSFSTNLQKRLRRKD

SEQ ID NO: 41158 - protein, 189 aa, Homo sapiens
  Payload ID: 8371
  Gene Symbol: IFNA5
  Gene Name: interferon, alpha 5
  Uniprot ID: P01569
  ENSP ID: ENSP00000484479
MALPFVLLMALVVLNCKSICSLGCDLPQTHSLSNRRTLMIMAQMGRISPFSCLKDRHDFGFPQEEFDGNQFQKAQAISVLHEMIQQTFNLFSTKDSSATWDETLLDKFYTELYQQLNDLEACMMQEVGVEDTPLMNVDSILTVRKYFQRITLYLTEKKYSPCAWEVVRAEIMRSFSLSANLQERLRRKE

SEQ ID NO: 41159 - protein, 190 aa, Homo sapiens
  Payload ID: 8372
  Gene Symbol: IFNA6
  Gene Name: interferon, alpha 6
  ENSP ID: ENSP00000259555
TMALPFALLMALVVLSCKSSCSLDCDLPQTHSLGHRRTMMLLAQMRRISLFSCLKDRHDFRFPQEEFDGNQFQKAEAISVLHEVIQQTFNLFSTKDSSVAWDERLLDKLYTELYQQLNDLEACVMQEVWVGGTPLMNEDSILAVRKYFQRITLYLTEKKYSPCAWEVVRAEIMRSFSSSRNLQERLRRKE

SEQ ID NO: 41160 - protein, 189 aa, Homo sapiens
  Payload ID: 8372
  Gene Symbol: IFNA6
  Gene Name: interferon, alpha 6
  Uniprot ID: P05013
  ENSP ID: ENSP00000369558
MALPFALLMALVVLSCKSSCSLDCDLPQTHSLGHRRTMMLLAQMRRISLFSCLKDRHDFRFPQEEFDGNQFQKAEAISVLHEVIQQTFNLFSTKDSSVAWDERLLDKLYTELYQQLNDLEACVMQEVWVGGTPLMNEDSILAVRKYFQRITLYLTEKKYSPCAWEVVRAEIMRSFSSSRNLQERLRRKE

SEQ ID NO: 41161 - protein, 189 aa, Homo sapiens
  Payload ID: 8373
  Gene Symbol: IFNA7
  Gene Name: interferon, alpha 7
  Uniprot ID: P01567
  ENSP ID: ENSP00000239347
MARSFSLLMVVLVLSYKSICSLGCDLPQTHSLRNRRALILLAQMGRISPFSCLKDRHEFRFPEEEFDGHQFQKTQAISVLHEMIQQTFNLFSTEDSSAAWEQSLLEKFSTELYQQLNDLEACVIQEVGVEETPLMNEDFILAVRKYFQRITLYLMEKKYSPCAWEVVRAEIMRSFSFSTNLKKGLRRKD

SEQ ID NO: 41162 - protein, 189 aa, Homo sapiens
  Payload ID: 8374
  Gene Symbol: IFNA8
  Gene Name: interferon, alpha 8
  Uniprot ID: P32881
  ENSP ID: ENSP00000369553
MALTFYLLVALVVLSYKSFSSLGCDLPQTHSLGNRRALILLAQMRRISPFSCLKDRHDFEFPQEEFDDKQFQKAQAISVLHEMIQQTFNLFSTKDSSAALDETLLDEFYIELDQQLNDLESCVMQEVGVIESPLMYEDSILAVRKYFQRITLYLTEKKYSSCAWEVVRAEIMRSFSLSINLQKRLKSKE

SEQ ID NO: 41163 - protein, 40 aa, Homo sapiens
  Payload ID: 8375
  Gene Symbol: IFI27
  Gene Name: interferon, alpha-inducible protein 27
  ENSP ID: ENSP00000451987
MEASALTSSAVTSVAKVVRVASGSAVVLPLARIATVVIGG

SEQ ID NO: 41164 - protein, 122 aa, Homo sapiens
  Payload ID: 8375
  Gene Symbol: IFI27
  Gene Name: interferon, alpha-inducible protein 27
  ENSP ID: ENSP00000477753
MEASALTSSAVTSVAKVVRVASGSAVVLPLARIATVVIGGVVAMAAVPMVLSAMGFTAAGIASSSIAAKMMSAAAIANGGGVASGSLVATLQSLGATGLSGLTKFILGSIGSAIAAVIARFY

SEQ ID NO: 41165 - protein, 96 aa, Homo sapiens
  Payload ID: 8375
  Gene Symbol: IFI27
  Gene Name: interferon, alpha-inducible protein 27
  ENSP ID: ENSP00000478718
MEASALTSSAVTSVAKVVRVASGSAVVLPLARIATVVIGGVVAMAAVPMVLSAMGFTAAGIASSSIAAKMMSAAAIANGGGVASGSLVATLQSLGA

SEQ ID NO: 41166 - protein, 65 aa, Homo sapiens
  Payload ID: 8375
  Gene Symbol: IFI27
  Gene Name: interferon, alpha-inducible protein 27
  ENSP ID: ENSP00000479250
MEASALTSSAVTSVAKVVRVASGSAVVLPLARIATVVIGGVVAMAAVPMVLSAMGFTAAGIASSS

SEQ ID NO: 41167 - protein, 79 aa, Homo sapiens
  Payload ID: 8375
  Gene Symbol: IFI27
  Gene Name: interferon, alpha-inducible protein 27
  ENSP ID: ENSP00000482635
MAAVPMVLSAMGFTAAGIASSSIAAKMMSAAAIANGGGVASGSLVATLQSLGATGLSGLTKFILGSIGSAIAAVIARFY

SEQ ID NO: 41168 - protein, 119 aa, Homo sapiens
  Payload ID: 8375
  Gene Symbol: IFI27
  Gene Name: interferon, alpha-inducible protein 27
  ENSP ID: ENSP00000482832
MEASALTSSAVTSVAKVVRVASGSAVVLPLARIATVVIGGVAAVPMVLSAMGFTAAGIASSSIAAKMMSAAAIANGGGVASGSLVATLQSLGATGLSGLTKFILGSIGSAIAAVIARFY

SEQ ID NO: 41169 - protein, 110 aa, Homo sapiens
  Payload ID: 8375
  Gene Symbol: IFI27
  Gene Name: interferon, alpha-inducible protein 27
  ENSP ID: ENSP00000483072
  MOD_RES (1)..(1): Any amino acid
XQDCYSCDWRSCGHGGCAHGAQCHGLHCGGNRLVLHSSQDDVRGGHCQWGWSCLGQPCGYSAVTGVSLREMEEGGKEPKPGTVHSGRLSPKQICWVTWGVSSPLGCSLLP

SEQ ID NO: 41170 - protein, 79 aa, Homo sapiens; identical to SEQ ID NO: 41167
  Payload ID: 8375
  Gene Symbol: IFI27
  Gene Name: interferon, alpha-inducible protein 27
  ENSP ID: ENSP00000483291

SEQ ID NO: 41171 - protein, 60 aa, Homo sapiens
  Payload ID: 8375
  Gene Symbol: IFI27
  Gene Name: interferon, alpha-inducible protein 27
  ENSP ID: ENSP00000483404
MEASALTSSAVTSVAKVVRVASGSAVVLPLARIATVVIGGVVAMAAVPMVLSAMGFTAAG

SEQ ID NO: 41172 - protein, 122 aa, Homo sapiens; identical to SEQ ID NO: 41164
  Payload ID: 8375
  Gene Symbol: IFI27
  Gene Name: interferon, alpha-inducible protein 27
  ENSP ID: ENSP00000483430

SEQ ID NO: 41173 - protein, 122 aa, Homo sapiens; identical to SEQ ID NO: 41164
  Payload ID: 8375
  Gene Symbol: IFI27
  Gene Name: interferon, alpha-inducible protein 27
  ENSP ID: ENSP00000483498

SEQ ID NO: 41174 - protein, 122 aa, Homo sapiens; identical to SEQ ID NO: 41164
  Payload ID: 8375
  Gene Symbol: IFI27
  Gene Name: interferon, alpha-inducible protein 27
  ENSP ID: ENSP00000483932

SEQ ID NO: 41175 - protein, 112 aa, Homo sapiens
  Payload ID: 8375
  Gene Symbol: IFI27
  Gene Name: interferon, alpha-inducible protein 27
  ENSP ID: ENSP00000483954
MEASALTSSAVTSVAKVVRVASGSAVVLPLVVAMAAVPMVLSAMGFTAAGIASSSIAAKMMSAAAIANGGGVASGSLVATLQSLGATGLSGLTKFILGSIGSAIAAVIARFY

SEQ ID NO: 41176 - protein, 122 aa, Homo sapiens; identical to SEQ ID NO: 41164
  Payload ID: 8375
  Gene Symbol: IFI27
  Gene Name: interferon, alpha-inducible protein 27
  ENSP ID: ENSP00000484089

SEQ ID NO: 41177 - protein, 119 aa, Homo sapiens; identical to SEQ ID NO: 41168
  Payload ID: 8375
  Gene Symbol: IFI27
  Gene Name: interferon, alpha-inducible protein 27
  ENSP ID: ENSP00000484970

SEQ ID NO: 41178 - protein, 65 aa, Homo sapiens; identical to SEQ ID NO: 41166
  Payload ID: 8375
  Gene Symbol: IFI27
  Gene Name: interferon, alpha-inducible protein 27
  ENSP ID: ENSP00000486139

SEQ ID NO: 41179 - protein, 112 aa, Homo sapiens; identical to SEQ ID NO: 41175
  Payload ID: 8375
  Gene Symbol: IFI27
  Gene Name: interferon, alpha-inducible protein 27
  ENSP ID: ENSP00000486224

SEQ ID NO: 41180 - protein, 122 aa, Homo sapiens; identical to SEQ ID NO: 41164
  Payload ID: 8375
  Gene Symbol: IFI27
  Gene Name: interferon, alpha-inducible protein 27
  ENSP ID: ENSP00000486608

SEQ ID NO: 41181 - protein, 60 aa, Homo sapiens; identical to SEQ ID NO: 41171
  Payload ID: 8375
  Gene Symbol: IFI27
  Gene Name: interferon, alpha-inducible protein 27
  ENSP ID: ENSP00000487246

SEQ ID NO: 41182 - protein, 110 aa, Homo sapiens; identical to SEQ ID NO: 41169
  Payload ID: 8375
  Gene Symbol: IFI27
  Gene Name: interferon, alpha-inducible protein 27
  ENSP ID: ENSP00000487416
  MOD_RES (1)..(1): Any amino acid

SEQ ID NO: 41183 - protein, 104 aa, Homo sapiens
  Payload ID: 8376
  Gene Symbol: IFI27L1
  Gene Name: interferon, alpha-inducible protein 27-like 1
  Uniprot ID: Q96BM0
  ENSP ID: ENSP00000376824
MGKESGWDSGRAAVAAVVGGVVAVGTVLVALSAMGFTSVGIAASSIAAKMMSTAAIANGGGVAAGSLVAILQSVGAAGLSVTSKVIGGFAGTALGAWLGSPPSS

SEQ ID NO: 41184 - protein, 50 aa, Homo sapiens
  Payload ID: 8376
  Gene Symbol: IFI27L1
  Gene Name: interferon, alpha-inducible protein 27-like 1
  ENSP ID: ENSP00000450463
MGKESGWDSGRAAVAAVVGGGAAGLSVTSKVIGGFAGTALGAWLGSPPSS

SEQ ID NO: 41185 - protein, 92 aa, Homo sapiens
  Payload ID: 8376
  Gene Symbol: IFI27L1
  Gene Name: interferon, alpha-inducible protein 27-like 1
  ENSP ID: ENSP00000450620
MGKESGWDSGRAAVAAVVGGVVAVGTVLVALSAMGFTSVGIAASSIAAKMMSTAAIANGGGVAAGSLVAILQSVGECSGQDDQSQEMIQPRG

SEQ ID NO: 41186 - protein, 105 aa, Homo sapiens
  Payload ID: 8376
  Gene Symbol: IFI27L1
  Gene Name: interferon, alpha-inducible protein 27-like 1
  ENSP ID: ENSP00000451043
MRDAEGGSPRIRVEAHRGEGANHGKGEWMGLRQGCCSSCGRRSCGCGDCARGAQCHGLHLSRNRRILHSSQDDVYSSHCQRGRSCCWQSGGYSAVSGGSWTLCDI

SEQ ID NO: 41187 - protein, 91 aa, Homo sapiens
  Payload ID: 8376
  Gene Symbol: IFI27L1
  Gene Name: interferon, alpha-inducible protein 27-like 1
  ENSP ID: ENSP00000451459
MVRLDISEGRAAVAAVVGGVVAVGTVLVALSAMGFTSVGIAASSIAAKMMSTAAIANGGGVAAGSLVAILQSVGECSGQDDQSQEMIQPRG

SEQ ID NO: 41188 - protein, 95 aa, Homo sapiens
  Payload ID: 8376
  Gene Symbol: IFI27L1
  Gene Name: interferon, alpha-inducible protein 27-like 1
  ENSP ID: ENSP00000451608
MVRLDISEGRAAVAAVVGGVVAVGTVLVALSAMGFTSVGIAASSIAAKMMSTAAIANGGGVAAGSLVAILQSVGAAGLSVTSKVIGGFAGTALGA

SEQ ID NO: 41189 - protein, 39 aa, Homo sapiens
  Payload ID: 8376
  Gene Symbol: IFI27L1
  Gene Name: interferon, alpha-inducible protein 27-like 1
  ENSP ID: ENSP00000451676
MGKESGWDSGAAGLSVTSKVIGGFAGTALGAWLGSPPSS

SEQ ID NO: 41190 - protein, 104 aa, Homo sapiens; identical to SEQ ID NO: 41183
  Payload ID: 8376
  Gene Symbol: IFI27L1
  Gene Name: interferon, alpha-inducible protein 27-like 1
  Uniprot ID: Q96BM0
  ENSP ID: ENSP00000451851

SEQ ID NO: 41191 - protein, 50 aa, Homo sapiens; identical to SEQ ID NO: 41184
  Payload ID: 8376
  Gene Symbol: IFI27L1
  Gene Name: interferon, alpha-inducible protein 27-like 1
  ENSP ID: ENSP00000451889

SEQ ID NO: 41192 - protein, 93 aa, Homo sapiens
  Payload ID: 8376
  Gene Symbol: IFI27L1
  Gene Name: interferon, alpha-inducible protein 27-like 1
  ENSP ID: ENSP00000452226
MVRLDISEGRAAVAAVVGGVVAVGTVLVALSAMGFTSVGIAASSIAAKMMSTAAIANGGGVAAGSLVAILQSVGAAGLSVTSKVIGGFAGTAL

SEQ ID NO: 41193 - protein, 104 aa, Homo sapiens; identical to SEQ ID NO: 41183
  Payload ID: 8376
  Gene Symbol: IFI27L1
  Gene Name: interferon, alpha-inducible protein 27-like 1
  Uniprot ID: Q96BM0
  ENSP ID: ENSP00000480235

SEQ ID NO: 41194 - protein, 91 aa, Homo sapiens; identical to SEQ ID NO: 41187
  Payload ID: 8376
  Gene Symbol: IFI27L1
  Gene Name: interferon, alpha-inducible protein 27-like 1
  ENSP ID: ENSP00000485767

SEQ ID NO: 41195 - protein, 104 aa, Homo sapiens; identical to SEQ ID NO: 41183
  Payload ID: 8376
  Gene Symbol: IFI27L1
  Gene Name: interferon, alpha-inducible protein 27-like 1
  Uniprot ID: Q96BM0
  ENSP ID: ENSP00000485930

SEQ ID NO: 41196 - protein, 50 aa, Homo sapiens; identical to SEQ ID NO: 41184
  Payload ID: 8376
  Gene Symbol: IFI27L1
  Gene Name: interferon, alpha-inducible protein 27-like 1
  ENSP ID: ENSP00000486527

SEQ ID NO: 41197 - protein, 39 aa, Homo sapiens; identical to SEQ ID NO: 41189
  Payload ID: 8376
  Gene Symbol: IFI27L1
  Gene Name: interferon, alpha-inducible protein 27-like 1
  ENSP ID: ENSP00000486785

SEQ ID NO: 41198 - protein, 50 aa, Homo sapiens; identical to SEQ ID NO: 41184
  Payload ID: 8376
  Gene Symbol: IFI27L1
  Gene Name: interferon, alpha-inducible protein 27-like 1
  ENSP ID: ENSP00000487076

SEQ ID NO: 41199 - protein, 95 aa, Homo sapiens; identical to SEQ ID NO: 41188
  Payload ID: 8376
  Gene Symbol: IFI27L1
  Gene Name: interferon, alpha-inducible protein 27-like 1
  ENSP ID: ENSP00000487181

SEQ ID NO: 41200 - protein, 92 aa, Homo sapiens; identical to SEQ ID NO: 41185
  Payload ID: 8376
  Gene Symbol: IFI27L1
  Gene Name: interferon, alpha-inducible protein 27-like 1
  ENSP ID: ENSP00000487242

SEQ ID NO: 41201 - protein, 93 aa, Homo sapiens; identical to SEQ ID NO: 41192
  Payload ID: 8376
  Gene Symbol: IFI27L1
  Gene Name: interferon, alpha-inducible protein 27-like 1
  ENSP ID: ENSP00000487394

SEQ ID NO: 41202 - protein, 105 aa, Homo sapiens; identical to SEQ ID NO: 41186
  Payload ID: 8376
  Gene Symbol: IFI27L1
  Gene Name: interferon, alpha-inducible protein 27-like 1
  ENSP ID: ENSP00000487514

SEQ ID NO: 41203 - protein, 130 aa, Homo sapiens
  Payload ID: 8377
  Gene Symbol: IFI27L2
  Gene Name: interferon, alpha-inducible protein 27-like 2
  Uniprot ID: Q9H2X8
  ENSP ID: ENSP00000238609
MMKRAAAAAVGGALAVGAVPVVLSAMGFTGAGIAASSIAAKMMSAAAIANGGGVSAGSLVATLQSVGAAGLSTSSNILLASVGSVLGACLGNSPSSSLPAEPEAKEDEARENVPQGEPPKPPLKSEKHEE

SEQ ID NO: 41204 - protein, 105 aa, Homo sapiens
  Payload ID: 8377
  Gene Symbol: IFI27L2
  Gene Name: interferon, alpha-inducible protein 27-like 2
  ENSP ID: ENSP00000451717
MGFTGAGIAASSIAAKMMSAAAIANGGGVSAGSLVATLQSVGAAGLSTSSNILLASVGSVLGACLGNSPSSSLPAEPEAKEDEARENVPQGEPPKPPLKSEKHEE

SEQ ID NO: 41205 - protein, 130 aa, Homo sapiens; identical to SEQ ID NO: 41203
  Payload ID: 8377
  Gene Symbol: IFI27L2
  Gene Name: interferon, alpha-inducible protein 27-like 2
  Uniprot ID: Q9H2X8
  ENSP ID: ENSP00000482521

SEQ ID NO: 41206 - protein, 105 aa, Homo sapiens; identical to SEQ ID NO: 41204
  Payload ID: 8377
  Gene Symbol: IFI27L2
  Gene Name: interferon, alpha-inducible protein 27-like 2
  ENSP ID: ENSP00000487453

SEQ ID NO: 41207 - protein, 138 aa, Homo sapiens
  Payload ID: 8378
  Gene Symbol: IFI6
  Gene Name: interferon, alpha-inducible protein 6
  Uniprot ID: P09912
  ENSP ID: ENSP00000342513
MRQKAVSLFLCYLLLFTCSGVEAGENAGKDAGKKKCSESSDSGSGFWKALTFMAVGGGLAVAGLPALGFTGAGIAANSVAASLMSWSAILNGGGVPAGGLVATLQSLGAGGSSVVIGNIGALMGYATHKYLDSEEDEE

SEQ ID NO: 41208 - protein, 130 aa, Homo sapiens
  Payload ID: 8378
  Gene Symbol: IFI6
  Gene Name: interferon, alpha-inducible protein 6
  Uniprot ID: P09912
  ENSP ID: ENSP00000354736
MRQKAVSLFLCYLLLFTCSGVEAGKKKCSESSDSGSGFWKALTFMAVGGGLAVAGLPALGFTGAGIAANSVAASLMSWSAILNGGGVPAGGLVATLQSLGAGGSSVVIGNIGALMGYATHKYLDSEEDEE

SEQ ID NO: 41209 - protein, 134 aa, Homo sapiens
  Payload ID: 8378
  Gene Symbol: IFI6
  Gene Name: interferon, alpha-inducible protein 6
  Uniprot ID: P09912
  ENSP ID: ENSP00000355152
MRQKAVSLFLCYLLLFTCSGVEAGENAGKKKCSESSDSGSGFWKALTFMAVGGGLAVAGLPALGFTGAGIAANSVAASLMSWSAILNGGGVPAGGLVATLQSLGAGGSSVVIGNIGALMGYATHKYLDSEEDEE

SEQ ID NO: 41210 - protein, 187 aa, Homo sapiens
  Payload ID: 8379
  Gene Symbol: IFNB1
  Gene Name: interferon, beta 1, fibroblast
  Uniprot ID: P01574
  ENSP ID: ENSP00000369581
MTNKCLLQIALLLCFSTTALSMSYNLLGFLQRSSNFQCQKLLWQLNGRLEYCLKDRMNFDIPEEIKQLQQFQKEDAALTIYEMLQNIFAIFRQDSSSTGWNETIVENLLANVYHQINHLKTVLEEKLEKEDFTRGKLMSSLHLKRYYGRILHYLKAKEYSHCAWTIVRVEILRNFYFINRLTGYLRN

SEQ ID NO: 41211 - protein, 208 aa, Homo sapiens
  Payload ID: 8380
  Gene Symbol: IFNE
  Gene Name: interferon, epsilon
  Uniprot ID: Q86WN2
  ENSP ID: ENSP00000418018
MIIKHFFGTVLVLLASTTIFSLDLKLIIFQQRQVNQESLKLLNKLQTLSIQQCLPHRKNFLLPQKSLSPQQYQKGHTLAILHEMLQQIFSLFRANISLDGWEENHTEKFLIQLHQQLEYLEALMGLEAEKLSGTLGSDNLRLQVKMYFRRIHDYLENQDYSTCAWAIVQVEISRCLFFVFSLTEKLSKQGRPLNDMKQELTTEFRSPR

SEQ ID NO: 41212 - protein, 166 aa, Homo sapiens
  Payload ID: 8381
  Gene Symbol: IFNG
  Gene Name: interferon, gamma
  Uniprot ID: P01579
  ENSP ID: ENSP00000229135
MKYTSYILAFQLCIVLGSLGCYCQDPYVKEAENLKKYFNAGHSDVADNGTLFLGILKNWKEESDRKIMQSQIVSFYFKLFKNFKDDQSIQKSVETIKEDMNVKFFNSNKKKRDDFEKLTNYSVTDLNVQRKAIHELIQVMAELSPAAKTGKRKRSQMLFRGRRASQ

SEQ ID NO: 41213 - protein, 785 aa, Homo sapiens
  Payload ID: 8382
  Gene Symbol: IFI16
  Gene Name: interferon, gamma-inducible protein 16
  Uniprot ID: Q16666
  ENSP ID: ENSP00000295809
MGKKYKNIVLLKGLEVINDYHFRMVKSLLSNDLKLNLKMREEYDKIQIADLMEEKFRGDAGLGKLIKIFEDIPTLEDLAETLKKEKLKVKGPALSRKRKKEVDATSPAPSTSSTVKTEGAEATPGAQKRKKSTKEKAGPKGSKVSEEQTQPPSPAGAGMSTAMGRSPSPKTSLSAPPNSSSTENPKTVAKCQVTPRRNVLQKRPVIVKVLSTTKPFEYETPEMEKKIMFHATVATQTQFFHVKVLNTSLKEKFNGKKIIIISDYLEYDSLLEVNEESTVSEAGPNQTFEVPNKIINRAKETLKIDILHKQASGNIVYGVFMLHKKTVNQKTTIYEIQDDRGKMDVVGTGQCHNIPCEEGDKLQLFCFRLRKKNQMSKLISEMHSFIQIKKKTNPRNNDPKSMKLPQEQRQLPYPSEASTTFPESHLRTPQMPPTTPSSSFFTKKSEDTISKMNDFMRMQILKEGSHFPGPFMTSIGPAESHPHTPQMPPSTPSSSFLTTKSEDTISKMNDFMRMQILKEGSHFPGPFMTSIGPAESHPHTPQMPPSTPSSSFLTTLKPRLKTEPEEVSIEDSAQSDLKEVMVLNATESFVYEPKEQKKMFHATVATENEVFRVKVFNIDLKEKFTPKKIIAIANYVCRNGFLEVYPFTLVADVNADRNMEIPKGLIRSASVTPKINQLCSQTKGSFVNGVFEVHKKNVRGEFTYYEIQDNTGKMEVVVHGRLTTINCEEGDKLKLTCFELAPKSGNTGELRSVIHSHIKVIKTRKNKKDILNPDSSMETSPDFFF

SEQ ID NO: 41214 - protein, 243 aa, Homo sapiens [sequence omitted]

SEQ ID NO: 41215 - protein, 729 aa, Homo sapiens
  Payload ID: 8382
  Gene Symbol: IFI16
  Gene Name: interferon, gamma-inducible protein 16
  Uniprot ID: Q16666
  ENSP ID: ENSP00000352740
MGKKYKNIVLLKGLEVINDYHFRMVKSLLSNDLKLNLKMREEYDKIQIADLMEEKFRGDAGLGKLIKIFEDIPTLEDLAETLKKEKLKVKGPALSRKRKKEVDATSPAPSTSSTVKTEGAEATPGAQNPKTVAKCQVTPRRNVLQKRPVIVKVLSTTKPFEYETPEMEKKIMFHATVATQTQFFHVKVLNTSLKEKFNGKKIIIISDYLEYDSLLEVNEESTVSEAGPNQTFEVPNKIINRAKETLKIDILHKQASGNIVYGVFMLHKKTVNQKTTIYEIQDDRGKMDVVGTGQCHNIPCEEGDKLQLFCFRLRKKNQMSKLISEMHSFIQIKKKTNPRNNDPKSMKLPQEQRQLPYPSEASTTFPESHLRTPQMPPTTPSSSFFTKKSEDTISKMNDFMRMQILKEGSHFPGPFMTSIGPAESHPHTPQMPPSTPSSSFLTTKSEDTISKMNDFMRMQILKEGSHFPGPFMTSIGPAESHPHTPQMPPSTPSSSFLTTLKPRLKTEPEEVSIEDSAQSDLKEVMVLNATESFVYEPKEQKKMFHATVATENEVFRVKVFNIDLKEKFTPKKIIAIANYVCRNGFLEVYPFTLVADVNADRNMEIPKGLIRSASVTPKINQLCSQTKGSFVNGVFEVHKKNVRGEFTYYEIQDNTGKMEVVVHGRLTTINCEEGDKLKLTCFELAPKSGNTGELRSVIHSHIKVIKTRKNKKDILNPDSSMETSPDFFF

SEQ ID NO: 41216 - protein, 729 aa, Homo sapiens
  Payload ID: 8382
  Gene Symbol: IFI16
  Gene Name: interferon, gamma-inducible protein 16
  Uniprot ID: Q16666
  ENSP ID: ENSP00000357113
MGKKYKNIVLLKGLEVINDYHFRMVKSLLSNDLKLNLKMREEYDKIQIADLMEEKFRGDAGLGKLIKIFEDIPTLEDLAETLKKEKLKVKGPALSRKRKKEVDATSPAPSTSSTVKTEGAEATPGAQKRKKSTKEKAGPKGSKVSEEQTQPPSPAGAGMSTAMGRSPSPKTSLSAPPNSSSTENPKTVAKCQVTPRRNVLQKRPVIVKVLSTTKPFEYETPEMEKKIMFHATVATQTQFFHVKVLNTSLKEKFNGKKIIIISDYLEYDSLLEVNEESTVSEAGPNQTFEVPNKIINRAKETLKIDILHKQASGNIVYGVFMLHKKTVNQKTTIYEIQDDRGKMDVVGTGQCHNIPCEEGDKLQLFCFRLRKKNQMSKLISEMHSFIQIKKKTNPRNNDPKSMKLPQEQRQLPYPSEASTTFPESHLRTPQMPPTTPSSSFFTKKSEDTISKMNDFMRMQILKEGSHFPGPFMTSIGPAESHPHTPQMPPSTPSSSFLTTLKPRLKTEPEEVSIEDSAQSDLKEVMVLNATESFVYEPKEQKKMFHATVATENEVFRVKVFNIDLKEKFTPKKIIAIANYVCRNGFLEVYPFTLVADVNADRNMEIPKGLIRSASVTPKINQLCSQTKGSFVNGVFEVHKKNVRGEFTYYEIQDNTGKMEVVVHGRLTTINCEEGDKLKLTCFELAPKSGNTGELRSVIHSHIKVIKTRKNKKDILNPDSSMETSPDFFF

SEQ ID NO: 41217 - protein, 729 aa, Homo sapiens; identical to SEQ ID NO: 41216
  Payload ID: 8382
  Gene Symbol: IFI16
  Gene Name: interferon, gamma-inducible protein 16
  Uniprot ID: Q16666
  ENSP ID: ENSP00000357114

SEQ ID NO: 41218 - protein, 673 aa, Homo sapiens
  Payload ID: 8382
  Gene Symbol: IFI16
  Gene Name: interferon, gamma-inducible protein 16
  Uniprot ID: Q16666
  ENSP ID: ENSP00000404325
MGKKYKNIVLLKGLEVINDYHFRMVKSLLSNDLKLNLKMREEYDKIQIADLMEEKFRGDAGLGKLIKIFEDIPTLEDLAETLKKEKLKVKGPALSRKRKKEVDATSPAPSTSSTVKTEGAEATPGAQKRKKSTKEKAGPKGSKVSEEQTQPPSPAGAGMSTAMGRSPSPKTSLSAPPNSSSTENPKTVAKCQVTPRRNVLQKRPVIVKVLSTTKPFEYETPEMEKKIMFHATVATQTQFFHVKVLNTSLKEKFNGKKIIIISDYLEYDSLLEVNEESTVSEAGPNQTFEVPNKIINRAKETLKIDILHKQASGNIVYGVFMLHKKTVNQKTTIYEIQDDRGKMDVVGTGQCHNIPCEEGDKLQLFCFRLRKKNQMSKLISEMHSFIQIKKKTNPRNNDPKSMKLPQEQRQLPYPSEASTTFPESHLRTPQMPPTTPSSSFFTKLKPRLKTEPEEVSIEDSAQSDLKEVMVLNATESFVYEPKEQKKMFHATVATENEVFRVKVFNIDLKEKFTPKKIIAIANYVCRNGFLEVYPFTLVADVNADRNMEIPKGLIRSASVTPKINQLCSQTKGSFVNGVFEVHKKNVRGEFTYYEIQDNTGKMEVVVHGRLTTINCEEGDKLKLTCFELAPKSGNTGELRSVIHSHIKVIKTRKNKKDILNPDSSMETSPDFFF

SEQ ID NO: 41219 - protein, 167 aa, Homo sapiens
  Payload ID: 8382
  Gene Symbol: IFI16
  Gene Name: interferon, gamma-inducible protein 16
  ENSP ID: ENSP00000406406
MGKKYKNIVLLKGLEVINDYHFRMVKSLLSNDLKLNLKMREEYDKIQIADLMEEKFRGDAGLGKLIKIFEDIPTLEDLAETLKKEKLKVKGPALSRKRKKEVDATSPAPSTSSTVKTEGAEATPGAQKRKKSTKEKAGPKGSKVSEEQTQPPSPAGAGMSTAMGRSP

SEQ ID NO: 41220 - protein, 180 aa, Homo sapiens
  Payload ID: 8382
  Gene Symbol: IFI16
  Gene Name: interferon, gamma-inducible protein 16
  ENSP ID: ENSP00000407052
MGKKYKNIVLLKGLEVINDYHFRMVKSLLSNDLKLNLKMREEYDKIQIADLMEEKFRGDAGLGKLIKIFEDIPTLEDLAETLKKEKLKVKGPALSRKRKKEVDATSPAPSTSSTVKTEGAEATPGAQKRKKSTKEKAGPKGSKVSEEQTQPPSPAGAGMSTAMGRSPSPKTSLSAPPNSS

SEQ ID NO: 41221 - protein, 74 aa, Homo sapiens
  Payload ID: 8382
  Gene Symbol: IFI16
  Gene Name: interferon, gamma-inducible protein 16
  ENSP ID: ENSP00000456094
MSTAMGRSPSPKTSLSAPPNSSSTENPKTVAKCQVTPRRNVLQKRPVIVKVLSTTKPFEYETPEMEKKIMFHAT

SEQ ID NO: 41222 - protein, 229 aa, Homo sapiens
  Payload ID: 8382
  Gene Symbol: IFI16
  Gene Name: interferon, gamma-inducible protein 16
  ENSP ID: ENSP00000456129
MSTAMGRSPSPKTSLSAPPNSSSTENPKTVAKCQVTPRRNVLQKRPVIVKVLSTTKPFEYETPEMEKKIMFHATVATQTQFFHVKVLNTSLKEKFNGKKIIIISDYLEYDSLLEVNEESTVSEAGPNQTFEVPNKIINRAKETLKIDILHKQASGNIVYGVFMLHKKTVNQKTTIYEIQDDRGKMDVVGTGQCHNIPCEEGDKLQLFCFRLRKKNQMSKLISEMHSFIQ

SEQ ID NO: 41223 - protein, 83 aa, Homo sapiens
  Payload ID: 8382
  Gene Symbol: IFI16
  Gene Name: interferon, gamma-inducible protein 16
  ENSP ID: ENSP00000458084
MGKKYKNIVLLKGLEVINDYHFRMVKSLLSNDLKLNLKMREEYDKIQIADLMEEKFRGDAGLGKLIKIFEDIPTLEDLAETLK

SEQ ID NO: 41224 - protein, 250 aa, Homo sapiens
  Payload ID: 8383
  Gene Symbol: IFI30
  Gene Name: interferon, gamma-inducible protein 30
  Uniprot ID: P13284
  ENSP ID: ENSP00000384886
MTLSPLLLFLPPLLLLLDVPTAAVQASPLQALDFFGNGPPVNYKTGNLYLRGPLKKSNAPLVNVTLYYEALCGGCRAFLIRELFPTWLLVMEILNVTLVPYGNAQEQNVSGRWEFKCQHGEEECKFNKVEACVLDELDMELAFLTIVCMEEFEDMERSLPLCLQLYAPGLSPDTIMECAMGDRGMQLMHANAQRTDALQPPHEYVPWVTVNGKPLEDQTQLLTLVCQLYQGKKPDVCPSSTSSLRSVCFK

SEQ ID NO: 41225 - protein, 105 aa, Homo sapiens
  Payload ID: 8383
  Gene Symbol: IFI30
  Gene Name: interferon, gamma-inducible protein 30
  ENSP ID: ENSP00000470527
MTLSPLLLFLPPLLLLLDVPTAAVQASPLQALDFFGNGPPVNYKTGNLYLRGPLKKSNAPLVNVTLYYEALCGGCRAFLIRELFPTWLLVMEILNVTLVPYGNAQ

SEQ ID NO: 41226 - protein, 207 aa, Homo sapiens
  Payload ID: 8384
  Gene Symbol: IFNK
  Gene Name: interferon, kappa
  Uniprot ID: Q9P0W0
  ENSP ID: ENSP00000276943
MSTKPDMIQKCLWLEILMGIFIAGTLSLDCNLLNVHLRRVTWQNLRHLSSMSNSFPVECLRENIAFELPQEFLQYTQPMKRDIKKAFYEMSLQAFNIFSQHTFKYWKERHLKQIQIGLDQQAEYLNQCLEEDKNENEDMKEMKENEMKPSEARVPQLSSLELRRYFHRIDNFLKEKKYSDCAWEIVRVEIRRCLYYFYKFTALFRRK

SEQ ID NO: 41227 - protein, 200 aa, Homo sapiens
  Payload ID: 8385
  Gene Symbol: IFNL1
  Gene Name: interferon, lambda 1
  Uniprot ID: Q8IU54
  ENSP ID: ENSP00000329991
MAAAWTVVLVTLVLGLAVAGPVPTSKPTTTGKGCHIGRFKSLSPQELASFKKARDALEESLKLKNWSCSSPVFPGNWDLRLLQVRERPVALEAELALTLKVLEAAAGPALEDVLDQPLHTLHHILSQLQACIQPQPTAGPRPRGRLHHWLHRLQEAPKKESAGCLEASVTFNLFRLLTRDLKYVADGNLCLRTSTHPEST

SEQ ID NO: 41228 - protein, 200 aa, Homo sapiens
  Payload ID: 8386
  Gene Symbol: IFNL2
  Gene Name: interferon, lambda 2
  Uniprot ID: Q8IZJ0
  ENSP ID: ENSP00000333639
MKLDMTGDCTPVLVLMAAVLTVTGAVPVARLHGALPDARGCHIAQFKSLSPQELQAFKRAKDALEESLLLKDCRCHSRLFPRTWDLRQLQVRERPMALEAELALTLKVLEATADTDPALVDVLDQPLHTLHHILSQFRACIQPQPTAGPRTRGRLHHWLYRLQEAPKKESPGCLEASVTFNLFRLLTRDLNCVASGDLCV

SEQ ID NO: 41229 - protein, 196 aa, Homo sapiens
  Payload ID: 8387
  Gene Symbol: IFNL3
  Gene Name: interferon, lambda 3
  Uniprot ID: Q8IZI9
  ENSP ID: ENSP00000409000
MTGDCMPVLVLMAAVLTVTGAVPVARLRGALPDARGCHIAQFKSLSPQELQAFKRAKDALEESLLLKDCKCRSRLFPRTWDLRQLQVRERPVALEAELALTLKVLEATADTDPALGDVLDQPLHTLHHILSQLRACIQPQPTAGPRTRGRLHHWLHRLQEAPKKESPGCLEASVTFNLFRLLTRDLNCVASGDLCV

SEQ ID NO: 41230 - protein, 200 aa, Homo sapiens
  Payload ID: 8387
  Gene Symbol: IFNL3
  Gene Name: interferon, lambda 3
  ENSP ID: ENSP00000481633
MKLDMTGDCMPVLVLMAAVLTVTGAVPVARLRGALPDARGCHIAQFKSLSPQELQAFKRAKDALEESLLLKDCKCRSRLFPRTWDLRQLQVRERPVALEAELALTLKVLEATADTDPALGDVLDQPLHTLHHILSQLRACIQPQPTAGPRTRGRLHHWLHRLQEAPKKESPGCLEASVTFNLFRLLTRDLNCVASGDLCV

SEQ ID NO: 41231 - protein, 179 aa, Homo sapiens
  Payload ID: 8388
  Gene Symbol: IFNL4
  Gene Name: interferon, lambda 4 (gene/pseudogene)
  ENSP ID: ENSP00000476098
MRPSVWAAVAAGLWVLCTVIAEGPPALPALALPLAGAPDAGGCQGAEGPLRGRGAELGAAQLLLPPQEGSSAAIVLRSAPPRGPGHRGRPGSAQRPAPLGAAPRRRPDPGAAGGRGEGCGGLPAGTARLLQEGPRGPEEASQTPESGLASVPQSQRGLQPPAPAHVGAPAGCTLWALPL

SEQ ID NO: 41232 - protein, 143 aa, Homo sapiens
  Payload ID: 8388
  Gene Symbol: IFNL4
  Gene Name: interferon, lambda 4 (gene/pseudogene)
  ENSP ID: ENSP00000480679
MRPSVWAAVAAGLWVLCTVIAEGPPALPALALPLAGAPDAGGCQGAEGPLRGRGAELGAAQLLLPPQEGSSAAIASLHPQAHGEPQRFANLSCLAEKPIQTGVGSSGCPEIRARVCGWEGHGQMQRGASSFAFSICLMSHLQL

SEQ ID NO: 41233 - protein, 179 aa, Homo sapiens
  Payload ID: 8388
  Gene Symbol: IFNL4
  Gene Name: interferon, lambda 4 (gene/pseudogene)
  ENSP ID: ENSP00000481371
MRPSVWAAVAAGLWVLCTVIAEAPRRCLLSHYRSLEPRTLAAAKALRDRYEEEALSWGQRNCSFRPRRDPPRPSSCARLRHVARGIADAQAVLSGLHRSELLPGAGPILELLAAAGRDVAACLELARPGSSRKVPGAQKRRHKPRRADSPRCRKASVVFNLLRLLTWELRLAAHSGPCL

SEQ ID NO: 41234 - protein, 107 aa, Homo sapiens
  Payload ID: 8388
  Gene Symbol: IFNL4
  Gene Name: interferon, lambda 4 (gene/pseudogene)
  ENSP ID: ENSP00000489240
MRPSVWAAVAAGLWVLCTVIAEGPPALPALALPLAGAPDAGGCQGAEGPLPAGTARLLQEGPRGPEEASQTPESGLASVPQSQRGLQPPAPAHVGAPAGCTLWALPL

SEQ ID NO: 41235 - protein, 131 aa, Homo sapiens
  Payload ID: 8388
  Gene Symbol: IFNL4
  Gene Name: interferon, lambda 4 (gene/pseudogene)
  ENSP ID: ENSP00000489559
MRPSVWAAVAAGLWVLCTVIAEGPPALPALALPLAGAPDAGGCQGAEGPLRGRGAELGAAQLLLPPQEGSSAAIAAGTARLLQEGPRGPEEASQTPESGLASVPQSQRGLQPPAPAHVGAPAGCTLWALPL

SEQ ID NO: 41236 - protein, 520 aa, Homo sapiens
  Payload ID: 8389
  Gene Symbol: IFNLR1
  Gene Name: interferon, lambda receptor 1
  Uniprot ID: Q8IU57
  ENSP ID: ENSP00000327824
MAGPERWGPLLLCLLQAAPGRPRLAPPQNVTLLSQNFSVYLTWLPGLGNPQDVTYFVAYQSSPTRRRWREVEECAGTKELLCSMMCLKKQDLYNKFKGRVRTVSPSSKSPWVESEYLDYLFEVEPAPPVLVLTQTEEILSANATYQLPPCMPPLDLKYEVAFWKEGAGNKTLFPVTPHGQPVQITLQPAASEHHCLSARTIYTFSVPKYSKFSKPTCFLLEVPEANWAFLVLPSLLILLLVIAAGGVIWKTLMGNPWFQRAKMPRALDFSGHTHPVATFQPSRPESVNDLFLCPQKELTRGVRPTPRVRAPATQQTRWKKDLAEDEEEEDEEDTEDGVSFQPYIEPPSFLGQEHQAPGHSEAGGVDSGRPRAPLVPSEGSSAWDSSDRSWASTVDSSWDRAGSSGYLAEKGPGQGPGGDGHQESLPPPEFSKDSGFLEELPEDNLSSWATWGTLPPEPNLVPGGPPVSLQTLTFCWESSPEEEEEARESEIEDSDAGSWGAESTQRTEDRGRTLGHYMAR

SEQ ID NO: 41237 - protein, 244 aa, Homo sapiens
  Payload ID: 8389
  Gene Symbol: IFNLR1
  Gene Name: interferon, lambda receptor 1
  Uniprot ID: Q8IU57
  ENSP ID: ENSP00000328994
MAGPERWGPLLLCLLQAAPGRPRLAPPQNVTLLSQNFSVYLTWLPGLGNPQDVTYFVAYQSSPTRRRWREVEECAGTKELLCSMMCLKKQDLYNKFKGRVRTVSPSSKSPWVESEYLDYLFEVEPAPPVLVLTQTEEILSANATYQLPPCMPPLDLKYEVAFWKEGAGNKTLFPVTPHGQPVQITLQPAASEHHCLSARTIYTFSVPKYSKFSKPTCFLLEVPGLFWTHTPCGNLSAQQTRVRE

SEQ ID NO: 41238 - protein, 211 aa, Homo sapiens
  Payload ID: 8389
  Gene Symbol: IFNLR1
  Gene Name: interferon, lambda receptor 1
  Uniprot ID: Q8IU57
  ENSP ID: ENSP00000363539
MAGPERWGPLLLCLLQAAPGRPRLAPPQNVTLLSQNFSVYLTWLPGLGNPQDVTYFVAYQSSPTRRRWREVEECAGTKELLCSMMCLKKQDLYNKFKGRVRTVSPSSKSPWVESEYLDYLFEVEPAPPVLVLTQTEEILSANATYQLPPCMPPLDLKYEVAFWKEGAGNKVGSSFPAPRLGPLLHPFLLRFFSPSQPAPAPLLQEVFPVHS

SEQ ID NO: 41239 - protein, 185 aa, Homo sapiens
  Payload ID: 8389
  Gene Symbol: IFNLR1
  Gene Name: interferon, lambda receptor 1
  ENSP ID: ENSP00000363540
MMCLKKQDLYNKFKGRVRTVSPSSKSPWVESEYLDYLFEVEPAPPVLVLTQTEEILSANATYQLPPCMPPLDLKYEVAFWKEGAGNKTLFPVTPHGQPVQITLQPAASEHHCLSARTIYTFSVPKYSKFSKPTCFLLEVPEANWAFLVLPSLLILLLVIAAGGVIWKTLMGNPWFQRAKMPRALV

SEQ ID NO: 41240 - protein, 491 aa, Homo sapiens
  Payload ID: 8389
  Gene Symbol: IFNLR1
  Gene Name: interferon, lambda receptor 1
  Uniprot ID: Q8IU57
  ENSP ID: ENSP00000363542
MAGPERWGPLLLCLLQAAPGRPRLAPPQNVTLLSQNFSVYLTWLPGLGNPQDVTYFVAYQSSPTRRRWREVEECAGTKELLCSMMCLKKQDLYNKFKGRVRTVSPSSKSPWVESEYLDYLFEVEPAPPVLVLTQTEEILSANATYQLPPCMPPLDLKYEVAFWKEGAGNKTLFPVTPHGQPVQITLQPAASEHHCLSARTIYTFSVPKYSKFSKPTCFLLEVPEANWAFLVLPSLLILLLVIAAGGVIWKTLMGNPWFQRAKMPRALELTRGVRPTPRVRAPATQQTRWKKDLAEDEEEEDEEDTEDGVSFQPYIEPPSFLGQEHQAPGHSEAGGVDSGRPRAPLVPSEGSSAWDSSDRSWASTVDSSWDRAGSSGYLAEKGPGQGPGGDGHQESLPPPEFSKDSGFLEELPEDNLSSWATWGTLPPEPNLVPGGPPVSLQTLTFCWESSPEEEEEARESEIEDSDAGSWGAESTQRTEDRGRTLGHYMAR

SEQ ID NO: 41241 - protein, 195 aa, Homo sapiens
  Payload ID: 8390
  Gene Symbol: IFNW1
  Gene Name: interferon, omega 1
  Uniprot ID: P05000
  ENSP ID: ENSP00000369578
MALLFPLLAALVMTSYSPVGSLGCDLPQNHGLLSRNTLVLLHQMRRISPFLCLKDRRDFRFPQEMVKGSQLQKAHVMSVLHEMLQQIFSLFHTERSSAAWNMTLLDQLHTGLHQQLQHLETCLLQVVGEGESAGAISSPALTLRRYFQGIRVYLKEKKYSDCAWEVVRMEIMKSLFLSTNMQERLRSKDRDLGSS

SEQ ID NO: 41242 - protein, 286 aa, Homo sapiens
  Payload ID: 8391
  Gene Symbol: IFI35
  Gene Name: interferon-induced protein 35
  Uniprot ID: P80217
  ENSP ID: ENSP00000394579
MSAPLDAALHALQEEQARLKMRLWDLQQLRKELGDSPKDKVPFSVPKIPLVFRGHTQQDPEVPKSLVSNLRIHCPLLAGSALITFDDPKVAEQVLQQKEHTINMEECRLRVQVQPLELPMVTTIQMSSQLSGRRVLVTGFPASLRLSEEELLDKLEIFFGKTRNGGGDVDVRELLPGSVMLGFARDGVAQRLCQIGQFTVPLGGQQVPLRVSPYVNGEIQKAEIRSQPVPRSVLVLNIPDILDGPELHDVLEIHFQKPTRGGGEVEALTVVPQGQQGLAVFTSESG

SEQ ID NO: 41243 - protein, 288 aa, Homo sapiens
  Payload ID: 8391
  Gene Symbol: IFI35
  Gene Name: interferon-induced protein 35
  Uniprot ID: P80217
  ENSP ID: ENSP00000395590
MSAPLDAALHALQEEQARLKMRLWDLQQLRKELGDSPKDKVPFSVPKIPLVFRGHTQQDPEVPKSLVSNLRIHCPLLAGSALITFDDPKVAEQVLQQKEHTINMEECRLRVQVQPLELPMVTTIQVMMSSQLSGRRVLVTGFPASLRLSEEELLDKLEIFFGKTRNGGGDVDVRELLPGSVMLGFARDGVAQRLCQIGQFTVPLGGQQVPLRVSPYVNGEIQKAEIRSQPVPRSVLVLNIPDILDGPELHDVLEIHFQKPTRGGGEVEALTVVPQGQQGLAVFTSESG

SEQ ID NO: 41244 - protein, 444 aa, Homo sapiens
  Payload ID: 8392
  Gene Symbol: IFI44
  Gene Name: interferon-induced protein 44
  Uniprot ID: Q8TCB0
  ENSP ID: ENSP00000359783
MAVTTRLTWLHEKILQNHFGGKRLSLLYKGSVHGFRNGVLLDRCCNQGPTLTVIYSEDHIIGAYAEESYQEGKYASIILFALQDTKISEWKLGLCTPETLFCCDVTKYNSPTNFQIDGRNRKVIMDLKTMENLGLAQNCTISIQDYEVFRCEDSLDERKIKGVIELRKSLLSALRTYEPYGSLVQQIRILLLGPIGAGKSSFFNSVRSVFQGHVTHQALVGTNTTGISEKYRTYSIRDGKDGKYLPFILCDSLGLSEKEGGLCRDDIFYILNGNIRDRYQFNPMESIKLNHHDYIDSPSLKDRIHCVAFVFDASSIQYFSSQMIVKIKRIRRELVNAGVVHVALLTHVDSMDLITKGDLIEIERCEPVRSKLEEVQRKLGFALSDISVVSNYSSEWELDPVKDVLILSALRRMLWAADDFLEDLPFEQIGNLREEIINCAQGKK

SEQ ID NO: 41245 - protein, 195 aa, Homo sapiens
  Payload ID: 8392
  Gene Symbol: IFI44
  Gene Name: interferon-induced protein 44
  ENSP ID: ENSP00000399477
MDLKTMENLGLAQNCTISIQDYEVFRCEDSLDERKIKGVIELRKSLLSALRTYEPYGSLVQQIRILLLGPIGAGKSSFFNSVRSVFQGHVTHQALVGTNTTGISEKYRTYSIRDGKDGKYLPFILCDSLGLSEKEGGLCRDDIFYILNGNIRDRYQFNPMESIKLNHHDYIDSPSLKDRIHCVAFVFDASSIQYF

SEQ ID NO: 41246 - protein, 76 aa, Homo sapiens
  Payload ID: 8392
  Gene Symbol: IFI44
  Gene Name: interferon-induced protein 44
  ENSP ID: ENSP00000400001
  MOD_RES (1)..(1): Any amino acid
XLSDISVVSNYSSEWELDPVKDVLILSALRRMLWAADDFLEDLPFEQIGRWFGGVEAWKRSGNLREEIINCAQGKK

SEQ ID NO: 41247 - protein, 452 aa, Homo sapiens
  Payload ID: 8393
  Gene Symbol: IFI44L
  Gene Name: interferon-induced protein 44-like
  Uniprot ID: Q53G44
  ENSP ID: ENSP00000359787
MEVTTRLTWNDENHLRKLLGNVSLSLLYKSSVHGGSIEDMVERCSRQGCTITMAYIDYNMIVAFMLGNYINLHESSTEPNDSLWFSLQKKNDTTEIETLLLNTAPKIIDEQLVCRLSKTDIFIICRDNKIYLDKMITRNLKLRFYGHRQYLECEVFRVEGIKDNLDDIKRIIKAREHRNRLLADIRDYRPYADLVSEIRILLVGPVGSGKSSFFNSVKSIFHGHVTGQAVVGSDITSITERYRIYSVKDGKNGKSLPFMLCDTMGLDGAEGAGLCMDDIPHILKGCMPDRYQFNSRKPITPEHSTFITSPSLKDRIHCVAYVLDINSIDNLYSKMLAKVKQVHKEVLNCGIAYVALLTKVDDCSEVLQDNFLNMSRSMTSQSRVMNVHKMLGIPISNILMVGNYASDLELDPMKDILILSALRQMLRAADDFLEDLPLEETGAIERALQPCI

SEQ ID NO: 41248 - protein, 232 aa, Homo sapiens
  Payload ID: 8393
  Gene Symbol: IFI44L
  Gene Name: interferon-induced protein 44-like
  ENSP ID: ENSP00000400784
LSLLYKSSVHGGSIEDMVERCSRQGCTITMAYIDYNMIVAFMLGNYINLHESSTEPNDSLWFSLQKKNDTTEIETLLLNTAPKIIDEQLVCRLSKTDIFIICRDNKIYLDKMITRNLKLRFYGHRQYLECEVFRVEGIKDNLDDIKRIIKAREHRNRLLADIRDYRPYADLVSEIRILLVGPVGSGKSSFFNSVKSIFHGHVTGQAVVGSDITSITERGNPNIQLNAKSNGK

SEQ ID NO: 41249 - protein, 97 aa, Homo sapiens
  Payload ID: 8393
  Gene Symbol: IFI44L
  Gene Name: interferon-induced protein 44-like
  ENSP ID: ENSP00000409914
MEVTTRLTWNDENHLRKLLGNVSLSLLYKSSVHGGSIEDMVERCSRQGCTITMAYIDYNMIVAFMLGNYINLHESSTEPNDSLWFSLQKKNDTTEIE

SEQ ID NO: 41250 - protein, 478 aa, Homo sapiens
  Payload ID: 8394
  Gene Symbol: IFIT1
  Gene Name: interferon-induced protein with tetratricopeptide repeats 1
  Uniprot ID: P09914
  ENSP ID: ENSP00000360869
MSTNGDDHQVKDSLEQLRCHFTWELSIDDDEMPDLENRVLDQIEFLDTKYSVGIHNLLAYVKHLKGQNEEALKSLKEAENLMQEEHDNQANVRSLVTWGNFAWMYYHMGRLAEAQTYLDKVENICKKLSNPFRYRMECPEIDCEEGWALLKCGGKNYERAKACFEKVLEVDPENPESSAGYAISAYRLDGFKLATKNHKPFSLLPLRQAVRLNPDNGYIKVLLALKLQDEGQEAEGEKYIEEALANMSSQTYVFRYAAKFYRRKGSVDKALELLKKALQETPTSVLLHHQIGLCYKAQMIQIKEATKGQPRGQNREKLDKMIRSAIFHFESAVEKKPTFEVAHLDLARMYIEAGNHRKAEENFQKLLCMKPVVEETMQDIHFHYGRFQEFQKKSDVNAIIHYLKAIKIEQASLTRDKSINSLKKLVLRKLRRKALDLESLSLLGFVYKLEGNMNEALEYYERALRLAADFENSVRQGP

SEQ ID NO: 41251 - protein, 447 aa, Homo sapiens
  Payload ID: 8394
  Gene Symbol: IFIT1
  Gene Name: interferon-induced protein with tetratricopeptide repeats 1
  Uniprot ID: P09914
  ENSP ID: ENSP00000441968
MPDLENRVLDQIEFLDTKYSVGIHNLLAYVKHLKGQNEEALKSLKEAENLMQEEHDNQANVRSLVTWGNFAWMYYHMGRLAEAQTYLDKVENICKKLSNPFRYRMECPEIDCEEGWALLKCGGKNYERAKACFEKVLEVDPENPESSAGYAISAYRLDGFKLATKNHKPFSLLPLRQAVRLNPDNGYIKVLLALKLQDEGQEAEGEKYIEEALANMSSQTYVFRYAAKFYRRKGSVDKALELLKKALQETPTSVLLHHQIGLCYKAQMIQIKEATKGQPRGQNREKLDKMIRSAIFHFESAVEKKPTFEVAHLDLARMYIEAGNHRKAEENFQKLLCMKPVVEETMQDIHFHYGRFQEFQKKSDVNAIIHYLKAIKIEQASLTRDKSINSLKKLVLRKLRRKALDLESLSLLGFVYKLEGNMNEALEYYERALRLAADFENSVRQGP

SEQ ID NO: 41252 - protein, 474 aa, Homo sapiens
  Payload ID: 8395
  Gene Symbol: IFIT1B
  Gene Name: interferon-induced protein with tetratricopeptide repeats 1B
  Uniprot ID: Q5T764
  ENSP ID: ENSP00000360874
MSEESDGKLIEDSLIQLRCHFTWKLLIEAPEIPDLENRIWEEIQFLDTKYNVGIHNLLAYVKHLKGQNEEALVSLKKAEDLIQKEHANQADIRSLVTWGNFAWVYYHMGRLAEAQTYLDKVENTCKKFANPSRYRMECPEVDCEEGWALAKCGGKNYERAKTCFEKALEGNPENPEFNTGYAITVYRLDKFNTASGRNKAFSLHVLKRAVRLNPDDVYIRVLLALKLQDEGQEAEGEKYIEEALTSISSQAYVFQYAAKFYRRKGSVDKALELLKMALETTPTSAFLHHQMGLCYRAQMIQIKEATNWQPRGQDRETVDRLVQLAICKFEKTIMLKRTFEMAYVDLAETYAEIGHHRKAEEHFQKGLRMKIFEDQLKQEIHYHYGRFQEHHGKSQDKAITHYLKGLKIEKMSHSREKLLNALEKLAKRCIHQNVRVVESVSLLGLIHKLKGEVSDALLCYERALRLAADLNPIF

SEQ ID NO: 41253 - protein, 472 aa, Homo sapiens
  Payload ID: 8396
  Gene Symbol: IFIT2
  Gene Name: interferon-induced protein with tetratricopeptide repeats 2
  Uniprot ID: P09913
  ENSP ID: ENSP00000360891
MSENNKNSLESSLRQLKCHFTWNLMEGENSLDDFEDKVFYRTEFQNREFKATMCNLLAYLKHLKGQNEAALECLRKAEELIQQEHADQAEIRSLVTWGNYAWVYYHMGRLSDVQIYVDKVKHVCEKFSSPYRIESPELDCEEGWTRLKCGGNQNERAKVCFEKALEKKPKNPEFTSGLAIASYRLDNWPPSQNAIDPLRQAIRLNPDNQYLKVLLALKLHKMREEGEEEGEGEKLVEEALEKAPGVTDVLRSAAKFYRRKDEPDKAIELLKKALEYIPNNAYLHCQIGCCYRAKVFQVMNLRENGMYGKRKLLELIGHAVAHLKKADEANDNLFRVCSILASLHALADQYEDAEYYFQKEFSKELTPVAKQLLHLRYGNFQLYQMKCEDKAIHHFIEGVKINQKSREKEKMKDKLQKIAKMRLSKNGADSEALHVLAFLQELNEKMQQADEDSERGLESGSLIPSASSWNGE

SEQ ID NO: 41254 - protein, 483 aa, Homo sapiens
  Payload ID: 8396
  Gene Symbol: IFIT2
  Gene Name: interferon-induced protein with tetratricopeptide repeats 2
  ENSP ID: ENSP00000484770
MSENNKNSLESSLRQLKCHFTWNLMEGENSLDDFEDKVFYRTEFQNREFKATMCNLLAYLKHLKGQNEAALECLRKAEELIQQEHADQAEIRSLVTWGNYAWVYYHMGRLSDVQIYVDKVKHVCEKFSSPYRIESPELDCEEGWTRLKCGGNQNERAKVCFEKALEKKPKNPEFTSGLAIASYRLDNWPPSQNAIDPLRQAIRLNPDNQYLKVLLALKLHKMREEGEEEGEGEKLVEEALEKAPGVTDVLRSAAKFYRRKDEPDKAIELLKKALEYIPNNAYLHCQIGCCYRAKVFQVMNLRENGMYGKRKLLELIGHAVAHLKKADEANDNLFRVCSILASLHALADQYEDAEYYFQKEFSKELTPVAKQLLHLRYGNFQLYQMKCEDKAIHHFIEGVKINQKSREKEKMKDKLQKIAKMRLSKNGADSEALHVLAFLQELNEKMQQADEDSERGLESGSLIPSASSWNGERIEMWCPLGYC

SEQ ID NO: 41255 - protein, 490 aa, Homo sapiens
  Payload ID: 8397
  Gene Symbol: IFIT3
  Gene Name: interferon-induced protein with tetratricopeptide repeats 3
  Uniprot ID: O14879
  ENSP ID: ENSP00000360876
MSEVTKNSLEKILPQLKCHFTWNLFKEDSVSRDLEDRVCNQIEFLNTEFKATMYNLLAYIKHLDGNNEAALECLRQAEELIQQEHADQAEIRSLVTWGNYAWVYYHLGRLSDAQIYVDKVKQTCKKFSNPYSIEYSELDCEEGWTQLKCGRNERAKVCFEKALEEKPNNPEFSSGLAIAMYHLDNHPEKQFSTDVLKQAIELSPDNQYVKVLLGLKLQKMNKEAEGEQFVEEALEKSPCQTDVLRSAAKFYRRKGDLDKAIELFQRVLESTPNNGYLYHQIGCCYKAKVRQMQNTGESEASGNKEMIEALKQYAMDYSNKALEKGLNPLNAYSDLAEFLETECYQTPFNKEVPDAEKQQSHQRYCNLQKYNGKSEDTAVQHGLEGLSISKKSTDKEEIKDQPQNVSENLLPQNAPNYWYLQGLIHKQNGDLLQAAKCYEKELGRLLRDAPSGIGSIFLSASELEDGSEEMGQGAVSSSPRELLSNSEQLN

SEQ ID NO: 41256 - protein, 490 aa, Homo sapiens; identical to SEQ ID NO: 41255
  Payload ID: 8397
  Gene Symbol: IFIT3
  Gene Name: interferon-induced protein with tetratricopeptide repeats 3
  Uniprot ID: O14879
  ENSP ID: ENSP00000360883

SEQ ID NO: 41257 - protein, 482 aa, Homo sapiens
  Payload ID: 8398
  Gene Symbol: IFIT5
  Gene Name: interferon-induced protein with tetratricopeptide repeats 5
  Uniprot ID: Q13325
  ENSP ID: ENSP00000360860
MSEIRKDTLKAILLELECHFTWNLLKEDIDLFEVEDTIGQQLEFLTTKSRLALYNLLAYVKHLKGQNKDALECLEQAEEIIQQEHSDKEEVRSLVTWGNYAWVYYHMDQLEEAQKYTGKIGNVCKKLSSPSNYKLECPETDCEKGWALLKFGGKYYQKAKAAFEKALEVEPDNPEFNIGYAITVYRLDDSDREGSVKSFSLGPLRKAVTLNPDNSYIKVFLALKLQDVHAEAEGEKYIEEILDQISSQPYVLRYAAKFYRRKNSWNKALELLKKALEVTPTSSFLHHQMGLCYRAQMIQIKKATHNRPKGKDKLKVDELISSAIFHFKAAMERDSMFAFAYTDLANMYAEGGQYSNAEDIFRKALRLENITDDHKHQIHYHYGRFQEFHRKSENTAIHHYLEALKVKDRSPLRTKLTSALKKLSTKRLCHNALDVQSLSALGFVYKLEGEKRQAAEYYEKAQKIDPENAEFLTALCELRLSI

SEQ ID NO: 41258 - protein, 451 aa, Homo sapiens
  Payload ID: 8399
  Gene Symbol: IFRD1
  Gene Name: interferon-related developmental regulator 1
  Uniprot ID: O00458
  ENSP ID: ENSP00000005558
MPKNKKRNTPHRGSSAGGGGSGAAAATAATAGGQHRNVQPFSDEDASIETMSHCSGYSDPSSFAEDGPEVLDEEGTQEDLEYKLKGLIDLTLDKSAKTRQAALEGIKNALASKMLYEFILERRMTLTDSIERCLKKGKSDEQRAAAALASVLCIQLGPGIESEEILKTLGPILKKIICDGSASMQARQTCATCFGVCCFIATDDITELYSTLECLENIFTKSYLKEKDTTVICSTPNTVLHISSLLAWTLLLTICPINEVKKKLEMHFHKLPSLLSCDDVNMRIAAGESLALLFELARGIESDFFYEDMESLTQMLRALATDGNKHRAKVDKRKQRSVFRDVLRAVEERDFPTETIKFGPERMYIDCWVKKHTYDTFKEVLGSGMQYHLQSNEFLRNVFELGPPVMLDAATLKTMKISRFERHLYNSAAFKARTKARSKCRDKRADVGEFF

SEQ ID NO: 41259 - protein, 451 aa, Homo sapiens; identical to SEQ ID NO: 41258
  Payload ID: 8399
  Gene Symbol: IFRD1
  Gene Name: interferon-related developmental regulator 1
  Uniprot ID: O00458
  ENSP ID: ENSP00000384477

SEQ ID NO: 41260 - protein, 30 aa, Homo sapiens
  Payload ID: 8399
  Gene Symbol: IFRD1
  Gene Name: interferon-related developmental regulator 1
  ENSP ID: ENSP00000391379
MPKNKKRNTPHRGSSAGGGGSGAAAATAAT

SEQ ID NO: 41261 - protein, 148 aa, Homo sapiens
  Payload ID: 8399
  Gene Symbol: IFRD1
  Gene Name: interferon-related developmental regulator 1
  ENSP ID: ENSP00000397314
MPKNKKRNTPHRGSSAGGGGSGAAAATAATAGGQHRNVQPFSDEDASIETMSHCSGYSDPSSFAEDGPEVLDEEGTQEDLEYKLKGLIDLTLDKSAKTRQAALEGIKNALASKMLYEFILERRMTLTDSIERCLKKGNALIFESQTYN

SEQ ID NO: 41262 - protein, 40 aa, Homo sapiens
  Payload ID: 8399
  Gene Symbol: IFRD1
  Gene Name: interferon-related developmental regulator 1
  ENSP ID: ENSP00000397592
MSHCSGYSDPSSFAEDGPEVLDEEGTQEDLEYKLKGLIDL

SEQ ID NO: 41263 - protein, 127 aa, Homo sapiens
  Payload ID: 8399
  Gene Symbol: IFRD1
  Gene Name: interferon-related developmental regulator 1
  ENSP ID: ENSP00000402177
MSHCSGYSDPSSFAEDGPEVLDEEGTQEDLEYKLKGLIDLTLDKSAKTRQAALEGIKNALASKMLYEFILERRMTLTDSIERCLKKGKSDEQRAAAALASVLCIQLGPGIESEEILKTLGPILKKII

SEQ ID NO: 41264 - protein, 62 aa, Homo sapiens
  Payload ID: 8399
  Gene Symbol: IFRD1
  Gene Name: interferon-related developmental regulator 1
  ENSP ID: ENSP00000402453
MPKNKKRNTPHRGSSAGGGGSGAAAATAATAGGQHRNVQPFSDEDASIETMSHCSGYSDPSS

SEQ ID NO: 41265 - protein, 90 aa, Homo sapiens
  Payload ID: 8399
  Gene Symbol: IFRD1
  Gene Name: interferon-related developmental regulator 1
  ENSP ID: ENSP00000403203
MHFHKLPSLLSCDDVNMRIAAGESLALLFELARGIESDFFYEDMESLTQMLRALATDGNKHRAKVDKRKQRSVFRDVLRAVEERDFPTET

SEQ ID NO: 41266 - protein, 17 aa, Homo sapiens
  Payload ID: 8399
  Gene Symbol: IFRD1
  Gene Name: interferon-related developmental regulator 1
  ENSP ID: ENSP00000413893
MPKNKKRNTPHRGSSAG

SEQ ID NO: 41267 - protein, 98 aa, Homo sapiens
  Payload ID: 8399
  Gene Symbol: IFRD1
  Gene Name: interferon-related developmental regulator 1
  ENSP ID: ENSP00000435635
VFRDVLRAVEERDFPTETIKFGPERMYIDCWVKKHTYDTFKEVLGSGMQYHLQSNEFLRNVFELGPPVMLDAATLKTMKISRFERFSGLSGVFASQSS

SEQ ID NO: 41268 - protein, 103 aa, Homo sapiens
  Payload ID: 8399
  Gene Symbol: IFRD1
  Gene Name: interferon-related developmental regulator 1
  ENSP ID: ENSP00000437250
MSHCSGYSDPSSFAEDGPEVLDEEGTQEDLEYKLKGLIDLTLDKSAKTRQAALEGIKNALASKMLYEFILERRMTLTDSIERCLKKGKSDEQRAAAALASVLC

SEQ ID NO: 41269 - protein, 401 aa, Homo sapiens
  Payload ID: 8399
  Gene Symbol: IFRD1
  Gene Name: interferon-related developmental regulator 1
  Uniprot ID: O00458
  ENSP ID: ENSP00000439188
MSHCSGYSDPSSFAEDGPEVLDEEGTQEDLEYKLKGLIDLTLDKSAKTRQAALEGIKNALASKMLYEFILERRMTLTDSIERCLKKGKSDEQRAAAALASVLCIQLGPGIESEEILKTLGPILKKIICDGSASMQARQTCATCFGVCCFIATDDITELYSTLECLENIFTKSYLKEKDTTVICSTPNTVLHISSLLAWTLLLTICPINEVKKKLEMHFHKLPSLLSCDDVNMRIAAGESLALLFELARGIESDFFYEDMESLTQMLRALATDGNKHRAKVDKRKQRSVFRDVLRAVEERDFPTETIKFGPERMYIDCWVKKHTYDTFKEVLGSGMQYHLQSNEFLRNVFELGPPVMLDAATLKTMKISRFERHLYNSAAFKARTKARSKCRDKRADVGEFF

SEQ ID NO: 41270 - protein, 401 aa, Homo sapiens; identical to SEQ ID NO: 41269
  Payload ID: 8399
  Gene Symbol: IFRD1
  Gene Name: interferon-related developmental regulator 1
  Uniprot ID: O00458
  ENSP ID: ENSP00000483255

SEQ ID NO: 41271 - protein, 442 aa, Homo sapiens
  Payload ID: 8400
  Gene Symbol: IFRD2
  Gene Name: interferon-related developmental regulator 2
  ENSP ID: ENSP00000392316
MPRARKGNTLRKGGQRRGGGARSSAQADSGSSDDEAASEARSTASECPSLLSTTAEDSLGGDVVDEQGQQEDLEEKLKEYVDCLTDKSAKTRQGALESLRLALASRLLPDFLLERRLTLADALEKCLKKGKGEEQALAAAVLGLLCVQLGPGPKGEELFHSLQPLLVSVLSDSTASPAARLHCASALGLGCYVAAADIQDLVSCLACLESVFSRFYGLGGSSTSPVVPASLHGLLSAALQAWALLLTICPSTQISHILDRQLPRLPQLLSSESVNLRIAAGETIALLFELARDLEEEFVYEDMEALCSVLRTLATDSNKYRAKADRRRQRSTFRAVLHSVEGGECEEEIVRFGFEVLYMDSWARHRIYAAFKEVLGSGMHHHLQNNELLRDIFGLGPVLLLDATALKACKVPRFEKHLYNAAAFKARTKARSRVRDKRADIL

SEQ ID NO: 41272 - protein, 506 aa, Homo sapiens
  Payload ID: 8400
  Gene Symbol: IFRD2
  Gene Name: interferon-related developmental regulator 2
  Uniprot ID: Q12894
  ENSP ID: ENSP00000402849
MAWNSPSRRPVWQGGAPREDGGARGVWLPSSGQVSAQRTGRRLVGLEPTPTGSLTPRPPRPVPGMPRARKGNTLRKGGQRRGGGARSSAQADSGSSDDEAASEARSTASECPSLLSTTAEDSLGGDVVDEQGQQEDLEEKLKEYVDCLTDKSAKTRQGALESLRLALASRLLPDFLLERRLTLADALEKCLKKGKGEEQALAAAVLGLLCVQLGPGPKGEELFHSLQPLLVSVLSDSTASPAARLHCASALGLGCYVAAADIQDLVSCLACLESVFSRFYGLGGSSTSPVVPASLHGLLSAALQAWALLLTICPSTQISHILDRQLPRLPQLLSSESVNLRIAAGETIALLFELARDLEEEFVYEDMEALCSVLRTLATDSNKYRAKADRRRQRSTFRAVLHSVEGGECEEEIVRFGFEVLYMDSWARHRIYAAFKEVLGSGMHHHLQNNELLRDIFGLGPVLLLDATALKACKVPRFEKHLYNAAAFKARTKARSRVRDKRADIL

SEQ ID NO: 41273 - protein, 71 aa, Homo sapiens
  Payload ID: 8400
  Gene Symbol: IFRD2
  Gene Name: interferon-related developmental regulator 2
  ENSP ID: ENSP00000408549
RIYAAFKEVLGSGMHHHLQNNELLRDIFGLGPVLLLDATALKACKHLYNAAAFKARTKARSRVRDKRADIL

SEQ ID NO: 41274 - protein, 74 aa, Homo sapiens
  Payload ID: 8400
  Gene Symbol: IFRD2
  Gene Name: interferon-related developmental regulator 2
  ENSP ID: ENSP00000413726
MPRARKGNTLRKGGQRRGGGARSSAQADSGSSDDEAASEARSTASECPSLLSTTAEDSLVPRPGRVLLRACAWP

SEQ ID NO: 41275 - protein, 170 aa, Homo sapiens
  Payload ID: 8400
  Gene Symbol: IFRD2
  Gene Name: interferon-related developmental regulator 2
  ENSP ID: ENSP00000415448
LASRLLPDFLLERRLTLADALEKCLKKGKGEEQALAAAVLGLLCVQLGPGPKGEELFHSLQPLLVSVLSDSTASPAARLHCASALGLGCYVAAADIQDLVSCLACLESVFSRFYGLGGSSTSPVVPASLHGLLSAALQAWALLLTICPSTQISHILDSCPGCPSSCPVKV

SEQ ID NO: 41276 - protein, 152 aa, Homo sapiens
  Payload ID: 8401
  Gene Symbol: IL1F10
  Gene Name: interleukin 1 family, member 10 (theta)
  Uniprot ID: Q8WWZ1
  ENSP ID: ENSP00000341794
MCSLPMARYYIIKYADQKALYTRDGQLLVGDPVADNCCAEKICILPNRGLARTKVPIFLGIQGGSRCLACVETEEGPSLQLEDVNIEELYKGGEEATRFTFFQSSSGSAFRLEAAAWPGWFLCGPAEPQQPVQLTKESEPSARTKFYFEQSW

SEQ ID NO: 41277 - protein, 152 aa, Homo sapiens; identical to SEQ ID NO: 41276
  Payload ID: 8401
  Gene Symbol: IL1F10
  Gene Name: interleukin 1 family, member 10 (theta)
  Uniprot ID: Q8WWZ1
  ENSP ID: ENSP00000376893

SEQ ID NO: 41278 - protein, 570 aa, Homo sapiens
  Payload ID: 8402
  Gene Symbol: IL1RAP
  Gene Name: interleukin 1 receptor accessory protein
  Uniprot ID: Q9NPH3
  ENSP ID: ENSP00000072516
MTLLWCVVSLYFYGILQSDASERCDDWGLDTMRQIQVFEDEPARIKCPLFEHFLKFNYSTAHSAGLTLIWYWTRQDRDLEEPINFRLPENRISKEKDVLWFRPTLLNDTGNYTCMLRNTTYCSKVAFPLEVVQKDSCFNSPMKLPVHKLYIEYGIQRITCPNVDGYFPSSVKPTITWYMGCYKIQNFNNVIPEGMNLSFLIALISNNGNYTCVVTYPENGRTFHLTRTLTVKVVGSPKNAVPPVIHSPNDHVVYEKEPGEELLIPCTVYFSFLMDSRNEVWWTIDGKKPDDITIDVTINESISHSRTEDETRTQILSIKKVTSEDLKRSYVCHARSAKGEVAKAAKVKQKVPAPRYTVELACGFGATVLLVVILIVVYHVYWLEMVLFYRAHFGTDETILDGKEYDIYVSYARNAEEEEFVLLTLRGVLENEFGYKLCIFDRDSLPGGIVTDETLSFIQKSRRLLVVLSPNYVLQGTQALLELKAGLENMASRGNINVILVQYKAVKETKVKELKRAKTVLTVIKWKGEKSKYPQGRFWKQLQVAMPVKKSPRRSSSDEQGLSYSSLKNV

SEQ ID NO: 41279 - protein, 687 aa, Homo sapiens
  Payload ID: 8402
  Gene Symbol: IL1RAP
  Gene Name: interleukin 1 receptor accessory protein
  Uniprot ID: Q9NPH3
  ENSP ID: ENSP00000314807
MTLLWCVVSLYFYGILQSDASERCDDWGLDTMRQIQVFEDEPARIKCPLFEHFLKFNYSTAHSAGLTLIWYWTRQDRDLEEPINFRLPENRISKEKDVLWFRPTLLNDTGNYTCMLRNTTYCSKVAFPLEVVQKDSCFNSPMKLPVHKLYIEYGIQRITCPNVDGYFPSSVKPTITWYMGCYKIQNFNNVIPEGMNLSFLIALISNNGNYTCVVTYPENGRTFHLTRTLTVKVVGSPKNAVPPVIHSPNDHVVYEKEPGEELLIPCTVYFSFLMDSRNEVWWTIDGKKPDDITIDVTINESISHSRTEDETRTQILSIKKVTSEDLKRSYVCHARSAKGEVAKAAKVKQKVPAPRYTVELACGFGATVLLVVILIVVYHVYWLEMVLFYRAHFGTDETILDGKEYDIYVSYARNAEEEEFVLLTLRGVLENEFGYKLCIFDRDSLPGGNTVEAVFDFIQRSRRMIVVLSPDYVTEKSISMLEFKLGVMCQNSIATKLIVVEYRPLEHPHPGILQLKESVSFVSWKGEKSKHSGSKFWKALRLALPLRSLSASSGWNESCSSQSDISLDHVQRRRSRLKEPPELQSSERAAGSPPAPGTMSKHRGKSSATCRCCVTYCEGENHLRNKSRAEIHNQPQWETHLCKPVPQESETQWIQNGTRLEPPAPQISALALHHFTDLSNNNDFYIL

SEQ ID NO: 41280 - protein, 346 aa, Homo sapiens
  Payload ID: 8402
  Gene Symbol: IL1RAP
  Gene Name: interleukin 1 receptor accessory protein
  Uniprot ID: Q9NPH3
  ENSP ID: ENSP00000345829
MTLLWCVVSLYFYGILQSDASERCDDWGLDTMRQIQVFEDEPARIKCPLFEHFLKFNYSTAHSAGLTLIWYWTRQDRDLEEPINFRLPENRISKEKDVLWFRPTLLNDTGNYTCMLRNTTYCSKVAFPLEVVQKDSCFNSPMKLPVHKLYIEYGIQRITCPNVDGYFPSSVKPTITWYMGCYKIQNFNNVIPEGMNLSFLIALISNNGNYTCVVTYPENGRTFHLTRTLTVKVVGSPKNAVPPVIHSPNDHVVYEKEPGEELLIPCTVYFSFLMDSRNEVWWTIDGKKPDDITIDVTINESASSKIHSGTGLWFWSHSPASGDSHCCLPCLLARDGPILPGSFWNR

SEQ ID NO: 41281 - protein, 356 aa, Homo sapiens
  Payload ID: 8402
  Gene Symbol: IL1RAP
  Gene Name: interleukin 1 receptor accessory protein
  Uniprot ID: Q9NPH3
  ENSP ID: ENSP00000387371
MTLLWCVVSLYFYGILQSDASERCDDWGLDTMRQIQVFEDEPARIKCPLFEHFLKFNYSTAHSAGLTLIWYWTRQDRDLEEPINFRLPENRISKEKDVLWFRPTLLNDTGNYTCMLRNTTYCSKVAFPLEVVQKDSCFNSPMKLPVHKLYIEYGIQRITCPNVDGYFPSSVKPTITWYMGCYKIQNFNNVIPEGMNLSFLIALISNNGNYTCVVTYPENGRTFHLTRTLTVKVVGSPKNAVPPVIHSPNDHVVYEKEPGEELLIPCTVYFSFLMDSRNEVWWTIDGKKPDDITIDVTINESISHSRTEDETRTQILSIKKVTSEDLKRSYVCHARSAKGEVAKAAKVKQKGNRCGQ

SEQ ID NO: 41282 - protein, 113 aa, Homo sapiens
  Payload ID: 8402
  Gene Symbol: IL1RAP
  Gene Name: interleukin 1 receptor accessory protein
  ENSP ID: ENSP00000389149
MTLLWCVVSLYFYGILQSDASERCDDWGLDTMRQIQVFEDEPARIKCPLFEHFLKFNYSTAHSAGLTLIWYWTRQDRDLEEPINFRLPENRISKEKDVLWFRPTLLNDTGNYT

SEQ ID NO: 41283 - protein, 570 aa, Homo sapiens; identical to SEQ ID NO: 41278
  Payload ID: 8402
  Gene Symbol: IL1RAP
  Gene Name: interleukin 1 receptor accessory protein
  Uniprot ID: Q9NPH3
  ENSP ID: ENSP00000390541

SEQ ID NO: 41284 - protein, 215 aa, Homo sapiens
  Payload ID: 8402
  Gene Symbol: IL1RAP
  Gene Name: interleukin 1 receptor accessory protein
  ENSP ID: ENSP00000391899
MKLPVHKLYIEYGIQRITCPNVDGYFPSSVKPTITWYMGCYKIQNFNNVIPEGMNLSFLIALISNNGNYTCVVTYPENGRTFHLTRTLTVKVVGSPKNAVPPVIHSPNDHVVYEKEPGEELLIPCTVYFSFLMDSRNEVWWTIDGKKPDDITIDVTINESISHSRTEDETRTQILSIKKVTSEDLKRSYVCHARSAKGEVAKAAKVKQKGNRCGQ

SEQ ID NO: 41285 - protein, 570 aa, Homo sapiens; identical to SEQ ID NO: 41278
  Payload ID: 8402
  Gene Symbol: IL1RAP
  Gene Name: interleukin 1 receptor accessory protein
  Uniprot ID: Q9NPH3
  ENSP ID: ENSP00000401132

SEQ ID NO: 41286 - protein, 687 aa, Homo sapiens; identical to SEQ ID NO: 41279
  Payload ID: 8402
  Gene Symbol: IL1RAP
  Gene Name: interleukin 1 receptor accessory protein
  Uniprot ID: Q9NPH3
  ENSP ID: ENSP00000408893

SEQ ID NO: 41287 - protein, 356 aa, Homo sapiens; identical to SEQ ID NO: 41281
  Payload ID: 8402
  Gene Symbol: IL1RAP
  Gene Name: interleukin 1 receptor accessory protein
  Uniprot ID: Q9NPH3
  ENSP ID: ENSP00000409352

SEQ ID NO: 41288 - protein, 145 aa, Homo sapiens
  Payload ID: 8402
  Gene Symbol: IL1RAP
  Gene Name: interleukin 1 receptor accessory protein
  ENSP ID: ENSP00000412008
MTLLWCVVSLYFYGILQSDASERCDDWGLDTMRQIQVFEDEPARIKCPLFEHFLKFNYSTAHSAGLTLIWYWTRQDRDLEEPINFRLPENRISKEKDVLWFRPTLLNDTGNYTCMLRNTTYCSKVAFPLEVVQKDSCFNSPMKLP

SEQ ID NO: 41289 - protein, 570 aa, Homo sapiens; identical to SEQ ID NO: 41278
  Payload ID: 8402
  Gene Symbol: IL1RAP
  Gene Name: interleukin 1 receptor accessory protein
  Uniprot ID: Q9NPH3
  ENSP ID: ENSP00000412053

SEQ ID NO: 41290 - protein, 193 aa, Homo sapiens
  Payload ID: 8402
  Gene Symbol: IL1RAP
  Gene Name: interleukin 1 receptor accessory protein
  ENSP ID: ENSP00000414102
  MOD_RES (1)..(1): Any amino acid
XFIHIGTSKHIEVKTQGCYKIQNFNNVIPEGMNLSFLIALISNNGNYTCVVTYPENGRTFHLTRTLTVKVVGSPKNAVPPVIHSPNDHVVYEKEPGEELLIPCTVYFSFLMDSRNEVWWTIDGKKPDDITIDVTINESISHSRTEDETRTQILSIKKVTSEDLKRSYVCHARSAKGEVAKAAKVKQKGNRCGQ

SEQ ID NO: 41291 - protein, 346 aa, Homo sapiens; identical to SEQ ID NO: 41280
  Payload ID: 8402
  Gene Symbol: IL1RAP
  Gene Name: interleukin 1 receptor accessory protein
  Uniprot ID: Q9NPH3
  ENSP ID: ENSP00000416296

SEQ ID NO: 41292 - protein, 437 aa, Homo sapiens
  Payload ID: 8403
  Gene Symbol: IL1RAPL1
  Gene Name: interleukin 1 receptor accessory protein-like 1
  ENSP ID: ENSP00000305200
GDSANLTCRAFFGYSGDVSPLIYWMKGEKFIEDLDENRVWESDIRILKEHLGEQEVSISLIVDSVEEGDLGNYSCYVENGNGRRHASVLLHKRELMYTVELAGGLGAILLLLVCLVTIYKCYKIEIMLFYRNHFGAEELDGDNKDYDAYLSYTKVDPDQWNQETGEEERFALEILPDMLEKHYGYKLFIPDRDLIPTGTYIEDVARCVDQSKRLIIVMTPNYVVRRGWSIFELETRLRNMLVTGEIKVILIECSELRGIMNYQEVEALKHTIKLLTVIKWHGPKCNKLNSKFWKRLQYEMPFKRIEPITHEQALDVSEQGPFGELQTVSAISMAAATSTALATAHPDLRSTFHNTYHSQMRQKHYYRSYEYDVPPTGTLPLTSIGNQHTYCNIPMTLINGQRPQTKSSREQNPDEAHTNSAILPLLPRETSISSVIW

SEQ ID NO: 41293 - protein, 696 aa, Homo sapiens
  Payload ID: 8403
  Gene Symbol: IL1RAPL1
  Gene Name: interleukin 1 receptor accessory protein-like 1
  Uniprot ID: Q9NZN1
  ENSP ID: ENSP00000368278
MKAPIPHLILLYATFTQSLKVVTKRGSADGCTDWSIDIKKYQVLVGEPVRIKCALFYGYIRTNYSLAQSAGLSLMWYKSSGPGDFEEPIAFDGSRMSKEEDSIWFRPTLLQDSGLYACVIRNSTYCMKVSISLTVGENDTGLCYNSKMKYFEKAELSKSKEISCRDIEDFLLPTREPEILWYKECRTKTWRPSIVFKRDTLLIREVREDDIGNYTCELKYGGFVVRRTTELTVTAPLTDKPPKLLYPMESKLTIQETQLGDSANLTCRAFFGYSGDVSPLIYWMKGEKFIEDLDENRVWESDIRILKEHLGEQEVSISLIVDSVEEGDLGNYSCYVENGNGRRHASVLLHKRELMYTVELAGGLGAILLLLVCLVTIYKCYKIEIMLFYRNHFGAEELDGDNKDYDAYLSYTKVDPDQWNQETGEEERFALEILPDMLEKHYGYKLFIPDRDLIPTGTYIEDVARCVDQSKRLIIVMTPNYVVRRGWSIFELETRLRNMLVTGEIKVILIECSELRGIMNYQEVEALKHTIKLLTVIKWHGPKCNKLNSKFWKRLQYEMPFKRIEPITHEQALDVSEQGPFGELQTVSAISMAAATSTALATAHPDLRSTFHNTYHSQMRQKHYYRSYEYDVPPTGTLPLTSIGNQHTYCNIPMTLINGQRPQTKSSREQNPDEAHTNSAILPLLPRETSISSVIW

SEQ ID NO: 41294 - protein, 429 aa, Homo sapiens
  Payload ID: 8404
  Gene Symbol: IL1RAPL2
  Gene Name: interleukin 1 receptor accessory protein-like 2
  ENSP ID: ENSP00000344976
GKPLNIPCKAFFGFSGESGPMIYWMKGEKFIEELAGHIREGEIRLLKEHLGEKEVELALIFDSVVEADLANYTCHVENRNGRKHASVLLRKKDLIYKIELAGGLGAIFLLLVLLVVIYKCYNIELMLFYRQHFGADETNDDNKEYDAYLSYTKVDQDTLDCDNPEEEQFALEVLPDVLEKHYGYKLFIPERDLIPSGTYMEDLTRYVEQSRRLIIVLTPDYILRRGWSIFELESRLHNMLVSGEIKVILIECTELKGKVNCQEVESLKRSIKLLSLIKWKGSKSSKLNSKFWKHLVYEMPIKKKEMLPRCHVLDSAEQGLFGELQPIPSIAMTSTSATLVSSQADLPEFHPSDSMQIRHCCRGYKHEIPATTLPVPSLGNHHTYCNLPLTLLNGQLPLNNTLKDTQEFHRNSSLLPLSSKELSFTSDIW

SEQ ID NO: 41295 - protein, 686 aa, Homo sapiens
  Payload ID: 8404
  Gene Symbol: IL1RAPL2
  Gene Name: interleukin 1 receptor accessory protein-like 2
  Uniprot ID: Q9NP60
  ENSP ID: ENSP00000361663
MKPPFLLALVVCSVVSTNLKMVSKRNSVDGCIDWSVDLKTYMALAGEPVRVKCALFYSYIRTNYSTAQSTGLRLMWYKNKGDLEEPIIFSEVRMSKEEDSIWFHSAEAQDSGFYTCVLRNSTYCMKVSMSLTVAENESGLCYNSRIRYLEKSEVTKRKEISCPDMDDFKKSDQEPDVVWYKECKPKMWRSIIIQKGNALLIQEVQEEDGGNYTCELKYEGKLVRRTTELKVTALLTDKPPKPLFPMENQPSVIDVQLGKPLNIPCKAFFGFSGESGPMIYWMKGEKFIEELAGHIREGEIRLLKEHLGEKEVELALIFDSVVEADLANYTCHVENRNGRKHASVLLRKKDLIYKIELAGGLGAIFLLLVLLVVIYKCYNIELMLFYRQHFGADETNDDNKEYDAYLSYTKVDQDTLDCDNPEEEQFALEVLPDVLEKHYGYKLFIPERDLIPSGTYMEDLTRYVEQSRRLIIVLTPDYILRRGWSIFELESRLHNMLVSGEIKVILIECTELKGKVNCQEVESLKRSIKLLSLIKWKGSKSSKLNSKFWKHLVYEMPIKKKEMLPRCHVLDSAEQGLFGELQPIPSIAMTSTSATLVSSQADLPEFHPSDSMQIRHCCRGYKHEIPATTLPVPSLGNHHTYCNLPLTLLNGQLPLNNTLKDTQEFHRNSSLLPLSSKELSFTSDIW

SEQ ID NO: 41296 - protein, 180 aa, Homo sapiens
  Payload ID: 8405
  Gene Symbol: IL1RN
  Gene Name: interleukin 1 receptor antagonist
  Uniprot ID: P18510
  ENSP ID: ENSP00000259206
MALADLYEEGGGGGGEGEDNADSKETICRPSGRKSSKMQAFRIWDVNQKTFYLRNNQLVAGYLQGPNVNLEEKIDVVPIEPHALFLGIHGGKMCLSCVKSGDETRLQLEAVNITDLSENRKQDKRFAFIRSDSGPTTSFESAACPGWFLCTAMEADQPVSLTNMPDEGVMVTKFYFQEDE

SEQ ID NO: 41297 - protein, 159 aa, Homo sapiens
  Payload ID: 8405
  Gene Symbol: IL1RN
  Gene Name: interleukin 1 receptor antagonist
  Uniprot ID: P18510
  ENSP ID: ENSP00000329072
MALETICRPSGRKSSKMQAFRIWDVNQKTFYLRNNQLVAGYLQGPNVNLEEKIDVVPIEPHALFLGIHGGKMCLSCVKSGDETRLQLEAVNITDLSENRKQDKRFAFIRSDSGPTTSFESAACPGWFLCTAMEADQPVSLTNMPDEGVMVTKFYFQEDE

SEQ ID NO: 41298 - protein, 143 aa, Homo sapiens
  Payload ID: 8405
  Gene Symbol: IL1RN
  Gene Name: interleukin 1 receptor antagonist
  Uniprot ID: P18510
  ENSP ID: ENSP00000354816
MQAFRIWDVNQKTFYLRNNQLVAGYLQGPNVNLEEKIDVVPIEPHALFLGIHGGKMCLSCVKSGDETRLQLEAVNITDLSENRKQDKRFAFIRSDSGPTTSFESAACPGWFLCTAMEADQPVSLTNMPDEGVMVTKFYFQEDE

SEQ ID NO: 41299 - protein, 177 aa, Homo sapiens
  Payload ID: 8405
  Gene Symbol: IL1RN
  Gene Name: interleukin 1 receptor antagonist
  Uniprot ID: P18510
  ENSP ID: ENSP00000387173
MEICRGLRSHLITLLLFLFHSETICRPSGRKSSKMQAFRIWDVNQKTFYLRNNQLVAGYLQGPNVNLEEKIDVVPIEPHALFLGIHGGKMCLSCVKSGDETRLQLEAVNITDLSENRKQDKRFAFIRSDSGPTTSFESAACPGWFLCTAMEADQPVSLTNMPDEGVMVTKFYFQEDE

SEQ ID NO: 41300 - protein, 143 aa, Homo sapiens; identical to SEQ ID NO: 41298
  Payload ID: 8405
  Gene Symbol: IL1RN
  Gene Name: interleukin 1 receptor antagonist
  Uniprot ID: P18510
  ENSP ID: ENSP00000387210

SEQ ID NO: 41301 - protein, 569 aa, Homo sapiens
  Payload ID: 8406
  Gene Symbol: IL1R1
  Gene Name: interleukin 1 receptor, type I
  Uniprot ID: P14778
  ENSP ID: ENSP00000386380
MKVLLRLICFIALLISSLEADKCKEREEKIILVSSANEIDVRPCPLNPNEHKGTITWYKDDSKTPVSTEQASRIHQHKEKLWFVPAKVEDSGHYYCVVRNSSYCLRIKISAKFVENEPNLCYNAQAIFKQKLPVAGDGGLVCPYMEFFKNENNELPKLQWYKDCKPLLLDNIHFSGVKDRLIVMNVAEKHRGNYTCHASYTYLGKQYPITRVIEFITLEENKPTRPVIVSPANETMEVDLGSQIQLICNVTGQLSDIAYWKWNGSVIDEDDPVLGEDYYSVENPANKRRSTLITVLNISEIESRFYKHPFTCFAKNTHGIDAAYIQLIYPVTNFQKHMIGICVTLTVIIVCSVFIYKIFKIDIVLWYRDSCYDFLPIKASDGKTYDAYILYPKTVGEGSTSDCDIFVFKVLPEVLEKQCGYKLFIYGRDDYVGEDIVEVINENVKKSRRLIIILVRETSGFSWLGGSSEEQIAMYNALVQDGIKVVLLELEKIQDYEKMPESIKFIKQKHGAIRWSGDFTQGPQSAKTRFWKNVRYHMPVQRRSPSSKHQLLSPATKEKLQREAHVPLG

SEQ ID NO: 41302 - protein, 447 aa, Homo sapiens
  Payload ID: 8406
  Gene Symbol: IL1R1
  Gene Name: interleukin 1 receptor, type I
  ENSP ID: ENSP00000386478
MKVLLRLICFIALLISSLEADKCKEREEKIILVSSANEIDVRPCPLNPNEHKGTITWYKDDSKTPVSTEQASRIHQHKEKLWFVPAKVEDSGHYYCVVRNSSYCLRIKISAKFVENEPNLCYNAQAIFKQKLPVAGDGGLVCPYMEFFKNENNELPKLQWYKDCKPLLLDNIHFSGVKDRLIVMNVAEKHRGNYTCHASYTYLGKQYPITRVIEFITLEENKPTRPVIVSPANETMEVDLGSQIQLICNVTGQLSDIAYWKWNGSVIDEDDPVLGEDYYSVENPANKRRSTLITVLNISEIESRFYKHPFTCFAKNTHGIDAAYIQLIYPVTNFQKHMIGICVTLTVIIVCSVFIYKIFKIDIVLWYRDSCYDFLPIKASDGKTYDAYILYPKTVGEGSTSDCDIFVFKVLPEVLEKQCGYKLFIYGRDDYVGEGMCVMEQSKGLLL

SEQ ID NO: 41303 - protein, 173 aa, Homo sapiens
  Payload ID: 8406
  Gene Symbol: IL1R1
  Gene Name: interleukin 1 receptor, type I
  ENSP ID: ENSP00000386555
MKVLLRLICFIALLISSLEADKCKEREEKIILVSSANEIDVRPCPLNPNEHKGTITWYKDDSKTPVSTEQASRIHQHKEKLWFVPAKVEDSGHYYCVVRNSSYCLRIKISAKFVENEPNLCYNAQAIFKQKLPVAGDGGLVCPYMEFFKNENNELPKLQWYKVAVSRVWATAL

SEQ ID NO: 41304 - protein, 538 aa, Homo sapiens
  Payload ID: 8406
  Gene Symbol: IL1R1
  Gene Name: interleukin 1 receptor, type I
  ENSP ID: ENSP00000386776
MKVLLRLICFIALLISSLEADKCKEREEKIILVSSANEIDVRPCPLNPNEHKGTITWYKDDSKTPVSTEQASRIHQHKEKLWFVPAKVEDSGHYYCVVRNSSYCLRIKISAKFVENEPNLCYNAQAIFKQKLPVAGDGGLVCPYMEFFKNENNELPKLQWYKDCKPLLLDNIHFSGVKDRLIVMNVAEKHRGNYTCHASYTYLGKQYPITRVIEFITLEENKPTRPVIVSPANETMEVDLGSQIQLICNVTGQLSDIAYWKWNGSVIDEDDPVLGEDYYSVENPANKRRSTLITVLNISEIESRFYKHPFTCFAKNTHGIDAAYIQLIYPVTNFQKHMIGICVTLTVIIVCSVFIYKIFKIDIVLWYRDSCYDFLPIKVLPEVLEKQCGYKLFIYGRDDYVGEDIVEVINENVKKSRRLIIILVRETSGFSWLGGSSEEQIAMYNALVQDGIKVVLLELEKIQDYEKMPESIKFIKQKHGAIRWSGDFTQGPQSAKTRFWKNVRYHMPVQRRSPSSKHQLLSPATKEKLQREAHVPLG

SEQ ID NO: 41305 - protein, 447 aa, Homo sapiens; identical to SEQ ID NO: 41302
  Payload ID: 8406
  Gene Symbol: IL1R1
  Gene Name: interleukin 1 receptor, type I
  ENSP ID: ENSP00000387131

SEQ ID NO: 41306 - protein, 124 aa, Homo sapiens
  Payload ID: 8406
  Gene Symbol: IL1R1
  Gene Name: interleukin 1 receptor, type I
  ENSP ID: ENSP00000390349
  MOD_RES (1)..(1): Any amino acid
XKCKEREEKIILVSSANEIDVRPCPLNPNEHKGTITWYKDDSKTPVSTEQASRIHQHKEKLWFVPAKVEDSGHYYCVETEDLCALIWSFLKMKIMSYLNYSGIRIANLYFLTIYTLVESKIGSS

SEQ ID NO: 41307 - protein, 114 aa, Homo sapiens
  Payload ID: 8406
  Gene Symbol: IL1R1
  Gene Name: interleukin 1 receptor, type I
  ENSP ID: ENSP00000393296
MKVLLRLICFIALLISSLEADKCKEREEKIILVSSANEIDVRPCPLNPNEHKGTITWYKDDSKTPVSTEQASRIHQHKEKLWFVPAKVEDSGHYYCVVRNSSYCLRIKISAKFV

SEQ ID NO: 41308 - protein, 80 aa, Homo sapiens
  Payload ID: 8406
  Gene Symbol: IL1R1
  Gene Name: interleukin 1 receptor, type I
  ENSP ID: ENSP00000401646
MKVLLRLICFIALLISSLEADKCKEREEKIILVSSANEIDVRPCPLNPNEHKGTITWYKDDSKTPVSTEQASRIHQHKEK

SEQ ID NO: 41309 - protein, 119 aa, Homo sapiens
  Payload ID: 8406
  Gene Symbol: IL1R1
  Gene Name: interleukin 1 receptor, type I
  ENSP ID: ENSP00000407017
MKVLLRLICFIALLISSLEADKCKEREEKIILVSSANEIDVRPCPLNPNEHKGTITWYKDDSKTPVSTEQASRIHQHKEKLWFVPAKVEDSGHYYCVVRIANLYFLTIYTLVESKIGSS

SEQ ID NO: 41310 - protein, 182 aa, Homo sapiens
  Payload ID: 8406
  Gene Symbol: IL1R1
  Gene Name: interleukin 1 receptor, type I
  ENSP ID: ENSP00000408101
MKVLLRLICFIALLISSLEADKCKEREEKIILVSSANEIDVRPCPLNPNEHKGTITWYKDDSKTPVSTEQASRIHQHKEKLWFVPAKVEDSGHYYCVVRNSSYCLRIKISAKFVENEPNLCYNAQAIFKQKLPVAGDGGLVCPYMEFFKNENNELPKLQWYKDCKPLLLDNIHFSGVKDRLI

SEQ ID NO: 41311 - protein, 298 aa, Homo sapiens
  Payload ID: 8406
  Gene Symbol: IL1R1
  Gene Name: interleukin 1 receptor, type I
  ENSP ID: ENSP00000410461
MEFFKNENNELPKLQWYKDCKPLLLDNIHFSGVKDRLIVMNVAEKHRGNYTCHASYTYLGKQYPITRVIEFITLEENKPTRPVIVSPANETMEVDLGSQIQLICNVTGQLSDIAYWKWNGSVIDEDDPVLGEDYYSVENPANKRRSTLITVLNISEIESRFYKHPFTCFAKNTHGIDAAYIQLIYPVTNFQKHMIGICVTLTVIIVCSVFIYKIFKIDIVLWYRDSCYDFLPIKASDGKTYDAYILYPKTVGEGSTSDCDIFVFKVLPEVLEKQCGYKLFIYGRDDYVGEDIVEVINE

SEQ ID NO: 41312 - protein, 106 aa, Homo sapiens
  Payload ID: 8406
  Gene Symbol: IL1R1
  Gene Name: interleukin 1 receptor, type I
  ENSP ID: ENSP00000411627
MKVLLRLICFIALLISSLEADKCKEREEKIILVSSANEIDVRPCPLNPNEHKGTITWYKDDSKTPVSTEQASRIHQHKEKLWFVPAKVEDSGHYYCVVRNSSYCLR

SEQ ID NO: 41313 - protein, 447 aa, Homo sapiens; identical to SEQ ID NO: 41302
  Payload ID: 8406
  Gene Symbol: IL1R1
  Gene Name: interleukin 1 receptor, type I
  ENSP ID: ENSP00000415366

SEQ ID NO: 41314 - protein, 398 aa, Homo sapiens
  Payload ID: 8407
  Gene Symbol: IL1R2
  Gene Name: interleukin 1 receptor, type II
  Uniprot ID: P27930
  ENSP ID: ENSP00000330959
MLRLYVLVMGVSAFTLQPAAHTGAARSCRFRGRHYKREFRLEGEPVALRCPQVPYWLWASVSPRINLTWHKNDSARTVPGEEETRMWAQDGALWLLPALQEDSGTYVCTTRNASYCDKMSIELRVFENTDAFLPFISYPQILTLSTSGVLVCPDLSEFTRDKTDVKIQWYKDSLLLDKDNEKFLSVRGTTHLLVHDVALEDAGYYRCVLTFAHEGQQYNITRSIELRIKKKKEETIPVIISPLKTISASLGSRLTIPCKVFLGTGTPLTTMLWWTANDTHIESAYPGGRVTEGPRQEYSENNENYIEVPLIFDPVTREDLHMDFKCVVHNTLSFQTLRTTVKEASSTFSWGIVLAPLSLAFLVLGGIWMHRRCKHRTGKADGLTVLWPHHQDFQSYPK

SEQ ID NO: 41315 - protein, 398 aa, Homo sapiens; identical to SEQ ID NO: 41314
  Payload ID: 8407
  Gene Symbol: IL1R2
  Gene Name: interleukin 1 receptor, type II
  Uniprot ID: P27930
  ENSP ID: ENSP00000377066

SEQ ID NO: 41316 - protein, 229 aa, Homo sapiens
  Payload ID: 8407
  Gene Symbol: IL1R2
  Gene Name: interleukin 1 receptor, type II
  ENSP ID: ENSP00000408415
MLRLYVLVMGVSAFTLQPAAHTGAARSCRFRGRHYKREFRLEGEPVALRCPQVPYWLWASVSPRINLTWHKNDSARTVPGEEETRMWAQDGALWLLPALQEDSGTYVCTTRNASYCDKMSIELRVFENTDAFLPFISYPQILTLSTSGVLVCPDLSEFTRDKTDVKIQWYKDSLLLDKDNEKFLSVRGTTHLLVHDVALEDAGYYRCVLTFAHEGQQYNITRSIELRIK

SEQ ID NO: 41317 - protein, 296 aa, Homo sapiens
  Payload ID: 8407
  Gene Symbol: IL1R2
  Gene Name: interleukin 1 receptor, type II
  Uniprot ID: P27930
  ENSP ID: ENSP00000414611
MLRLYVLVMGVSAFTLQPAAHTGAARSCRFRGRHYKREFRLEGEPVALRCPQVPYWLWASVSPRINLTWHKNDSARTVPGEEETRMWAQDGALWLLPALQEDSGTYVCTTRNASYCDKMSIELRVFENTDAFLPFISYPQILTLSTSGVLVCPDLSEFTRDKTDVKIQWYKDSLLLDKDNEKFLSVRGTTHLLVHDVALEDAGYYRCVLTFAHEGQQYNITRSIELRIKKKKEETIPVIISPLKTISASLGSRLTIPCKVFLGTGTPLTTMLWWTANDTHIESAYPGGRVTEGPRQ

SEQ ID NO: 41318 - protein, 556 aa, Homo sapiens
  Payload ID: 8408
  Gene Symbol: IL1RL1
  Gene Name: interleukin 1 receptor-like 1
  Uniprot ID: Q01638
  ENSP ID: ENSP00000233954
MGFWILAILTILMYSTAAKFSKQSWGLENEALIVRCPRQGKPSYTVDWYYSQTNKSIPTQERNRVFASGQLLKFLPAAVADSGIYTCIVRSPTFNRTGYANVTIYKKQSDCNVPDYLMYSTVSGSEKNSKIYCPTIDLYNWTAPLEWFKNCQALQGSRYRAHKSFLVIDNVMTEDAGDYTCKFIHNENGANYSVTATRSFTVKDEQGFSLFPVIGAPAQNEIKEVEIGKNANLTCSACFGKGTQFLAAVLWQLNGTKITDFGEPRIQQEEGQNQSFSNGLACLDMVLRIADVKEEDLLLQYDCLALNLHGLRRHTVRLSRKNPIDHHSIYCIIAVCSVFLMLINVLVIILKMFWIEATLLWRDIAKPYKTRNDGKLYDAYVVYPRNYKSSTDGASRVEHFVHQILPDVLENKCGYTLCIYGRDMLPGEDVVTAVETNIRKSRRHIFILTPQITHNKEFAYEQEVALHCALIQNDAKVILIEMEALSELDMLQAEALQDSLQHLMKVQGTIKWREDHIANKRSLNSKFWKHVRYQMPVPSKIPRKASSLTPLAAQKQ

SEQ ID NO: 41319 - protein, 328 aa, Homo sapiens
  Payload ID: 8408
  Gene Symbol: IL1RL1
  Gene Name: interleukin 1 receptor-like 1
  Uniprot ID: Q01638
  ENSP ID: ENSP00000310371
MGFWILAILTILMYSTAAKFSKQSWGLENEALIVRCPRQGKPSYTVDWYYSQTNKSIPTQERNRVFASGQLLKFLPAAVADSGIYTCIVRSPTFNRTGYANVTIYKKQSDCNVPDYLMYSTVSGSEKNSKIYCPTIDLYNWTAPLEWFKNCQALQGSRYRAHKSFLVIDNVMTEDAGDYTCKFIHNENGANYSVTATRSFTVKDEQGFSLFPVIGAPAQNEIKEVEIGKNANLTCSACFGKGTQFLAAVLWQLNGTKITDFGEPRIQQEEGQNQSFSNGLACLDMVLRIADVKEEDLLLQYDCLALNLHGLRRHTVRLSRKNPSKECF

SEQ ID NO: 41320 - protein, 211 aa, Homo sapiens
  Payload ID: 8408
  Gene Symbol: IL1RL1
  Gene Name: interleukin 1 receptor-like 1
  Uniprot ID: Q01638
  ENSP ID: ENSP00000384822
MYSTVSGSEKNSKIYCPTIDLYNWTAPLEWFKNCQALQGSRYRAHKSFLVIDNVMTEDAGDYTCKFIHNENGANYSVTATRSFTVKDEQGFSLFPVIGAPAQNEIKEVEIGKNANLTCSACFGKGTQFLAAVLWQLNGTKITDFGEPRIQQEEGQNQSFSNGLACLDMVLRIADVKEEDLLLQYDCLALNLHGLRRHTVRLSRKNPSKECF

SEQ ID NO: 41321 - protein, 314 aa, Homo sapiens
  Payload ID: 8408
  Gene Symbol: IL1RL1
  Gene Name: interleukin 1 receptor-like 1
  ENSP ID: ENSP00000386618
MGFWILAILTILMYSTAAKFSKQSWGLENEALIVRCPRQGKPSYTVDWYYSQTNKSIPTQERNRVFASGQLLKFLPAAVADSGIYTCIVRSPTFNRTGYANVTIYKKQSDCNVPDYLMYSTVSGSEKNSKIYCPTIDLYNWTAPLEWFKNCQALQGSRYRAHKSFLVIDNVMTEDAGDYTCKFIHNENGANYSVTATRSFTVKDEQGFSLFPVIGAPAQNEIKEVEIGTQFLAAVLWQLNGTKITDFGEPRIQQEEGQNQSFSNGLACLDMVLRIADVKEEDLLLQYDCLALNLHGLRRHTVRLSRKNPSKECF

SEQ ID NO: 41322 - protein, 259 aa, Homo sapiens
  Payload ID: 8408
  Gene Symbol: IL1RL1
  Gene Name: interleukin 1 receptor-like 1
  Uniprot ID: Q01638
  ENSP ID: ENSP00000391120
MGFWILAILTILMYSTAAKFSKQSWGLENEALIVRCPRQGKPSYTVDWYYSQTNKSIPTQERNRVFASGQLLKFLPAAVADSGIYTCIVRSPTFNRTGYANVTIYKKQSDCNVPDYLMYSTVSGSEKNSKIYCPTIDLYNWTAPLEWFKNCQALQGSRYRAHKSFLVIDNVMTEDAGDYTCKFIHNENGANYSVTATRSFTVKVWCQSFCKLKKSLIFSNTHWIQSLMRGFVMVYYGVHKCCRVVFNLCLQYFQHHQWP

SEQ ID NO: 41323 - protein, 38 aa, Homo sapiens
  Payload ID: 8408
  Gene Symbol: IL1RL1
  Gene Name: interleukin 1 receptor-like 1
  ENSP ID: ENSP00000409437
MGFWILAILTILMYSTAAKFSKQSWGLENEALIVRCPR

SEQ ID NO: 41324 - protein, 575 aa, Homo sapiens
  Payload ID: 8409
  Gene Symbol: IL1RL2
  Gene Name: interleukin 1 receptor-like 2
  Uniprot ID: Q9HB29
  ENSP ID: ENSP00000264257
MWSLLLCGLSIALPLSVTADGCKDIFMKNEILSASQPFAFNCTFPPITSGEVSVTWYKNSSKIPVSKIIQSRIHQDETWILFLPMEWGDSGVYQCVIKGRDSCHRIHVNLTVFEKHWCDTSIGGLPNLSDEYKQILHLGKDDSLTCHLHFPKSCVLGPIKWYKDCNEIKGERFTVLETRLLVSNVSAEDRGNYACQAILTHSGKQYEVLNGITVSITERAGYGGSVPKIIYPKNHSIEVQLGTTLIVDCNVTDTKDNTNLRCWRVNNTLVDDYYDESKRIREGVETHVSFREHNLYTVNITFLEVKMEDYGLPFMCHAGVSTAYIILQLPAPDFRAYLIGGLIALVAVAVSVVYIYNIFKIDIVLWYRSAFHSTETIVDGKLYDAYVLYPKPHKESQRHAVDALVLNILPEVLERQCGYKLFIFGRDEFPGQAVANVIDENVKLCRRLIVIVVPESLGFGLLKNLSEEQIAVYSALIQDGMKVILIELEKIEDYTVMPESIQYIKQKHGAIRWHGDFTEQSQCMKTKFWKTVRYHMPPRRCRPFPPVQLLQHTPCYRTAGPELGSRRKKCTLTTG

SEQ ID NO: 41325 - protein, 172 aa, Homo sapiens
  Payload ID: 8409
  Gene Symbol: IL1RL2
  Gene Name: interleukin 1 receptor-like 2
  ENSP ID: ENSP00000387611
MWSLLLCGLSIALPLSVTADGCKDIFMKNEILSASQPFAFNCTFPPITSGEVSVTWYKNSSKIPVSKIIQSRIHQDETWILFLPMEWGDSGVYQCVIKGRDSCHRIHVNLTVFEKHWCDTSIGGLPNLSDEYKQILHLGKDDSLTCHLHFPKSCVLGPIKWYKDCNEIKGER

SEQ ID NO: 41326 - protein, 457 aa, Homo sapiens
  Payload ID: 8409
  Gene Symbol: IL1RL2
  Gene Name: interleukin 1 receptor-like 2
  Uniprot ID: Q9HB29
  ENSP ID: ENSP00000413348
MTGLVSLSYFPLSTRSCALQSCSPVWGCGPCCSAGCPSPFHCLSQQDCNEIKGERFTVLETRLLVSNVSAEDRGNYACQAILTHSGKQYEVLNGITVSIKRAGYGGSVPKIIYPKNHSIEVQLGTTLIVDCNVTDTKDNTNLRCWRVNNTLVDDYYDESKRIREGVETHVSFREHNLYTVNITFLEVKMEDYGLPFMCHAGVSTAYIILQLPAPDFRAYLIGGLIALVAVAVSVVYIYNIFKIDIVLWYRSAFHSTETIVDGKLYDAYVLYPKPHKESQRHAVDALVLNILPEVLERQCGYKLFIFGRDEFPGQAVANVIDENVKLCRRLIVIVVPESLGFGLLKNLSEEQIAVYSALIQDGMKVILIELEKIEDYTVMPESIQYIKQKHGAIRWHGDFTEQSQCMKTKFWKTVRYHMPPRRCRPFPPVQLLQHTPCYRTAGPELGSRRKKCTLTTG

SEQ ID NO: 41327 - protein, 271 aa, Homo sapiens
  Payload ID: 8410
  Gene Symbol: IL1A
  Gene Name: interleukin 1, alpha
  Uniprot ID: P01583
  ENSP ID: ENSP00000263339
MAKVPDMFEDLKNCYSENEEDSSSIDHLSLNQKSFYHVSYGPLHEGCMDQSVSLSISETSKTSKLTFKESMVVVATNGKVLKKRRLSLSQSITDDDLEAIANDSEEEIIKPRSAPFSFLSNVKYNFMRIIKYEFILNDALNQSIIRANDQYLTAAALHNLDEAVKFDMGAYKSSKDDAKITVILRISKTQLYVTAQDEDQPVLLKEMPEIPKTITGSETNLLFFWETHGTKNYFTSVAHPNLFIATKQDYWVCLAGGPPSITDFQILENQA

SEQ ID NO: 41328 - protein, 269 aa, Homo sapiens
  Payload ID: 8411
  Gene Symbol: IL1B
  Gene Name: interleukin 1, beta
  Uniprot ID: P01584
  ENSP ID: ENSP00000263341
MAEVPELASEMMAYYSGNEDDLFFEADGPKQMKCSFQDLDLCPLDGGIQLRISDHHYSKGFRQAASVVVAMDKLRKMLVPCPQTFQENDLSTFFPFIFEEEPIFFDTWDNEAYVHDAPVRSLNCTLRDSQQKSLVMSGPYELKALHLQGQDMEQQVVFSMSFVQGEESNDKIPVALGLKEKNLYLSCVLKDDKPTLQLESVDPKNYPKKKMEKRFVFNKIEINNKLEFESAQFPNWYISTSQAENMPVFLGGTKGGQDITDFTMQFVSS

SEQ ID NO: 41329 - protein, 111 aa, Homo sapiens
  Payload ID: 8411
  Gene Symbol: IL1B
  Gene Name: interleukin 1, beta
  ENSP ID: ENSP00000400854
MAEVPELASEMMAYYSGNEDDLFFEADGPKQMKCSFQDLDLCPLDGGIQLRISDHHYSKGFRQAASVVVAMDKLRKMLVPCPQTFQENDLSTFFPFIFEEEPIFFDTWDNE

SEQ ID NO: 41330 - protein, 143 aa, Homo sapiens
  Payload ID: 8411
  Gene Symbol: IL1B
  Gene Name: interleukin 1, beta
  ENSP ID: ENSP00000407219
MAEVPELASEMMAYYSGNEDDLFFEADGPKQMKCSFQDLDLCPLDGGIQLRISDHHYSKGFRQAASVVVAMDKLRKMLVPCPQTFQENDLSTFFPFIFEEEPIFFDTWDNEAYVHDAPVRSLNCTLRDSQQKSLVMSGPYELK

SEQ ID NO: 41331 - protein, 125 aa, Homo sapiens
  Payload ID: 8411
  Gene Symbol: IL1B
  Gene Name: interleukin 1, beta
  ENSP ID: ENSP00000409680
MAEVPELASEMMAYYSGNEDDLFFEADGPKQMKCSFQDLDLCPLDGGIQLRISDHHYSKGFRQAASVVVAMDKLRKMLVPCPQTFQENDLSTFFPFIFEEEPIFFDTWDNEAYVHDAPVRSLNCT

SEQ ID NO: 41332 - protein, 178 aa, Homo sapiens
  Payload ID: 8412
  Gene Symbol: IL10
  Gene Name: interleukin 10
  Uniprot ID: P22301
  ENSP ID: ENSP00000412237
MHSSALLCCLVLLTGVRASPGQGTQSENSCTHFPGNLPNMLRDLRDAFSRVKTFFQMKDQLDNLLLKESLLEDFKGYLGCQALSEMIQFYLEEVMPQAENQDPDIKAHVNSLGENLKTLRLRLRRCHRFLPCENKSKAVEQVKNAFNKLQEKGIYKAMSEFDIFINYIEAYMTMKIRN

SEQ ID NO: 41333 - protein, 578 aa, Homo sapiens
  Payload ID: 8413
  Gene Symbol: IL10RA
  Gene Name: interleukin 10 receptor, alpha
  Uniprot ID: Q13651
  ENSP ID: ENSP00000227752
MLPCLVVLLAALLSLRLGSDAHGTELPSPPSVWFEAEFFHHILHWTPIPNQSESTCYEVALLRYGIESWNSISNCSQTLSYDLTAVTLDLYHSNGYRARVRAVDGSRHSNWTVTNTRFSVDEVTLTVGSVNLEIHNGFILGKIQLPRPKMAPANDTYESIFSHFREYEIAIRKVPGNFTFTHKKVKHENFSLLTSGEVGEFCVQVKPSVASRSNKGMWSKEECISLTRQYFTVTNVIIFFAFVLLLSGALAYCLALQLYVRRRKKLPSVLLFKKPSPFIFISQRPSPETQDTIHPLDEEAFLKVSPELKNLDLHGSTDSGFGSTKPSLQTEEPQFLLPDPHPQADRTLGNREPPVLGDSCSSGSSNSTDSGICLQEPSLSPSTGPTWEQQVGSNSRGQDDSGIDLVQNSEGRAGDTQGGSALGHHSPPEPEVPGEEDPAAVAFQGYLRQTRCAEEKATKTGCLEEESPLTDGLGPKFGRCLVDEAGLHPPALAKGYLKQDPLEMTLASSGAPTGQWNQPTEEWSLLALSSCSDLGISDWSFAHDLAPLGCVAAPGGLLGSFNSDLVTLPLISSLQSSE

SEQ ID NO: 41334 - protein, 94 aa, Homo sapiens
  Payload ID: 8413
  Gene Symbol: IL10RA
  Gene Name: interleukin 10 receptor, alpha
  ENSP ID: ENSP00000435317
MLPCLVVLLAALLSLRLGSDAHGTELPSPPSVWFEAEFFHHILHWTPIPNQSESTCYEVALLSDSDSWQCEPRDPQWLHPREDSATQAQDGPRK

SEQ ID NO: 41335 - protein, 88 aa, Homo sapiens
  Payload ID: 8413
  Gene Symbol: IL10RA
  Gene Name: interleukin 10 receptor, alpha
  ENSP ID: ENSP00000436328
MLPCLVVLLAALLSLRLGSDAHVESPGWLALWQSGARVLPYSGKPGSQAHLLWKWKRLKLTGTDGLGRIEKYAQGQTPNPQTSSSTHF

SEQ ID NO: 41336 - protein, 325 aa, Homo sapiens
  Payload ID: 8414
  Gene Symbol: IL10RB
  Gene Name: interleukin 10 receptor, beta
  Uniprot ID: Q08334
  ENSP ID: ENSP00000290200
MAWSLGSWLGGCLLVSALGMVPPPENVRMNSVNFKNILQWESPAFAKGNLTFTAQYLSYRIFQDKCMNTTLTECDFSSLSKYGDHTLRVRAEFADEHSDWVNITFCPVDDTIIGPPGMQVEVLADSLHMRFLAPKIENEYETWTMKNVYNSWTYNVQYWKNGTDEKFQITPQYDFEVLRNLEPWTTYCVQVRGFLPDRNKAGEWSEPVCEQTTHDETVPSWMVAVILMASVFMVCLALLGCFALLWCVYKKTKYAFSPRNSLPQHLKEFLGHPHHNTLLFFSFPLSDENDVFDKLSVIAEDSESGKQNPGDSCSLGTPPGQGPQS

SEQ ID NO: 41337 - protein, 216 aa, Homo sapiens
  Payload ID: 8414
  Gene Symbol: IL10RB
  Gene Name: interleukin 10 receptor, beta
  ENSP ID: ENSP00000397611
DKCMNTTLTECDFSSLSKYGDHTLRVRAEFADEHSDWVNITFCPVDDTIIGPPGMQVEVLADSLHMRFLAPKIENEYETWTMKNVYNSWTYNVQYWKNGTDEKFQITPQYDFEVLRNLEPWTTYCVQVRGFLPDRNKAGEWSEPVCEQTTHDETVPSWMVAVILMASVFMVCLALLGCFALLWCVYKKTKYAFSPRNSLPQHLKERNWSDRKEQTE

SEQ ID NO: 41338 - protein, 71 aa, Homo sapiens
  Payload ID: 8414
  Gene Symbol: IL10RB
  Gene Name: interleukin 10 receptor, beta
  ENSP ID: ENSP00000414682
MAWSLGSWLGGCLLVSALGMVPPPENVRMNSVNFKNILQWESPAFAKGNLTFTAQYLSHYWTPWNASRSTC

SEQ ID NO: 41339 - protein, 199 aa, Homo sapiens
  Payload ID: 8415
  Gene Symbol: IL11
  Gene Name: interleukin 11
  Uniprot ID: P20809
  ENSP ID: ENSP00000264563
MNCVCRLVLVVLSLWPDTAVAPGPPPGPPRVSPDPRAELDSTVLLTRSLLADTRQLAAQLRDKFPADGDHNLDSLPTLAMSAGALGALQLPGVLTRLRADLLSYLRHVQWLRRAGGSSLKTLEPELGTLQARLDRLLRRLQLLMSRLALPQPPPDPPAPPLAPPSSAWGGIRAAHAILGGLHLTLDWAVRGLLLLKTRL

SEQ ID NO: 41340 - protein, 120 aa, Homo sapiens
  Payload ID: 8415
  Gene Symbol: IL11
  Gene Name: interleukin 11
  Uniprot ID: P20809
  ENSP ID: ENSP00000465705
MSAGALGALQLPGVLTRLRADLLSYLRHVQWLRRAGGSSLKTLEPELGTLQARLDRLLRRLQLLMSRLALPQPPPDPPAPPLAPPSSAWGGIRAAHAILGGLHLTLDWAVRGLLLLKTRL

SEQ ID NO: 41341 - protein, 199 aa, Homo sapiens; identical to SEQ ID NO: 41339
  Payload ID: 8415
  Gene Symbol: IL11
  Gene Name: interleukin 11
  Uniprot ID: P20809
  ENSP ID: ENSP00000467355

SEQ ID NO: 41342 - protein, 40 aa, Homo sapiens
  Payload ID: 8415
  Gene Symbol: IL11
  Gene Name: interleukin 11
  ENSP ID: ENSP00000468663
MSAGALGALQLPGVLTRLRADLLSYLRHVQWLRRAGGSSL

SEQ ID NO: 41343 - protein, 422 aa, Homo sapiens
  Payload ID: 8416
  Gene Symbol: IL11RA
  Gene Name: interleukin 11 receptor, alpha
  Uniprot ID: Q14626
  ENSP ID: ENSP00000326500
MSSSCSGLSRVLVAVATALVSASSPCPQAWGPPGVQYGQPGRSVKLCCPGVTAGDPVSWFRDGEPKLLQGPDSGLGHELVLAQADSTDEGTYICQTLDGALGGTVTLQLGYPPARPVVSCQAADYENFSCTWSPSQISGLPTRYLTSYRKKTVLGADSQRRSPSTGPWPCPQDPLGAARCVVHGAEFWSQYRINVTEVNPLGASTRLLDVSLQSILRPDPPQGLRVESVPGYPRRLRASWTYPASWPCQPHFLLKFRLQYRPAQHPAWSTVEPAGLEEVITDAVAGLPHAVRVSARDFLDAGTWSTWSPEAWGTPSTGTIPKEIPAWGQLHTQPEVEPQVDSPAPPRPSLQPHPRLLDHRDSVEQVAVLASLGILSFLGLVAGALALGLWLRLRRGGKDGSPKPGFLASVIPVDRRPGAPNL

SEQ ID NO: 41344 - protein, 422 aa, Homo sapiens; identical to SEQ ID NO: 41343
  Payload ID: 8416
  Gene Symbol: IL11RA
  Gene Name: interleukin 11 receptor, alpha
  Uniprot ID: Q14626
  ENSP ID: ENSP00000394391

SEQ ID NO: 41345 - protein, 77 aa, Homo sapiens
  Payload ID: 8416
  Gene Symbol: IL11RA
  Gene Name: interleukin 11 receptor, alpha
  ENSP ID: ENSP00000432263
  MOD_RES (1)..(1): Any amino acid
XTPSTGTIPKEIPAWGQLHTQPEVEPQVDSPAPPRPSLQPHPRLLDHRDSVEQVAVLASLGILSFLGLVAGALALGL

SEQ ID NO: 41346 - protein, 139 aa, Homo sapiens
  Payload ID: 8416
  Gene Symbol: IL11RA
  Gene Name: interleukin 11 receptor, alpha
  ENSP ID: ENSP00000450543
MSSSCSGLSRVLVAVATALVSASSPCPQAWGPPGVQYGQPGRSVKLCCPGVTAGDPVSWFRDGEPKLLQGPDSGLGHELVLAQADSTDEGTYICQTLDGALGGTVTLQLGYPPARPVVSCQAADYENFSCTWSPSQISG

SEQ ID NO: 41347 - protein, 422 aa, Homo sapiens; identical to SEQ ID NO: 41343
  Payload ID: 8416
  Gene Symbol: IL11RA
  Gene Name: interleukin 11 receptor, alpha
  Uniprot ID: Q14626
  ENSP ID: ENSP00000450565

SEQ ID NO: 41348 - protein, 270 aa, Homo sapiens
  Payload ID: 8416
  Gene Symbol: IL11RA
  Gene Name: interleukin 11 receptor, alpha
  ENSP ID: ENSP00000450640
MSSSCSGLSRVLVAVATALVSASSPCPQAWGPPGVQYGQPGRSVKLCCPGVTAGDPVSWFRDGEPKLLQGPDSGLGHELVLAQADSTDEGTYICQTLDGALGGTVTLQLGYPPARPVVSCQAADYENFSCTWSPSQISGLPTRYLTSYRKKTVLGADSQRRSPSTGPWPCPQDPLGAARCVVHGAEFWSQYRINVTEVNPLGASTRLLDVSLQSILRPDPPQGLRVESVPGYPRRLRASWTYPASWPCQPHFLLKFRLQYRPAQHPAWST

SEQ ID NO: 41349 - protein, 54 aa, Homo sapiens
  Payload ID: 8416
  Gene Symbol: IL11RA
  Gene Name: interleukin 11 receptor, alpha
  ENSP ID: ENSP00000450707
MSSSCSGLSRVLVAVATALVSASSPCPQAWGPPGTQCPGFGMGSQSCSRDLTLG

SEQ ID NO: 41350 - protein, 167 aa, Homo sapiens
  Payload ID: 8416
  Gene Symbol: IL11RA
  Gene Name: interleukin 11 receptor, alpha
  ENSP ID: ENSP00000451447
MSSSCSGLSRVLVAVATALVSASSPCPQAWGPPGVQYGQPGRSVKLCCPGVTAGDPVSWFRDGEPKLLQGPDSGLGHELVLAQADSTDEGTYICQTLDGALGGTVTLQLGYPPARPVVSCQAADYENFSCTWSPSQISGLPTRYLTSYRKKTVLGADSQRRSPSTGP

SEQ ID NO: 41351 - protein, 68 aa, Homo sapiens
  Payload ID: 8416
  Gene Symbol: IL11RA
  Gene Name: interleukin 11 receptor, alpha
  ENSP ID: ENSP00000451553
MSSSCSGLSRVLVAVATALVSASSPCPQAWGPPGVQYGQPGRSVKLCCPGVTAGPSSPPCCLLPSSRL

SEQ ID NO: 41352 - protein, 152 aa, Homo sapiens
  Payload ID: 8416
  Gene Symbol: IL11RA
  Gene Name: interleukin 11 receptor, alpha
  ENSP ID: ENSP00000452207
MSSSCSGLSRVLVAVATALVSASSPCPQAWGPPDPPARPVVSCQAADYENFSCTWSPSQISGLPTRYLTSYRKKTVLGADSQRRSPSTGPWPCPQDPLGAARCVVHGAEFWSQYRINVTEVNPLGASTRLLDVSLQSILRPDPPQGLRVESV

SEQ ID NO: 41353 - protein, 390 aa, Homo sapiens
  Payload ID: 8416
  Gene Symbol: IL11RA
  Gene Name: interleukin 11 receptor, alpha
  Uniprot ID: Q14626
  ENSP ID: ENSP00000473647
MSSSCSGLSRVLVAVATALVSASSPCPQAWGPPGVQYGQPGRSVKLCCPGVTAGDPVSWFRDGEPKLLQGPDSGLGHELVLAQADSTDEGTYICQTLDGALGGTVTLQLGYPPARPVVSCQAADYENFSCTWSPSQISGLPTRYLTSYRKKTVLGADSQRRSPSTGPWPCPQDPLGAARCVVHGAEFWSQYRINVTEVNPLGASTRLLDVSLQSILRPDPPQGLRVESVPGYPRRLRASWTYPASWPCQPHFLLKFRLQYRPAQHPAWSTVEPAGLEEVITDAVAGLPHAVRVSARDFLDAGTWSTWSPEAWGTPSTGTIPKEIPAWGQLHTQPEVEPQVDSPAPPRPSLQPHPRLLDHRDSVEQVAVLASLGILSFLGLVAGALALGLW

SEQ ID NO: 41354 - protein, 381 aa, Homo sapiens
  Payload ID: 8417
  Gene Symbol: IL12RB1
  Gene Name: interleukin 12 receptor, beta 1
  Uniprot ID: P42701
  ENSP ID: ENSP00000314425
MEPLVTWVVPLLFLFLLSRQGAACRTSECCFQDPPYPDADSGSASGPRDLRCYRISSDRYECSWQYEGPTAGVSHFLRCCLSSGRCCYFAAGSATRLQFSDQAGVSVLYTVTLWVESWARNQTEKSPEVTLQLYNSVKYEPPLGDIKVSKLAGQLRMEWETPDNQVGAEVQFRHRTPSSPWKLGDCGPQDDDTESCLCPLEMNVAQEFQLRRRQLGSQGSSWSKWSSPVCVPPENPPQPQVRFSVEQLGQDGRRRLTLKEQPTQLELPEGCQGLAPGTEVTYRLQLHMLSCPCKAKATRTLHLGKMPYLSGAAYNVAVISSNQFGPGLNQTWHIPADTHTDGMISAHCNLRLPDSRDSPASASRVAGITGICHHTRLILYF

SEQ ID NO: 41355 - protein, 118 aa, Homo sapiens
  Payload ID: 8417
  Gene Symbol: IL12RB1
  Gene Name: interleukin 12 receptor, beta 1
  ENSP ID: ENSP00000403103
MEPLVTWVVPLLFLFLLSRQGAACRTSECCFQDPPYPDADSGSLPGSASGPRDLRCYRISSDRYECSWQYEGPTAGVSHFLRCCLSSGRCCYFAAGSATRLQFSDQAGVSVLYTVTLW

SEQ ID NO: 41356 - protein, 67 aa, Homo sapiens
  Payload ID: 8417
  Gene Symbol: IL12RB1
  Gene Name: interleukin 12 receptor, beta 1
  ENSP ID: ENSP00000468831
MEPLVTWVVPLLFLFLLSRQGAACRTSECCFQDPPYPDADSGSASGPRDLRCYRISSDRYECSWQYE

SEQ ID NO: 41357 - protein, 662 aa, Homo sapiens
  Payload ID: 8417
  Gene Symbol: IL12RB1
  Gene Name: interleukin 12 receptor, beta 1
  Uniprot ID: P42701
  ENSP ID: ENSP00000470788
MEPLVTWVVPLLFLFLLSRQGAACRTSECCFQDPPYPDADSGSASGPRDLRCYRISSDRYECSWQYEGPTAGVSHFLRCCLSSGRCCYFAAGSATRLQFSDQAGVSVLYTVTLWVESWARNQTEKSPEVTLQLYNSVKYEPPLGDIKVSKLAGQLRMEWETPDNQVGAEVQFRHRTPSSPWKLGDCGPQDDDTESCLCPLEMNVAQEFQLRRRQLGSQGSSWSKWSSPVCVPPENPPQPQVRFSVEQLGQDGRRRLTLKEQPTQLELPEGCQGLAPGTEVTYRLQLHMLSCPCKAKATRTLHLGKMPYLSGAAYNVAVISSNQFGPGLNQTWHIPADTHTEPVALNISVGTNGTTMYWPARAQSMTYCIEWQPVGQDGGLATCSLTAPQDPDPAGMATYSWSRESGAMGQEKCYYITIFASAHPEKLTLWSTVLSTYHFGGNASAAGTPHHVSVKNHSLDSVSVDWAPSLLSTCPGVLKEYVVRCRDEDSKQVSEHPVQPTETQVTLSGLRAGVAYTVQVRADTAWLRGVWSQPQRFSIEVQVSDWLIFFASLGSFLSILLVGVLGYLGLNRAARHLCPPLPTPCASSAIEFPGGKETWQWINPVDFQEEASLQEALVVEMSWDKGERTEPLEKTELPEGAPELALDTELSLEDGDRCKAKM

SEQ ID NO: 41358 - protein, 662 aa, Homo sapiens; identical to SEQ ID NO: 41357
  Payload ID: 8417
  Gene Symbol: IL12RB1
  Gene Name: interleukin 12 receptor, beta 1
  Uniprot ID: P42701
  ENSP ID: ENSP00000472165

SEQ ID NO: 41359 - protein, 51 aa, Homo sapiens
  Payload ID: 8417
  Gene Symbol: IL12RB1
  Gene Name: interleukin 12 receptor, beta 1
  ENSP ID: ENSP00000473051
MEPLVTWVVPLLFLFLLSRQGAACRTSECCFQDPPYPDADSGSASGPRDLR

SEQ ID NO: 41360 - protein, 862 aa, Homo sapiens
  Payload ID: 8418
  Gene Symbol: IL12RB2
  Gene Name: interleukin 12 receptor, beta 2
  Uniprot ID: Q99665
  ENSP ID: ENSP00000262345
MAHTFRGCSLAFMFIITWLLIKAKIDACKRGDVTVKPSHVILLGSTVNITCSLKPRQGCFHYSRRNKLILYKFDRRINFHHGHSLNSQVTGLPLGTTLFVCKLACINSDEIQICGAEIFVGVAPEQPQNLSCIQKGEQGTVACTWERGRDTHLYTEYTLQLSGPKNLTWQKQCKDIYCDYLDFGINLTPESPESNFTAKVTAVNSLGSSSSLPSTFTFLDIVRPLPPWDIRIKFQKASVSRCTLYWRDEGLVLLNRLRYRPSNSRLWNMVNVTKAKGRHDLLDLKPFTEYEFQISSKLHLYKGSWSDWSESLRAQTPEEEPTGMLDVWYMKRHIDYSRQQISLFWKNLSVSEARGKILHYQVTLQELTGGKAMTQNITGHTSWTTVIPRTGNWAVAVSAANSKGSSLPTRINIMNLCEAGLLAPRQVSANSEGMDNILVTWQPPRKDPSAVQEYVVEWRELHPGGDTQVPLNWLRSRPYNVSALISENIKSYICYEIRVYALSGDQGGCSSILGNSKHKAPLSGPHINAITEEKGSILISWNSIPVQEQMGCLLHYRIYWKERDSNSQPQLCEIPYRVSQNSHPINSLQPRVTYVLWMTALTAAGESSHGNEREFCLQGKANWMAFVAPSICIAIIMVGIFSTHYFQQKVFVLLAALRPQWCSREIPDPANSTCAKKYPIAEEKTQLPLDRLLIDWPTPEDPEPLVISEVLHQVTPVFRHPPCSNWPQREKGIQGHQASEKDMMHSASSPPPPRALQAESRQLVDLYKVLESRGSDPKPENPACPWTVLPAGDLPTHDGYLPSNIDDLPSHEAPLADSLEELEPQHISLSVFPSSSLHPLTFSCGDKLTLDQLKMRCDSLML

SEQ ID NO: 41361 - protein, 659 aa, Homo sapiens
  Payload ID: 8418
  Gene Symbol: IL12RB2
  Gene Name: interleukin 12 receptor, beta 2
  Uniprot ID: Q99665
  ENSP ID: ENSP00000360039
MAHTFRGCSLAFMFIITWLLIKAKIDACKRGDVTVKPSHVILLGSTVNITCSLKPRQGCFHYSRRNKLILYKFDRRINFHHGHSLNSQVTGLPLGTTLFVCKLACINSDEIQICGAEIFVGVAPEQPQNLSCIQKGEQGTVACTWERGRDTHLYTEYTLQLSGPKNLTWQKQCKDIYCDYLDFGINLTPESPESNFTAKVTAVNSLGSSSSLPSTFTFLDIVRPLPPWDIRIKFQKASVSRCTLYWRDEGLVLLNRLRYRPSNSRLWNMVNVTKAKGRHDLLDLKPFTEYEFQISSKLHLYKGSWSDWSESLRAQTPEEEPTGMLDVWYMKRHIDYSRQQISLFWKNLSVSEARGKILHYQVTLQELTGGKAMTQNITGHTSWTTVIPRTGNWAVAVSAANSKGSSLPTRINIMNLCEAGLLAPRQVSANSEGMDNILVTWQPPRKDPSAVQEYVVEWRELHPGGDTQVPLNWLRSRPYNVSALISENIKSYICYEIRVYALSGDQGGCSSILGNSKHKAPLSGPHINAITEEKGSILISWNSIPVQEQMGCLLHYRIYWKERDSNSQPQLCEIPYRVSQNSHPINSLQPRVTYVLWMTALTAAGESSHGNEREFCLQGKANWMAFVAPSICIAIIMVGIFSTHYFQQKRRHSCPWTGS

SEQ ID NO: 41362 - protein, 229 aa, Homo sapiens
  Payload ID: 8418
  Gene Symbol: IL12RB2
  Gene Name: interleukin 12 receptor, beta 2
  ENSP ID: ENSP00000400959
  MOD_RES (1)..(1): Any amino acid
XQKGEQGTVACTWERGRDTHLYTEYTLQLSGPKNLTWQKQCKDIYCDYLDFGINLTPESPESNFTAKVTAVNSLGSSSSLPSTFTFLDIVRPLPPWDIRIKFQKASVSRCTLYWRDEGLVLLNRLRYRPSNSRLWNMVNVTKAKGRHDLLDLKPFTEYEFQISSKLHLYKGSWSDWSESLRAQTPEEEPTGMLDVWYMKRHIDYSRQQISLFWKVSFKRQLKTQGNKTE

SEQ ID NO: 41363 - protein, 776 aa, Homo sapiens
  Payload ID: 8418
  Gene Symbol: IL12RB2
  Gene Name: interleukin 12 receptor, beta 2
  Uniprot ID: Q99665
  ENSP ID: ENSP00000442443
MAHTFRGCSLAFMFIITWLLIKAKIDACKRGDVTVKPSHVILLGSTVNITCSLKPRQGCFHYSRRNKLILYKFDRRINFHHGHSLNSQVTGLPLGTTLFVCKLACINSDEIQICGAEIFVGVAPEQPQNLSCIQKGEQGTVACTWERGRDTHLYTEYTLQLSGPKNLTWQKQCKDIYCDYLDFGINLTPESPESNFTAKVTAVNSLGSSSSLPSTFTFLDIVRPLPPWDIRIKFQKASVSRCTLYWRDEGLVLLNRLRYRPSNSRLWNMVNVTKAKGRHDLLDLKPFTEYEFQISSKLHLYKGSWSDWSESLRAQTPEEEPTGMLDVWYMKRHIDYSRQQISLFWKNLSVSEARGKILHYQVTLQELTGGKAMTQNITGHTSWTTVIPRTGNWAVAVSAANSKGSSLPTRINIMNLCEAGLLAPRQVSANSEGMDNILVTWQPPRKDPSAVQEYVVEWRELHPGGDTQVPLNWLRSRPYNVSALISEIPYRVSQNSHPINSLQPRVTYVLWMTALTAAGESSHGNEREFCLQGKANWMAFVAPSICIAIIMVGIFSTHYFQQKVFVLLAALRPQWCSREIPDPANSTCAKKYPIAEEKTQLPLDRLLIDWPTPEDPEPLVISEVLHQVTPVFRHPPCSNWPQREKGIQGHQASEKDMMHSASSPPPPRALQAESRQLVDLYKVLESRGSDPKPENPACPWTVLPAGDLPTHDGYLPSNIDDLPSHEAPLADSLEELEPQHISLSVFPSSSLHPLTFSCGDKLTLDQLKMRCDSLML

SEQ ID NO: 41364 - protein, 635 aa, Homo sapiens
  Payload ID: 8418
  Gene Symbol: IL12RB2
  Gene Name: interleukin 12 receptor, beta 2
  ENSP ID: ENSP00000445276
MAHTFRGCSLAFMFIITWLLIKAKIDACKRGDVTVKPSHVILLGSTVNITCSLKPRQGCFHYSRRNKLILYKFDRRINFHHGHSLNSQVTGLPLGTTLFVCKLACINSDEIQICGAEIFVGVAPEQPQNLSCIQKGEQGTVACTWERGRDTHLYTEYTLQLSGPKNLTWQKQCKDIYCDYLDFGINLTPESPESNFTAKVTAVNSLGSSSSLPSTFTFLDIVRPLPPWDIRIKFQKASVSRCTLYWRDEGLVLLNRLRYRPSNSRLWNMVNVTKAKGRHDLLDLKPFTEYEFQISSKLHLYKGSWSDWSESLRAQTPEEEPTGMLDVWYMKRHIDYSRQQISLFWKNLSVSEARGKILHYQVTLQELTGGKAMTQNITGHTSWTTVIPRTGNWAVAVSAANSKGSSLPTRINIMNLCEAGLLAPRQVSANSEGMDNILVTWQPPRKDPSAVQEYVVEWRELHPGGDTQVPLNWLRSRPYNVSALISENIKSYICYEIRVYALSGDQGGCSSILGNSKHKAPLSGPHINAITEEKGSILISWNSIPVQEQMGCLLHYRIYWKERDSNSQPQLCEIPYRVSQNSHPINSLQPRVTYVLWMTALTAAGESSHGNEREFCLQGEDTAALGQAPDRLAHA

SEQ ID NO: 41365 - protein, 253 aa, Homo sapiens
  Payload ID: 8419
  Gene Symbol: IL12A
  Gene Name: interleukin 12A
  Uniprot ID: P29459
  ENSP ID: ENSP00000303231
MWPPGSASQPPPSPAAATGLHPAARPVSLQCRLSMCPARSLLLVATLVLLDHLSLARNLPVATPDPGMFPCLHHSQNLLRAVSNMLQKARQTLEFYPCTSEEIDHEDITKDKTSTVEACLPLELTKNESCLNSRETSFITNGSCLASRKTSFMMALCLSSIYEDLKMYQVEFKTMNAKLLMDPKRQIFLDQNMLAVIDELMQALNFNSETVPQKSSLEEPDFYKTKIKLCILLHAFRIRAVTIDRVMSYLNAS

SEQ ID NO: 41366 - protein, 239 aa, Homo sapiens
  Payload ID: 8419
  Gene Symbol: IL12A
  Gene Name: interleukin 12A
  ENSP ID: ENSP00000419046
MWPPGSASQPPPSPAAATGLHPAARPVSLQCRLSMCPARSLLLVATLVLLDHLSLARNLPVATPDPGMFPCLHHSQNLLRAVSNMLQKARQTLEFYPCTSEEIDHEDITKDKTSTVEACLPLELTKNGSCLASRKTSFMMALCLSSIYEDLKMYQVEFKTMNAKLLMDPKRQIFLDQNMLAVIDELMQALNFNSETVPQKSSLEEPDFYKTKIKLCILLHAFRIRAVTIDRVMSYLNAS

SEQ ID NO: 41367 - protein, 215 aa, Homo sapiens
  Payload ID: 8419
  Gene Symbol: IL12A
  Gene Name: interleukin 12A
  ENSP ID: ENSP00000420184
MWPPGSASQPPPSPAAATGLHPAARPVSLQCRLSMCPARSLLLVATLVLLDHLSLARNLPVATPDPGMFPCLHHSQNLLRAVSNMLQKNESCLNSRETSFITNGSCLASRKTSFMMALCLSSIYEDLKMYQVEFKTMNAKLLMDPKRQIFLDQNMLAVIDELMQALNFNSETVPQKSSLEEPDFYKTKIKLCILLHAFRIRAVTIDRVMSYLNAS

SEQ ID NO: 41368 - protein, 328 aa, Homo sapiens
  Payload ID: 8420
  Gene Symbol: IL12B
  Gene Name: interleukin 12B
  Uniprot ID: P29460
  ENSP ID: ENSP00000231228
MCHQQLVISWFSLVFLASPLVAIWELKKDVYVVELDWYPDAPGEMVVLTCDTPEEDGITWTLDQSSEVLGSGKTLTIQVKEFGDAGQYTCHKGGEVLSHSLLLLHKKEDGIWSTDILKDQKEPKNKTFLRCEAKNYSGRFTCWWLTTISTDLTFSVKSSRGSSDPQGVTCGAATLSAERVRGDNKEYEYSVECQEDSACPAAEESLPIEVMVDAVHKLKYENYTSSFFIRDIIKPDPPKNLQLKPLKNSRQVEVSWEYPDTWSTPHSYFSLTFCVQVQGKSKREKKDRVFTDKTSATVICRKNASISVRAQDRYYSSSWSEWASVPCS

SEQ ID NO: 41369 - protein, 146 aa, Homo sapiens
  Payload ID: 8421
  Gene Symbol: IL13
  Gene Name: interleukin 13
  Uniprot ID: P35225
  ENSP ID: ENSP00000304915
MHPLLNPLLLALGLMALLLTTVIALTCLGGFASPGPVPPSTALRELIEELVNITQNQKAPLCNGSMVWSINLTAGMYCAALESLINVSGCSAIEKTQRMLSGFCPHKVSAGQFSSLHVRDTKIEVAQFVKDLLLHLKKLFREGQFN

SEQ ID NO: 41370 - protein, 144 aa, Homo sapiens
  Payload ID: 8421
  Gene Symbol: IL13
  Gene Name: interleukin 13
  ENSP ID: ENSP00000479835
MALLLTTVIALTCLGGFASPGPVPPSTALRELIEELVNITQNQKAPLCNGSMVWSINLTAGMYCAALESLINVSGCSAIEKTQRMLSGFCPHKVSAGQFSSLHVRDTKIEVAQFVKDLLLHLKKLFREGQFNNFESIIICRDRT

SEQ ID NO: 41371 - protein, 279 aa, Homo sapiens
  Payload ID: 8422
  Gene Symbol: IL13RA1
  Gene Name: interleukin 13 receptor, alpha 1
  Uniprot ID: P78552
  ENSP ID: ENSP00000360705
MEWPARLCGLWALLLCAGGGGGGGGAAPTETQPPVTNLSVSVENLCTVIWTWNPPEGASSNCSLWYFSHFGDKQDKKIAPETRRSIEVPLNERICLQVGSQCSTNESEKPSILVEKCISPPEGDPESAVTELQCIWHNLSYMKCSWLPGRNTSPDTNYTLYYWHRSLEKIHQCENIFREGQYFGCSFDLTKVKDSSFEQHSVQIMVKDNAGKIKPSFNIVPLTSRVKPDPPHIKNLSFHNDDLYVQWENPQNFISRCLFYEVEVNNSQTETHNVFYVRF

SEQ ID NO: 41372 - protein, 427 aa, Homo sapiens
  Payload ID: 8422
  Gene Symbol: IL13RA1
  Gene Name: interleukin 13 receptor, alpha 1
  Uniprot ID: P78552
  ENSP ID: ENSP00000360730
MEWPARLCGLWALLLCAGGGGGGGGAAPTETQPPVTNLSVSVENLCTVIWTWNPPEGASSNCSLWYFSHFGDKQDKKIAPETRRSIEVPLNERICLQVGSQCSTNESEKPSILVEKCISPPEGDPESAVTELQCIWHNLSYMKCSWLPGRNTSPDTNYTLYYWHRSLEKIHQCENIFREGQYFGCSFDLTKVKDSSFEQHSVQIMVKDNAGKIKPSFNIVPLTSRVKPDPPHIKNLSFHNDDLYVQWENPQNFISRCLFYEVEVNNSQTETHNVFYVQEAKCENPEFERNVENTSCFMVPGVLPDTLNTVRIRVKTNKLCYEDDKLWSNWSQEMSIGKKRNSTLYITMLLIVPVIVAGAIIVLLLYLKRLKIIIFPPIPDPGKIFKEMFGDQNDDTLHWKKYDIYEKQTKEETDSVVLIENLKKASQ

SEQ ID NO: 41373 - protein, 380 aa, Homo sapiens
  Payload ID: 8423
  Gene Symbol: IL13RA2
  Gene Name: interleukin 13 receptor, alpha 2
  Uniprot ID: Q14627
  ENSP ID: ENSP00000243213
MAFVCLAIGCLYTFLISTTFGCTSSSDTEIKVNPPQDFEIVDPGYLGYLYLQWQPPLSLDHFKECTVEYELKYRNIGSETWKTIITKNLHYKDGFDLNKGIEAKIHTLLPWQCTNGSEVQSSWAETTYWISPQGIPETKVQDMDCVYYNWQYLLCSWKPGIGVLLDTNYNLFYWYEGLDHALQCVDYIKADGQNIGCRFPYLEASDYKDFYICVNGSSENKPIRSSYFTFQLQNIVKPLPPVYLTFTRESSCEIKLKWSIPLGPIPARCFDYEIEIREDDTTLVTATVENETYTLKTTNETRQLCFVVRSKVNIYCSDDGIWSEWSDKQCWEGEDLSKKTLLRFWLPFGFILILVIFVTGLLLRKPNTYPKMIPEFFCDT

SEQ ID NO: 41374 - protein, 380 aa, Homo sapiens; identical to SEQ ID NO: 41373
  Payload ID: 8423
  Gene Symbol: IL13RA2
  Gene Name: interleukin 13 receptor, alpha 2
  Uniprot ID: Q14627
  ENSP ID: ENSP00000361004

SEQ ID NO: 41375 - protein, 162 aa, Homo sapiens
  Payload ID: 8424
  Gene Symbol: IL15
  Gene Name: interleukin 15
  Uniprot ID: P40933
  ENSP ID: ENSP00000296545
MRISKPHLRSISIQCYLCLLLNSHFLTEAGIHVFILGCFSAGLPKTEANWVNVISDLKKIEDLIQSMHIDATLYTESDVHPSCKVTAMKCFLLELQVISLESGDASIHDTVENLIILANNSLSSNGNVTESGCKECEELEEKNIKEFLQSFVHIVQMFINTS

SEQ ID NO: 41376 - protein, 162 aa, Homo sapiens; identical to SEQ ID NO: 41375
  Payload ID: 8424
  Gene Symbol: IL15
  Gene Name: interleukin 15
  Uniprot ID: P40933
  ENSP ID: ENSP00000323505

SEQ ID NO: 41377 - protein, 135 aa, Homo sapiens
  Payload ID: 8424
  Gene Symbol: IL15
  Gene Name: interleukin 15
  Uniprot ID: P40933
  ENSP ID: ENSP00000377714
MVLGTIDLCSCFSAGLPKTEANWVNVISDLKKIEDLIQSMHIDATLYTESDVHPSCKVTAMKCFLLELQVISLESGDASIHDTVENLIILANNSLSSNGNVTESGCKECEELEEKNIKEFLQSFVHIVQMFINTS

SEQ ID NO: 41378 - protein, 135 aa, Homo sapiens; identical to SEQ ID NO: 41377
  Payload ID: 8424
  Gene Symbol: IL15
  Gene Name: interleukin 15
  Uniprot ID: P40933
  ENSP ID: ENSP00000422271

SEQ ID NO: 41379 - protein, 162 aa, Homo sapiens; identical to SEQ ID NO: 41375
  Payload ID: 8424
  Gene Symbol: IL15
  Gene Name: interleukin 15
  Uniprot ID: P40933
  ENSP ID: ENSP00000435462

SEQ ID NO: 41380 - protein, 135 aa, Homo sapiens; identical to SEQ ID NO: 41377
  Payload ID: 8424
  Gene Symbol: IL15
  Gene Name: interleukin 15
  Uniprot ID: P40933
  ENSP ID: ENSP00000436914

SEQ ID NO: 41381 - protein, 154 aa, Homo sapiens
  Payload ID: 8425
  Gene Symbol: IL15RA
  Gene Name: interleukin 15 receptor, alpha
  Uniprot ID: Q13261
  ENSP ID: ENSP00000369306
MAPRRARGCRTLGLPALLLLLLLRPPATREPAASSPSSNNTAATTAAIVPGSQLMPSKSPSTGTTEISSHESSHGTPSQTTAKNWELTASASHQPPGVYPQGHSDTTVAISTSTVLLCGLSAVSLLACYLKSRASVCSCHPRSAGHTCSVGSVC

SEQ ID NO: 41382 - protein, 267 aa, Homo sapiens
  Payload ID: 8425
  Gene Symbol: IL15RA
  Gene Name: interleukin 15 receptor, alpha
  Uniprot ID: Q13261
  ENSP ID: ENSP00000369312
MAPRRARGCRTLGLPALLLLLLLRPPATRGITCPPPMSVEHADIWVKSYSLYSRERYICNSGFKRKAGTSSLTECVLNKATNVAHWTTPSLKCIRDPALVHQRPAPPSTVTTAGVTPQPESLSPSGKEPAASSPSSNNTAATTAAIVPGSQLMPSKSPSTGTTEISSHESSHGTPSQTTAKNWELTASASHQPPGVYPQGHSDTTVAISTSTVLLCGLSAVSLLACYLKSRQTPPLASVEMEAMEALPVTWGTSSRDEDLENCSHHL

SEQ ID NO: 41383 - protein, 172 aa, Homo sapiens
  Payload ID: 8425
  Gene Symbol: IL15RA
  Gene Name: interleukin 15 receptor, alpha
  ENSP ID: ENSP00000380420
MSVEHADIWVKSYSLYSRERYICNSGFKRKAGTSSLTECVLNKATNVAHWTTPSLKCIKPAASSPSSNNTAATTAAIVPGSQLMPSKSPSTGTTEISSHESSHGTPSQTTAKNWELTASASHQPPGVYPQGHSDTTVAISTSTVLLCGLSAVSLLACYLKSRQTPPLASVEM

SEQ ID NO: 41384 - protein, 353 aa, Homo sapiens
  Payload ID: 8425
  Gene Symbol: IL15RA
  Gene Name: interleukin 15 receptor, alpha
  ENSP ID: ENSP00000380421
MRLAGRQVPEQRSPPPPGLGSARPGSPAVSCGAAAMAPRRARGCRTLGLPALLLLLLLRPPATRDARDRLAVLAGRSRISESFNHEVQTHEACVRLRTMENCPQCHHHRTSRQQAGITCPPPMSVEHADIWVKSYSLYSRERYICNSGFKRKAGTSSLTECVLNKATNVAHWTTPSLKCIRDPALVHQRPAPPSTVTTAGVTPQPESLSPSGKEPAASSPSSNNTAATTAAIVPGSQLMPSKSPSTGTTEISSHESSHGTPSQTTAKNWELTASASHQPPGVYPQGHSDTTVAISTSTVLLCGLSAVSLLACYLKSRQTPPLASVEMEAMEALPVTWGTSSRDEDLENCSHHL

SEQ ID NO: 41385 - protein, 169 aa, Homo sapiens
  Payload ID: 8425
  Gene Symbol: IL15RA
  Gene Name: interleukin 15 receptor, alpha
  Uniprot ID: Q13261
  ENSP ID: ENSP00000380422
MAPRRARGCRTLGLPALLLLLLLRPPATREPAASSPSSNNTAATTAAIVPGSQLMPSKSPSTGTTEISSHESSHGTPSQTTAKNWELTASASHQPPGVYPQGHSDTTVAISTSTVLLCGLSAVSLLACYLKSRQTPPLASVEMEAMEALPVTWGTSSRDEDLENCSHHL

SEQ ID NO: 41386 - protein, 308 aa, Homo sapiens
  Payload ID: 8425
  Gene Symbol: IL15RA
  Gene Name: interleukin 15 receptor, alpha
  ENSP ID: ENSP00000380423
MAPRRARGCRTLGLPALLLLLLLRPPATRDARDRLAVLAGRSRISESFNHEVQTHEACVRLRTMENCPQCHHHRTSRQQAGITCPPPMSVEHADIWVKSYSLYSRERYICNSGFKRKAGTSSLTECVLNKATNVAHWTTPSLKCIRDPALVHQRPAPPSTVTTAGVTPQPESLSPSGKEPAASSPSSNNTAATTAAIVPGSQLMPSKSPSTGTTEISSHESSHGTPSQTTAKNWELTASASHQPPGVYPQGHSDTTVAISTSTVLLCGLSAVSLLACYLKSSLDAFIKIRGGFSTWLLGLPHSTVGSG

SEQ ID NO: 41387 - protein, 252 aa, Homo sapiens
  Payload ID: 8425
  Gene Symbol: IL15RA
  Gene Name: interleukin 15 receptor, alpha
  Uniprot ID: Q13261
  ENSP ID: ENSP00000380426
MAPRRARGCRTLGLPALLLLLLLRPPATRGITCPPPMSVEHADIWVKSYSLYSRERYICNSGFKRKAGTSSLTECVLNKATNVAHWTTPSLKCIRDPALVHQRPAPPSTVTTAGVTPQPESLSPSGKEPAASSPSSNNTAATTAAIVPGSQLMPSKSPSTGTTEISSHESSHGTPSQTTAKNWELTASASHQPPGVYPQGHSDTTVAISTSTVLLCGLSAVSLLACYLKSRASVCSCHPRSAGHTCSVGSVC

SEQ ID NO: 41388 - protein, 198 aa, Homo sapiens
  Payload ID: 8425
  Gene Symbol: IL15RA
  Gene Name: interleukin 15 receptor, alpha
  ENSP ID: ENSP00000393612
  MOD_RES (1)..(1): Any amino acid
XPAASSPSSNNTAATTAAIVPGSQLMPSKSPSTGTTEISSHESSHGTPSQTTAKNWELTASASHQPPGVYPQGHSDTTVAISTSTVLLCGLSAVSLLACYLKSSSQRKVTYLRLSVNYKAPPGVGDVYREDTSVWAPPNDPVSSCAARTDREPEKVEEMLSPVNPLHRRIQEEENSSQRHFTYICIYTSLSVISTHYI

SEQ ID NO: 41389 - protein, 172 aa, Homo sapiens
  Payload ID: 8425
  Gene Symbol: IL15RA
  Gene Name: interleukin 15 receptor, alpha
  ENSP ID: ENSP00000395113
MAPRRARGCRTLGLPALLLLLLLRPPATRGITCPPPMSVEHADIWVKSYSLYSRERYICNSGFKRKAGTSSLTECVLNKATNVAHWTTPSLKCIKPAASSPSSNNTAATTAAIVPGSQLMPSKSPSTGTTEISSHESSHGTPSQTTAKNWELTASASHQPPGVYPQGHSDTT

SEQ ID NO: 41390 - protein, 148 aa, Homo sapiens
  Payload ID: 8425
  Gene Symbol: IL15RA
  Gene Name: interleukin 15 receptor, alpha
  ENSP ID: ENSP00000405107
MSVEHADIWVKSYSLYSRERYICNSGFKRKAGTSSLTECVLNKATNVAHWTTPSLKCINPALVHQRPAPPSTVTTAGVTPQPESLSPSGKEPAASSPSSNNTAATTAAIVPGSQLMPSKSPSTGTTEISSHESSHGTPSQTTAKNWEL

SEQ ID NO: 41391 - protein, 155 aa, Homo sapiens
  Payload ID: 8425
  Gene Symbol: IL15RA
  Gene Name: interleukin 15 receptor, alpha
  ENSP ID: ENSP00000405128
  MOD_RES (1)..(1): Any amino acid
XLVHQRPAPPSTVTTAGVTPQPESLSPSGKEPAASSPSSNNTAATTAAIVPGSQLMPSKSPSTGTTEISSHESSHGTPSQTTAKNWELTASASHQPPGVYPQGHSDTTVAISTSTVLLCGLSAVSLLACYLKSRASVCSCHPRSAGHTCSVGSVC

SEQ ID NO: 41392 - protein, 231 aa, Homo sapiens
  Payload ID: 8425
  Gene Symbol: IL15RA
  Gene Name: interleukin 15 receptor, alpha
  Uniprot ID: Q13261
  ENSP ID: ENSP00000431529
MSVEHADIWVKSYSLYSRERYICNSGFKRKAGTSSLTECVLNKATNVAHWTTPSLKCIRDPALVHQRPAPPSTVTTAGVTPQPESLSPSGKEPAASSPSSNNTAATTAAIVPGSQLMPSKSPSTGTTEISSHESSHGTPSQTTAKNWELTASASHQPPGVYPQGHSDTTVAISTSTVLLCGLSAVSLLACYLKSRQTPPLASVEMEAMEALPVTWGTSSRDEDLENCSHHL

SEQ ID NO: 41393 - protein, 209 aa, Homo sapiens
  Payload ID: 8425
  Gene Symbol: IL15RA
  Gene Name: interleukin 15 receptor, alpha
  ENSP ID: ENSP00000432691
  MOD_RES (1)..(1): Any amino acid
XITCPPPMSVEHADIWVKSYSLYSRERYICNSGFKRKAGTSSLTECVLNKATNVAHWTTPSLKCIRTTEISSHESSHGTPSQTTAKNWELTASASHQPPGVYPQGHSDTTGRKQHLLPDFQASFQRDCINKHIEDKECWTVASFLLFLAISTSTVLLCGLSAVSLLACYLKSRQTPPLASVEMEAMEALPVTWGTSSRDEDLENCSHHL

SEQ ID NO: 41394 - protein, 234 aa, Homo sapiens
  Payload ID: 8425
  Gene Symbol: IL15RA
  Gene Name: interleukin 15 receptor, alpha
  Uniprot ID: Q13261
  ENSP ID: ENSP00000435454
MAPRRARGCRTLGLPALLLLLLLRPPATRGITCPPPMSVEHADIWVKSYSLYSRERYICNSGFKRKAGTSSLTECVLNKATNVAHWTTPSLKCIKPAASSPSSNNTAATTAAIVPGSQLMPSKSPSTGTTEISSHESSHGTPSQTTAKNWELTASASHQPPGVYPQGHSDTTVAISTSTVLLCGLSAVSLLACYLKSRQTPPLASVEMEAMEALPVTWGTSSRDEDLENCSHHL

SEQ ID NO: 41395 - protein, 219 aa, Homo sapiens
  Payload ID: 8425
  Gene Symbol: IL15RA
  Gene Name: interleukin 15 receptor, alpha
  Uniprot ID: Q13261
  ENSP ID: ENSP00000435995
MAPRRARGCRTLGLPALLLLLLLRPPATRGITCPPPMSVEHADIWVKSYSLYSRERYICNSGFKRKAGTSSLTECVLNKATNVAHWTTPSLKCIKPAASSPSSNNTAATTAAIVPGSQLMPSKSPSTGTTEISSHESSHGTPSQTTAKNWELTASASHQPPGVYPQGHSDTTVAISTSTVLLCGLSAVSLLACYLKSRASVCSCHPRSAGHTCSVGSVC

SEQ ID NO: 41396 - protein, 305 aa, Homo sapiens
  Payload ID: 8425
  Gene Symbol: IL15RA
  Gene Name: interleukin 15 receptor, alpha
  ENSP ID: ENSP00000478525
MAPRRARGCRTLGLPALLLLLLLRPPATRDARDRLAVLAGRSRISESFNHEVQTHEACVRLRTMENCPQCHHHRTSRQQAGITCPPPMSVEHADIWVKSYSLYSRERYICNSGFKRKAGTSSLTECVLNKATNVAHWTTPSLKCIRDPALVHQRPAPPSTVTTAGVTPQPESLSPSGKEPAASSPSSNNTAATTAAIVPGSQLMPSKSPSTGTTEISSHESSHGTPSQTTAKNWELTASASHQPPGVYPQGHSDTTGRKQHLLPDFQASFQRDCINKHIEDKECWTVASFLLFCTMFVSTCWYTL

SEQ ID NO: 41397 - protein, 331 aa, Homo sapiens
  Payload ID: 8425
  Gene Symbol: IL15RA
  Gene Name: interleukin 15 receptor, alpha
  ENSP ID: ENSP00000479839
MAPRRARGCRTLGLPALLLLLLLRPPATRDARDRLAVLAGRSRISESFNHEVQTHEACVRLRTMENCPQCHHHRTSRQQAGITCPPPMSVEHADIWVKSYSLYSRERYICNSGFKRKAGTSSLTECVLNKATNVAHWTTPSLKCIRDPALVHQRPAPPSTVTTAGVTPQPESLSPSGKEPAASSPSSNNTAATTAAIVPGSQLMPSKSPSTGTTEISSHESSHGTPSQTTAKNWELTASASHQPPGVYPQGHSDTTVAISTSTVLLCGLSAVSLLACYLKSRWLAKRSLPGDAEAPNMSRGGRNAWEQLSRAPATSLLRTPVESALSASRP

SEQ ID NO: 41398 - protein, 316 aa, Homo sapiens
  Payload ID: 8425
  Gene Symbol: IL15RA
  Gene Name: interleukin 15 receptor, alpha
  ENSP ID: ENSP00000479938
MAPRRARGCRTLGLPALLLLLLLRPPATRDARDRLAVLAGRSRISESFNHEVQTHEACVRLRTMENCPQCHHHRTSRQQAGITCPPPMSVEHADIWVKSYSLYSRERYICNSGFKRKAGTSSLTECVLNKATNVAHWTTPSLKCIRDPALVHQRPAPPSTVTTAGVTPQPESLSPSGKEPAASSPSSNNTAATTAAIVPGSQLMPSKSPSTGTTEISSHESSHGTPSQTTAKNWELTASASHQPPGVYPQGHSDTTVAISTSTVLLCGLSAVSLLACYLKSSDSAVGKSKLEKEKVQNDSADADITQRYASAMVPV

SEQ ID NO: 41399 - protein, 346 aa, Homo sapiens
  Payload ID: 8425
  Gene Symbol: IL15RA
  Gene Name: interleukin 15 receptor, alpha
  ENSP ID: ENSP00000480949
MAPRRARGCRTLGLPALLLLLLLRPPATRDARDRLAVLAGRSRISESFNHEVQTHEACVRLRTMENCPQCHHHRTSRQQAGITCPPPMSVEHADIWVKSYSLYSRERYICNSGFKRKAGTSSLTECVLNKATNVAHWTTPSLKCIRDPALVHQRPAPPSTVTTAGVTPQPESLSPSGKEPAASSPSSNNTAATTAAIVPGSQLMPSKSPSTGTTEISSHESSHGTPSQTTAKNWELTASASHQPPGVYPQGHSDTTVAISTSTVLLCGLSAVSLLACYLKSSSHSRELTLLTLKWPKELLLLRRDISPALVEGAGQMPRASAPRQLQTGQPRMTSVLPRLCLSFGS

SEQ ID NO: 41400 - protein, 1332 aa, Homo sapiens
  Payload ID: 8426
  Gene Symbol: IL16
  Gene Name: interleukin 16
  Uniprot ID: Q14005
  ENSP ID: ENSP00000302935
MESHSRAGKSRKSAKFRSISRSLMLCNAKTSDDGSSPDEKYPDPFEISLAQGKEGIFHSSVQLADTSEAGPSSVPDLALASEAAQLQAAGNDRGKTCRRIFFMKESSTASSREKPGKLEAQSSNFLFPKACHQRARSNSTSVNPYCTREIDFPMTKKSAAPTDRQPYSLCSNRKSLSQQLDCPAGKAAGTSRPTRSLSTAQLVQPSGGLQASVISNIVLMKGQAKGLGFSIVGGKDSIYGPIGIYVKTIFAGGAAAADGRLQEGDEILELNGESMAGLTHQDALQKFKQAKKGLLTLTVRTRLTAPPSLCSHLSPPLCRSLSSSTCITKDSSSFALESPSAPISTAKPNYRIMVEVSLQKEAGVGLGIGLCSVPYFQCISGIFVHTLSPGSVAHLDGRLRCGDEIVEISDSPVHCLTLNEVYTILSHCDPGPVPIIVSRHPDPQVSEQQLKEAVAQAVENTKFGKERHQWSLEGVKRLESSWHGRPTLEKEREKNSAPPHRRAQKVMIRSSSDSSYMSGSPGGSPGSGSAEKPSSDVDISTHSPSLPLAREPVVLSIASSRLPQESPPLPESRDSHPPLRLKKSFEILVRKPMSSKPKPPPRKYFKSDSDPQKSLEERENSSCSSGHTPPTCGQEARELLPLLLPQEDTAGRSPSASAGCPGPGIGPQTKSSTEGEPGWRRASPVTQTSPIKHPLLKRQARMDYSFDTTAEDPWVRISDCIKNLFSPIMSENHGHMPLQPNASLNEEEGTQGHPDGTPPKLDTANGTPKVYKSADSSTVKKGPPVAPKPAWFRQSLKGLRNRASDPRGLPDPALSTQPAPASREHLGSHIRASSSSSSIRQRISSFETFGSSQLPDKGAQRLSLQPSSGEAAKPLGKHEEGRFSGLLGRGAAPTLVPQQPEQVLSSGSPAASEARDPGVSESPPPGRQPNQKTLPPGPDPLLRLLSTQAEESQGPVLKMPSQRARSFPLTRSQSCETKLLDEKTSKLYSISSQVSSAVMKSLLCLPSSISCAQTPCIPKEGASPTSSSNEDSAANGSAETSALDTGFSLNLSELREYTEGLTEAKEDDDGDHSSLQSGQSVISLLSSEELKKLIEEVKVLDEATLKQLDGIHVTILHKEEGAGLGFSLAGGADLENKVITVHRVFPNGLASQEGTIQKGNEVLSINGKSLKGTTHHDALAILRQAREPRQAVIVTRKLTPEAMPDLNSSTDSAASASAASDVSVESTAEATVCTVTLEKMSAGLGFSLEGGKGSLHGDKPLTINRIFKGAASEQSETVQPGDEILQLGGTAMQGLTRFEAWNIIKALPDGPVTIVIRRKSLQSKETTAAGDS

SEQ ID NO: 41401 - protein, 631 aa, Homo sapiens
  Payload ID: 8426
  Gene Symbol: IL16
  Gene Name: interleukin 16
  Uniprot ID: Q14005
  ENSP ID: ENSP00000378147
MDYSFDTTAEDPWVRISDCIKNLFSPIMSENHGHMPLQPNASLNEEEGTQGHPDGTPPKLDTANGTPKVYKSADSSTVKKGPPVAPKPAWFRQSLKGLRNRASDPRGLPDPALSTQPAPASREHLGSHIRASSSSSSIRQRISSFETFGSSQLPDKGAQRLSLQPSSGEAAKPLGKHEEGRFSGLLGRGAAPTLVPQQPEQVLSSGSPAASEARDPGVSESPPPGRQPNQKTLPPGPDPLLRLLSTQAEESQGPVLKMPSQRARSFPLTRSQSCETKLLDEKTSKLYSISSQVSSAVMKSLLCLPSSISCAQTPCIPKEGASPTSSSNEDSAANGSAETSALDTGFSLNLSELREYTEGLTEAKEDDDGDHSSLQSGQSVISLLSSEELKKLIEEVKVLDEATLKQLDGIHVTILHKEEGAGLGFSLAGGADLENKVITVHRVFPNGLASQEGTIQKGNEVLSINGKSLKGTTHHDALAILRQAREPRQAVIVTRKLTPEAMPDLNSSTDSAASASAASDVSVESTAEATVCTVTLEKMSAGLGFSLEGGKGSLHGDKPLTINRIFKGAASEQSETVQPGDEILQLGGTAMQGLTRFEAWNIIKALPDGPVTIVIRRKSLQSKETTAAGDS

SEQ ID NO: 41402 - protein, 1331 aa, Homo sapiens
  Payload ID: 8426
  Gene Symbol: IL16
  Gene Name: interleukin 16
  Uniprot ID: Q14005
  ENSP ID: ENSP00000378155
MESHSRAGKSRKSAKFRSISRSLMLCNAKTSDDGSSPDEKYPDPFEISLAQGKEGIFHSSVQLADTSEAGPSSVPDLALASEAAQLQAAGNDRGKTCRRIFFMKESSTASSREKPGKLEAQSSNFLFPKACHQRARSNSTSVNPYCTREIDFPMTKKSAAPTDRQPYSLCSNRKSLSQQLDCPAGKAAGTSRPTRSLSTAQLVQPSGGLQASVISNIVLMKGQAKGLGFSIVGGKDSIYGPIGIYVKTIFAGGAAAADGRLQEGDEILELNGESMAGLTHQDALQKFKQAKKGLLTLTVRTRLTAPPSLCSHLSPPLCRSLSSSTCITKDSSSFALESPSAPISTAKPNYRIMVEVSLQKEAGVGLGIGLCSVPYFQCISGIFVHTLSPGSVAHLDGRLRCGDEIVEISDSPVHCLTLNEVYTILSHCDPGPVPIIVSRHPDPQVSEQQLKEAVAQAVENTKFGKERHQWSLEGVKRLESSWHGRPTLEKEREKNSAPPHRRAQKVMIRSSSDSSYMSGSPGGSPGSGSAEKPSSDVDISTHSPSLPLAREPVVLSIASSRLPQESPPLPESRDSHPPLRLKKSFEILVRKPMSSKPKPPPRKYFKSDSDPQKSLEERENSSCSSGHTPPTCGQEARELLPLLLPQEDTAGRSPSASAGCPGPGIGPQTKSSTEGEPGWRRASPVTQTSPIKHPLLKRQARMDYSFDTTAEDPWVRISDCIKNLFSPIMSENHGHMPLQPNASLNEEEGTQGHPDGTPPKLDTANGTPKVYKSADSSTVKKGPPVAPKPAWFRQSLKGLRNRASDPRGLPDPALSTQPAPASREHLGSHIRASSSSSSIRQRISSFETFGSSQLPDKGAQRLSLQPSSGEAAKPLGKHEEGRFSGLLGRGAAPTLVPQQPEQVLSSGSPAASEARDPGVSESPPPGRQPNQKTLPPGPDPLLRLLSTQAEESQGPVLKMPSQRARSFPLTRSQSCETKLLDEKTSKLYSISSQVSSAVMKSLLCLPSSISCAQTPCIPKEGASPTSSSNEDSAANGSAETSALDTGFSLNLSELREYTEGLTEAKEDDDGDHSSLQSGQSVISLLSSEELKKLIEEVKVLDEATLKQLDGIHVTILHKEEGAGLGFSLAGGADLENKVITVHRVFPNGLASQEGTIQKGNEVLSINGKSLKGTTHHDALAILRQAREPRQAVIVTRKLTPEAMPDLNSSTDSAASASAASDVSVESTEATVCTVTLEKMSAGLGFSLEGGKGSLHGDKPLTINRIFKGAASEQSETVQPGDEILQLGGTAMQGLTRFEAWNIIKALPDGPVTIVIRRKSLQSKETTAAGDS

SEQ ID NO: 41403 - protein, 454 aa, Homo sapiens
  Payload ID: 8426
  Gene Symbol: IL16
  Gene Name: interleukin 16
  ENSP ID: ENSP00000452738
MESHSRAGKSRKSAKFRSISRSLMLCNAKTSDDGSSPDEKYPDPFEISLAQGKEGIFHSSVQLADTSEAGPSSVPDLALASEAAQLQAAGNDRGKTCRRIFFMKESSTASSREKPGKLEAQSSNFLFPKACHQRARSNSTSVNPYCTREIDFPMTKKSAAPTDRQPYSLCSNRKSLSQQLDCPAGKAAGTSRPTRSLSTAQLVQPSGGLQASVISNIVLMKGQAKGLGFSIVGGKDSIYGPIGIYVKTIFAGGAAAADGRLQEGDEILELNGESMAGLTHQDALQKFKQAKKGLLTLTVRTRLTAPPSLCSHLSPPLCRSLSSSTCITKDSSSFALESPSAPISTAKPNYRIMVEVSLQKEAGVGLGIGLCSVPYFQCISGIFVHTLSPGSVAHLDGRLRCGDEIVEISDSPVHCLTLNEVYTILSHCDPGPVPIIVSRHPDPQKEEMEAQEVK

SEQ ID NO: 41404 - protein, 44 aa, Homo sapiens
  Payload ID: 8426
  Gene Symbol: IL16
  Gene Name: interleukin 16
  ENSP ID: ENSP00000453131
SASAGCPGPGIGPQTKSSTEGEPGWRRASPAWKLEFRKKSHCMM

SEQ ID NO: 41405 - protein, 611 aa, Homo sapiens
  Payload ID: 8426
  Gene Symbol: IL16
  Gene Name: interleukin 16
  ENSP ID: ENSP00000453214
  MOD_RES (1)..(1): Any amino acid
XRQARMDYSFDTTAEDPWVRISDCIKNLFSPIMSENHGHMPLQPNASLNEEEGTQGHPDGTPPKLDTANGTPKVYKSADSSTVKKGPPVAPKPAWFRQSLKGLRNRASDPRGLPDPALSTQPAPASREHLGSHIRASSSSSSIRQRISSFETFGSSQLPDKGAQRLSLQPSSGEAAKPLGKHEEGRFSGLLGRGAAPTLVPQQPEQVLSSGSPAASEARDPGVSESPPPGRQPNQKTLPPGPDPLLRLLSTQAEESQGPVLKMPSQRARSFPLTRSQSCETKLLDEKTSKLYSISSQVSSAVMKSLLCLPSSISCAQTPCIPKEGASPTSSSNEDSAANGSAETSALDTGFSLNLSELREYTEGLTEAKEDDDGDHSSLQSGQSVISLLSSEELKKLIEEVKVLDEATLKQLDGIHVTILHKEEGAGLGFSLAGGADLENKVITVHRVFPNGLASQEGTIQKGNEVLSINGKSLKGTTHHDALAILRQAREPRQAVIVTRKLTPEAMPDLNSSTDSAASASAASDVSVESTEATVCTVTLEKMSAGLGFSLEGGKGSLHGDKPLTINRIFKGVGCVWFFACSPVVGMWPGPQKASGHFLGYVVSHNSMSSS

SEQ ID NO: 41406 - protein, 594 aa, Homo sapiens
  Payload ID: 8426
  Gene Symbol: IL16
  Gene Name: interleukin 16
  ENSP ID: ENSP00000453250
MESHSRAGKSRKSAKFRSISRSLMLCNAKTSDDGSSPDEKYPDPFEISLAQGKEGIFHSSVQLADTSEAGPSSVPDLALASEAAQLQAAGNDRGKTCRRIFFMKESSTASSREKPGKLEAQSSNFLFPKACHQRARSNSTSVNPYCTREIDFPMTKKSAAPTDRQPYSLCSNRKSLSQQLDCPAGKAAGTSRPTRSLSTAQLVQPSGGLQASVISNIVLMKGQAKGLGFSIVGGKDSIYGPIGIYVKTIFAGGAAAADGRLQEGDEILELNGESMAGLTHQDALQKFKQAKKGLLTLTVRTRLTAPPSLCSHLSPPLCRSLSSSTCITKDSSSFALESPSAPISTAKPNYRIMVEVSLQKEAGVGLGIGLCSVPYFQCISGIFVHTLSPGSVAHLDGRLRCGDEIVEISDSPVHCLTLNEVYTILSHCDPGPVPIIVSRHPDPQVSEQQLKEAVAQAVENTKFGKERHQWSLEGVKRLESSWHGRPTLEKEREKNSAPPHRRAQKVMIRSSSDSSYMSGSPGGSPGSGSAEKPSSDVDISTHSPSLPLAREPVVLSIASSRLPQESPPLPESRDSHPPLRLKKSFEILVRKPMS

SEQ ID NO: 41407 - protein, 201 aa, Homo sapiens
  Payload ID: 8426
  Gene Symbol: IL16
  Gene Name: interleukin 16
  ENSP ID: ENSP00000454636
  MOD_RES (1)..(1): Any amino acid
XQKFKQAKKGLLTLTVRTRLTAPPSLCSHLSPPLCRSLSSSTCITKDSSSFALESPSAPISTAKPNYRIMVEVSLQKEAGVGLGIGLCSVPYFQCISGIFVHTLSPGSVAHLDGRLRCGDEIVEISDSPVHCLTLNEVYTILSHCDPGPVPIIVSRHPDPQVSEQQLKEAVAQAVENTKFGKERHQWSLEDAEMELGPPGS

SEQ ID NO: 41408 - protein, 484 aa, Homo sapiens
  Payload ID: 8426
  Gene Symbol: IL16
  Gene Name: interleukin 16
  ENSP ID: ENSP00000456972
MESHSRAGKSRKSAKFRSISRSLMLCNAKTSDDGSSPDEKYPDPFEISLAQGKEGIFHSSVQLADTSEAGPSSVPDLALASEAAQLQAAGNDRGKTCRRIFFMKESSTASSREKPGKLEAQSSNFLFPKACHQRARSNSTSVNPYCTREIDFPMTKKSAAPTDRQPYSLCSNRKSLSQQLDCPAGKAAGTSRPTRSLSTAQLVQPSGGLQASVISNIVLMKGQAKGLGFSIVGGKDSIYGPIGIYVKTIFAGGAAAADGRLQEGDEILELNGESMAGLTHQDALQKFKQAKKGLLTLTVRTRLTAPPSLCSHLSPPLCRSLSSSTCITKDSSSFALESPSAPISTAKPNYRIMVEVSLQKEAGVGLGIGLCSVPYFQCISGIFVHTLSPGSVAHLDGRLRCGDEIVEISDSPVHCLTLNEVYTILSHCDPGPVPIIVSRHPDPQVSEQQLKEAVAQAVENTKFGKERHQWSLEDAEMELGPPGS

SEQ ID NO: 41409 - protein, 560 aa, Homo sapiens
  Payload ID: 8426
  Gene Symbol: IL16
  Gene Name: interleukin 16
  Uniprot ID: Q14005
  ENSP ID: ENSP00000458125
MDYSFDTTAEDPWVRISDCIKNLFSPIMSENHGHMPLQPNASLNEEEGTQGHPDGTPPKLDTANGTPKVYKSADSSTVKKGPPVAPKPAWFRQSLKGLRNRASDPRGLPDPALSTQPAPASREHLGSHIRASSSSSSIRQRISSFETFGSSQLPDKGAQRLSLQPSSGEAAKPLGKHEEGRFSGLLGRGAAPTLVPQQPEQVLSSGSPAASEARDPGVSESPPPGRQPNQKTLPPGPDPLLRLLSTQAEESQGPVLKMPSQRARSFPLTRSQSCETKLLDEKTSKLYSISSQVSSAVMKSLLCLPSSISCAQTPCIPKEGASPTSSSNEDSAANGSAETSALDTGFSLNLSELREYTEGLTEAKEDDDGDHSSLQSGQSVISLLSSEELKKLIEEVKVLDEATLKQLDGIHVTILHKEEGAGLGFSLAGGADLENKVITVHRVFPNGLASQEGTIQKGNEVLSINGKSLKGTTHHDALAILRQAREPRQAVIVTRKLTPEAMPDLNSSTDSAASASAASDVSVESTEATVCTVTLEDVGRAGLQPGRREGLPTRRQASHH

SEQ ID NO: 41410 - protein, 866 aa, Homo sapiens
  Payload ID: 8427
  Gene Symbol: IL17RA
  Gene Name: interleukin 17 receptor A
  Uniprot ID: Q96F46
  ENSP ID: ENSP00000320936
MGAARSPPSAVPGPLLGLLLLLLGVLAPGGASLRLLDHRALVCSQPGLNCTVKNSTCLDDSWIHPRNLTPSSPKDLQIQLHFAHTQQGDLFPVAHIEWTLQTDASILYLEGAELSVLQLNTNERLCVRFEFLSKLRHHHRRWRFTFSHFVVDPDQEYEVTVHHLPKPIPDGDPNHQSKNFLVPDCEHARMKVTTPCMSSGSLWDPNITVETLEAHQLRVSFTLWNESTHYQILLTSFPHMENHSCFEHMHHIPAPRPEEFHQRSNVTLTLRNLKGCCRHQVQIQPFFSSCLNDCLRHSATVSCPEMPDTPEPIPDYMPLWVYWFITGISILLVGSVILLIVCMTWRLAGPGSEKYSDDTKYTDGLPAADLIPPPLKPRKVWIIYSADHPLYVDVVLKFAQFLLTACGTEVALDLLEEQAISEAGVMTWVGRQKQEMVESNSKIIVLCSRGTRAKWQALLGRGAPVRLRCDHGKPVGDLFTAAMNMILPDFKRPACFGTYVVCYFSEVSCDGDVPDLFGAAPRYPLMDRFEEVYFRIQDLEMFQPGRMHRVGELSGDNYLRSPGGRQLRAALDRFRDWQVRCPDWFECENLYSADDQDAPSLDEEVFEEPLLPPGTGIVKRAPLVREPGSQACLAIDPLVGEEGGAAVAKLEPHLQPRGQPAPQPLHTLVLAAEEGALVAAVEPGPLADGAAVRLALAGEGEACPLLGSPGAGRNSVLFLPVDPEDSPLGSSTPMASPDLLPEDVREHLEGLMLSLFEQSLSCQAQGGCSRPAMVLTDPHTPYEEEQRQSVQSDQGYISRSSPQPPEGLTEMEEEEEEEQDPGKPALPLSPEDLESLRSLQRQLLFRQLQKNSGWDTMGSESEGPSA

SEQ ID NO: 41411 - protein, 832 aa, Homo sapiens
  Payload ID: 8427
  Gene Symbol: IL17RA
  Gene Name: interleukin 17 receptor A
  Uniprot ID: Q96F46
  ENSP ID: ENSP00000479970
MGAARSPPSAVPGPLLGLLLLLLGVLAPGGASLRLLDHRALVCSQPGLNCTVKNSTCLDDSWIHPRNLTPSSPKDLQIQLHFAHTQQGDLFPVAHIEWTLQTDASILYLEGAELSVLQLNTNERLCVRFEFLSKLRHHHRRWRFTFSHFVVDPDQEYEVTVHHLPKPIPDGDPNHQSKNFLVPDCEHARMKVTTPCMSSGSLWDPNITVETLEAHQLRVSFTLWNESTHYQILLTSFPHMENHSCFEHMHHIPAPRPEEFHQRSNVTLTLRNLKGCCRHQVQIQPFFSSCLNDCLRHSATVSCPEMPDTPEPIPGPGSEKYSDDTKYTDGLPAADLIPPPLKPRKVWIIYSADHPLYVDVVLKFAQFLLTACGTEVALDLLEEQAISEAGVMTWVGRQKQEMVESNSKIIVLCSRGTRAKWQALLGRGAPVRLRCDHGKPVGDLFTAAMNMILPDFKRPACFGTYVVCYFSEVSCDGDVPDLFGAAPRYPLMDRFEEVYFRIQDLEMFQPGRMHRVGELSGDNYLRSPGGRQLRAALDRFRDWQVRCPDWFECENLYSADDQDAPSLDEEVFEEPLLPPGTGIVKRAPLVREPGSQACLAIDPLVGEEGGAAVAKLEPHLQPRGQPAPQPLHTLVLAAEEGALVAAVEPGPLADGAAVRLALAGEGEACPLLGSPGAGRNSVLFLPVDPEDSPLGSSTPMASPDLLPEDVREHLEGLMLSLFEQSLSCQAQGGCSRPAMVLTDPHTPYEEEQRQSVQSDQGYISRSSPQPPEGLTEMEEEEEEEQDPGKPALPLSPEDLESLRSLQRQLLFRQLQKNSGWDTMGSESEGPSA

SEQ ID NO: 41412 - protein, 502 aa, Homo sapiens
  Payload ID: 8428
  Gene Symbol: IL17RB
  Gene Name: interleukin 17 receptor B
  Uniprot ID: Q9NRM6
  ENSP ID: ENSP00000288167
MSLVLLSLAALCRSAVPREPTVQCGSETGPSPEWMLQHDLIPGDLRDLRVEPVTTSVATGDYSILMNVSWVLRADASIRLLKATKICVTGKSNFQSYSCVRCNYTEAFQTQTRPSGGKWTFSYIGFPVELNTVYFIGAHNIPNANMNEDGPSMSVNFTSPGCLDHIMKYKKKCVKAGSLWDPNITACKKNEETVEVNFTTTPLGNRYMALIQHSTIIGFSQVFEPHQKKQTRASVVIPVTGDSEGATVQLTPYFPTCGSDCIRHKGTVVLCPQTGVPFPLDNNKSKPGGWLPLLLLSLLVATWVLVAGIYLMWRHERIKKTSFSTTTLLPPIKVLVVYPSEICFHHTICYFTEFLQNHCRSEVILEKWQKKKIAEMGPVQWLATQKKAADKVVFLLSNDVNSVCDGTCGKSEGSPSENSQDLFPLAFNLFCSDLRSQIHLHKYVVVYFREIDTKDDYNALSVCPKYHLMKDATAFCAELLHVKQQVSAGKRSQACHDGCCSL

SEQ ID NO: 41413 - protein, 348 aa, Homo sapiens
  Payload ID: 8428
  Gene Symbol: IL17RB
  Gene Name: interleukin 17 receptor B
  ENSP ID: ENSP00000418638
MSLVLLSLAALCRSAVPREPTVQCGSETGPSPEWMLQHDLIPGDLRDLRVEPVTTSVATGDYSILMNVSWVLRADASIRLLKATKICVTGKSNFQSYSCVRCNYTEAFQTQTRPSGGKWTFSYIGFPVELNTVYFIGAHNIPNANMNEDGPSMSVNFTSPGSLWDPNITACKKNEETVEVNFTTTPLGNRYMALIQHSTIIGFSQVFEPHQKKQTRASVVIPVTGDSEGATVQLTPYFPTCGSDCIRHKGTVVLCPQTGVPFPLDNNKSKPGGWLPLLLLSLLVATWVLVAGIYLMWRHERIKKTSFSTTTLLPPIKVLVVYPSEICFHHTICYFTEFLQNHCRSEVI

SEQ ID NO: 41414 - protein, 791 aa, Homo sapiens
  Payload ID: 8429
  Gene Symbol: IL17RC
  Gene Name: interleukin 17 receptor C
  Uniprot ID: Q8NAC3
  ENSP ID: ENSP00000295981
MPVPWFLLSLALGRSPVVLSLERLVGPQDATHCSPVSLEPWGDEERLRVQFLAQQSLSLAPVTAATARTALSGLSGADGRREERGRGKSWVCLSLGGSGNTEPQKKGLSCRLWDSDILCLPGDIVPAPGPVLAPTHLQTELVLRCQKETDCDLCLRVAVHLAVHGHWEEPEDEEKFGGAADSGVEEPRNASLQAQVVLSFQAYPTARCVLLEVQVPAALVQFGQSVGSVVYDCFEAALGSEVRIWSYTQPRYEKELNHTQQLPDCRGLEVWNSIPSCWALPWLNVSADGDNVHLVLNVSEEQHFGLSLYWNQVQGPPKPRWHKNLTGPQIITLNHTDLVPCLCIQVWPLEPDSVRTNICPFREDPRAHQNLWQAARLQLLTLQSWLLDAPCSLPAEAALCWRAPGGDPCQPLVPPLSWENVTVDKVLEFPLLKGHPNLCVQVNSSEKLQLQECLWADSLGPLKDDVLLLETRGPQDNRSLCALEPSGCTSLPSKASTRAARLGEYLLQDLQSGQCLQLWDDDLGALWACPMDKYIHKRWALVWLACLLFAAALSLILLLKKDHAKGWLRLLKQDVRSGAAARGRAALLLYSADDSGFERLVGALASALCQLPLRVAVDLWSRRELSAQGPVAWFHAQRRQTLQEGGVVVLLFSPGAVALCSEWLQDGVSGPGAHGPHDAFRASLSCVLPDFLQGRAPGSYVGACFDRLLHPDAVPALFRTVPVFTLPSQLPDFLGALQQPRAPRSGRLQERAEQVSRALQPALDSYFHPPGTPAPGRGVGPGAGPGAGDGT

SEQ ID NO: 41415 - protein, 705 aa, Homo sapiens
  Payload ID: 8429
  Gene Symbol: IL17RC
  Gene Name: interleukin 17 receptor C
  Uniprot ID: Q8NAC3
  ENSP ID: ENSP00000373323
MPVPWFLLSLALGRSPVVLSLERLVGPQDATHCSPGLSCRLWDSDILCLPGDIVPAPGPVLAPTHLQTELVLRCQKETDCDLCLRVAVHLAVHGHWEEPEDEEKFGGAADSGVEEPRNASLQAQVVLSFQAYPTARCVLLEVQVPAALVQFGQSVGSVVYDCFEAALGSEVRIWSYTQPRYEKELNHTQQLPALPWLNVSADGDNVHLVLNVSEEQHFGLSLYWNQVQGPPKPRWHKNLTGPQIITLNHTDLVPCLCIQVWPLEPDSVRTNICPFREDPRAHQNLWQAARLQLLTLQSWLLDAPCSLPAEAALCWRAPGGDPCQPLVPPLSWENVTVDKVLEFPLLKGHPNLCVQVNSSEKLQLQECLWADSLGPLKDDVLLLETRGPQDNRSLCALEPSGCTSLPSKASTRAARLGEYLLQDLQSGQCLQLWDDDLGALWACPMDKYIHKRWALVWLACLLFAAALSLILLLKKDHAKGWLRLLKQDVRSGAAARGRAALLLYSADDSGFERLVGALASALCQLPLRVAVDLWSRRELSAQGPVAWFHAQRRQTLQEGGVVVLLFSPGAVALCSEWLQDGVSGPGAHGPHDAFRASLSCVLPDFLQGRAPGSYVGACFDRLLHPDAVPALFRTVPVFTLPSQLPDFLGALQQPRAPRSGRLQERAEQVSRALQPALDSYFHPPGTPAPGRGVGPGAGPGAGDGT

SEQ ID NO: 41416 - protein, 720 aa, Homo sapiens
  Payload ID: 8429
  Gene Symbol: IL17RC
  Gene Name: interleukin 17 receptor C
  Uniprot ID: Q8NAC3
  ENSP ID: ENSP00000384969
MPVPWFLLSLALGRSPVVLSLERLVGPQDATHCSPGLSCRLWDSDILCLPGDIVPAPGPVLAPTHLQTELVLRCQKETDCDLCLRVAVHLAVHGHWEEPEDEEKFGGAADSGVEEPRNASLQAQVVLSFQAYPTARCVLLEVQVPAALVQFGQSVGSVVYDCFEAALGSEVRIWSYTQPRYEKELNHTQQLPDCRGLEVWNSIPSCWALPWLNVSADGDNVHLVLNVSEEQHFGLSLYWNQVQGPPKPRWHKNLTGPQIITLNHTDLVPCLCIQVWPLEPDSVRTNICPFREDPRAHQNLWQAARLQLLTLQSWLLDAPCSLPAEAALCWRAPGGDPCQPLVPPLSWENVTVDKVLEFPLLKGHPNLCVQVNSSEKLQLQECLWADSLGPLKDDVLLLETRGPQDNRSLCALEPSGCTSLPSKASTRAARLGEYLLQDLQSGQCLQLWDDDLGALWACPMDKYIHKRWALVWLACLLFAAALSLILLLKKDHAKGWLRLLKQDVRSGAAARGRAALLLYSADDSGFERLVGALASALCQLPLRVAVDLWSRRELSAQGPVAWFHAQRRQTLQEGGVVVLLFSPGAVALCSEWLQDGVSGPGAHGPHDAFRASLSCVLPDFLQGRAPGSYVGACFDRLLHPDAVPALFRTVPVFTLPSQLPDFLGALQQPRAPRSGRLQERAEQVSRALQPALDSYFHPPGTPAPGRGVGPGAGPGAGDGT

SEQ ID NO: 41417 - protein, 91 aa, Homo sapiens
  Payload ID: 8429
  Gene Symbol: IL17RC
  Gene Name: interleukin 17 receptor C
  ENSP ID: ENSP00000387675
MPVPWFLLSLALGRSPVVLSLERLVGPQDATHCSPGLSCRLWGATKFWAWNSFSSHPLLHTQTVTYSACLGTSCLLRAPCWRLRTCRQSWC

SEQ ID NO: 41418 - protein, 156 aa, Homo sapiens
  Payload ID: 8429
  Gene Symbol: IL17RC
  Gene Name: interleukin 17 receptor C
  ENSP ID: ENSP00000390080
MPVPWFLLSLALGRSPVVLSLERLVGPQDATHCSPGLSCRLWDSDILCLPGDIVPAPGPVLAPTHLQTELVLRCQKETDCDLCLRVAVHLAVHGHWEEPEDEEKFGGAADSGVEEPRNASLQAQVVLSFQAYPTARCVLLEVQVPAALVQFGLCGI

SEQ ID NO: 41419 - protein, 98 aa, Homo sapiens
  Payload ID: 8429
  Gene Symbol: IL17RC
  Gene Name: interleukin 17 receptor C
  ENSP ID: ENSP00000394996
MPVPWFLLSLALGRSPVVLSLERLVGPQDATHCSPGLSCRLWDSDILCLPGDIVPAPGPVLAPTHLQTELVLRCQKETDCDLCLRVAVHLAVHGLCGI

SEQ ID NO: 41420 - protein, 690 aa, Homo sapiens
  Payload ID: 8429
  Gene Symbol: IL17RC
  Gene Name: interleukin 17 receptor C
  ENSP ID: ENSP00000395315
MPVPWFLLSLALGRSPVVLSLERLVGPQDATHCSPGLSCRLWDSDILCLPGDIVPAPGPVLAPTHLQTELVLRCQKETDCDLCLRVAVHLAVHGHWEEPEDEEKFGGAADSGVEEPRNASLQAQVVLSFQAYPTARCVLLEVQVPAALVQFGQSVGSVVYDCFEAALGSEVRIWSYTQPRYEKELNHTQQLPDCRGLEVWNSIPSCWALPWLNVSADGDNVHLVLNVSEEQHFGLSLYWNQVQGPPKPRWHKNLTGPQIITLNHTDLVPCLCIQVWPLEPDSVRTNICPFREDPRAHQNLWQAARLQLLTLQSWLLDAPCSLPAEAALCWRAPGGDPCQPLVPPLSWENVTVDVNSSEKLQLQECLWADSLGPLKDDVLLLETRGPQDNRSLCALEPSGCTSLPSKASTRAARLGEYLLQDLQSGQCLQLWDDDLGALWACPMDKYIHKRWALVWLACLLFAAALSLILLLKKDHAKAAARGRAALLLYSADDSGFERLVGALASALCQLPLRVAVDLWSRRELSAQGPVAWFHAQRRQTLQEGGVVVLLFSPGAVALCSEWLQDGVSGPGAHGPHDAFRASLSCVLPDFLQGRAPGSYVGACFDRLLHPDAVPALFRTVPVFTLPSQLPDFLGALQQPRAPRSGRLQERAEQVSRALQPALDSYFHPPGTPAPGRGVGPGAGPGAGDGT

SEQ ID NO: 41421 - protein, 707 aa, Homo sapiens
  Payload ID: 8429
  Gene Symbol: IL17RC
  Gene Name: interleukin 17 receptor C
  Uniprot ID: Q8NAC3
  ENSP ID: ENSP00000396064
MPVPWFLLSLALGRSPVVLSLERLVGPQDATHCSPGLSCRLWDSDILCLPGDIVPAPGPVLAPTHLQTELVLRCQKETDCDLCLRVAVHLAVHGHWEEPEDEEKFGGAADSGVEEPRNASLQAQVVLSFQAYPTARCVLLEVQVPAALVQFGQSVGSVVYDCFEAALGSEVRIWSYTQPRYEKELNHTQQLPDCRGLEVWNSIPSCWALPWLNVSADGDNVHLVLNVSEEQHFGLSLYWNQVQGPPKPRWHKNLTGPQIITLNHTDLVPCLCIQVWPLEPDSVRTNICPFREDPRAHQNLWQAARLQLLTLQSWLLDAPCSLPAEAALCWRAPGGDPCQPLVPPLSWENVTVDKVLEFPLLKGHPNLCVQVNSSEKLQLQECLWADSLGPLKDDVLLLETRGPQDNRSLCALEPSGCTSLPSKASTRAARLGEYLLQDLQSGQCLQLWDDDLGALWACPMDKYIHKRWALVWLACLLFAAALSLILLLKKDHAKAAARGRAALLLYSADDSGFERLVGALASALCQLPLRVAVDLWSRRELSAQGPVAWFHAQRRQTLQEGGVVVLLFSPGAVALCSEWLQDGVSGPGAHGPHDAFRASLSCVLPDFLQGRAPGSYVGACFDRLLHPDAVPALFRTVPVFTLPSQLPDFLGALQQPRAPRSGRLQERAEQVSRALQPALDSYFHPPGTPAPGRGVGPGAGPGAGDGT

SEQ ID NO: 41422 - protein, 242 aa, Homo sapiens
  Payload ID: 8429
  Gene Symbol: IL17RC
  Gene Name: interleukin 17 receptor C
  ENSP ID: ENSP00000399396
MPVPWFLLSLALGRSPVVLSLERLVGPQDATHCSPGLSCRLWDSDILCLPGDIVPAPGPVLAPTHLQTELVLRCQKETDCDLCLRVAVHLAVHASLQAQVVLSFQAYPTARCVLLEVQVPAALVQFGQSVGSVVYDCFEAALGSEVRIWSYTQPRYEKELNHTQQLPALPWLNVSADGDNVHLVLNVSEEQHFGLSLYWNQVQGPPKPRWHKNLVRPPPSQVHSHCRPMPVQRTQCHIREDP

SEQ ID NO: 41423 - protein, 416 aa, Homo sapiens
  Payload ID: 8429
  Gene Symbol: IL17RC
  Gene Name: interleukin 17 receptor C
  ENSP ID: ENSP00000401128
MPVPWFLLSLALGRSPVVLSLERLVGPQDATHCSPGLSCRLWDSDILCLPGDIVPAPGPVLAPTHLQTELVLRCQKETDCDLCLRVAVHLAVHASLQAQVVLSFQAYPTARCVLLEVQVPAALVQFGQSVGSVVYDCFEAALGSEVRIWSYTQPRYEKELNHTQQLPDCRGLEVWNSIPSCWALPWLNVSADGDNVHLVLNVSEEQHFGLSLYWNQVQGPPKPRWHKNLTGPQIITLNHTDLVPCLCIQVWPLEPDSVRTNICPFREDPRAHQNLWQAARLQLLTLQSWLLDAPCSLPAEAALCWRAPGGDPCQPLVPPLSWENVTVDKVLEFPLLKGHPNLCVQVNSSEKLQLQECLWADSLGPLKDDVLLLETRGPQDNRSLCALEPSGCTSLPSKASTRAARLGEYLLQDLQS

SEQ ID NO: 41424 - protein, 688 aa, Homo sapiens
  Payload ID: 8429
  Gene Symbol: IL17RC
  Gene Name: interleukin 17 receptor C
  Uniprot ID: Q8NAC3
  ENSP ID: ENSP00000407894
MPVPWFLLSLALGRSPVVLSLERLVGPQDATHCSPGLSCRLWDSDILCLPGDIVPAPGPVLAPTHLQTELVLRCQKETDCDLCLRVAVHLAVHGHWEEPEDEEKFGGAADSGVEEPRNASLQAQVVLSFQAYPTARCVLLEVQVPAALVQFGQSVGSVVYDCFEAALGSEVRIWSYTQPRYEKELNHTQQLPALPWLNVSADGDNVHLVLNVSEEQHFGLSLYWNQVQGPPKPRWHKNLTGPQIITLNHTDLVPCLCIQVWPLEPDSVRTNICPFREDPRAHQNLWQAARLQLLTLQSWLLDAPCSLPAEAALCWRAPGGDPCQPLVPPLSWENVTVDVNSSEKLQLQECLWADSLGPLKDDVLLLETRGPQDNRSLCALEPSGCTSLPSKASTRAARLGEYLLQDLQSGQCLQLWDDDLGALWACPMDKYIHKRWALVWLACLLFAAALSLILLLKKDHAKGWLRLLKQDVRSGAAARGRAALLLYSADDSGFERLVGALASALCQLPLRVAVDLWSRRELSAQGPVAWFHAQRRQTLQEGGVVVLLFSPGAVALCSEWLQDGVSGPGAHGPHDAFRASLSCVLPDFLQGRAPGSYVGACFDRLLHPDAVPALFRTVPVFTLPSQLPDFLGALQQPRAPRSGRLQERAEQVSRALQPALDSYFHPPGTPAPGRGVGPGAGPGAGDGT

SEQ ID NO: 41425 - protein, 123 aa, Homo sapiens
  Payload ID: 8429
  Gene Symbol: IL17RC
  Gene Name: interleukin 17 receptor C
  ENSP ID: ENSP00000410834
MPVPWFLLSLALGRSPVVLSLERLVGPQDATHCSPGLSCRLWDSDILCLPGDIVPAPGPVLAPTHLQTELVLRCQKETDCDLCLRVAVHLAVHGLPYCPLRPAGGASACCPCAVWSVCGLCGI

SEQ ID NO: 41426 - protein, 70 aa, Homo sapiens
  Payload ID: 8429
  Gene Symbol: IL17RC
  Gene Name: interleukin 17 receptor C
  ENSP ID: ENSP00000412777
MPVPWFLLSLALGRSPVVLSLERLVGPQDATHCSPGLSCRLWVTYSACLGTSCLLRAPCWRLRTCRQSWC

SEQ ID NO: 41427 - protein, 99 aa, Homo sapiens
  Payload ID: 8429
  Gene Symbol: IL17RC
  Gene Name: interleukin 17 receptor C
  ENSP ID: ENSP00000413914
MPVPWFLLSLALGRSPVVLSLERLVGPQDATHCSPGLSCRLWDSDILCLPGDIVPAPGPVLAPTHLQTELVLRCQKETDCDLCLRVAVHLAVHGEQVIL

SEQ ID NO: 41428 - protein, 330 aa, Homo sapiens
  Payload ID: 8429
  Gene Symbol: IL17RC
  Gene Name: interleukin 17 receptor C
  ENSP ID: ENSP00000414609
MPVPWFLLSLALGRSPVVLSLERLVGPQDATHCSPGLSCRLWDSDILCLPGDIVPAPGPVLAPTHLQTELVLRCQKETDCDLCLRVAVHLAVHASLQAQVVLSFQAYPTARCVLLEVQVPAALVQFGQSVGSVVYDCFEAALGSEVRIWSYTQPRYEKELNHTQQLPALPWLNVSADGDNVHLVLNVSEEQHFGLSLYWNQVQGPPKPRWHKNLTGPQIITLNHTDLVPCLCIQVWPLEPDSVRTNICPFREDPRAHQNLWQAARLQLLTLQSWLLDAPCSLPAEAALCWRAPGGDPCQPLVPPLSWENVTVDKVLEFPLLKGHPNLCVQ

SEQ ID NO: 41429 - protein, 44 aa, Homo sapiens
  Payload ID: 8429
  Gene Symbol: IL17RC
  Gene Name: interleukin 17 receptor C
  ENSP ID: ENSP00000432564
MPVPWFLLSLALGRSPVVLSLERLVGPQDATHCSPNCPVWSVWC

SEQ ID NO: 41430 - protein, 739 aa, Homo sapiens
  Payload ID: 8430
  Gene Symbol: IL17RD
  Gene Name: interleukin 17 receptor D
  Uniprot ID: Q8NFM7
  ENSP ID: ENSP00000296318
MAPWLQLCSVFFTVNACLNGSQLAVAAGGSGRARGADTCGWRGVGPASRNSGLYNITFKYDNCTTYLNPVGKHVIADAQNITISQYACHDQVAVTILWSPGALGIEFLKGFRVILEELKSEGRQCQQLILKDPKQLNSSFKRTGMESQPFLNMKFETDYFVKVVPFPSIKNESNYHPFFFRTRACDLLLQPDNLACKPFWKPRNLNISQHGSDMQVSFDHAPHNFGFRFFYLHYKLKHEGPFKRKTCKQEQTTETTSCLLQNVSPGDYIIELVDDTNTTRKVMHYALKPVHSPWAGPIRAVAITVPLVVISAFATLFTVMCRKKQQENIYSHLDEESSESSTYTAALPRERLRPRPKVFLCYSSKDGQNHMNVVQCFAYFLQDFCGCEVALDLWEDFSLCREGQREWVIQKIHESQFIIVVCSKGMKYFVDKKNYKHKGGGRGSGKGELFLVAVSAIAEKLRQAKQSSSAALSKFIAVYFDYSCEGDVPGILDLSTKYRLMDNLPQLCSHLHSRDHGLQEPGQHTRQGSRRNYFRSKSGRSLYVAICNMHQFIDEEPDWFEKQFVPFHPPPLRYREPVLEKFDSGLVLNDVMCKPGPESDFCLKVEAAVLGATGPADSQHESQHGGLDQDGEARPALDGSAALQPLLHTVKAGSPSDMPRDSGIYDSSVPSSELSLPLMEGLSTDQTETSSLTESVSSSSGLGEEEPPALPSKLLSSGSCKADLGCRSYTDELHAVAPL

SEQ ID NO: 41431 - protein, 595 aa, Homo sapiens
  Payload ID: 8430
  Gene Symbol: IL17RD
  Gene Name: interleukin 17 receptor D
  Uniprot ID: Q8NFM7
  ENSP ID: ENSP00000322250
MESQPFLNMKFETDYFVKVVPFPSIKNESNYHPFFFRTRACDLLLQPDNLACKPFWKPRNLNISQHGSDMQVSFDHAPHNFGFRFFYLHYKLKHEGPFKRKTCKQEQTTETTSCLLQNVSPGDYIIELVDDTNTTRKVMHYALKPVHSPWAGPIRAVAITVPLVVISAFATLFTVMCRKKQQENIYSHLDEESSESSTYTAALPRERLRPRPKVFLCYSSKDGQNHMNVVQCFAYFLQDFCGCEVALDLWEDFSLCREGQREWVIQKIHESQFIIVVCSKGMKYFVDKKNYKHKGGGRGSGKGELFLVAVSAIAEKLRQAKQSSSAALSKFIAVYFDYSCEGDVPGILDLSTKYRLMDNLPQLCSHLHSRDHGLQEPGQHTRQGSRRNYFRSKSGRSLYVAICNMHQFIDEEPDWFEKQFVPFHPPPLRYREPVLEKFDSGLVLNDVMCKPGPESDFCLKVEAAVLGATGPADSQHESQHGGLDQDGEARPALDGSAALQPLLHTVKAGSPSDMPRDSGIYDSSVPSSELSLPLMEGLSTDQTETSSLTESVSSSSGLGEEEPPALPSKLLSSGSCKADLGCRSYTDELHAVAPL

SEQ ID NO: 41432 - protein, 595 aa, Homo sapiens; identical to SEQ ID NO: 41431
  Payload ID: 8430
  Gene Symbol: IL17RD
  Gene Name: interleukin 17 receptor D
  Uniprot ID: Q8NFM7
  ENSP ID: ENSP00000417516

SEQ ID NO: 41433 - protein, 73 aa, Homo sapiens
  Payload ID: 8430
  Gene Symbol: IL17RD
  Gene Name: interleukin 17 receptor D
  ENSP ID: ENSP00000418368
MESQPFLNMKFETDYFVKVVPFPSIKNESNYHPFFFRTRACDLLLQPDNLACKPFWKPRNLNISQHGSDMQVS

SEQ ID NO: 41434 - protein, 667 aa, Homo sapiens
  Payload ID: 8431
  Gene Symbol: IL17RE
  Gene Name: interleukin 17 receptor E
  Uniprot ID: Q8NFR9
  ENSP ID: ENSP00000373325
MGSSRLAALLLPLLLIVIDLSDSAGIGFRHLPHWNTRCPLASHTDDSFTGSSAYIPCRTWWALFSTKPWCVRVWHCSRCLCQHLLSGGSGLQRGLFHLLVQKSKKSSTFKFYRRHKMPAPAQRKLLPRRHLSEKSHHISIPSPDISHKGLRSKRTQPSDPETWESLPRLDSQRHGGPEFSFDLLPEARAIRVTISSGPEVSVRLCHQWALECEELSSPYDVQKIVSGGHTVELPYEFLLPCLCIEASYLQEDTVRRKKCPFQSWPEAYGSDFWKSVHFTDYSQHTQMVMALTLRCPLKLEAALCQRHDWHTLCKDLPNATARESDGWYVLEKVDLHPQLCFKFSFGNSSHVECPHQTGSLTSWNVSMDTQAQQLILHFSSRMHATFSAAWSLPGLGQDTLVPPVYTVSQARGSSPVSLDLIIPFLRPGCCVLVWRSDVQFAWKHLLCPDVSYRHLGLLILALLALLTLLGVVLALTCRRPQSGPGPARPVLLLHAADSEAQRRLVGALAELLRAALGGGRDVIVDLWEGRHVARVGPLPWLWAARTRVAREQGTVLLLWSGADLRPVSGPDPRAAPLLALLHAAPRPLLLLAYFSRLCAKGDIPPPLRALPRYRLLRDLPRLLRALDARPFAEATSWGRLGARQRRQSRLELCSRLEREAARLADLG

SEQ ID NO: 41435 - protein, 186 aa, Homo sapiens
  Payload ID: 8431
  Gene Symbol: IL17RE
  Gene Name: interleukin 17 receptor E
  ENSP ID: ENSP00000373326
MGSSRLAALLLPLLLIVIDLSDSAGIGFRHLPHWNTRCPLASHTEVLPISLAAPGGPSSPQSLGVCESGTVPAVCASICCQVAQVFNGASSTSWCRNPKSLPHSSSIGDTRCQHLLRGSCCLVVTCLRRAITFPSPPQTSPTRDFALKGPNLRIQRHGKVFPDWTHKGMEDPSSPLICCLRPGLFG

SEQ ID NO: 41436 - protein, 533 aa, Homo sapiens
  Payload ID: 8431
  Gene Symbol: IL17RE
  Gene Name: interleukin 17 receptor E
  Uniprot ID: Q8NFR9
  ENSP ID: ENSP00000388086
MGSSRLAALLLPLLLIVIDLSDSAGIGFRHLPHWNTRCPLASHTDDSFTGSSAYIPCRTWWALFSTKPWCVRVWHCSRCLCQHLLSGGSGLQRGLFHLLVQKSKKSSTFKFYRRHKMPAPAQRKLLPRRHLSEKSHHISIPSPDISHKGLRSKRTQPSDPETWESLPRLDSQRHGGPEFSFDLLPEARAIRVTISSGPEVSVRLCHQWALECEELSSPYDVQKIVSGGHTVELPYEFLLPCLCIEASYLQEDTVRRKKCPFQSWPEAYGSDFWKSVHFTDYSQHTQMVMALTLRCPLKLEAALCQRHDWHTLCKDLPNATARESDGWYVLEKVDLHPQLCFKFSFGNSSHVECPHQTGSLTSWNVSMDTQAQQLILHFSSRMHATFSAAWSLPGLGQDTLVPPVYTVSQARGSSPVSLDLIIPFLRPGCCVLLHASLSSPGGEDAWLIGVGGSVPSGVAVRCPVCLEAPLVSGCLLQTPGALDPGTAGPPHPTGCCSGPHLPAPTVRPGPSAASAPPARGGLGGAAAPGGSAG

SEQ ID NO: 41437 - protein, 173 aa, Homo sapiens
  Payload ID: 8431
  Gene Symbol: IL17RE
  Gene Name: interleukin 17 receptor E
  ENSP ID: ENSP00000400768
MGSSRLAALLLPLLLIVIDLSDSAGIGFRHLPHWNTRCPLASHTDDSFTGLQRGLFHLLVQKSKKSSTFKFYRRHKMPAPAQRKLLPRRHLSEKSHHISIPSPDISHKGLRSKRTQPSDPETWESLPRLDSQRHGGPEFSFDLLPEARAIRVTISSGPEVSVRLCHQWALECE

SEQ ID NO: 41438 - protein, 700 aa, Homo sapiens
  Payload ID: 8431
  Gene Symbol: IL17RE
  Gene Name: interleukin 17 receptor E
  ENSP ID: ENSP00000404916
MLAPFLLLLTHSRSPLSFRPCSHVPGALIAQKPMGSSRLAALLLPLLLIVIDLSDSAGIGFRHLPHWNTRCPLASHTDDSFTGSSAYIPCRTWWALFSTKPWCVRVWHCSRCLCQHLLSGGSGLQRGLFHLLVQKSKKSSTFKFYRRHKMPAPAQRKLLPRRHLSEKSHHISIPSPDISHKGLRSKRTQPSDPETWESLPRLDSQRHGGPEFSFDLLPEARAIRVTISSGPEVSVRLCHQWALECEELSSPYDVQKIVSGGHTVELPYEFLLPCLCIEASYLQEDTVRRKKCPFQSWPEAYGSDFWKSVHFTDYSQHTQMVMALTLRCPLKLEAALCQRHDWHTLCKDLPNATARESDGWYVLEKVDLHPQLCFKFSFGNSSHVECPHQTGSLTSWNVSMDTQAQQLILHFSSRMHATFSAAWSLPGLGQDTLVPPVYTVSQARGSSPVSLDLIIPFLRPGCCVLVWRSDVQFAWKHLLCPDVSYRHLGLLILALLALLTLLGVVLALTCRRPQSGPGPARPVLLLHAADSEAQRRLVGALAELLRAALGGGRDVIVDLWEGRHVARVGPLPWLWAARTRVAREQGTVLLLWSGADLRPVSGPDPRAAPLLALLHAAPRPLLLLAYFSRLCAKGDIPPPLRALPRYRLLRDLPRLLRALDARPFAEATSWGRLGARQRRQSRLELCSRLEREAARLADLG

SEQ ID NO: 41439 - protein, 190 aa, Homo sapiens
  Payload ID: 8431
  Gene Symbol: IL17RE
  Gene Name: interleukin 17 receptor E
  ENSP ID: ENSP00000406076
MGSSRLAALLLPLLLIVIDLSDSAGIGFRHLPHWNTRCPLASHTRKLLPRRHLSEKSHHISIPSPDISHKGLRSKRTQPSDPETWESLPRLDSQRHGGPEFSFDLLPEARAIRVTISSGPEVSVRLCHQWALECEELSSPYDVQKIVSGGHTVELPYEFLLPCLCIEMARTSGSQCTSLTTASTLRWSWP

SEQ ID NO: 41440 - protein, 146 aa, Homo sapiens
  Payload ID: 8431
  Gene Symbol: IL17RE
  Gene Name: interleukin 17 receptor E
  ENSP ID: ENSP00000415701
MGSSRLAALLLPLLLIVIDLSDSAGIGFRHLPHWNTRCPLASHTVFNGASSTSWCRNPKSLPHSSSIGDTRCQHLLRGSCCLVVTCLRRAITFPSPPQTSPTRDFALKGPNLRIQRHGKVFPDWTHKGMEDPSSPLICCLRPGLFG

SEQ ID NO: 41441 - protein, 336 aa, Homo sapiens
  Payload ID: 8432
  Gene Symbol: IL17REL
  Gene Name: interleukin 17 receptor E-like
  Uniprot ID: Q6ZVW7
  ENSP ID: ENSP00000342520
MSRSVLEALTSSTAMQCVPSDGCAMLLRVRASITLHERLRGLEACAMSLDTQETQCQSVWVARASHRQQGGQQLQVHFGCFAVSVAQHLYVTLRTIPHFCGVQLDQRHLVEAGKLSYWVDRRRKAILVQVPRASGSPDYYLRLCLKRFTCEDAGAPVRVTANSVSQAVFLPYSQELPCLCLEGWSATPDAVRIQICPFENDTEALEVLWDTVYYHPESQTLSWEPACPVSGHVSLCWRPGPGAGCRKLQQSSQLVHRRVQYPLVDTQPQLCLKFSTSWGSWVRCPFEQRRFPTPPTSRCTCVTGGSHSSLPANAHSRPARSLQPQVTWQPPLLLPS

SEQ ID NO: 41442 - protein, 336 aa, Homo sapiens; identical to SEQ ID NO: 41441
  Payload ID: 8432
  Gene Symbol: IL17REL
  Gene Name: interleukin 17 receptor E-like
  Uniprot ID: Q6ZVW7
  ENSP ID: ENSP00000374633

SEQ ID NO: 41443 - protein, 155 aa, Homo sapiens
  Payload ID: 8433
  Gene Symbol: IL17A
  Gene Name: interleukin 17A
  Uniprot ID: Q16552
  ENSP ID: ENSP00000344192
MTPGKTSLVSLLLLLSLEAIVKAGITIPRNPGCPNSEDKNFPRTVMVNLNIHNRNTNTNPKRSSDYYNRSTSPWNLHRNEDPERYPSVIWEAKCRHLGCINADGNVDYHMNSVPIQQEILVLRREPPHCPNSFRLEKILVSVGCTCVTPIVHHVA

SEQ ID NO: 41444 - protein, 180 aa, Homo sapiens
  Payload ID: 8434
  Gene Symbol: IL17B
  Gene Name: interleukin 17B
  Uniprot ID: Q9UHF5
  ENSP ID: ENSP00000261796
MDWPHNLLFLLTISIFLGLGQPRSPKSKRKGQGRPGPLAPGPHQVPLDLVSRMKPYARMEEYERNIEEMVAQLRNSSELAQRKCEVNLQLWMSNKRSLSPWGYSINHDPSRIPVDLPEARCLCLGCVNPFTMQEDRSMVSVPVFSQVPVRRRLCPPPPRTGPCRQRAVMETIAVGCTCIF

SEQ ID NO: 41445 - protein, 197 aa, Homo sapiens
  Payload ID: 8435
  Gene Symbol: IL17C
  Gene Name: interleukin 17C
  Uniprot ID: Q9P0M4
  ENSP ID: ENSP00000244241
MTLLPGLLFLTWLHTCLAHHDPSLRGHPHSHGTPHCYSAEELPLGQAPPHLLARGAKWGQALPVALVSSLEAASHRGRHERPSATTQCPVLRPEEVLEADTHQRSISPWRYRVDTDEDRYPQKLAFAECLCRGCIDARTGRETAALNSVRLLQSLLVLRRRPCSRDGSGLPTPGAFAFHTEFIHVPVGCTCVLPRSV

SEQ ID NO: 41446 - protein, 202 aa, Homo sapiens
  Payload ID: 8436
  Gene Symbol: IL17D
  Gene Name: interleukin 17D
  Uniprot ID: Q8TAD2
  ENSP ID: ENSP00000302924
MLVAGFLLALPPSWAAGAPRAGRRPARPRGCADRPEELLEQLYGRLAAGVLSAFHHTLQLGPREQARNASCPAGGRPADRRFRPPTNLRSVSPWAYRISYDPARYPRYLPEAYCLCRGCLTGLFGEEDVRFRSAPVYMPTVVLRRTPACAGGRSVYTEAYVTIPVGCTCVPEPEKDADSINSSIDKQGAKLLLGPNDAPAGP

SEQ ID NO: 41447 - protein, 35 aa, Homo sapiens
  Payload ID: 8436
  Gene Symbol: IL17D
  Gene Name: interleukin 17D
  ENSP ID: ENSP00000479852
MLGALVWMLVAGFLLALPPSWAAGAPRAGRRPARP

SEQ ID NO: 41448 - protein, 90 aa, Homo sapiens
  Payload ID: 8436
  Gene Symbol: IL17D
  Gene Name: interleukin 17D
  ENSP ID: ENSP00000480610
  MOD_RES (1)..(1): Any amino acid
XRPRGCADRPEELLEQLYGRLAAGVLSAFHHTLQLGPREQARNASCPAGGRPADRRFRPPTNLRSVSPWAYSSVSITSNHPWRTRPLFLD

SEQ ID NO: 41449 - protein, 163 aa, Homo sapiens
  Payload ID: 8437
  Gene Symbol: IL17F
  Gene Name: interleukin 17F
  Uniprot ID: Q96PD4
  ENSP ID: ENSP00000337432
MTVKTLHGPAMVKYLLLSILGLAFLSEAAARKIPKVGHTFFQKPESCPPVPGGSMKLDIGIINENQRVSMSRNIESRSTSPWNYTVTWDPNRYPSEVVQAQCRNLGCINAQGKEDISMNSVPIQQETLVVRRKHQGCSVSFQLEKVLVTVGCTCVTPVIHHVQ

SEQ ID NO: 41450 - protein, 193 aa, Homo sapiens
  Payload ID: 8438
  Gene Symbol: IL18
  Gene Name: interleukin 18
  Uniprot ID: Q14116
  ENSP ID: ENSP00000280357
MAAEPVEDNCINFVAMKFIDNTLYFIAEDDENLESDYFGKLESKLSVIRNLNDQVLFIDQGNRPLFEDMTDSDCRDNAPRTIFIISMYKDSQPRGMAVTISVKCEKISTLSCENKIISFKEMNPPDNIKDTKSDIIFFQRSVPGHDNKMQFESSSYEGYFLACEKERDLFKLILKKEDELGDRSIMFTVQNED

SEQ ID NO: 41451 - protein, 193 aa, Homo sapiens; identical to SEQ ID NO: 41450
  Payload ID: 8438
  Gene Symbol: IL18
  Gene Name: interleukin 18
  Uniprot ID: Q14116
  ENSP ID: ENSP00000434161

SEQ ID NO: 41452 - protein, 189 aa, Homo sapiens
  Payload ID: 8438
  Gene Symbol: IL18
  Gene Name: interleukin 18
  Uniprot ID: Q14116
  ENSP ID: ENSP00000434561
MAAEPVEDNCINFVAMKFIDNTLYFIENLESDYFGKLESKLSVIRNLNDQVLFIDQGNRPLFEDMTDSDCRDNAPRTIFIISMYKDSQPRGMAVTISVKCEKISTLSCENKIISFKEMNPPDNIKDTKSDIIFFQRSVPGHDNKMQFESSSYEGYFLACEKERDLFKLILKKEDELGDRSIMFTVQNED

SEQ ID NO: 41453 - protein, 194 aa, Homo sapiens
  Payload ID: 8439
  Gene Symbol: IL18BP
  Gene Name: interleukin 18 binding protein
  Uniprot ID: O95998
  ENSP ID: ENSP00000260049
MTMRHNWTPDLSPLWVLLLCAHVVTLLVRATPVSQTTTAATASVRSTKDPCPSQPPVFPAAKQCPALEVTWPEVEVPLNGTLSLSCVACSRFPNFSILYWLGNGSFIEHLPGRLWEGSTSRERGSTGTQLCKALVLEQLTPALHSTNFSCVLVDPEQVVQRHVVLAQLWAGLRATLPPTQEALPSSHSSPQQQG

SEQ ID NO: 41454 - protein, 194 aa, Homo sapiens; identical to SEQ ID NO: 41453
  Payload ID: 8439
  Gene Symbol: IL18BP
  Gene Name: interleukin 18 binding protein
  Uniprot ID: O95998
  ENSP ID: ENSP00000338723

SEQ ID NO: 41455 - protein, 163 aa, Homo sapiens
  Payload ID: 8439
  Gene Symbol: IL18BP
  Gene Name: interleukin 18 binding protein
  Uniprot ID: O95998
  ENSP ID: ENSP00000343309
MTMRHNWTPDLSPLWVLLLCAHVVTLLVRATPVSQTTTAATASVRSTKDPCPSQPPVFPAAKQCPALEVTWPEVEVPLNGTLSLSCVACSRFPNFSILYWLGNGSFIEHLPGRLWEGSTSRERGSTGWAEGNLAPHPRSPALQPQQSTAAGLRLSTGPAAAQP

SEQ ID NO: 41456 - protein, 194 aa, Homo sapiens; identical to SEQ ID NO: 41453
  Payload ID: 8439
  Gene Symbol: IL18BP
  Gene Name: interleukin 18 binding protein
  Uniprot ID: O95998
  ENSP ID: ENSP00000377306

SEQ ID NO: 41457 - protein, 194 aa, Homo sapiens; identical to SEQ ID NO: 41453
  Payload ID: 8439
  Gene Symbol: IL18BP
  Gene Name: interleukin 18 binding protein
  Uniprot ID: O95998
  ENSP ID: ENSP00000377308

SEQ ID NO: 41458 - protein, 115 aa, Homo sapiens
  Payload ID: 8439
  Gene Symbol: IL18BP
  Gene Name: interleukin 18 binding protein
  Uniprot ID: O95998
  ENSP ID: ENSP00000377310
MTMRHNWTPDLSPLWVLLLCAHVVTLLVRATPVSQTTTAATASVRSTKDPCPSQPPVFPAAKQCPALEVTWPEVEVPLSWAEGNLAPHPRSPALQPQQSTAAGLRLSTGPAAAQP

SEQ ID NO: 41459 - protein, 194 aa, Homo sapiens; identical to SEQ ID NO: 41453
  Payload ID: 8439
  Gene Symbol: IL18BP
  Gene Name: interleukin 18 binding protein
  Uniprot ID: O95998
  ENSP ID: ENSP00000384212

SEQ ID NO: 41460 - protein, 194 aa, Homo sapiens; identical to SEQ ID NO: 41453
  Payload ID: 8439
  Gene Symbol: IL18BP
  Gene Name: interleukin 18 binding protein
  Uniprot ID: O95998
  ENSP ID: ENSP00000434376

SEQ ID NO: 41461 - protein, 199 aa, Homo sapiens
  Payload ID: 8439
  Gene Symbol: IL18BP
  Gene Name: interleukin 18 binding protein
  ENSP ID: ENSP00000434717
MTMRHNWTPDLSPLWVLLLCAHVVTLLVRATPVSQTTTAATASVRSTKDPCPSQPPVFPAAKQCPALEVTWPEVEVPLNGTLSLSCVACSRFPNFSILYWLGNGSFIEHLPGRLWEGSTSRERGSTGTQLCKALVLEQLTPALHSTNFSCVLVDPEQVVQRHVVLAQLWVRSPRRGLQEQEELCFHMWGGKGGLCQSSL

SEQ ID NO: 41462 - protein, 199 aa, Homo sapiens; identical to SEQ ID NO: 41461
  Payload ID: 8439
  Gene Symbol: IL18BP
  Gene Name: interleukin 18 binding protein
  ENSP ID: ENSP00000434835

SEQ ID NO: 41463 - protein, 163 aa, Homo sapiens; identical to SEQ ID NO: 41455
  Payload ID: 8439
  Gene Symbol: IL18BP
  Gene Name: interleukin 18 binding protein
  Uniprot ID: O95998
  ENSP ID: ENSP00000480621

SEQ ID NO: 41464 - protein, 541 aa, Homo sapiens
  Payload ID: 8440
  Gene Symbol: IL18R1
  Gene Name: interleukin 18 receptor 1
  Uniprot ID: Q13478
  ENSP ID: ENSP00000233957
MNCRELPLTLWVLISVSTAESCTSRPHITVVEGEPFYLKHCSCSLAHEIETTTKSWYKSSGSQEHVELNPRSSSRIALHDCVLEFWPVELNDTGSYFFQMKNYTQKWKLNVIRRNKHSCFTERQVTSKIVEVKKFFQITCENSYYQTLVNSTSLYKNCKKLLLENNKNPTIKKNAEFEDQGYYSCVHFLHHNGKLFNITKTFNITIVEDRSNIVPVLLGPKLNHVAVELGKNVRLNCSALLNEEDVIYWMFGEENGSDPNIHEEKEMRIMTPEGKWHASKVLRIENIGESNLNVLYNCTVASTGGTDTKSFILVRKADMADIPGHVFTRGMIIAVLILVAVVCLVTVCVIYRVDLVLFYRHLTRRDETLTDGKTYDAFVSYLKECRPENGEEHTFAVEILPRVLEKHFGYKLCIFERDVVPGGAVVDEIHSLIEKSRRLIIVLSKSYMSNEVRYELESGLHEALVERKIKIILIEFTPVTDFTFLPQSLKLLKSHRVLKWKADKSLSYNSRFWKNLLYLMPAKTVKPGRDEPEVLPVLSES

SEQ ID NO: 41465 - protein, 170 aa, Homo sapiens
  Payload ID: 8440
  Gene Symbol: IL18R1
  Gene Name: interleukin 18 receptor 1
  ENSP ID: ENSP00000334030
MNCRELPLTLWVLISVSTAESCTSRPHITVVEGEPFYLKHCSCSLAHEIETTTKSWYKSSGSQEHVELNPRSSSRIALHDCVLEFWPVELNDTGSYFFQMKNYTQKWKLNVIRRNKHSCFTERQVTSKIVEVKKFFQITCENSYYQTLVNSTSLYKIGPPICRKTSSGLH

SEQ ID NO: 41466 - protein, 541 aa, Homo sapiens; identical to SEQ ID NO: 41464
  Payload ID: 8440
  Gene Symbol: IL18R1
  Gene Name: interleukin 18 receptor 1
  Uniprot ID: Q13478
  ENSP ID: ENSP00000386663

SEQ ID NO: 41467 - protein, 541 aa, Homo sapiens; identical to SEQ ID NO: 41464
  Payload ID: 8440
  Gene Symbol: IL18R1
  Gene Name: interleukin 18 receptor 1
  Uniprot ID: Q13478
  ENSP ID: ENSP00000387211

SEQ ID NO: 41468 - protein, 599 aa, Homo sapiens
  Payload ID: 8441
  Gene Symbol: IL18RAP
  Gene Name: interleukin 18 receptor accessory protein
  Uniprot ID: O95256
  ENSP ID: ENSP00000264260
MLCLGWIFLWLVAGERIKGFNISGCSTKKLLWTYSTRSEEEFVLFCDLPEPQKSHFCHRNRLSPKQVPEHLPFMGSNDLSDVQWYQQPSNGDPLEDIRKSYPHIIQDKCTLHFLTPGVNNSGSYICRPKMIKSPYDVACCVKMILEVKPQTNASCEYSASHKQDLLLGSTGSISCPSLSCQSDAQSPAVTWYKNGKLLSVERSNRIVVDEVYDYHQGTYVCDYTQSDTVSSWTVRAVVQVRTIVGDTKLKPDILDPVEDTLEVELGKPLTISCKARFGFERVFNPVIKWYIKDSDLEWEVSVPEAKSIKSTLKDEIIERNIILEKVTQRDLRRKFVCFVQNSIGNTTQSVQLKEKRGVVLLYILLGTIGTLVAVLAASALLYRHWIEIVLLYRTYQSKDQTLGDKKDFDAFVSYAKWSSFPSEATSSLSEEHLALSLFPDVLENKYGYSLCLLERDVAPGGVYAEDIVSIIKRSRRGIFILSPNYVNGPSIFELQAAVNLALDDQTLKLILIKFCYFQEPESLPHLVKKALRVLPTVTWRGLKSVPPNSRFWAKMRYHMPVKNSQGFTWNQLRITSRIFQWKGLSRTETTGRSSQPKEW

SEQ ID NO: 41469 - protein, 457 aa, Homo sapiens
  Payload ID: 8441
  Gene Symbol: IL18RAP
  Gene Name: interleukin 18 receptor accessory protein
  Uniprot ID: O95256
  ENSP ID: ENSP00000387201
MILEVKPQTNASCEYSASHKQDLLLGSTGSISCPSLSCQSDAQSPAVTWYKNGKLLSVERSNRIVVDEVYDYHQGTYVCDYTQSDTVSSWTVRAVVQVRTIVGDTKLKPDILDPVEDTLEVELGKPLTISCKARFGFERVFNPVIKWYIKDSDLEWEVSVPEAKSIKSTLKDEIIERNIILEKVTQRDLRRKFVCFVQNSIGNTTQSVQLKEKRGVVLLYILLGTIGTLVAVLAASALLYRHWIEIVLLYRTYQSKDQTLGDKKDFDAFVSYAKWSSFPSEATSSLSEEHLALSLFPDVLENKYGYSLCLLERDVAPGGVYAEDIVSIIKRSRRGIFILSPNYVNGPSIFELQAAVNLALDDQTLKLILIKFCYFQEPESLPHLVKKALRVLPTVTWRGLKSVPPNSRFWAKMRYHMPVKNSQGFTWNQLRITSRIFQWKGLSRTETTGRSSQPKEW

SEQ ID NO: 41470 - protein, 44 aa, Homo sapiens
  Payload ID: 8441
  Gene Symbol: IL18RAP
  Gene Name: interleukin 18 receptor accessory protein
  ENSP ID: ENSP00000389815
MLCLGWIFLWLVAGERIKGFNISGCSTKKLLWTYSTRSEEEFVL

SEQ ID NO: 41471 - protein, 177 aa, Homo sapiens
  Payload ID: 8442
  Gene Symbol: IL19
  Gene Name: interleukin 19
  Uniprot ID: Q9UHD0
  ENSP ID: ENSP00000270218
MKLQCVSLWLLGTILILCSVDNHGLRRCLISTDMHHIEESFQEIKRAIQAKDTFPNVTILSTLETLQIIKPLDVCCVTKNLLAFYVDRVFKDHQEPNPKILRKISSIANSFLYMQKTLRQCQEQRQCHCRQEATNATRVIHDNYDQLEVHAAAIKSLGELDVFLAWINKNHEVMFSA

SEQ ID NO: 41472 - protein, 215 aa, Homo sapiens
  Payload ID: 8442
  Gene Symbol: IL19
  Gene Name: interleukin 19
  Uniprot ID: Q9UHD0
  ENSP ID: ENSP00000343000
MCTEGAFPHRSACSLPLTHVHTHIHVCVPVLWGSVPRGMKLQCVSLWLLGTILILCSVDNHGLRRCLISTDMHHIEESFQEIKRAIQAKDTFPNVTILSTLETLQIIKPLDVCCVTKNLLAFYVDRVFKDHQEPNPKILRKISSIANSFLYMQKTLRQCQEQRQCHCRQEATNATRVIHDNYDQLEVHAAAIKSLGELDVFLAWINKNHEVMFSA

SEQ ID NO: 41473 - protein, 177 aa, Homo sapiens; identical to SEQ ID NO: 41471
  Payload ID: 8442
  Gene Symbol: IL19
  Gene Name: interleukin 19
  Uniprot ID: Q9UHD0
  ENSP ID: ENSP00000482668

SEQ ID NO: 41474 - protein, 153 aa, Homo sapiens
  Payload ID: 8443
  Gene Symbol: IL2
  Gene Name: interleukin 2
  Uniprot ID: P60568
  ENSP ID: ENSP00000226730
MYRMQLLSCIALSLALVTNSAPTSSSTKKTQLQLEHLLLDLQMILNGINNYKNPKLTRMLTFKFYMPKKATELKHLQCLEEELKPLEEVLNLAQSKNFHLRPRDLISNINVIVLELKGSETTFMCEYADETATIVEFLNRWITFCQSIISTLT

SEQ ID NO: 41475 - protein, 263 aa, Homo sapiens
  Payload ID: 8444
  Gene Symbol: IL2RA
  Gene Name: interleukin 2 receptor, alpha
  ENSP ID: ENSP00000256876
MDSYLLMWGLLTFIMVPGCQAELCDDDPPEIPHATFKAMAYKEGTMLNCECKRGFRRIKSGSLYMLCTGNSSHSSWDNQCQCTSSATRNTTKQVTPQPEEQKERKTTEMQSPMQPVDQASLPGHCREPPPWENEATERIYHFVVGQMVYYQCVQGYRALHRGPAESVCKMTHGKTRWTQPQLICTGEEKPQASPEGRPESETSCLVTTTDFQIQTEMAATMETSIFTTEYQVAVAGCVFLLISVLLLSGLTWQRRQRKSRRTI

SEQ ID NO: 41476 - protein, 200 aa, Homo sapiens
  Payload ID: 8444
  Gene Symbol: IL2RA
  Gene Name: interleukin 2 receptor, alpha
  ENSP ID: ENSP00000369287
MDSYLLMWGLLTFIMVPGCQAELCDDDPPEIPHATFKAMAYKEGTMLNCECKRGFRRIKSGSLYMLCTGNSSHSSWDNQCQCTSSATRNTTKQVTPQPEEQKERKTTEMQSPMQPVDQASLPGEEKPQASPEGRPESETSCLVTTTDFQIQTEMAATMETSIFTTEYQVAVAGCVFLLISVLLLSGLTWQRRQRKSRRTI

SEQ ID NO: 41477 - protein, 272 aa, Homo sapiens
  Payload ID: 8444
  Gene Symbol: IL2RA
  Gene Name: interleukin 2 receptor, alpha
  Uniprot ID: P01589
  ENSP ID: ENSP00000369293
MDSYLLMWGLLTFIMVPGCQAELCDDDPPEIPHATFKAMAYKEGTMLNCECKRGFRRIKSGSLYMLCTGNSSHSSWDNQCQCTSSATRNTTKQVTPQPEEQKERKTTEMQSPMQPVDQASLPGHCREPPPWENEATERIYHFVVGQMVYYQCVQGYRALHRGPAESVCKMTHGKTRWTQPQLICTGEMETSQFPGEEKPQASPEGRPESETSCLVTTTDFQIQTEMAATMETSIFTTEYQVAVAGCVFLLISVLLLSGLTWQRRQRKSRRTI

SEQ ID NO: 41478 - protein, 109 aa, Homo sapiens
  Payload ID: 8444
  Gene Symbol: IL2RA
  Gene Name: interleukin 2 receptor, alpha
  ENSP ID: ENSP00000402024
  MOD_RES (1)..(1): Any amino acid
XIPHATFKAMAYKEGTMLNCECKRGFRRIKSGSLYMLCTGNSSHSSWDNQCQCTSSATRNTTKQVTPQPEEQKERKTTEMQSPMQPVDQASLPDFQIQTEMAATMETSI

SEQ ID NO: 41479 - protein, 551 aa, Homo sapiens
  Payload ID: 8445
  Gene Symbol: IL2RB
  Gene Name: interleukin 2 receptor, beta
  Uniprot ID: P14784
  ENSP ID: ENSP00000216223
MAAPALSWRLPLLILLLPLATSWASAAVNGTSQFTCFYNSRANISCVWSQDGALQDTSCQVHAWPDRRRWNQTCELLPVSQASWACNLILGAPDSQKLTTVDIVTLRVLCREGVRWRVMAIQDFKPFENLRLMAPISLQVVHVETHRCNISWEISQASHYFERHLEFEARTLSPGHTWEEAPLLTLKQKQEWICLETLTPDTQYEFQVRVKPLQGEFTTWSPWSQPLAFRTKPAALGKDTIPWLGHLLVGLSGAFGFIILVYLLINCRNTGPWLKKVLKCNTPDPSKFFSQLSSEHGGDVQKWLSSPFPSSSFSPGGLAPEISPLEVLERDKVTQLLLQQDKVPEPASLSSNHSLTSCFTNQGYFFFHLPDALEIEACQVYFTYDPYSEEDPDEGVAGAPTGSSPQPLQPLSGEDDAYCTFPSRDDLLLFSPSLLGGPSPPSTAPGGSGAGEERMPPSLQERVPRDWDPQPLGPPTPGVPDLVDFQPPPELVLREAGEEVPDAGPREGVSFPWSRPPGQGEFRALNARLPLNTDAYLSLQELQGQDPTHLV

SEQ ID NO: 41480 - protein, 105 aa, Homo sapiens
  Payload ID: 8445
  Gene Symbol: IL2RB
  Gene Name: interleukin 2 receptor, beta
  ENSP ID: ENSP00000400416
TCFYNSRANISCVWSQDGALQDTSCQVHAWPDRRSLQLPWDQAGMREQDKVPMREECHGASGGGSAPHSGWHRGPSLALLPGAILAAERSEKSPLGQLCGSFLFF

SEQ ID NO: 41481 - protein, 88 aa, Homo sapiens
  Payload ID: 8445
  Gene Symbol: IL2RB
  Gene Name: interleukin 2 receptor, beta
  ENSP ID: ENSP00000401020
MAAPALSWRLPLLILLLPLATSWASAAVNGTSQFTCFYNSRANISCVWSQDGALQDTSCQVHAWPDRRRWNQTCELLPVSQASWACNL

SEQ ID NO: 41482 - protein, 146 aa, Homo sapiens
  Payload ID: 8445
  Gene Symbol: IL2RB
  Gene Name: interleukin 2 receptor, beta
  ENSP ID: ENSP00000402685
MAAPALSWRLPLLILLLPLATSWASAAVNGTSQFTCFYNSRANISCVWSQDGALQDTSCQVHAWPDRRRWNQTCELLPVSQASWACNLILGAPDSQKLTTVDIVTLRVLCREGVRWRVMAIQDFKPFENLRLMAPISLQVVHVETH

SEQ ID NO: 41483 - protein, 188 aa, Homo sapiens
  Payload ID: 8445
  Gene Symbol: IL2RB
  Gene Name: interleukin 2 receptor, beta
  ENSP ID: ENSP00000403731
MAAPALSWRLPLLILLLPLATSWASAAVNGTSQFTCFYNSRANISCVWSQDGALQDTSCQVHAWPDRRRWNQTCELLPVSQASWACNLILGAPDSQKLTTVDIVTLRVLCREGVRWRVMAIQDFKPFENLRLMAPISLQVVHVETHRCNISWEISQASHYFERHLEFEARTLSPGHTWEEAPLLTLKQ

SEQ ID NO: 41484 - protein, 98 aa, Homo sapiens
  Payload ID: 8446
  Gene Symbol: IL2RG
  Gene Name: interleukin 2 receptor, gamma
  ENSP ID: ENSP00000363303
MEPPNPLGEQYFKRTMPRIPTLKNLEDLVTEYHGNFSAWSGVSKGLAESLQPDYSERLCLVSEIPPKGGALGEGPGASPCNQHSPYWAPPCYTLKPET

SEQ ID NO: 41485 - protein, 369 aa, Homo sapiens
  Payload ID: 8446
  Gene Symbol: IL2RG
  Gene Name: interleukin 2 receptor, gamma
  Uniprot ID: P31785
  ENSP ID: ENSP00000363318
MLKPSLPFTSLLFLQLPLLGVGLNTTILTPNGNEDTTADFFLTTMPTDSLSVSTLPLPEVQCFVFNVEYMNCTWNSSSEPQPTNLTLHYWYKNSDNDKVQKCSHYLFSEEITSGCQLQKKEIHLYQTFVVQLQDPREPRRQATQMLKLQNLVIPWAPENLTLHKLSESQLELNWNNRFLNHCLEHLVQYRTDWDHSWTEQSVDYRHKFSLPSVDGQKRYTFRVRSRFNPLCGSAQHWSEWSHPIHWGSNTSKENPFLFALEAVVISVGSMGLIISLLCVYFWLERTMPRIPTLKNLEDLVTEYHGNFSAWSGVSKGLAESLQPDYSERLCLVSEIPPKGGALGEGPGASPCNQHSPYWAPPCYTLKPET

SEQ ID NO: 41486 - protein, 179 aa, Homo sapiens
  Payload ID: 8446
  Gene Symbol: IL2RG
  Gene Name: interleukin 2 receptor, gamma
  Uniprot ID: P31785
  ENSP ID: ENSP00000388967
MGMKTPQLEQSVDYRHKFSLPSVDGQKRYTFRVRSRFNPLCGSAQHWSEWSHPIHWGSNTSKENPFLFALEAVVISVGSMGLIISLLCVYFWLERTMPRIPTLKNLEDLVTEYHGNFSAWSGVSKGLAESLQPDYSERLCLVSEIPPKGGALGEGPGASPCNQHSPYWAPPCYTLKPET

SEQ ID NO: 41487 - protein, 65 aa, Homo sapiens
  Payload ID: 8446
  Gene Symbol: IL2RG
  Gene Name: interleukin 2 receptor, gamma
  ENSP ID: ENSP00000421262
  MOD_RES (1)..(1): Any amino acid
XWTEQSVDYRHKFSLPSVDGQKRYTFRVRSRFNPLCGSAQHWSEWSHPIHWGSNTSKGRCPEFPP

SEQ ID NO: 41488 - protein, 99 aa, Homo sapiens
  Payload ID: 8446
  Gene Symbol: IL2RG
  Gene Name: interleukin 2 receptor, gamma
  ENSP ID: ENSP00000423601
MGMKTPQLVGNLGLEGADFFLTTMPTDSLSVSTLPLPEVQCFVFNVEYMNCTWNSSSEPQPTNLTLHYWYKNSDNDKVQKCSHYLFSEEITSGCQLQKK

SEQ ID NO: 41489 - protein, 176 aa, Homo sapiens
  Payload ID: 8446
  Gene Symbol: IL2RG
  Gene Name: interleukin 2 receptor, gamma
  ENSP ID: ENSP00000423966
MSHRAWPPPSDHHFSFPPCLHFLPNLDFFLTTMPTDSLSVSTLPLPEVQCFVFNVEYMNCTWNSSSEPQPTNLTLHYWYKNSDNDKVQKCSHYLFSEEITSGCQLQKKEIHLYQTFVVQLQDPREPRRQATQMLKLQNLVIPWAPENLTLHKLSESQLELNWNNRFLNHCLEHLVQ

SEQ ID NO: 41490 - protein, 219 aa, Homo sapiens
  Payload ID: 8446
  Gene Symbol: IL2RG
  Gene Name: interleukin 2 receptor, gamma
  ENSP ID: ENSP00000425233
MPTDSLSVSTLPLPEVQCFVFNVEYMNCTWNSSSEPQPTNLTLHYWYKNSDNDKVQKCSHYLFSEEITSGCQLQKKEIHLYQTFVVQLQDPREPRRQATQMLKLQNLVIPWAPENLTLHKLSESQLELNWNNRFLNHCLEHLVQYRTDWDHSWTEQSVDYRHKFSLPSVDGQKRYTFRVRSRFNPLCGSAQHWSEWSHPIHWGSNTSKENPFLFALEAV

SEQ ID NO: 41491 - protein, 176 aa, Homo sapiens
  Payload ID: 8447
  Gene Symbol: IL20
  Gene Name: interleukin 20
  Uniprot ID: Q9NYY1
  ENSP ID: ENSP00000356063
MKASSLAFSLLSAAFYLLWTPSTGLKTLNLGSCVIATNLQEIRNGFSEIRGSVQAKDGNIDIRILRRTESLQDTKPANRCCLLRHLLRLYLDRVFKNYQTPDHYTLRKISSLANSFLTIKKDLRLCHAHMTCHCGEEAMKKYSQILSHFEKLEPQAAVVKALGELDILLQWMEETE

SEQ ID NO: 41492 - protein, 176 aa, Homo sapiens; identical to SEQ ID NO: 41491
  Payload ID: 8447
  Gene Symbol: IL20
  Gene Name: interleukin 20
  Uniprot ID: Q9NYY1
  ENSP ID: ENSP00000356065

SEQ ID NO: 41493 - protein, 151 aa, Homo sapiens
  Payload ID: 8447
  Gene Symbol: IL20
  Gene Name: interleukin 20
  Uniprot ID: Q9NYY1
  ENSP ID: ENSP00000375796
MKASSLAFSLLSAAFYLLWTPSTGLKTLNLGSCVIATNLQEIRNGFSEIRGSVQAKDGNIDIRILRRTESLQDTKPANRCCLLRHLLRLYLDRVFKNYQTPDHYTLRKISSLANSFLTIKKDLRLCLEPQAAVVKALGELDILLQWMEETE

SEQ ID NO: 41494 - protein, 311 aa, Homo sapiens
  Payload ID: 8448
  Gene Symbol: IL20RB
  Gene Name: interleukin 20 receptor beta
  Uniprot ID: Q6UXL0
  ENSP ID: ENSP00000328133
MQTFTMVLEEIWTSLFMWFFYALIPCLLTDEVAILPAPQNLSVLSTNMKHLLMWSPVIAPGETVYYSVEYQGEYESLYTSHIWIPSSWCSLTEGPECDVTDDITATVPYNLRVRATLGSQTSAWSILKHPFNRNSTILTRPGMEITKDGFHLVIELEDLGPQFEFLVAYWRREPGAEEHVKMVRSGGIPVHLETMEPGAAYCVKAQTFVKAIGRYSAFSQTECVEVQGEAIPLVLALFAFVGFMLILVVVPLFVWKMGRLLQYSCCPVVVLPDTLKITNSPQKLISCRREEVDACATAVMSPEELLRAWIS

SEQ ID NO: 41495 - protein, 55 aa, Homo sapiens
  Payload ID: 8448
  Gene Symbol: IL20RB
  Gene Name: interleukin 20 receptor beta
  ENSP ID: ENSP00000417437
MAGAPSPASLPPCSLISDCCASNQRDSVGVGPSEPGWSAVVQSQLTATSASEALH

SEQ ID NO: 41496 - protein, 49 aa, Homo sapiens
  Payload ID: 8448
  Gene Symbol: IL20RB
  Gene Name: interleukin 20 receptor beta
  ENSP ID: ENSP00000418637
MQTFTMVLEEIWTSLFMWFFYALIPCLLTGWSAVVQSQLTATSASEALH

SEQ ID NO: 41497 - protein, 120 aa, Homo sapiens
  Payload ID: 8448
  Gene Symbol: IL20RB
  Gene Name: interleukin 20 receptor beta
  ENSP ID: ENSP00000420725
AILPAPQNLSVLSTNMKHLLMWSPVIAPGETVYYSVEYQGEYESLYTSHIWIPSSWCSLTEGPECDVTDDITATVPYNLRVRATLGSQTSAWSILKHPFNRNSRTAFLLSVHLCPELVGS

SEQ ID NO: 41498 - protein, 553 aa, Homo sapiens
  Payload ID: 8449
  Gene Symbol: IL20RA
  Gene Name: interleukin 20 receptor, alpha
  Uniprot ID: Q9UHF4
  ENSP ID: ENSP00000314976
MRAPGRPALRPLPLPPLLLLLLAAPWGRAVPCVSGGLPKPANITFLSINMKNVLQWTPPEGLQGVKVTYTVQYFIYGQKKWLNKSECRNINRTYCDLSAETSDYEHQYYAKVKAIWGTKCSKWAESGRFYPFLETQIGPPEVALTTDEKSISVVLTAPEKWKRNPEDLPVSMQQIYSNLKYNVSVLNTKSNRTWSQCVTNHTLVLTWLEPNTLYCVHVESFVPGPPRRAQPSEKQCARTLKDQSSEFKAKIIFWYVLPVSITVFLFSVMGYSIYRYIHVGKEKHPANLILIYGNEFDKRFFVPAEKIVINFITLNISDDSKISHQDMSLLGKSSDVSSLNDPQPSGNLRPPQEEEEVKHLGYASHLMEIFCDSEENTEGTSLTQQESLSRTIPPDKTVIEYEYDVRTTDICAGPEEQELSLQEEVSTQGTLLESQAALAVLGPQTLQYSYTPQLQDLDPLAQEHTDSEEGPEEEPSTTLVDWDPQTGRLCIPSLSSFDQDSEGCEPSEGDGLGEEGLLSRLYEEPAPDRPPGENETYLMQFMEEWGLYVQMEN

SEQ ID NO: 41499 - protein, 209 aa, Homo sapiens
  Payload ID: 8449
  Gene Symbol: IL20RA
  Gene Name: interleukin 20 receptor, alpha
  ENSP ID: ENSP00000356720
MRAPGRPALRPLPLPPLLLLLLAAPWGRAVPCVSGGLPKPANITFLSINMKNVLQWTPPEGLQGVKVTYTVQYFIYGQKKWLNKSECRNINRTYCDLSAETSDYEHQYYAKVKAIWGTKCSKWAESGRFYPFLETQIGPPEVALTTDEKSISVVLTAPEKWKRNPEDLPVSMQQIYSNLKYNVSVLNTKSNRTVSLKWNGAYIHVPLCS

SEQ ID NO: 41500 - protein, 442 aa, Homo sapiens
  Payload ID: 8449
  Gene Symbol: IL20RA
  Gene Name: interleukin 20 receptor, alpha
  Uniprot ID: Q9UHF4
  ENSP ID: ENSP00000356722
MSYNGLHQRVFKELKLLTLCSISSQIGPPEVALTTDEKSISVVLTAPEKWKRNPEDLPVSMQQIYSNLKYNVSVLNTKSNRTWSQCVTNHTLVLTWLEPNTLYCVHVESFVPGPPRRAQPSEKQCARTLKDQSSEFKAKIIFWYVLPVSITVFLFSVMGYSIYRYIHVGKEKHPANLILIYGNEFDKRFFVPAEKIVINFITLNISDDSKISHQDMSLLGKSSDVSSLNDPQPSGNLRPPQEEEEVKHLGYASHLMEIFCDSEENTEGTSLTQQESLSRTIPPDKTVIEYEYDVRTTDICAGPEEQELSLQEEVSTQGTLLESQAALAVLGPQTLQYSYTPQLQDLDPLAQEHTDSEEGPEEEPSTTLVDWDPQTGRLCIPSLSSFDQDSEGCEPSEGDGLGEEGLLSRLYEEPAPDRPPGENETYLMQFMEEWGLYVQMEN

SEQ ID NO: 41501 - protein, 504 aa, Homo sapiens
  Payload ID: 8449
  Gene Symbol: IL20RA
  Gene Name: interleukin 20 receptor, alpha
  Uniprot ID: Q9UHF4
  ENSP ID: ENSP00000437843
MKNVLQWTPPEGLQGVKVTYTVQYFIYGQKKWLNKSECRNINRTYCDLSAETSDYEHQYYAKVKAIWGTKCSKWAESGRFYPFLETQIGPPEVALTTDEKSISVVLTAPEKWKRNPEDLPVSMQQIYSNLKYNVSVLNTKSNRTWSQCVTNHTLVLTWLEPNTLYCVHVESFVPGPPRRAQPSEKQCARTLKDQSSEFKAKIIFWYVLPVSITVFLFSVMGYSIYRYIHVGKEKHPANLILIYGNEFDKRFFVPAEKIVINFITLNISDDSKISHQDMSLLGKSSDVSSLNDPQPSGNLRPPQEEEEVKHLGYASHLMEIFCDSEENTEGTSLTQQESLSRTIPPDKTVIEYEYDVRTTDICAGPEEQELSLQEEVSTQGTLLESQAALAVLGPQTLQYSYTPQLQDLDPLAQEHTDSEEGPEEEPSTTLVDWDPQTGRLCIPSLSSFDQDSEGCEPSEGDGLGEEGLLSRLYEEPAPDRPPGENETYLMQFMEEWGLYVQMEN

SEQ ID NO: 41502 - protein, 42 aa, Homo sapiens
  Payload ID: 8449
  Gene Symbol: IL20RA
  Gene Name: interleukin 20 receptor, alpha
  ENSP ID: ENSP00000489141
MRAPGRPALRPLPLPPLLLLLLAAPWGRAGYSRPLLGLWAKV

SEQ ID NO: 41503 - protein, 177 aa, Homo sapiens
  Payload ID: 8449
  Gene Symbol: IL20RA
  Gene Name: interleukin 20 receptor, alpha
  ENSP ID: ENSP00000489177
MSYNGLHQRVFKELKLLTLCSISSQIGPPEVALTTDEKSISVVLTAPEKWKRNPEDLPVSMQQIYSNLKYNVSVLNTKSNRTWSQCVTNHTLVLTWLEPNTLYCVHVESFVPGPPRRAQPSEKQCARTLKDQSSEFKAKIIFWYVLPVSITVFLFSVMGYSIYRYIHVGKEKHPANL

SEQ ID NO: 41504 - protein, 89 aa, Homo sapiens
  Payload ID: 8449
  Gene Symbol: IL20RA
  Gene Name: interleukin 20 receptor, alpha
  ENSP ID: ENSP00000489419
MSYNGLHQRVFKELKLLTLCSISSPEKWKRNPEDLPVSMQQIYSNLKYNVSVLNTKSNRTWSQCVTNHTLVLTWLEPNTLYCVHVESFV

SEQ ID NO: 41505 - protein, 162 aa, Homo sapiens
  Payload ID: 8450
  Gene Symbol: IL21
  Gene Name: interleukin 21
  Uniprot ID: Q9HBE4
  ENSP ID: ENSP00000264497
MRSSPGNMERIVICLMVIFLGTLVHKSSSQGQDRHMIRMRQLIDIVDQLKNYVNDLVPEFLPAPEDVETNCEWSAFSCFQKAQLKSANTGNNERIINVSIKKLKRKPPSTNAGRRQKHRLTCPSCDSYEKKPPKEFLERFKSLLQKMIHQHLSSRTHGSEDS

SEQ ID NO: 41506 - protein, 153 aa, Homo sapiens
  Payload ID: 8450
  Gene Symbol: IL21
  Gene Name: interleukin 21
  Uniprot ID: Q9HBE4
  ENSP ID: ENSP00000477555
MRSSPGNMERIVICLMVIFLGTLVHKSSSQGQDRHMIRMRQLIDIVDQLKNYVNDLVPEFLPAPEDVETNCEWSAFSCFQKAQLKSANTGNNERIINVSIKKLKRKPPSTNAGRRQKHRLTCPSCDSYEKKPPKEFLERFKSLLQKVSTLSFI

SEQ ID NO: 41507 - protein, 538 aa, Homo sapiens
  Payload ID: 8451
  Gene Symbol: IL21R
  Gene Name: interleukin 21 receptor
  Uniprot ID: Q9HBE5
  ENSP ID: ENSP00000338010
MPRGWAAPLLLLLLQGGWGCPDLVCYTDYLQTVICILEMWNLHPSTLTLTWQDQYEELKDEATSCSLHRSAHNATHATYTCHMDVFHFMADDIFSVNITDQSGNYSQECGSFLLAESIKPAPPFNVTVTFSGQYNISWRSDYEDPAFYMLKGKLQYELQYRNRGDPWAVSPRRKLISVDSRSVSLLPLEFRKDSSYELQVRAGPMPGSSYQGTWSEWSDPVIFQTQSEELKEGWNPHLLLLLLLVIVFIPAFWSLKTHPLWRLWKKIWAVPSPERFFMPLYKGCSGDFKKWVGAPFTGSSLELGPWSPEVPSTLEVYSCHPPRSPAKRLQLTELQEPAELVESDGVPKPSFWPTAQNSGGSAYSEERDRPYGLVSIDTVTVLDAEGPCTWPCSCEDDGYPALDLDAGLEPSPGLEDPLLDAGTTVLSCGCVSAGSPGLGGPLGSLLDRLKPPLADGEDWAGGLPWGGRSPGGVSESEAGSPLAGLDMDTFDSGFVGSDCSSPVECDFTSPGDEGPPRSYLRQWVVIPPPLSSPGPQAS

SEQ ID NO: 41508 - protein, 538 aa, Homo sapiens; identical to SEQ ID NO: 41507
  Payload ID: 8451
  Gene Symbol: IL21R
  Gene Name: interleukin 21 receptor
  Uniprot ID: Q9HBE5
  ENSP ID: ENSP00000379103

SEQ ID NO: 41509 - protein, 538 aa, Homo sapiens; identical to SEQ ID NO: 41507
  Payload ID: 8451
  Gene Symbol: IL21R
  Gene Name: interleukin 21 receptor
  Uniprot ID: Q9HBE5
  ENSP ID: ENSP00000456707

SEQ ID NO: 41510 - protein, 179 aa, Homo sapiens
  Payload ID: 8452
  Gene Symbol: IL22
  Gene Name: interleukin 22
  Uniprot ID: Q9GZX6
  ENSP ID: ENSP00000329384
MAALQKSVSSFLMGTLATSCLLLLALLVQGGAAAPISSHCRLDKSNFQQPYITNRTFMLAKEASLADNNTDVRLIGEKLFHGVSMSERCYLMKQVLNFTLEEVLFPQSDRFQPYMQEVVPFLARLSNRLSTCHIEGDDLHIQRNVQKLKDTVKKLGESGEIKAIGELDLLFMSLRNACI

SEQ ID NO: 41511 - protein, 179 aa, Homo sapiens; identical to SEQ ID NO: 41510
  Payload ID: 8452
  Gene Symbol: IL22
  Gene Name: interleukin 22
  Uniprot ID: Q9GZX6
  ENSP ID: ENSP00000442424

SEQ ID NO: 41512 - protein, 574 aa, Homo sapiens
  Payload ID: 8453
  Gene Symbol: IL22RA1
  Gene Name: interleukin 22 receptor, alpha 1
  Uniprot ID: Q8N6P7
  ENSP ID: ENSP00000270800
MRTLLTILTVGSLAAHAPEDPSDLLQHVKFQSSNFENILTWDSGPEGTPDTVYSIEYKTYGERDWVAKKGCQRITRKSCNLTVETGNLTELYYARVTAVSAGGRSATKMTDRFSSLQHTTLKPPDVTCISKVRSIQMIVHPTPTPIRAGDGHRLTLEDIFHDLFYHLELQVNRTYQMHLGGKQREYEFFGLTPDTEFLGTIMICVPTWAKESAPYMCRVKTLPDRTWTYSFSGAFLFSMGFLVAVLCYLSYRYVTKPPAPPNSLNVQRVLTFQPLRFIQEHVLIPVFDLSGPSSLAQPVQYSQIRVSGPREPAGAPQRHSLSEITYLGQPDISILQPSNVPPPQILSPLSYAPNAAPEVGPPSYAPQVTPEAQFPFYAPQAISKVQPSSYAPQATPDSWPPSYGVCMEGSGKDSPTGTLSSPKHLRPKGQLQKEPPAGSCMLGGLSLQEVTSLAMEESQEAKSLHQPLGICTDRTSDPNVLHSGEEGTPQYLKGQLPLLSSVQIEGHPMSLPLQPPSRPCSPSDQGPSPWGLLESLVCPKDEAKSPAPETSDLEQPTELDSLFRGLALTVQWES

SEQ ID NO: 41513 - protein, 231 aa, Homo sapiens
  Payload ID: 8454
  Gene Symbol: IL22RA2
  Gene Name: interleukin 22 receptor, alpha 2
  Uniprot ID: Q969J5
  ENSP ID: ENSP00000296979
MMPKHCFLGFLISFFLTGVAGTQSTHESLKPQRVQFQSRNFHNILQWQPGRALTGNSSVYFVQYKIYGQRQWKNKEDCWGTQELSCDLTSETSDIQEPYYGRVRAASAGSYSEWSMTPRFTPWWETKIDPPVMNITQVNGSLLVILHAPNLPYRYQKEKNVSIEDYYELLYRVFIINNSLEKEQKVYEGAHRAVEIEALTPHSSYCVVAEIYQPMLDRRSQRSEERCVEIP

SEQ ID NO: 41514 - protein, 263 aa, Homo sapiens
  Payload ID: 8454
  Gene Symbol: IL22RA2
  Gene Name: interleukin 22 receptor, alpha 2
  Uniprot ID: Q969J5
  ENSP ID: ENSP00000296980
MMPKHCFLGFLISFFLTGVAGTQSTHESLKPQRVQFQSRNFHNILQWQPGRALTGNSSVYFVQYKIMFSCSMKSSHQKPSGCWQHISCNFPGCRTLAKYGQRQWKNKEDCWGTQELSCDLTSETSDIQEPYYGRVRAASAGSYSEWSMTPRFTPWWETKIDPPVMNITQVNGSLLVILHAPNLPYRYQKEKNVSIEDYYELLYRVFIINNSLEKEQKVYEGAHRAVEIEALTPHSSYCVVAEIYQPMLDRRSQRSEERCVEIP

SEQ ID NO: 41515 - protein, 130 aa, Homo sapiens
  Payload ID: 8454
  Gene Symbol: IL22RA2
  Gene Name: interleukin 22 receptor, alpha 2
  Uniprot ID: Q969J5
  ENSP ID: ENSP00000340920
MMPKHCFLGFLISFFLTGVAGTQSTHESLKPQRVQFQSRNFHNILQWQPGRALTGNSSVYFVQYKIYGQRQWKNKEDCWGTQELSCDLTSETSDIQEPYYGRVRAASAGSYSEWSMTPRFTPWWERAKGL

SEQ ID NO: 41516 - protein, 629 aa, Homo sapiens
  Payload ID: 8455
  Gene Symbol: IL23R
  Gene Name: interleukin 23 receptor
  Uniprot ID: Q5VWK5
  ENSP ID: ENSP00000321345
MNQVTIQWDAVIALYILFSWCHGGITNINCSGHIWVEPATIFKMGMNISIYCQAAIKNCQPRKLHFYKNGIKERFQITRINKTTARLWYKNFLEPHASMYCTAECPKHFQETLICGKDISSGYPPDIPDEVTCVIYEYSGNMTCTWNAGKLTYIDTKYVVHVKSLETEEEQQYLTSSYINISTDSLQGGKKYLVWVQAANALGMEESKQLQIHLDDIVIPSAAVISRAETINATVPKTIIYWDSQTTIEKVSCEMRYKATTNQTWNVKEFDTNFTYVQQSEFYLEPNIKYVFQVRCQETGKRYWQPWSSLFFHKTPETVPQVTSKAFQHDTWNSGLTVASISTGHLTSDNRGDIGLLLGMIVFAVMLSILSLIGIFNRSFRTGIKRRILLLIPKWLYEDIPNMKNSNVVKMLQENSELMNNNSSEQVLYVDPMITEIKEIFIPEHKPTDYKKENTGPLETRDYPQNSLFDNTTVVYIPDLNTGYKPQISNFLPEGSHLSNNNEITSLTLKPPVDSLDSGNNPRLQKHPNFAFSVSSVNSLSNTIFLGELSLILNQGECSSPDIQNSVEEETTMLLENDSPSETIPEQTLLPDEFVSCLGIVNEELPSINTYFPQNILESHFNRISLLEK

SEQ ID NO: 41517 - protein, 227 aa, Homo sapiens
  Payload ID: 8455
  Gene Symbol: IL23R
  Gene Name: interleukin 23 receptor
  Uniprot ID: Q5VWK5
  ENSP ID: ENSP00000378652
MKNSNVVKMLQENSELMNNNSSEQVLYVDPMITEIKEIFIPEHKPTDYKKENTGPLETRDYPQNSLFDNTTVVYIPDLNTGYKPQISNFLPEGSHLSNNNEITSLTLKPPVDSLDSGNNPRLQKHPNFAFSVSSVNSLSNTIFLGELSLILNQGECSSPDIQNSVEEETTMLLENDSPSETIPEQTLLPDEFVSCLGIVNEELPSINTYFPQNILESHFNRISLLEK

SEQ ID NO: 41518 - protein, 374 aa, Homo sapiens
  Payload ID: 8455
  Gene Symbol: IL23R
  Gene Name: interleukin 23 receptor
  Uniprot ID: Q5VWK5
  ENSP ID: ENSP00000387640
MILRPYQPCGTVKEFDTNFTYVQQSEFYLEPNIKYVFQVRCQETGKRYWQPWSSLFFHKTPETVPQVTSKAFQHDTWNSGLTVASISTGHLTSDNRGDIGLLLGMIVFAVMLSILSLIGIFNRSFRTGIKRRILLLIPKWLYEDIPNMKNSNVVKMLQENSELMNNNSSEQVLYVDPMITEIKEIFIPEHKPTDYKKENTGPLETRDYPQNSLFDNTTVVYIPDLNTGYKPQISNFLPEGSHLSNNNEITSLTLKPPVDSLDSGNNPRLQKHPNFAFSVSSVNSLSNTIFLGELSLILNQGECSSPDIQNSVEEETTMLLENDSPSETIPEQTLLPDEFVSCLGIVNEELPSINTYFPQNILESHFNRISLLEK

SEQ ID NO: 41519 - protein, 71 aa, Homo sapiens
  Payload ID: 8455
  Gene Symbol: IL23R
  Gene Name: interleukin 23 receptor
  ENSP ID: ENSP00000486667
MILRPYQPCGTVKEFDTNFTYVQQSEFYLEPNIKYVFQVRCQETGKRYWQPWSSLFFHKTPETGLKEGSYC

SEQ ID NO: 41520 - protein, 189 aa, Homo sapiens
  Payload ID: 8456
  Gene Symbol: IL23A
  Gene Name: interleukin 23, alpha subunit p19
  Uniprot ID: Q9NPF7
  ENSP ID: ENSP00000228534
MLGSRAVMLLLLLPWTAQGRAVPGGSSPAWTQCQQLSQKLCTLAWSAHPLVGHMDLREEGDEETTNDVPHIQCGDGCDPQGLRDNSQFCLQRIHQGLIFYEKLLGSDIFTGEPSLLPDSPVGQLHASLLGLSQLLQPEGHHWETQQIPSLSPSQPWQRLLLRFKILRSLQAFVAVAARVFAHGAATLSP

SEQ ID NO: 41521 - protein, 206 aa, Homo sapiens
  Payload ID: 8457
  Gene Symbol: IL24
  Gene Name: interleukin 24
  Uniprot ID: Q13007
  ENSP ID: ENSP00000294984
MNFQQRLQSLWTLARPFCPPLLATASQMQMVVLPCLGFTLLLWSQVSGAQGQEFHFGPCQVKGVVPQKLWEAFWAVKDTMQAQDNITSARLLQQEVLQNVSDAESCYLVHTLLEFYLKTVFKNYHNRTVEVRTLKSFSTLANNFVLIVSQLQPSQENEMFSIRDSAHRRFLLFRRAFKQLDVEAALTKALGEVDILLTWMQKFYKL

SEQ ID NO: 41522 - protein, 154 aa, Homo sapiens
  Payload ID: 8457
  Gene Symbol: IL24
  Gene Name: interleukin 24
  Uniprot ID: Q13007
  ENSP ID: ENSP00000356060
MNFQQRLQSLWTLASRPFCPPLLATASQMQMVVLPCLGFTLLLWSQVSGAQGQEFHFGPCQVKGVVPQKLWEAFWAVKDTMQAQDNITSARLLQQEVLQNVSQENEMFSIRDSAHRRFLLFRRAFKQLDVEAALTKALGEVDILLTWMQKFYKL

SEQ ID NO: 41523 - protein, 51 aa, Homo sapiens
  Payload ID: 8457
  Gene Symbol: IL24
  Gene Name: interleukin 24
  ENSP ID: ENSP00000356062
MNFQQRLQSLWTLASKLRITSRVPGCCSRRFCRTSRMLRAVTLSTPCWSST

SEQ ID NO: 41524 - protein, 207 aa, Homo sapiens
  Payload ID: 8457
  Gene Symbol: IL24
  Gene Name: interleukin 24
  Uniprot ID: Q13007
  ENSP ID: ENSP00000375795
MNFQQRLQSLWTLASRPFCPPLLATASQMQMVVLPCLGFTLLLWSQVSGAQGQEFHFGPCQVKGVVPQKLWEAFWAVKDTMQAQDNITSARLLQQEVLQNVSDAESCYLVHTLLEFYLKTVFKNYHNRTVEVRTLKSFSTLANNFVLIVSQLQPSQENEMFSIRDSAHRRFLLFRRAFKQLDVEAALTKALGEVDILLTWMQKFYKL

SEQ ID NO: 41525 - protein, 60 aa, Homo sapiens
  Payload ID: 8457
  Gene Symbol: IL24
  Gene Name: interleukin 24
  ENSP ID: ENSP00000418933
MNFQQRLQSLWTLASKLRITSRVPGCCSRRFCRTSRKKMRCFPSETVHTGGFCYSGEHSN

SEQ ID NO: 41526 - protein, 63 aa, Homo sapiens
  Payload ID: 8457
  Gene Symbol: IL24
  Gene Name: interleukin 24
  Uniprot ID: Q13007
  ENSP ID: ENSP00000484900
MNFQQRLQSLWTLASKLRITSRVPGCCSRRFCRTSRKKMRCFPSETVHTGGFCYSGEHSNSWT

SEQ ID NO: 41527 - protein, 177 aa, Homo sapiens
  Payload ID: 8458
  Gene Symbol: IL25
  Gene Name: interleukin 25
  Uniprot ID: Q9H293
  ENSP ID: ENSP00000328111
MRERPRLGEDSSLISLFLQVVAFLAMVMGTHTYSHWPSCCPSKGQDTSEELLRWSTVPVPPLEPARPNRHPESCRASEDGPLNSRAISPWRYELDRDLNRLPQDLYHARCLCPHCVSLQTGSHMDPRGNSELLYHNQTVFYRRPCHGEKGTHKGYCLERRLYRVSLACVCVRPRVMG

SEQ ID NO: 41528 - protein, 161 aa, Homo sapiens
  Payload ID: 8458
  Gene Symbol: IL25
  Gene Name: interleukin 25
  Uniprot ID: Q9H293
  ENSP ID: ENSP00000380417
MYQVVAFLAMVMGTHTYSHWPSCCPSKGQDTSEELLRWSTVPVPPLEPARPNRHPESCRASEDGPLNSRAISPWRYELDRDLNRLPQDLYHARCLCPHCVSLQTGSHMDPRGNSELLYHNQTVFYRRPCHGEKGTHKGYCLERRLYRVSLACVCVRPRVMG

SEQ ID NO: 41529 - protein, 171 aa, Homo sapiens
  Payload ID: 8459
  Gene Symbol: IL26
  Gene Name: interleukin 26
  Uniprot ID: Q9NPH9
  ENSP ID: ENSP00000229134
MLVNFILRCGLLLVTLSLAIAKHKQSSFTKSCYPRGTLSQAVDALYIKAAWLKATIPEDRIKNIRLLKKKTKKQFMKNCQFQEQLLSFFMEDVFGQLQLQGCKKIRFVEDFHSLRQKLSHCISCASSAREMKSITRMKRIFYRIGNKGIYKAISELDILLSWIKKLLESSQ

SEQ ID NO: 41530 - protein, 243 aa, Homo sapiens
  Payload ID: 8460
  Gene Symbol: IL27
  Gene Name: interleukin 27
  Uniprot ID: Q8NEV9
  ENSP ID: ENSP00000349365
MGQTAGDLGWRLSLLLLPLLLVQAGVWGFPRPPGRPQLSLQELRREFTVSLHLARKLLSEVRGQAHRFAESHLPGVNLYLLPLGEQLPDVSLTFQAWRRLSDPERLCFISTTLQPFHALLGGLGTQGRWTNMERMQLWAMRLDLRDLQRHLRFQVLAAGFNLPEEEEEEEEEEEEERKGLLPGALGSALQGPAQVSWPQLLSTYRLLHSLELVLSRAVRELLLLSKAGHSVWPLGFPTLSPQP

SEQ ID NO: 41531 - protein, 23 aa, Homo sapiens
  Payload ID: 8460
  Gene Symbol: IL27
  Gene Name: interleukin 27
  ENSP ID: ENSP00000455990
MERMQLWAMRLDLRDLQRHLRFQ

SEQ ID NO: 41532 - protein, 636 aa, Homo sapiens
  Payload ID: 8461
  Gene Symbol: IL27RA
  Gene Name: interleukin 27 receptor, alpha
  Uniprot ID: Q6UWB1
  ENSP ID: ENSP00000263379
MRGGRGAPFWLWPLPKLALLPLLWVLFQRTRPQGSAGPLQCYGVGPLGDLNCSWEPLGDLGAPSELHLQSQKYRSNKTQTVAVAAGRSWVAIPREQLTMSDKLLVWGTKAGQPLWPPVFVNLETQMKPNAPRLGPDVDFSEDDPLEATVHWAPPTWPSHKVLICQFHYRRCQEAAWTLLEPELKTIPLTPVEIQDLELATGYKVYGRCRMEKEEDLWGEWSPILSFQTPPSAPKDVWVSGNLCGTPGGEEPLLLWKAPGPCVQVSYKVWFWVGGRELSPEGITCCCSLIPSGAEWARVSAVNATSWEPLTNLSLVCLDSASAPRSVAVSSIAGSTELLVTWQPGPGEPLEHVVDWARDGDPLEKLNWVRLPPGNLSALLPGNFTVGVPYRITVTAVSASGLASASSVWGFREELAPLVGPTLWRLQDAPPGTPAIAWGEVPRHQLRGHLTHYTLCAQSGTSPSVCMNVSGNTQSVTLPDLPWGPCELWVTASTIAGQGPPGPILRLHLPDNTLRWKVLPGILFLWGLFLLGCGLSLATSGRCYHLRHKVLPRWVWEKVPDPANSSSGQPHMEQVPEAQPLGDLPILEVEEMEPPPVMESSQPAQATAPLDSGYEKHFLPTPEELGLLGPPRPQVLA

SEQ ID NO: 41533 - protein, 152 aa, Homo sapiens
  Payload ID: 8462
  Gene Symbol: IL3
  Gene Name: interleukin 3
  Uniprot ID: P08700
  ENSP ID: ENSP00000296870
MSRLPVLLLLQLLVRPGLQAPMTQTTPLKTSWVNCSNMIDEIITHLKQPPLPLLDFNNLNGEDQDILMENNLRRPNLEAFNRAVKSLQNASAIESILKNLLPCLPLATAAPTRHPIHIKDGDWNEFRRKLTFYLKTLENAQAQQTTLSLAIF

SEQ ID NO: 41534 - protein, 378 aa, Homo sapiens
  Payload ID: 8463
  Gene Symbol: IL3RA
  Gene Name: interleukin 3 receptor, alpha (low affinity)
  Uniprot ID: P26951
  ENSP ID: ENSP00000327890
MVLLWLTLLLIALPCLLQTKEDPNPPITNLRMKAKAQQLTWDLNRNVTDIECVKDADYSMPAVNNSYCQFGAISLCEVTNYTVRVANPPFSTWILFPENSGKPWAGAENLTCWIHDVDFLSCSWAVGPGAPADVQYDLYLNVANRRQQYECLHYKTDAQGTRIGCRFDDISRLSSGSQSSHILVRGRSAAFGIPCTDKFVVFSQIEILTPPNMTAKCNKTHSFMHWKMRSHFNRKFRYELQIQKRMQPVITEQVRDRTSFQLLNPGTYTVQIRARERVYEFLSAWSTPQRFECDQEEGANTRAWRTSLLIALGTLLALVCVFVICRRYLVMQRLFPRIPHMKDPIGDSFQNDKLVVWEAGKAGLEECLVTEVQVVQKT

SEQ ID NO: 41535 - protein, 300 aa, Homo sapiens
  Payload ID: 8463
  Gene Symbol: IL3RA
  Gene Name: interleukin 3 receptor, alpha (low affinity)
  Uniprot ID: P26951
  ENSP ID: ENSP00000370878
MVLLWLTLLLIALPCLLQTKEGGKPWAGAENLTCWIHDVDFLSCSWAVGPGAPADVQYDLYLNVANRRQQYECLHYKTDAQGTRIGCRFDDISRLSSGSQSSHILVRGRSAAFGIPCTDKFVVFSQIEILTPPNMTAKCNKTHSFMHWKMRSHFNRKFRYELQIQKRMQPVITEQVRDRTSFQLLNPGTYTVQIRARERVYEFLSAWSTPQRFECDQEEGANTRAWRTSLLIALGTLLALVCVFVICRRYLVMQRLFPRIPHMKDPIGDSFQNDKLVVWEAGKAGLEECLVTEVQVVQKT

SEQ ID NO: 41536 - protein, 164 aa, Homo sapiens
  Payload ID: 8463
  Gene Symbol: IL3RA
  Gene Name: interleukin 3 receptor, alpha (low affinity)
  ENSP ID: ENSP00000414867
MVLLWLTLLLIALPCLLQTKEGGKPWAGAENLTCWIHDVDFLSCSWAVGPGAPADVQYDLYLNVANRRQQYECLHYKTDAQGTRIGCRFDDISRLSSGSQSSHILVRGRSAAFGIPCTDKFVVFSQIEILTPPNMTAKCNKTHSFMHWKMRSHFNRKFRYELQI

SEQ ID NO: 41537 - protein, 164 aa, Homo sapiens
  Payload ID: 8464
  Gene Symbol: IL31
  Gene Name: interleukin 31
  Uniprot ID: Q6EBC2
  ENSP ID: ENSP00000366234
MASHSGPSTSVLFLFCCLGGWLASHTLPVRLLRPSDDVQKIVEELQSLSKMLLKDVEEEKGVLVSQNYTLPCLSPDAQPPNNIHSPAIRAYLKTIRQLDNKSVIDEIIEHLDKLIFQDAPETNISVPTDTHECKRFILTISQQFSECMDLALKSLTSGAQQATT

SEQ ID NO: 41538 - protein, 745 aa, Homo sapiens
  Payload ID: 8465
  Gene Symbol: IL31RA
  Gene Name: interleukin 31 receptor A
  Uniprot ID: Q8NI17
  ENSP ID: ENSP00000297015
MKLSPQPSCVNLGMMWTWALWMLPSLCKFSLAALPAKPENISCVYYYRKNLTCTWSPGKETSYTQYTVKRTYAFGEKHDNCTTNSSTSENRASCSFFLPRITIPDNYTIEVEAENGDGVIKSHMTYWRLENIAKTEPPKIFRVKPVLGIKRMIQIEWIKPELAPVSSDLKYTLRFRTVNSTSWMEVNFAKNRKDKNQTYNLTGLQPFTEYVIALRCAVKESKFWSDWSQEKMGMTEEEAPCGLELWRVLKPAEADGRRPVRLLWKKARGAPVLEKTLGYNIWYYPESNTNLTETMNTTNQQLELHLGGESFWVSMISYNSLGKSPVATLRIPAIQEKSFQCIEVMQACVAEDQLVVKWQSSALDVNTWMIEWFPDVDSEPTTLSWESVSQATNWTIQQDKLKPFWCYNISVYPMLHDKVGEPYSIQAYAKEGVPSEGPETKVENIGVKTVTITWKEIPKSERKGIICNYTIFYQAEGGKGFSKTVNSSILQYGLESLKRKTSYIVQVMASTSAGGTNGTSINFKTLSFSVFEIILITSLIGGGLLILIILTVAYGLKKPNKLTHLCWPTVPNPAESSIATWHGDDFKDKLNLKESDDSVNTEDRILKPCSTPSDKLVIDKLVVNFGNVLQEIFTDEARTGQENNLGGEKNGYVTCPFRPDCPLGKSFEELPVSPEIPPRKSQYLRSRMPEGTRPEAKEQLLFSGQSLVPDHLCEEGAPNPYLKNSVTAREFLVSEKLPEHTKGEV

SEQ ID NO: 41539 - protein, 662 aa, Homo sapiens
  Payload ID: 8465
  Gene Symbol: IL31RA
  Gene Name: interleukin 31 receptor A
  Uniprot ID: Q8NI17
  ENSP ID: ENSP00000347047
MKLSPQPSCVNLGMMWTWALWMLPSLCKFSLAALPAKPENISCVYYYRKNLTCTWSPGKETSYTQYTVKRTYAFGEKHDNCTTNSSTSENRASCSFFLPRITIPDNYTIEVEAENGDGVIKSHMTYWRLENIAKTEPPKIFRVKPVLGIKRMIQIEWIKPELAPVSSDLKYTLRFRTVNSTSWMEVNFAKNRKDKNQTYNLTGLQPFTEYVIALRCAVKESKFWSDWSQEKMGMTEEEAPCGLELWRVLKPAEADGRRPVRLLWKKARGAPVLEKTLGYNIWYYPESNTNLTETMNTTNQQLELHLGGESFWVSMISYNSLGKSPVATLRIPAIQEKSFQCIEVMQACVAEDQLVVKWQSSALDVNTWMIEWFPDVDSEPTTLSWESVSQATNWTIQQDKLKPFWCYNISVYPMLHDKVGEPYSIQAYAKEGVPSEGPETKVENIGVKTVTITWKEIPKSERKGIICNYTIFYQAEGGKGFSKTVNSSILQYGLESLKRKTSYIVQVMASTSAGGTNGTSINFKTLSFSVFEIILITSLIGGGLLILIILTVAYGLKKPNKLTHLCWPTVPNPAESSIATWHGDDFKDKLNLKESDDSVNTEDRILKPCSTPSDKLVIDKLVVNFGNVLQEIFTDEARTGQENNLGGEKNGTRILSSCPTSI

SEQ ID NO: 41540 - protein, 681 aa, Homo sapiens
  Payload ID: 8465
  Gene Symbol: IL31RA
  Gene Name: interleukin 31 receptor A
  Uniprot ID: Q8NI17
  ENSP ID: ENSP00000351935
MCIRQLKFFTTACVCECPQNILSPQPSCVNLGMMWTWALWMLPSLCKFSLAALPAKPENISCVYYYRKNLTCTWSPGKETSYTQYTVKRTYAFGEKHDNCTTNSSTSENRASCSFFLPRITIPDNYTIEVEAENGDGVIKSHMTYWRLENIAKTEPPKIFRVKPVLGIKRMIQIEWIKPELAPVSSDLKYTLRFRTVNSTSWMEVNFAKNRKDKNQTYNLTGLQPFTEYVIALRCAVKESKFWSDWSQEKMGMTEEEAPCGLELWRVLKPAEADGRRPVRLLWKKARGAPVLEKTLGYNIWYYPESNTNLTETMNTTNQQLELHLGGESFWVSMISYNSLGKSPVATLRIPAIQEKSFQCIEVMQACVAEDQLVVKWQSSALDVNTWMIEWFPDVDSEPTTLSWESVSQATNWTIQQDKLKPFWCYNISVYPMLHDKVGEPYSIQAYAKEGVPSEGPETKVENIGVKTVTITWKEIPKSERKGIICNYTIFYQAEGGKGFSKTVNSSILQYGLESLKRKTSYIVQVMASTSAGGTNGTSINFKTLSFSVFEIILITSLIGGGLLILIILTVAYGLKKPNKLTHLCWPTVPNPAESSIATWHGDDFKDKLNLKESDDSVNTEDRILKPCSTPSDKLVIDKLVVNFGNVLQEIFTDEARTGQENNLGGEKNGTRILSSCPTSI

SEQ ID NO: 41541 - protein, 662 aa, Homo sapiens; identical to SEQ ID NO: 41539
  Payload ID: 8465
  Gene Symbol: IL31RA
  Gene Name: interleukin 31 receptor A
  Uniprot ID: Q8NI17
  ENSP ID: ENSP00000380046

SEQ ID NO: 41542 - protein, 582 aa, Homo sapiens
  Payload ID: 8465
  Gene Symbol: IL31RA
  Gene Name: interleukin 31 receptor A
  Uniprot ID: Q8NI17
  ENSP ID: ENSP00000380048
MCIRQLKFFTTACVCECPQNILSPQPSCVNLGMMWTWALWMLPSLCKFSLAALPAKPENISCVYYYRKNLTCTWSPGKETSYTQYTVKRTYAFGEKHDNCTTNSSTSENRASCSFFLPRITIPDNYTIEVEAENGDGVIKSHMTYWRLENIAKTEPPKIFRVKPVLGIKRMIQIEWIKPELAPVSSDLKYTLRFRTVNSTSWMEVNFAKNRKDKNQTYNLTGLQPFTEYVIALRCAVKESKFWSDWSQEKMGMTEEEAPCGLELWRVLKPAEADGRRPVRLLWKKARGAPVLEKTLGYNIWYYPESNTNLTETMNTTNQQLELHLGGESFWVSMISYNSLGKSPVATLRIPAIQEKSFQCIEVMQACVAEDQLVVKWQSSALDVNTWMIEWFPDVDSEPTTLSWESVSQATNWTIQQDKLKPFWCYNISVYPMLHDKVGEPYSIQAYAKEGVPSEGPETKVENIGVKTVTITWKEIPKSERKGIICNYTIFYQAEGGKGFCKHAHSEVEKNPKPQIDAMDRPVVGMAPPSHCDLQPGMNHLASLNLSENGAKSTHLLGFWGLNESEVTVPERRVLRKWKELL

SEQ ID NO: 41543 - protein, 764 aa, Homo sapiens
  Payload ID: 8465
  Gene Symbol: IL31RA
  Gene Name: interleukin 31 receptor A
  Uniprot ID: Q8NI17
  ENSP ID: ENSP00000415900
MCIRQLKFFTTACVCECPQNILSPQPSCVNLGMMWTWALWMLPSLCKFSLAALPAKPENISCVYYYRKNLTCTWSPGKETSYTQYTVKRTYAFGEKHDNCTTNSSTSENRASCSFFLPRITIPDNYTIEVEAENGDGVIKSHMTYWRLENIAKTEPPKIFRVKPVLGIKRMIQIEWIKPELAPVSSDLKYTLRFRTVNSTSWMEVNFAKNRKDKNQTYNLTGLQPFTEYVIALRCAVKESKFWSDWSQEKMGMTEEEAPCGLELWRVLKPAEADGRRPVRLLWKKARGAPVLEKTLGYNIWYYPESNTNLTETMNTTNQQLELHLGGESFWVSMISYNSLGKSPVATLRIPAIQEKSFQCIEVMQACVAEDQLVVKWQSSALDVNTWMIEWFPDVDSEPTTLSWESVSQATNWTIQQDKLKPFWCYNISVYPMLHDKVGEPYSIQAYAKEGVPSEGPETKVENIGVKTVTITWKEIPKSERKGIICNYTIFYQAEGGKGFSKTVNSSILQYGLESLKRKTSYIVQVMASTSAGGTNGTSINFKTLSFSVFEIILITSLIGGGLLILIILTVAYGLKKPNKLTHLCWPTVPNPAESSIATWHGDDFKDKLNLKESDDSVNTEDRILKPCSTPSDKLVIDKLVVNFGNVLQEIFTDEARTGQENNLGGEKNGYVTCPFRPDCPLGKSFEELPVSPEIPPRKSQYLRSRMPEGTRPEAKEQLLFSGQSLVPDHLCEEGAPNPYLKNSVTAREFLVSEKLPEHTKGEV

SEQ ID NO: 41544 - protein, 622 aa, Homo sapiens
  Payload ID: 8465
  Gene Symbol: IL31RA
  Gene Name: interleukin 31 receptor A
  Uniprot ID: Q8NI17
  ENSP ID: ENSP00000427533
MTYWRLENIAKTEPPKIFRVKPVLGIKRMIQIEWIKPELAPVSSDLKYTLRFRTVNSTSWMEVNFAKNRKDKNQTYNLTGLQPFTEYVIALRCAVKESKFWSDWSQEKMGMTEEEAPCGLELWRVLKPAEADGRRPVRLLWKKARGAPVLEKTLGYNIWYYPESNTNLTETMNTTNQQLELHLGGESFWVSMISYNSLGKSPVATLRIPAIQEKSFQCIEVMQACVAEDQLVVKWQSSALDVNTWMIEWFPDVDSEPTTLSWESVSQATNWTIQQDKLKPFWCYNISVYPMLHDKVGEPYSIQAYAKEGVPSEGPETKVENIGVKTVTITWKEIPKSERKGIICNYTIFYQAEGGKGFSKTVNSSILQYGLESLKRKTSYIVQVMASTSAGGTNGTSINFKTLSFSVFEIILITSLIGGGLLILIILTVAYGLKKPNKLTHLCWPTVPNPAESSIATWHGDDFKDKLNLKESDDSVNTEDRILKPCSTPSDKLVIDKLVVNFGNVLQEIFTDEARTGQENNLGGEKNGYVTCPFRPDCPLGKSFEELPVSPEIPPRKSQYLRSRMPEGTRPEAKEQLLFSGQSLVPDHLCEEGAPNPYLKNSVTAREFLVSEKLPEHTKGEV

SEQ ID NO: 41545 - protein, 324 aa, Homo sapiens
  Payload ID: 8465
  Gene Symbol: IL31RA
  Gene Name: interleukin 31 receptor A
  ENSP ID: ENSP00000479432
MMWTWALWMLPSLCKFSLAALPAKPENISCVYYYRKNLTCTWSPGKETSYTQYTVKRTYAFGEKHDNCTTNSSTSENRASCSFFLPRITIPDNYTIEVEAENGDGVIKSHMTYWRLENIAKTEPPKIFRVKPVLGIKRMIQIEWIKPELAPVSSDLKYTLRFRTVNSTSWMEVNFAKNRKDKNQTYNLTGLQPFTEYVIALRCAVKESKFWSDWSQEKMGMTEEEAPCGLELWRVLKPAEADGRRPVRLLWKKARGAPVLEKTLGYNIWYYPESNTNLTETMNTTNQQLELHLGGESFWVSMISYNSLGKSPVATLRIPAIQEK

SEQ ID NO: 41546 - protein, 168 aa, Homo sapiens
  Payload ID: 8466
  Gene Symbol: IL32
  Gene Name: interleukin 32
  Uniprot ID: P24001
  ENSP ID: ENSP00000008180
MCFPKVLSDDMKKLKARMVMSSLAELEDDFKEGYLETVAAYYEEQHPELTPLLEKERDGLRCRGNRSPVPDVEDPATEEPGESFCDKVMRWFQAMLQRLQTWWHGVLAWVKEKVVALVHAVQALWKQFQSFCCSLSELFMSSFQSYGAPRGDKEELTPQKCSEPQSSK

SEQ ID NO: 41547 - protein, 188 aa, Homo sapiens
  Payload ID: 8466
  Gene Symbol: IL32
  Gene Name: interleukin 32
  Uniprot ID: P24001
  ENSP ID: ENSP00000324742
MCFPKVLSDDMKKLKARMHQAIERFYDKMQNAESGRGQVMSSLAELEDDFKEGYLETVAAYYEEQHPELTPLLEKERDGLRCRGNRSPVPDVEDPATEEPGESFCDKVMRWFQAMLQRLQTWWHGVLAWVKEKVVALVHAVQALWKQFQSFCCSLSELFMSSFQSYGAPRGDKEELTPQKCSEPQSSK

SEQ ID NO: 41548 - protein, 179 aa, Homo sapiens
  Payload ID: 8466
  Gene Symbol: IL32
  Gene Name: interleukin 32
  Uniprot ID: P24001
  ENSP ID: ENSP00000371648
MCFPKVLSDDMKKLKARMHQAIERFYDKMQNAESGRGQDDFKEGYLETVAAYYEEQHPELTPLLEKERDGLRCRGNRSPVPDVEDPATEEPGESFCDKVMRWFQAMLQRLQTWWHGVLAWVKEKVVALVHAVQALWKQFQSFCCSLSELFMSSFQSYGAPRGDKEELTPQKCSEPQSSK

SEQ ID NO: 41549 - protein, 131 aa, Homo sapiens
  Payload ID: 8466
  Gene Symbol: IL32
  Gene Name: interleukin 32
  Uniprot ID: P24001
  ENSP ID: ENSP00000380096
MCFPKVLSDDMKKLKARMHQAIERFYDKMQNAESGRGQVMSSLAELEDDFKEGYLETVAAYYEEQHPELTPLLEKERDGLRCRGNRSPVPDVEDPATEEPGESFCDKSYGAPRGDKEELTPQKCSEPQSSK

SEQ ID NO: 41550 - protein, 234 aa, Homo sapiens
  Payload ID: 8466
  Gene Symbol: IL32
  Gene Name: interleukin 32
  Uniprot ID: P24001
  ENSP ID: ENSP00000380099
MCFPKVLSDDMKKLKARMVMLLPTSAQGLGAWVSACDTEDTVGHLGPWRDKDPALWCQLCLSSQHQAIERFYDKMQNAESGRGQVMSSLAELEDDFKEGYLETVAAYYEEQHPELTPLLEKERDGLRCRGNRSPVPDVEDPATEEPGESFCDKVMRWFQAMLQRLQTWWHGVLAWVKEKVVALVHAVQALWKQFQSFCCSLSELFMSSFQSYGAPRGDKEELTPQKCSEPQSSK

SEQ ID NO: 41551 - protein, 188 aa, Homo sapiens; identical to SEQ ID NO: 41547
  Payload ID: 8466
  Gene Symbol: IL32
  Gene Name: interleukin 32
  Uniprot ID: P24001
  ENSP ID: ENSP00000405063

SEQ ID NO: 41552 - protein, 188 aa, Homo sapiens; identical to SEQ ID NO: 41547
  Payload ID: 8466
  Gene Symbol: IL32
  Gene Name: interleukin 32
  Uniprot ID: P24001
  ENSP ID: ENSP00000411958

SEQ ID NO: 41553 - protein, 131 aa, Homo sapiens
  Payload ID: 8466
  Gene Symbol: IL32
  Gene Name: interleukin 32
  ENSP ID: ENSP00000431740
MCFPKVLSDDMKKLKARMDDFKEGYLETVAAYYEEQHPELTPLLEKERDGLRCRGNRSPVPDVEDPATEEPGESFCDKVMRWFQAMLQRLQTWWHGVLAWVKEKVVALVHAVQALWKQFQSFCCSLSELFM

SEQ ID NO: 41554 - protein, 234 aa, Homo sapiens; identical to SEQ ID NO: 41550
  Payload ID: 8466
  Gene Symbol: IL32
  Gene Name: interleukin 32
  Uniprot ID: P24001
  ENSP ID: ENSP00000431775

SEQ ID NO: 41555 - protein, 188 aa, Homo sapiens; identical to SEQ ID NO: 41547
  Payload ID: 8466
  Gene Symbol: IL32
  Gene Name: interleukin 32
  Uniprot ID: P24001
  ENSP ID: ENSP00000432218

SEQ ID NO: 41556 - protein, 188 aa, Homo sapiens; identical to SEQ ID NO: 41547
  Payload ID: 8466
  Gene Symbol: IL32
  Gene Name: interleukin 32
  Uniprot ID: P24001
  ENSP ID: ENSP00000432850

SEQ ID NO: 41557 - protein, 188 aa, Homo sapiens; identical to SEQ ID NO: 41547
  Payload ID: 8466
  Gene Symbol: IL32
  Gene Name: interleukin 32
  Uniprot ID: P24001
  ENSP ID: ENSP00000432917

SEQ ID NO: 41558 - protein, 178 aa, Homo sapiens
  Payload ID: 8466
  Gene Symbol: IL32
  Gene Name: interleukin 32
  Uniprot ID: P24001
  ENSP ID: ENSP00000433177
MKKLKARMHQAIERFYDKMQNAESGRGQVMSSLAELEDDFKEGYLETVAAYYEEQHPELTPLLEKERDGLRCRGNRSPVPDVEDPATEEPGESFCDKVMRWFQAMLQRLQTWWHGVLAWVKEKVVALVHAVQALWKQFQSFCCSLSELFMSSFQSYGAPRGDKEELTPQKCSEPQSSK

SEQ ID NO: 41559 - protein, 168 aa, Homo sapiens; identical to SEQ ID NO: 41546
  Payload ID: 8466
  Gene Symbol: IL32
  Gene Name: interleukin 32
  Uniprot ID: P24001
  ENSP ID: ENSP00000433747

SEQ ID NO: 41560 - protein, 221 aa, Homo sapiens
  Payload ID: 8466
  Gene Symbol: IL32
  Gene Name: interleukin 32
  ENSP ID: ENSP00000433866
MCFPKVLSDDMKKLKARMVMLLPTSAQGLGAWVSACDTEDTVGHLGPWRDKDPALWCQLCLSSQHQAIERFYDKMQNAESGRGQVMSSLAELEDDFKEGYLETVAAYYEEQHPELTPLLEKERDGLRCRGNRSPVPDVEDPATEEPGESFCDKVMRWFQAMLQRLQTWWHGVLAWVKEKVVALVHAVQALWKQFQSFCCSLSELFMSSFQSYGATRGARRS

SEQ ID NO: 41561 - protein, 188 aa, Homo sapiens; identical to SEQ ID NO: 41547
  Payload ID: 8466
  Gene Symbol: IL32
  Gene Name: interleukin 32
  Uniprot ID: P24001
  ENSP ID: ENSP00000436929

SEQ ID NO: 41562 - protein, 168 aa, Homo sapiens
  Payload ID: 8466
  Gene Symbol: IL32
  Gene Name: interleukin 32
  ENSP ID: ENSP00000436937
MCFPKVLSDDMKKLKARMHQAIERFYDKMQNAESGRGQVMSSLAELEELTPLLEKERDGLRCRGNRSPVPDVEDPATEEPGESFCDKVMRWFQAMLQRLQTWWHGVLAWVKEKVVALVHAVQALWKQFQSFCCSLSELFMSSFQSYGAPRGDKEELTPQKCSEPQSSK

SEQ ID NO: 41563 - protein, 188 aa, Homo sapiens; identical to SEQ ID NO: 41547
  Payload ID: 8466
  Gene Symbol: IL32
  Gene Name: interleukin 32
  Uniprot ID: P24001
  ENSP ID: ENSP00000437020

SEQ ID NO: 41564 - protein, 179 aa, Homo sapiens; identical to SEQ ID NO: 41548
  Payload ID: 8466
  Gene Symbol: IL32
  Gene Name: interleukin 32
  Uniprot ID: P24001
  ENSP ID: ENSP00000446624

SEQ ID NO: 41565 - protein, 168 aa, Homo sapiens; identical to SEQ ID NO: 41546
  Payload ID: 8466
  Gene Symbol: IL32
  Gene Name: interleukin 32
  Uniprot ID: P24001
  ENSP ID: ENSP00000446978

SEQ ID NO: 41566 - protein, 212 aa, Homo sapiens
  Payload ID: 8466
  Gene Symbol: IL32
  Gene Name: interleukin 32
  ENSP ID: ENSP00000447033
MCFPKGLGAWVSACDTEDTVGHLGPWRDKDPALWCQLCLSSQHQAIERFYDKMQNAESGRGQVMSSLAELEDDFKEGYLETVAAYYEEQHPELTPLLEKERDGLRCRGNRSPVPDVEDPATEEPGESFCDKVMRWFQAMLQRLQTWWHGVLAWVKEKVVALVHAVQALWKQFQSFCCSLSELFMSSFQSYGAPRGDKEELTPQKCSEPQSSK

SEQ ID NO: 41567 - protein, 131 aa, Homo sapiens; identical to SEQ ID NO: 41549
  Payload ID: 8466
  Gene Symbol: IL32
  Gene Name: interleukin 32
  Uniprot ID: P24001
  ENSP ID: ENSP00000447496

SEQ ID NO: 41568 - protein, 131 aa, Homo sapiens; identical to SEQ ID NO: 41549
  Payload ID: 8466
  Gene Symbol: IL32
  Gene Name: interleukin 32
  Uniprot ID: P24001
  ENSP ID: ENSP00000447812

SEQ ID NO: 41569 - protein, 148 aa, Homo sapiens
  Payload ID: 8466
  Gene Symbol: IL32
  Gene Name: interleukin 32
  Uniprot ID: P24001
  ENSP ID: ENSP00000447979
MCFPKVLSDDMKKLKARMVMSSLAELEELTPLLEKERDGLRCRGNRSPVPDVEDPATEEPGESFCDKVMRWFQAMLQRLQTWWHGVLAWVKEKVVALVHAVQALWKQFQSFCCSLSELFMSSFQSYGAPRGDKEELTPQKCSEPQSSK

SEQ ID NO: 41570 - protein, 225 aa, Homo sapiens
  Payload ID: 8466
  Gene Symbol: IL32
  Gene Name: interleukin 32
  ENSP ID: ENSP00000448354
MCFPKVLSDDMKKLKARMVMLLPTSAQGLGAWVSACDTEDTVGHLGPWRDKDPALWCQLCLSSQHQAIERFYDKMQNAESGRGQVMSSLAELEDDFKEGYLETVAAYYEEQHPELTPLLEKERDGLRCRGNRSPVPDVEDPATEEPGESFCDKVMRWFQAMLQRLQTWWHGVLAWVKEKVVALVHAVQALWKQFQSFCCSLSELFMSSFQSYGAPRGDKEELTPQ

SEQ ID NO: 41571 - protein, 188 aa, Homo sapiens; identical to SEQ ID NO: 41547
  Payload ID: 8466
  Gene Symbol: IL32
  Gene Name: interleukin 32
  Uniprot ID: P24001
  ENSP ID: ENSP00000448683

SEQ ID NO: 41572 - protein, 225 aa, Homo sapiens
  Payload ID: 8466
  Gene Symbol: IL32
  Gene Name: interleukin 32
  ENSP ID: ENSP00000449147
MCFPKVLSDDMKKLKARMVMLLPTSAQGLGAWVSACDTEDTVGHLGPWRDKDPALWCQLCLSSQHQAIERFYDKMQNAESGRGQDDFKEGYLETVAAYYEEQHPELTPLLEKERDGLRCRGNRSPVPDVEDPATEEPGESFCDKVMRWFQAMLQRLQTWWHGVLAWVKEKVVALVHAVQALWKQFQSFCCSLSELFMSSFQSYGAPRGDKEELTPQKCSEPQSSK

SEQ ID NO: 41573 - protein, 234 aa, Homo sapiens; identical to SEQ ID NO: 41550
  Payload ID: 8466
  Gene Symbol: IL32
  Gene Name: interleukin 32
  Uniprot ID: P24001
  ENSP ID: ENSP00000449483

SEQ ID NO: 41574 - protein, 188 aa, Homo sapiens; identical to SEQ ID NO: 41547
  Payload ID: 8466
  Gene Symbol: IL32
  Gene Name: interleukin 32
  Uniprot ID: P24001
  ENSP ID: ENSP00000450364

SEQ ID NO: 41575 - protein, 168 aa, Homo sapiens; identical to SEQ ID NO: 41562
  Payload ID: 8466
  Gene Symbol: IL32
  Gene Name: interleukin 32
  ENSP ID: ENSP00000479701

SEQ ID NO: 41576 - protein, 270 aa, Homo sapiens
  Payload ID: 8467
  Gene Symbol: IL33
  Gene Name: interleukin 33
  Uniprot ID: O95760
  ENSP ID: ENSP00000370842
MKPKMKYSTNKISTAKWKNTASKALCFKLGKSQQKAKEVCPMYFMKLRSGLMIKKEACYFRRETTKRPSLKTGRKHKRHLVLAACQQQSTVECFAFGISGVQKYTRALHDSSITGISPITEYLASLSTYNDQSITFALEDESYEIYVEDLKKDEKKDKVLLSYYESQHPSNESGDGVDGKMLMVTLSPTKDFWLHANNKEHSVELHKCEKPLPDQAFFVLHNMHSNCVSFECKTDPGVFIGVKDNHLALIKVDSSENLCTENILFKLSET

SEQ ID NO: 41577 - protein, 144 aa, Homo sapiens
  Payload ID: 8467
  Gene Symbol: IL33
  Gene Name: interleukin 33
  Uniprot ID: O95760
  ENSP ID: ENSP00000394039
MKPKMKYSTNKISTAKWKNTASKALCFKLGNKVLLSYYESQHPSNESGDGVDGKMLMVTLSPTKDFWLHANNKEHSVELHKCEKPLPDQAFFVLHNMHSNCVSFECKTDPGVFIGVKDNHLALIKVDSSENLCTENILFKLSET

SEQ ID NO: 41578 - protein, 228 aa, Homo sapiens
  Payload ID: 8467
  Gene Symbol: IL33
  Gene Name: interleukin 33
  Uniprot ID: O95760
  ENSP ID: ENSP00000414238
MKPKMKYSTNKISTAKWKNTASKALCFKLGKSQQKAKEVCPMYFMKLRSGLMIKKEACYFRRETTKRPSLKTGRKHKRHLVLAACQQQSTVECFAFGISGVQKYTRALHDSSITDKVLLSYYESQHPSNESGDGVDGKMLMVTLSPTKDFWLHANNKEHSVELHKCEKPLPDQAFFVLHNMHSNCVSFECKTDPGVFIGVKDNHLALIKVDSSENLCTENILFKLSET

SEQ ID NO: 41579 - protein, 228 aa, Homo sapiens
  Payload ID: 8467
  Gene Symbol: IL33
  Gene Name: interleukin 33
  Uniprot ID: O95760
  ENSP ID: ENSP00000478858
MKPKMKYSTNKISTAKWKNTASKALCFKLGKSQQKAKEVCPMYFMKLRSGLMIKKEACYFRRETTKRPSLKTGISPITEYLASLSTYNDQSITFALEDESYEIYVEDLKKDEKKDKVLLSYYESQHPSNESGDGVDGKMLMVTLSPTKDFWLHANNKEHSVELHKCEKPLPDQAFFVLHNMHSNCVSFECKTDPGVFIGVKDNHLALIKVDSSENLCTENILFKLSET

SEQ ID NO: 41580 - protein, 242 aa, Homo sapiens
  Payload ID: 8468
  Gene Symbol: IL34
  Gene Name: interleukin 34
  Uniprot ID: Q6ZMJ4
  ENSP ID: ENSP00000288098
MPRGFTWLRYLGIFLGVALGNEPLEMWPLTQNEECTVTGFLRDKLQYRSRLQYMKHYFPINYKISVPYEGVFRIANVTRLQRAQVSERELRYLWVLVSLSATESVQDVLLEGHPSWKYLQEVETLLLNVQQGLTDVEVSPKVESVLSLLNAPGPNLKLVRPKALLDNCFRVMELLYCSCCKQSSVLNWQDCEVPSPQSCSPEPSLQYAATQLYPPPPWSPSSPPHSTGSVRPVRAQGEGLLP

SEQ ID NO: 41581 - protein, 242 aa, Homo sapiens; identical to SEQ ID NO: 41580
  Payload ID: 8468
  Gene Symbol: IL34
  Gene Name: interleukin 34
  Uniprot ID: Q6ZMJ4
  ENSP ID: ENSP00000397863

SEQ ID NO: 41582 - protein, 54 aa, Homo sapiens
  Payload ID: 8468
  Gene Symbol: IL34
  Gene Name: interleukin 34
  ENSP ID: ENSP00000455240
MPRGFTWLRYLGIFLGVALGNEPLEMWPLTQNEECTVTGFLRDKLQYRSRLQYM

SEQ ID NO: 41583 - protein, 217 aa, Homo sapiens
  Payload ID: 8468
  Gene Symbol: IL34
  Gene Name: interleukin 34
  ENSP ID: ENSP00000463886
MWPLTQNEECTVTGFLRDKLQYRSRLQYMKHYFPINYKISVPYEGVFRIANVTRLQRAQVSERELRYLWVLVSLSATESVQDVLLEGHPSWKYLQEVETLLLNVQQGLTDVEVSPKVESVLSLLNAPGPNLKLVRPKALLDNCFRVMELLYCSCCKQSSVLNWQDCEVPSPQSCSPEPSLQYAATQLYPPPPWSPSSPPHSTGSVRPVRAQGEGLLP

SEQ ID NO: 41584 - protein, 155 aa, Homo sapiens
  Payload ID: 8469
  Gene Symbol: IL36RN
  Gene Name: interleukin 36 receptor antagonist
  Uniprot ID: Q9UBH0
  ENSP ID: ENSP00000259212
MVLSGALCFRMKDSALKVLYLHNNQLLAGGLHAGKVIKGEEISVVPNRWLDASLSPVILGVQGGSQCLSCGVGQEPTLTLEPVNIMELYLGAKESKSFTFYRRDMGLTSSFESAAYPGWFLCTVPEADQPVRLTQLPENGGWNAPITDFYFQQCD

SEQ ID NO: 41585 - protein, 155 aa, Homo sapiens; identical to SEQ ID NO: 41584
  Payload ID: 8469
  Gene Symbol: IL36RN
  Gene Name: interleukin 36 receptor antagonist
  Uniprot ID: Q9UBH0
  ENSP ID: ENSP00000376896

SEQ ID NO: 41586 - protein, 117 aa, Homo sapiens
  Payload ID: 8469
  Gene Symbol: IL36RN
  Gene Name: interleukin 36 receptor antagonist
  ENSP ID: ENSP00000409262
MVLSGALCFRMKDSALKVLYLHNNQLLAGGLHAGKVIKGEEISVVPNRWLDASLSPVILGVQGGSQCLSCGVGQEPTLTLEPVNIMELYLGAKESKSFTFYRRDMGLTSSFESAAYP

SEQ ID NO: 41587 - protein, 52 aa, Homo sapiens
  Payload ID: 8469
  Gene Symbol: IL36RN
  Gene Name: interleukin 36 receptor antagonist
  ENSP ID: ENSP00000475308
  MOD_RES (1)..(1): Any amino acid
XMGLTSSFESAAYPGWFLCTVPEADQPVRLTQLPENGGWNAPITDFYFQQCD

SEQ ID NO: 41588 - protein, 158 aa, Homo sapiens
  Payload ID: 8470
  Gene Symbol: IL36A
  Gene Name: interleukin 36, alpha
  Uniprot ID: Q9UHA7
  ENSP ID: ENSP00000259211
MEKALKIDTPQQGSIQDINHRVWVLQDQTLIAVPRKDRMSPVTIALISCRHVETLEKDRGNPIYLGLNGLNLCLMCAKVGDQPTLQLKEKDIMDLYNQPEPVKSFLFYHSQSGRNSTFESVAFPGWFIAVSSEGGCPLILTQELGKANTTDFGLTMLF

SEQ ID NO: 41589 - protein, 164 aa, Homo sapiens
  Payload ID: 8471
  Gene Symbol: IL36B
  Gene Name: interleukin 36, beta
  Uniprot ID: Q9NZH7
  ENSP ID: ENSP00000259213
MNPQREAAPKSYAIRDSRQMVWVLSGNSLIAAPLSRSIKPVTLHLIACRDTEFSDKEKGNMVYLGIKGKDLCLFCAEIQGKPTLQLKLQGSQDNIGKDTCWKLVGIHTCINLDVRESCFMGTLDQWGIGVGRKKWKSSFQHHHLRKKDKDFSSMRTNIGMPGRM

SEQ ID NO: 41590 - protein, 157 aa, Homo sapiens
  Payload ID: 8471
  Gene Symbol: IL36B
  Gene Name: interleukin 36, beta
  Uniprot ID: Q9NZH7
  ENSP ID: ENSP00000328420
MNPQREAAPKSYAIRDSRQMVWVLSGNSLIAAPLSRSIKPVTLHLIACRDTEFSDKEKGNMVYLGIKGKDLCLFCAEIQGKPTLQLKEKNIMDLYVEKKAQKPFLFFHNKEGSTSVFQSVSYPGWFIATSTTSGQPIFLTKERGITNNTNFYLDSVE

SEQ ID NO: 41591 - protein, 169 aa, Homo sapiens
  Payload ID: 8472
  Gene Symbol: IL36G
  Gene Name: interleukin 36, gamma
  Uniprot ID: Q9NZH8
  ENSP ID: ENSP00000259205
MRGTPGDADGGGRAVYQSMCKPITGTINDLNQQVWTLQGQNLVAVPRSDSVTPVTVAVITCKYPEALEQGRGDPIYLGIQNPEMCLYCEKVGEQPTLQLKEQKIMDLYGQPEPVKPFLFYRAKTGRTSTLESVAFPDWFIASSKRDQPIILTSELGKSYNTAFELNIND

SEQ ID NO: 41592 - protein, 134 aa, Homo sapiens
  Payload ID: 8472
  Gene Symbol: IL36G
  Gene Name: interleukin 36, gamma
  Uniprot ID: Q9NZH8
  ENSP ID: ENSP00000365672
MRGTPGDADGGGRAVYQSITVAVITCKYPEALEQGRGDPIYLGIQNPEMCLYCEKVGEQPTLQLKEQKIMDLYGQPEPVKPFLFYRAKTGRTSTLESVAFPDWFIASSKRDQPIILTSELGKSYNTAFELNIND

SEQ ID NO: 41593 - protein, 38 aa, Homo sapiens
  Payload ID: 8472
  Gene Symbol: IL36G
  Gene Name: interleukin 36, gamma
  ENSP ID: ENSP00000411639
MRGTPGDADGGGRAVYQSMCKPITGTINDLNQQVWTLQ

SEQ ID NO: 41594 - protein, 218 aa, Homo sapiens
  Payload ID: 8473
  Gene Symbol: IL37
  Gene Name: interleukin 37
  Uniprot ID: Q9NZH6
  ENSP ID: ENSP00000263326
MSFVGENSGVKMGSEDWEKDEPQCCLEDPAGSPLEPGPSLPTMNFVHTSPKVKNLNPKKFSIHDQDHKVLVLDSGNLIAVPDKNYIRPEIFFALASSLSSASAEKGSPILLGVSKGEFCLYCDKDKGQSHPSLQLKKEKLMKLAAQKESARRPFIFYRAQVGSWNMLESAAHPGWFICTSCNCNEPVGVTDKFENRKHIEFSFQPVCKAEMSPSEVSD

SEQ ID NO: 41595 - protein, 197 aa, Homo sapiens
  Payload ID: 8473
  Gene Symbol: IL37
  Gene Name: interleukin 37
  Uniprot ID: Q9NZH6
  ENSP ID: ENSP00000263327
MSFVGENSGVKMGSEDWEKDEPQCCLEGPKVKNLNPKKFSIHDQDHKVLVLDSGNLIAVPDKNYIRPEIFFALASSLSSASAEKGSPILLGVSKGEFCLYCDKDKGQSHPSLQLKKEKLMKLAAQKESARRPFIFYRAQVGSWNMLESAAHPGWFICTSCNCNEPVGVTDKFENRKHIEFSFQPVCKAEMSPSEVSD

SEQ ID NO: 41596 - protein, 157 aa, Homo sapiens
  Payload ID: 8473
  Gene Symbol: IL37
  Gene Name: interleukin 37
  Uniprot ID: Q9NZH6
  ENSP ID: ENSP00000263328
MSFVGENSGVKMGSEDWEKDEPQCCLEEIFFALASSLSSASAEKGSPILLGVSKGEFCLYCDKDKGQSHPSLQLKKEKLMKLAAQKESARRPFIFYRAQVGSWNMLESAAHPGWFICTSCNCNEPVGVTDKFENRKHIEFSFQPVCKAEMSPSEVSD

SEQ ID NO: 41597 - protein, 178 aa, Homo sapiens
  Payload ID: 8473
  Gene Symbol: IL37
  Gene Name: interleukin 37
  Uniprot ID: Q9NZH6
  ENSP ID: ENSP00000309208
MSFVGENSGVKMGSEDWEKDEPQCCLEDPAGSPLEPGPSLPTMNFVHTKIFFALASSLSSASAEKGSPILLGVSKGEFCLYCDKDKGQSHPSLQLKKEKLMKLAAQKESARRPFIFYRAQVGSWNMLESAAHPGWFICTSCNCNEPVGVTDKFENRKHIEFSFQPVCKAEMSPSEVSD

SEQ ID NO: 41598 - protein, 192 aa, Homo sapiens
  Payload ID: 8473
  Gene Symbol: IL37
  Gene Name: interleukin 37
  Uniprot ID: Q9NZH6
  ENSP ID: ENSP00000309883
MSGCDRRETETKGKNSFKKRLRGPKVKNLNPKKFSIHDQDHKVLVLDSGNLIAVPDKNYIRPEIFFALASSLSSASAEKGSPILLGVSKGEFCLYCDKDKGQSHPSLQLKKEKLMKLAAQKESARRPFIFYRAQVGSWNMLESAAHPGWFICTSCNCNEPVGVTDKFENRKHIEFSFQPVCKAEMSPSEVSD

SEQ ID NO: 41599 - protein, 153 aa, Homo sapiens [sequence omitted]

SEQ ID NO: 41600 - protein, 137 aa, Homo sapiens
  Payload ID: 8474
  Gene Symbol: IL4
  Gene Name: interleukin 4
  Uniprot ID: P05112
  ENSP ID: ENSP00000325190
MGLTSQLLPPLFFLLACAGNFVHGHKCDITLQEIIKTLNSLTEQKNTTEKETFCRAATVLRQFYSHHEKDTRCLGATAQQFHRHKQLIRFLKRLDRNLWGLAGLNSCPVKEANQSTLENFLERLKTIMREKYSKCSS

SEQ ID NO: 41601 - protein, 136 aa, Homo sapiens
  Payload ID: 8474
  Gene Symbol: IL4
  Gene Name: interleukin 4
  ENSP ID: ENSP00000480581
MGLTSQLLPPLFFLLACAGNFVHGHKCDITLQEIIKTLNSLTEQKTLCTELTVTDIFAASKQHACLPTSRHTGTICRPPSARVPSTSTRLQSPERTQLRRKPSAGLRLCSGSSTATMRRTLAAWVRLHSSSTGTSS

SEQ ID NO: 41602 - protein, 589 aa, Homo sapiens
  Payload ID: 8475
  Gene Symbol: IL4I1
  Gene Name: interleukin 4 induced 1
  Uniprot ID: Q96RQ9
  ENSP ID: ENSP00000342557
MPNDDFCPGLTIKAMGAERAPQRQPCTLHLLVLVPILLSLVASQDWKAERSQDPFEKCMQDPDYEQLLKVVTWGLNRTLKPQRVIVVGAGVAGLVAAKVLSDAGHKVTILEADNRIGGRIFTYRDQNTGWIGELGAMRMPSSHRILHKLCQGLGLNLTKFTQYDKNTWTEVHEVKLRNYVVEKVPEKLGYALRPQEKGHSPEDIYQMALNQALKDLKALGCRKAMKKFERHTLLEYLLGEGNLSRPAVQLLGDVMSEDGFFYLSFAEALRAHSCLSDRLQYSRIVGGWDLLPRALLSSLSGLVLLNAPVVAMTQGPHDVHVQIETSPPARNLKVLKADVVLLTASGPAVKRITFSPPLPRHMQEALRRLHYVPATKVFLSFRRPFWREEHIEGGHSNTDRPSRMIFYPPPREGALLLASYTWSDAAAAFAGLSREEALRLALDDVAALHGPVVRQLWDGTGVVKRWAEDQHSQGGFVVQPPALWQTEKDDWTVPYGRIYFAGEHTAYPHGWVETAVKSALRAAIKINSRKGPASDTASPEGHASDMEGQGHVHGVASSPSHDLAKEEGSHPPVQGQLSLQNTTHTRTSH

SEQ ID NO: 41603 - protein, 567 aa, Homo sapiens
  Payload ID: 8475
  Gene Symbol: IL4I1
  Gene Name: interleukin 4 induced 1
  Uniprot ID: Q96RQ9
  ENSP ID: ENSP00000375702
MAPLALHLLVLVPILLSLVASQDWKAERSQDPFEKCMQDPDYEQLLKVVTWGLNRTLKPQRVIVVGAGVAGLVAAKVLSDAGHKVTILEADNRIGGRIFTYRDQNTGWIGELGAMRMPSSHRILHKLCQGLGLNLTKFTQYDKNTWTEVHEVKLRNYVVEKVPEKLGYALRPQEKGHSPEDIYQMALNQALKDLKALGCRKAMKKFERHTLLEYLLGEGNLSRPAVQLLGDVMSEDGFFYLSFAEALRAHSCLSDRLQYSRIVGGWDLLPRALLSSLSGLVLLNAPVVAMTQGPHDVHVQIETSPPARNLKVLKADVVLLTASGPAVKRITFSPPLPRHMQEALRRLHYVPATKVFLSFRRPFWREEHIEGGHSNTDRPSRMIFYPPPREGALLLASYTWSDAAAAFAGLSREEALRLALDDVAALHGPVVRQLWDGTGVVKRWAEDQHSQGGFVVQPPALWQTEKDDWTVPYGRIYFAGEHTAYPHGWVETAVKSALRAAIKINSRKGPASDTASPEGHASDMEGQGHVHGVASSPSHDLAKEEGSHPPVQGQLSLQNTTHTRTSH

SEQ ID NO: 41604 - protein, 82 aa, Homo sapiens
  Payload ID: 8475
  Gene Symbol: IL4I1
  Gene Name: interleukin 4 induced 1
  ENSP ID: ENSP00000469467
MPNDDFCPGLTIKAMGAERAPQRQPCNTISHRESWPHWPCTSSSSSPSSSAWWPPRTGRLNAAKTPSRNACRILTMSSCSRW

SEQ ID NO: 41605 - protein, 71 aa, Homo sapiens
  Payload ID: 8475
  Gene Symbol: IL4I1
  Gene Name: interleukin 4 induced 1
  ENSP ID: ENSP00000469841
MAPLALHLLVLVPILLSLVASQDWKAERSQDPFEKCMQDPDYEQLLKVVTWGLNRTLKPQRVIVVGAGVAG

SEQ ID NO: 41606 - protein, 150 aa, Homo sapiens
  Payload ID: 8475
  Gene Symbol: IL4I1
  Gene Name: interleukin 4 induced 1
  ENSP ID: ENSP00000470120
MAPLALHLLVLVPILLSLVASQDWKAERSQDPFEKCMQDPDYEQLLKVTILEADNRIGGRIFTYRDQNTGWIGELGAMRMPSSHRILHKLCQGLGLNLTKFTQYDKNTWTEVHEVKLRNYVVEKVPEKLGYALRPQEKGHSPEDIYQMAL

SEQ ID NO: 41607 - protein, 106 aa, Homo sapiens
  Payload ID: 8475
  Gene Symbol: IL4I1
  Gene Name: interleukin 4 induced 1
  ENSP ID: ENSP00000471950
MPNDDFCPGLTIKAMGAERAPQRQPCTLHLLVLVPILLSLVASQDWKAERSQDPFEKCMQDPDYEQLLKVVTWGLNRTLKPQRVIVVGAGVAGLVAAKVLSDAGHK

SEQ ID NO: 41608 - protein, 589 aa, Homo sapiens; identical to SEQ ID NO: 41602
  Payload ID: 8475
  Gene Symbol: IL4I1
  Gene Name: interleukin 4 induced 1
  Uniprot ID: Q96RQ9
  ENSP ID: ENSP00000472474

SEQ ID NO: 41609 - protein, 32 aa, Homo sapiens
  Payload ID: 8475
  Gene Symbol: IL4I1
  Gene Name: interleukin 4 induced 1
  ENSP ID: ENSP00000472786
MAPLALHLLVLVPILLSLVASQDWKAERSQDP

SEQ ID NO: 41610 - protein, 810 aa, Homo sapiens
  Payload ID: 8476
  Gene Symbol: IL4R
  Gene Name: interleukin 4 receptor
  Uniprot ID: P24394
  ENSP ID: ENSP00000170630
MQKDARREGNMKVLQEPTCVSDYMSISTCEWKMNGPTNCSTELRLLYQLVFLLSEAHTCIPENNGGAGCVCHLLMDDVVSADNYTLDLWAGQQLLWKGSFKPSEHVKPRAPGNLTVHTNVSDTLLLTWSNPYPPDNYLYNHLTYAVNIWSENDPADFRIYNVTYLEPSLRIAASTLKSGISYRARVRAWAQCYNTTWSEWSPSTKWHNSYREPFEQHLLLGVSVSCIVILAVCLLCYVSITKIKKEWWDQIPNPARSRLVAIIIQDAQGSQWEKRSRGQEPAKCPHWKNCLTKLLPCFLEHNMKRDEDPHKAAKEMPFQGSGKSAWCPVEISKTVLWPESISVVRCVELFEAPVECEEEEEVEEEKGSFCASPESSRDDFQEGREGIVARLTESLFLDLLGEENGGFCQQDMGESCLLPPSGSTSAHMPWDEFPSAGPKEAPPWGKEQPLHLEPSPPASPTQSPDNLTCTETPLVIAGNPAYRSFSNSLSQSPCPRELGPDPLLARHLEEVEPEMPCVPQLSEPTTVPQPEPETWEQILRRNVLQHGAAAAPVSAPTSGYQEFVHAVEQGGTQASAVVGLGPPGEAGYKAFSSLLASSAVSPEKCGFGASSGEEGYKPFQDLIPGCPGDPAPVPVPLFTFGLDREPPRSPQSSHLPSSSPEHLGLEPGEKVEDMPKPPLPQEQATDPLVDSLGSGIVYSALTCHLCGHLKQCHGQEDGGQTPVMASPCCGCCCGDRSSPPTTPLRAPDPSPGGVPLEASLCPASLAPSGISEKSKSSSSFHPAPGNAQSSSQTPKIVNFVSVGPTYMRVS

SEQ ID NO: 41611 - protein, 825 aa, Homo sapiens
  Payload ID: 8476
  Gene Symbol: IL4R
  Gene Name: interleukin 4 receptor
  Uniprot ID: P24394
  ENSP ID: ENSP00000379111
MGWLCSGLLFPVSCLVLLQVASSGNMKVLQEPTCVSDYMSISTCEWKMNGPTNCSTELRLLYQLVFLLSEAHTCIPENNGGAGCVCHLLMDDVVSADNYTLDLWAGQQLLWKGSFKPSEHVKPRAPGNLTVHTNVSDTLLLTWSNPYPPDNYLYNHLTYAVNIWSENDPADFRIYNVTYLEPSLRIAASTLKSGISYRARVRAWAQCYNTTWSEWSPSTKWHNSYREPFEQHLLLGVSVSCIVILAVCLLCYVSITKIKKEWWDQIPNPARSRLVAIIIQDAQGSQWEKRSRGQEPAKCPHWKNCLTKLLPCFLEHNMKRDEDPHKAAKEMPFQGSGKSAWCPVEISKTVLWPESISVVRCVELFEAPVECEEEEEVEEEKGSFCASPESSRDDFQEGREGIVARLTESLFLDLLGEENGGFCQQDMGESCLLPPSGSTSAHMPWDEFPSAGPKEAPPWGKEQPLHLEPSPPASPTQSPDNLTCTETPLVIAGNPAYRSFSNSLSQSPCPRELGPDPLLARHLEEVEPEMPCVPQLSEPTTVPQPEPETWEQILRRNVLQHGAAAAPVSAPTSGYQEFVHAVEQGGTQASAVVGLGPPGEAGYKAFSSLLASSAVSPEKCGFGASSGEEGYKPFQDLIPGCPGDPAPVPVPLFTFGLDREPPRSPQSSHLPSSSPEHLGLEPGEKVEDMPKPPLPQEQATDPLVDSLGSGIVYSALTCHLCGHLKQCHGQEDGGQTPVMASPCCGCCCGDRSSPPTTPLRAPDPSPGGVPLEASLCPASLAPSGISEKSKSSSSFHPAPGNAQSSSQTPKIVNFVSVGPTYMRVS

SEQ ID NO: 41612 - protein, 825 aa, Homo sapiens; identical to SEQ ID NO: 41611
  Payload ID: 8476
  Gene Symbol: IL4R
  Gene Name: interleukin 4 receptor
  Uniprot ID: P24394
  ENSP ID: ENSP00000441667

SEQ ID NO: 41613 - protein, 66 aa, Homo sapiens
  Payload ID: 8476
  Gene Symbol: IL4R
  Gene Name: interleukin 4 receptor
  ENSP ID: ENSP00000454684
MGWLCSGLLFPVSCLVLLQVASSGLFRMPCGERKRVEARRSGGRSGVEEMRGSGSLWEVDLRTDWN

SEQ ID NO: 41614 - protein, 10 aa, Homo sapiens
  Payload ID: 8476
  Gene Symbol: IL4R
  Gene Name: interleukin 4 receptor
  ENSP ID: ENSP00000454725
MGWLCSGLLF

SEQ ID NO: 41615 - protein, 120 aa, Homo sapiens
  Payload ID: 8476
  Gene Symbol: IL4R
  Gene Name: interleukin 4 receptor
  ENSP ID: ENSP00000455632
MGWLCSGLLFPVSCLVLLQVASSGNMKVLQEPTCVSDYMSISTCEWKMNGPTNCSTELRLLYQLVFLLSEAHTCIPENNGGAGCVCHLLMDDVVSADNYTLDLWAGQQLLWKGSFKPSEH

SEQ ID NO: 41616 - protein, 66 aa, Homo sapiens; identical to SEQ ID NO: 41613
  Payload ID: 8476
  Gene Symbol: IL4R
  Gene Name: interleukin 4 receptor
  ENSP ID: ENSP00000455714

SEQ ID NO: 41617 - protein, 124 aa, Homo sapiens
  Payload ID: 8476
  Gene Symbol: IL4R
  Gene Name: interleukin 4 receptor
  ENSP ID: ENSP00000456248
MGWLCSGLLFPVSCLVLLQVASSGNMKVLQEPTCVSDYMSISTCEWKMNGPTNCSTELRLLYQLVFLLSEAHTCIPENNGGAGCVCHLLMDDVVSADNYTLDLWAGQQLLWKGSFKPSEHVQNL

SEQ ID NO: 41618 - protein, 49 aa, Homo sapiens
  Payload ID: 8476
  Gene Symbol: IL4R
  Gene Name: interleukin 4 receptor
  ENSP ID: ENSP00000456669
  MOD_RES (1)..(1): Any amino acid
XCVCHLLMDDVVSADNYTLDLWAGQQLLWKGSFKPSEHVLPPLKRSWSQ

SEQ ID NO: 41619 - protein, 120 aa, Homo sapiens; identical to SEQ ID NO: 41615
  Payload ID: 8476
  Gene Symbol: IL4R
  Gene Name: interleukin 4 receptor
  ENSP ID: ENSP00000456930

SEQ ID NO: 41620 - protein, 63 aa, Homo sapiens
  Payload ID: 8476
  Gene Symbol: IL4R
  Gene Name: interleukin 4 receptor
  ENSP ID: ENSP00000457131
MGWLCSGLLFPVSCLVLLQVASSGNMKVLQEPTCVSDYMSISTCEWKMNGPTNCSTELRLLYQ

SEQ ID NO: 41621 - protein, 133 aa, Homo sapiens
  Payload ID: 8476
  Gene Symbol: IL4R
  Gene Name: interleukin 4 receptor
  ENSP ID: ENSP00000461268
PSTKWHNSYREPFEQHLLLGVSVSCIVILAVCLLCYVSITKIKKEWWDQIPNPARSRLVAIIIQDAQGSQWEKRSRGPWAPRLVNELLAAPSTASAADCPCCNCPRHVLPTRSWPTWRPTCLCLTELEAEPRN

SEQ ID NO: 41622 - protein, 193 aa, Homo sapiens
  Payload ID: 8476
  Gene Symbol: IL4R
  Gene Name: interleukin 4 receptor
  ENSP ID: ENSP00000461607
  MOD_RES (1)..(1): Any amino acid
XNVTYLEPSLRIAASTLKSGISYRARVRAWAQCYNTTWSEWSPSTKWHNSYREPFEQHLLLGVSVSCIVILAVCLLCYVSITKIKKEWWDQIPNPARSRLVAIIIQDAQGSQWEKRSRGQEPAKCPLQGTAGGGVFWKRGLLAKPPEFHWCVRHWKNCLTKLLPCFLEHNMKRDEDPHKAAKEMPFQGSGKSA

SEQ ID NO: 41623 - protein, 66 aa, Homo sapiens; identical to SEQ ID NO: 41613
  Payload ID: 8476
  Gene Symbol: IL4R
  Gene Name: interleukin 4 receptor
  ENSP ID: ENSP00000486645

SEQ ID NO: 41624 - protein, 134 aa, Homo sapiens
  Payload ID: 8477
  Gene Symbol: IL5
  Gene Name: interleukin 5
  Uniprot ID: P05113
  ENSP ID: ENSP00000231454
MRMLLHLSLLALGAAYVYAIPTEIPTSALVKETLALLSTHRTLLIANETLRIPVPVHKNHQLCTEEIFQGIGTLESQTVQGGTVERLFKNLSLIKKYIDGQKKKCGEERRRVNQFLDYLQEFLGVMNTEWIIES

SEQ ID NO: 41625 - protein, 51 aa, Homo sapiens
  Payload ID: 8477
  Gene Symbol: IL5
  Gene Name: interleukin 5
  ENSP ID: ENSP00000409825
MGVVVGWIGDPGSGTLRIPVPVHKNHQLCTEEIFQGIGTLESQTVQGGTVE

SEQ ID NO: 41626 - protein, 420 aa, Homo sapiens
  Payload ID: 8478
  Gene Symbol: IL5RA
  Gene Name: interleukin 5 receptor, alpha
  Uniprot ID: Q01344
  ENSP ID: ENSP00000256452
MIIVAHVLLILLGATEILQADLLPDEKISLLPPVNFTIKVTGLAQVLLQWKPNPDQEQRNVNLEYQVKINAPKEDDYETRITESKCVTILHKGFSASVRTILQNDHSLLASSWASAELHAPPGSPGTSIVNLTCTTNTTEDNYSRLRSYQVSLHCTWLVGTDAPEDTQYFLYYRYGSWTEECQEYSKDTLGRNIACWFPRTFILSKGRDWLAVLVNGSSKHSAIRPFDQLFALHAIDQINPPLNVTAEIEGTRLSIQWEKPVSAFPIHCFDYEVKIHNTRNGYLQIEKLMTNAFISIIDDLSKYDVQVRAAVSSMCREAGLWSEWSQPIYVGNDEHKPLREWFVIVIMATICFILLILSLICKICHLWIKLFPPIPAPKSNIKDLFVTTNYEKAGSSETEIEVICYIEKPGVETLEDSVF

SEQ ID NO: 41627 - protein, 335 aa, Homo sapiens
  Payload ID: 8478
  Gene Symbol: IL5RA
  Gene Name: interleukin 5 receptor, alpha
  Uniprot ID: Q01344
  ENSP ID: ENSP00000309196
MIIVAHVLLILLGATEILQADLLPDEKISLLPPVNFTIKVTGLAQVLLQWKPNPDQEQRNVNLEYQVKINAPKEDDYETRITESKCVTILHKGFSASVRTILQNDHSLLASSWASAELHAPPGSPGTSIVNLTCTTNTTEDNYSRLRSYQVSLHCTWLVGTDAPEDTQYFLYYRYGSWTEECQEYSKDTLGRNIACWFPRTFILSKGRDWLAVLVNGSSKHSAIRPFDQLFALHAIDQINPPLNVTAEIEGTRLSIQWEKPVSAFPIHCFDYEVKIHNTRNGYLQIEKLMTNAFISIIDDLSKYDVQVRAAVSSMCREAGLWSEWSQPIYVGFSR

SEQ ID NO: 41628 - protein, 335 aa, Homo sapiens; identical to SEQ ID NO: 41627
  Payload ID: 8478
  Gene Symbol: IL5RA
  Gene Name: interleukin 5 receptor, alpha
  Uniprot ID: Q01344
  ENSP ID: ENSP00000373358

SEQ ID NO: 41629 - protein, 325 aa, Homo sapiens
  Payload ID: 8478
  Gene Symbol: IL5RA
  Gene Name: interleukin 5 receptor, alpha
  ENSP ID: ENSP00000388858
MIIVAHVLLILLGATEILQADLLPDEKISLLPPVNFTIKVTGLAQVLLQWKPNPDQEQRNVNLEYQVKINAPKEDDYETRITESKCVTILHKGFSASVRTILQNDHSLLASSWASAELHAPPGSPGTSIVNLTCTTNTTEDNYSRLRSYQVSLHCTWLVGTDAPEDTQYFLYYRYGSWTEECQEYSKDTLGRNIACWFPRTFILSKGRDWLAVLVNGSSKHSAIRPFDQLFALHAIGNDEHKPLREWFVIVIMATICFILLILSLICKICHLWIKLFPPIPAPKSNIKDLFVTTNYEKAGSSETEIEVICYIEKPGVETLEDSVF

SEQ ID NO: 41630 - protein, 378 aa, Homo sapiens
  Payload ID: 8478
  Gene Symbol: IL5RA
  Gene Name: interleukin 5 receptor, alpha
  Uniprot ID: Q01344
  ENSP ID: ENSP00000390753
MIIVAHVLLILLGATEILQADLLPDEKISLLPPVNFTIKVTGLAQVLLQWKPNPDQEQRNVNLEYQVKINAPKEDDYETRITESKCVTILHKGFSASVRTILQNDHSLLASSWASAELHAPPGSPGTSIVNLTCTTNTTEDNYSRLRSYQVSLHCTWLVGTDAPEDTQYFLYYRYGSWTEECQEYSKDTLGRNIACWFPRTFILSKGRDWLAVLVNGSSKHSAIRPFDQLFALHAIDQINPPLNVTAEIEGTRLSIQWEKPVSAFPIHCFDYEVKIHNTRNGYLQIEKLMTNAFISIIDDLSKYDVQVRAAVSSMCREAGLWSEWSQPIYVGNDEHKPLREWFVIVIMATICFILLILSLICKIKLGPVRRKLKSSVI

SEQ ID NO: 41631 - protein, 109 aa, Homo sapiens
  Payload ID: 8478
  Gene Symbol: IL5RA
  Gene Name: interleukin 5 receptor, alpha
  ENSP ID: ENSP00000391274
MIIVAHVLLILLGATEILQADLLPDEKISLLPPVNFTIKVTGLAQVLLQWKPNPDQEQRNVNLEYQVKINAPKEDDYETRITESKCVTILHKGFSASVRTILQNDHSLL

SEQ ID NO: 41632 - protein, 333 aa, Homo sapiens
  Payload ID: 8478
  Gene Symbol: IL5RA
  Gene Name: interleukin 5 receptor, alpha
  Uniprot ID: Q01344
  ENSP ID: ENSP00000392059
MIIVAHVLLILLGATEILQADLLPDEKISLLPPVNFTIKVTGLAQVLLQWKPNPDQEQRNVNLEYQVKINAPKEDDYETRITESKCVTILHKGFSASVRTILQNDHSLLASSWASAELHAPPGSPGTSIVNLTCTTNTTEDNYSRLRSYQVSLHCTWLVGTDAPEDTQYFLYYRYGSWTEECQEYSKDTLGRNIACWFPRTFILSKGRDWLAVLVNGSSKHSAIRPFDQLFALHAIDQINPPLNVTAEIEGTRLSIQWEKPVSAFPIHCFDYEVKIHNTRNGYLQIEKLMTNAFISIIDDLSKYDVQVRAAVSSMCREAGLWSEWSQPIYVGK

SEQ ID NO: 41633 - protein, 196 aa, Homo sapiens
  Payload ID: 8478
  Gene Symbol: IL5RA
  Gene Name: interleukin 5 receptor, alpha
  ENSP ID: ENSP00000398117
MIIVAHVLLILLGATEILQADLLPDEKISLLPPVNFTIKVTGLAQVLLQWKPNPDQEQRNVNLEYQVKINAPKEDDYETRITESKCVTILHKGFSASVRTILQNDHSLLASSWASAELHAPPGSPGTSIVNLTCTTNTTEDNYSRLRSYQVSLHCTWLVGTDAPEDTQYFLYYRYGSWTEECQEYSKDTLGRNIAC

SEQ ID NO: 41634 - protein, 333 aa, Homo sapiens; identical to SEQ ID NO: 41632
  Payload ID: 8478
  Gene Symbol: IL5RA
  Gene Name: interleukin 5 receptor, alpha
  Uniprot ID: Q01344
  ENSP ID: ENSP00000400400

SEQ ID NO: 41635 - protein, 420 aa, Homo sapiens; identical to SEQ ID NO: 41626
  Payload ID: 8478
  Gene Symbol: IL5RA
  Gene Name: interleukin 5 receptor, alpha
  Uniprot ID: Q01344
  ENSP ID: ENSP00000412209

SEQ ID NO: 41636 - protein, 212 aa, Homo sapiens
  Payload ID: 8479
  Gene Symbol: IL6
  Gene Name: interleukin 6
  Uniprot ID: P05231
  ENSP ID: ENSP00000258743
MNSFSTSAFGPVAFSLGLLLVLPAAFPAPVPPGEDSKDVAAPHRQPLTSSERIDKQIRYILDGISALRKETCNKSNMCESSKEALAENNLNLPKMAEKDGCFQSGFNEETCLVKIITGLLEFEVYLEYLQNRFESSEEQARAVQMSTKVLIQFLQKKAKNLDAITTPDPTTNASLLTKLQAQNQWLQDMTTHLILRSFKEFLQSSLRALRQM

SEQ ID NO: 41637 - protein, 189 aa, Homo sapiens
  Payload ID: 8479
  Gene Symbol: IL6
  Gene Name: interleukin 6
  ENSP ID: ENSP00000384928
MNSFSTIPPGEDSKDVAAPHRQPLTSSERIDKQIRYILDGISALRKETCNKSNMCESSKEALAENNLNLPKMAEKDGCFQSGFNEETCLVKIITGLLEFEVYLEYLQNRFESSEEQARAVQMSTKVLIQFLQKKAKNLDAITTPDPTTNASLLTKLQAQNQWLQDMTTHLILRSFKEFLQSSLRALRQM

SEQ ID NO: 41638 - protein, 136 aa, Homo sapiens
  Payload ID: 8479
  Gene Symbol: IL6
  Gene Name: interleukin 6
  ENSP ID: ENSP00000385043
MCESSKEALAENNLNLPKMAEKDGCFQSGFNEETCLVKIITGLLEFEVYLEYLQNRFESSEEQARAVQMSTKVLIQFLQKKAKNLDAITTPDPTTNASLLTKLQAQNQWLQDMTTHLILRSFKEFLQSSLRALRQM

SEQ ID NO: 41639 - protein, 198 aa, Homo sapiens
  Payload ID: 8479
  Gene Symbol: IL6
  Gene Name: interleukin 6
  ENSP ID: ENSP00000385227
MNSFSTSAFGPVAFSLGLLLVLPAAFPAPVPPGEDSKDVAAPHRQPLTSSERIDKQIRYILDGISALRKETCNKSNMCESSKEALAENNLNLPKMAEKDGCFQSGFNEETCLVKIITGLLEFEVYLEYLQNRFESSEEQARAVQMSTKVLIQFLQKKVGVSSFPQLGVGEDRLKDSVLDNSGMQCHFQKRRLHVNKRV

SEQ ID NO: 41640 - protein, 212 aa, Homo sapiens; identical to SEQ ID NO: 41636
  Payload ID: 8479
  Gene Symbol: IL6
  Gene Name: interleukin 6
  Uniprot ID: P05231
  ENSP ID: ENSP00000385675

SEQ ID NO: 41641 - protein, 122 aa, Homo sapiens
  Payload ID: 8479
  Gene Symbol: IL6
  Gene Name: interleukin 6
  ENSP ID: ENSP00000385718
MCESSKEALAENNLNLPKMAEKDGCFQSGFNEETCLVKIITGLLEFEVYLEYLQNRFESSEEQARAVQMSTKVLIQFLQKKVGVSSFPQLGVGEDRLKDSVLDNSGMQCHFQKRRLHVNKRV

SEQ ID NO: 41642 - protein, 152 aa, Homo sapiens
  Payload ID: 8479
  Gene Symbol: IL6
  Gene Name: interleukin 6
  ENSP ID: ENSP00000405150
MNSFSTSAFGPVAFSLGLLLVLPAAFPAPVPPGEDSKDVAAPHRQPLTSSERIDKQIRYILDGISALRKETCNKSNMCESSKEALAENNLNLPKMAEKDGCFQSGFNEETCLVKIITGLLEFEVYLEYLQNRFESSEEQARAVQMSTKVLIQ

SEQ ID NO: 41643 - protein, 365 aa, Homo sapiens [sequence omitted]

SEQ ID NO: 41644 - protein, 468 aa, Homo sapiens
  Payload ID: 8480
  Gene Symbol: IL6R
  Gene Name: interleukin 6 receptor
  Uniprot ID: P08887
  ENSP ID: ENSP00000357470
MLAVGCALLAALLAAPGAALAPRRCPAQEVARGVLTSLPGDSVTLTCPGVEPEDNATVHWVLRKPAAGSHPSRWAGMGRRLLLRSVQLHDSGNYSCYRAGRPAGTVHLLVDVPPEEPQLSCFRKSPLSNVVCEWGPRSTPSLTTKAVLLVRKFQNSPAEDFQEPCQYSQESQKFSCQLAVPEGDSSFYIVSMCVASSVGSKFSKTQTFQGCGILQPDPPANITVTAVARNPRWLSVTWQDPHSWNSSFYRLRFELRYRAERSKTFTTWMVKDLQHHCVIHDAWSGLRHVVQLRAQEEFGQGEWSEWSPEAMGTPWTESRSPPAENEVSTPMQALTTNKDDDNILFRDSANATSLPVQDSSSVPLPTFLVAGGSLAFGTLLCIAIVLRFKKTWKLRALKEGKTSMHPPYSLGQLVPERPRPTPVLVPLISPPVSPSSLGSDNTSSHNRPDARDPRSPYDISNTDYFFPR

SEQ ID NO: 41645 - protein, 190 aa, Homo sapiens
  Payload ID: 8480
  Gene Symbol: IL6R
  Gene Name: interleukin 6 receptor
  ENSP ID: ENSP00000423036
  MOD_RES (1)..(1): Any amino acid
XGSKFSKTQTFQGCGILQPDPPANITVTAVARNPRWLSVTWQDPHSWNSSFYRLRFELRYRAERSKTFTTWMVKDLQHHCVIHDAWSGLRHVVQLRAQEEFGQGEWSEWSPEAMGTPWTESRSPPAENEVSTPMQALTTNKDDDNILFRDSANATSLPVQDSSSVPLPTFLVAGGSLAFGTLLCIAIVLR

SEQ ID NO: 41646 - protein, 170 aa, Homo sapiens
  Payload ID: 8480
  Gene Symbol: IL6R
  Gene Name: interleukin 6 receptor
  ENSP ID: ENSP00000423184
MLAVGCALLAALLAAPGAALAPRRCPAQEVARGVLTSLPGDSVTLTCPGVEPEDNATVHWVLRKPAAGSHPSRWAGMGRRLLLRSVQLHDSGNYSCYRAGRPAGTVHLLVDVPPEEPQLSCFRKSPLSNVVCEWGPRSTPSLTTKAVLLSEQSGRRLPGAVPVFPGVPEV

SEQ ID NO: 41647 - protein, 294 aa, Homo sapiens
  Payload ID: 8480
  Gene Symbol: IL6R
  Gene Name: interleukin 6 receptor
  ENSP ID: ENSP00000423668
  MOD_RES (1)..(1): Any amino acid
XRRLLLRSVQLHDSGNYSCYRAGRPAGTVHLLVDVPPEEPQLSCFRKSPLSNVVCEWGPRSTPSLTTKAVLLVRKFQNSPAEDFQEPCQYSQESQKFSCQLAVPEGDSSFYIVSMCVASSVGSKFSKTQTFQGCGILQPDPPANITVTAVARNPRWLSVTWQDPHSWNSSFYRLRFELRYRAERSKTFTTWMVKDLQHHCVIHDAWSGLRHVVQLRAQEEFGQGEWSEWSPEAMGTPWTGFSPQTIPGGIWDPAGESRSPPAENEVSTPMQALTTNKDDDNILFRDSANATSLP

SEQ ID NO: 41648 - protein, 352 aa, Homo sapiens
  Payload ID: 8480
  Gene Symbol: IL6R
  Gene Name: interleukin 6 receptor
  ENSP ID: ENSP00000477739
MLAVGCALLAALLAAPGAALAPRRCPAQEVARGVLTSLPGDSVTLTCPGVEPEDNATVHWVLRKPAAGSHPSRWAGMGRRLLLRSVQLHDSGNYSCYRAGRPAGTVHLLVDVPPEEPQLSCFRKSPLSNVVCEWGPRSTPSLTTKAVLLVRKFQNSPAEDFQEPCQYSQESQKFSCQLAVPEGDSSFYIVSMCVASSVGSKFSKTQTFQGCGILQPDPPANITVTAVARNPRWLSVTWQDPHSWNSSFYRLRFELRYRAERSKTFTTWMVKDLQHHCVIHDAWSGLRHVVQLRAQEEFGQGEWSEWSPEAMGTPWTDRLSPRCPGWSTAVQSQLTATSASWVQAILPPQPPK

SEQ ID NO: 41649 - protein, 918 aa, Homo sapiens
  Payload ID: 8481
  Gene Symbol: IL6ST
  Gene Name: interleukin 6 signal transducer
  Uniprot ID: P40189
  ENSP ID: ENSP00000338799
MLTLQTWLVQALFIFLTTESTGELLDPCGYISPESPVVQLHSNFTAVCVLKEKCMDYFHVNANYIVWKTNHFTIPKEQYTIINRTASSVTFTDIASLNIQLTCNILTFGQLEQNVYGITIISGLPPEKPKNLSCIVNEGKKMRCEWDGGRETHLETNFTLKSEWATHKFADCKAKRDTPTSCTVDYSTVYFVNIEVWVEAENALGKVTSDHINFDPVYKVKPNPPHNLSVINSEELSSILKLTWTNPSIKSVIILKYNIQYRTKDASTWSQIPPEDTASTRSSFTVQDLKPFTEYVFRIRCMKEDGKGYWSDWSEEASGITYEDRPSKAPSFWYKIDPSHTQGYRTVQLVWKTLPPFEANGKILDYEVTLTRWKSHLQNYTVNATKLTVNLTNDRYLATLTVRNLVGKSDAAVLTIPACDFQATHPVMDLKAFPKDNMLWVEWTTPRESVKKYILEWCVLSDKAPCITDWQQEDGTVHRTYLRGNLAESKCYLITVTPVYADGPGSPESIKAYLKQAPPSKGPTVRTKKVGKNEAVLEWDQLPVDVQNGFIRNYTIFYRTIIGNETAVNVDSSHTEYTLSSLTSDTLYMVRMAAYTDEGGKDGPEFTFTTPKFAQGEIEAIVVPVCLAFLLTTLLGVLFCFNKRDLIKKHIWPNVPDPSKSHIAQWSPHTPPRHNFNSKDQMYSDGNFTDVSVVEIEANDKKPFPEDLKSLDLFKKEKINTEGHSSGIGGSSCMSSSRPSISSSDENESSQNTSSTVQYSTVVHSGYRHQVPSVQVFSRSESTQPLLDSEERPEDLQLVDHVDGGDGILPRQQYFKQNCSQHESSPDISHFERSKQVSSVNEEDFVRLKQQISDHISQSCGSGQMKMFQEVSAADAFGPGTEGQVERFETVGMEAATDEGMPKSYLPQTVRQGGYMPQ

SEQ ID NO: 41650 - protein, 66 aa, Homo sapiens
  Payload ID: 8481
  Gene Symbol: IL6ST
  Gene Name: interleukin 6 signal transducer
  ENSP ID: ENSP00000370686
MLTLQTWLVQALFIFLTTESTELKNTSGLMFQILQRVILPSGHLTLLQGTILIQKIKCIQMAISLM

SEQ ID NO: 41651 - protein, 329 aa, Homo sapiens
  Payload ID: 8481
  Gene Symbol: IL6ST
  Gene Name: interleukin 6 signal transducer
  Uniprot ID: P40189
  ENSP ID: ENSP00000370687
MLTLQTWLVQALFIFLTTESTGELLDPCGYISPESPVVQLHSNFTAVCVLKEKCMDYFHVNANYIVWKTNHFTIPKEQYTIINRTASSVTFTDIASLNIQLTCNILTFGQLEQNVYGITIISGLPPEKPKNLSCIVNEGKKMRCEWDGGRETHLETNFTLKSEWATHKFADCKAKRDTPTSCTVDYSTVYFVNIEVWVEAENALGKVTSDHINFDPVYKVKPNPPHNLSVINSEELSSILKLTWTNPSIKSVIILKYNIQYRTKDASTWSQIPPEDTASTRSSFTVQDLKPFTEYVFRIRCMKEDGKGYWSDWSEEASGITYEDNIASF

SEQ ID NO: 41652 - protein, 203 aa, Homo sapiens
  Payload ID: 8481
  Gene Symbol: IL6ST
  Gene Name: interleukin 6 signal transducer
  ENSP ID: ENSP00000370693
MLTLQTWLVQALFIFLTTESTGELLDPCGYISPESPVVQLHSNFTAVCVLKEKLKPNPPHNLSVINSEELSSILKLTWTNPSIKSVIILKYNIQYRTKDASTWSQIPPEDTASTRSSFTVQDLKPFTEYVFRIRCMKEDGKGYWSDWSEEASGITYEDKLKNTSGLMFQILQRVILPSGHLTLLQGTILIQKIKCIQMAISLM

SEQ ID NO: 41653 - protein, 857 aa, Homo sapiens
  Payload ID: 8481
  Gene Symbol: IL6ST
  Gene Name: interleukin 6 signal transducer
  Uniprot ID: P40189
  ENSP ID: ENSP00000370694
MLTLQTWLVQALFIFLTTESTGELLDPCGYISPESPVVQLHSNFTAVCVLKEKCMDYFHVNANYIVWKTNHFTIPKEQYTIINRTASSVTFTDIASLNIQLTCNILTFGQLEQNVYGITIISGLPPEKPKNLSCIVNEGKKMRCEWDGGRETHLETNFTLKSEWATHKFADCKAKRDTPTSCTVDYSTVYFVNIEVWVEAENALGKVTSDHINFDPVYKVKPNPPHNLSVINSEELSSILKLTWTNPSIKSVIILKYNIQYRTKDASTWSQIPPEDTASTRSSFTVQDLKPFTEYVFRIRCMKEDGKGYWSDWSEEASGITYEDRPSKAPSFWYKIDPSHTQGYRTVQLVWKTLPPFEANGKILDYEVTLTRWKSHLQNYTVNATKLTVNLTNDRYLATLTVRNLVGKSDAAVLTIPACDFQGNLAESKCYLITVTPVYADGPGSPESIKAYLKQAPPSKGPTVRTKKVGKNEAVLEWDQLPVDVQNGFIRNYTIFYRTIIGNETAVNVDSSHTEYTLSSLTSDTLYMVRMAAYTDEGGKDGPEFTFTTPKFAQGEIEAIVVPVCLAFLLTTLLGVLFCFNKRDLIKKHIWPNVPDPSKSHIAQWSPHTPPRHNFNSKDQMYSDGNFTDVSVVEIEANDKKPFPEDLKSLDLFKKEKINTEGHSSGIGGSSCMSSSRPSISSSDENESSQNTSSTVQYSTVVHSGYRHQVPSVQVFSRSESTQPLLDSEERPEDLQLVDHVDGGDGILPRQQYFKQNCSQHESSPDISHFERSKQVSSVNEEDFVRLKQQISDHISQSCGSGQMKMFQEVSAADAFGPGTEGQVERFETVGMEAATDEGMPKSYLPQTVRQGGYMPQ

SEQ ID NO: 41654 - protein, 918 aa, Homo sapiens; identical to SEQ ID NO: 41649
  Payload ID: 8481
  Gene Symbol: IL6ST
  Gene Name: interleukin 6 signal transducer
  Uniprot ID: P40189
  ENSP ID: ENSP00000370698

SEQ ID NO: 41655 - protein, 333 aa, Homo sapiens
  Payload ID: 8481
  Gene Symbol: IL6ST
  Gene Name: interleukin 6 signal transducer
  ENSP ID: ENSP00000426224
MLTLQTWLVQALFIFLTTESTGELLDPCGYISPESPVVQLHSNFTAVCVLKEKCMDYFHVNANYIVWKTNHFTIPKEQYTIINRTASSVTFTDIASLNIQLTCNILTFGQLEQNVYGITIISGLPPEKPKNLSCIVNEGKKMRCEWDGGRETHLETNFTLKSEWATHKFADCKAKRDTPTSCTVDYSTVYFVNIEVWVEAENALGKVTSDHINFDPVYKVKPNPPHNLSVINSEELSSILKLTWTNPSIKSVIILKYNIQYRTKDASTWSQIPPEDTASTRSSFTVQDLKPFTEYVFRIRCMKEDGKGYWSDWSEEASGITYEDTLDKPLGSG

SEQ ID NO: 41656 - protein, 329 aa, Homo sapiens; identical to SEQ ID NO: 41651
  Payload ID: 8481
  Gene Symbol: IL6ST
  Gene Name: interleukin 6 signal transducer
  Uniprot ID: P40189
  ENSP ID: ENSP00000435399

SEQ ID NO: 41657 - protein, 918 aa, Homo sapiens; identical to SEQ ID NO: 41649
  Payload ID: 8481
  Gene Symbol: IL6ST
  Gene Name: interleukin 6 signal transducer
  Uniprot ID: P40189
  ENSP ID: ENSP00000462158

SEQ ID NO: 41658 - protein, 55 aa, Homo sapiens
  Payload ID: 8481
  Gene Symbol: IL6ST
  Gene Name: interleukin 6 signal transducer
  ENSP ID: ENSP00000463896
MLTLQTWLVQALFIFLTTESTGQHTSLLIAKQNVTPPPHALLIILLCILSTLKSG

SEQ ID NO: 41659 - protein, 177 aa, Homo sapiens
  Payload ID: 8482
  Gene Symbol: IL7
  Gene Name: interleukin 7
  Uniprot ID: P13232
  ENSP ID: ENSP00000263851
MFHVSFRYIFGLPPLILVLLPVASSDCDIEGKDGKQYESVLMVSIDQLLDSMKEIGSNCLNNEFNFFKRHICDANKEGMFLFRAARKLRQFLKMNSTGDFDLHLLKVSEGTTILLNCTGQVKGRKPAALGEAQPTKSLEENKSLKEQKKLNDLCFLKRLLQEIKTCWNKILMGTKEH

SEQ ID NO: 41660 - protein, 115 aa, Homo sapiens
  Payload ID: 8482
  Gene Symbol: IL7
  Gene Name: interleukin 7
  ENSP ID: ENSP00000368408
MFHVSFRYIFGLPPLILVLLPVASSDCDIEGKDGKQYESVLMVSIDQLLDSMKEIGSNCLNNEFNFFKRHICDANKEENKSLKEQKKLNDLCFLKRLLQEIKTCWNKILMGTKEH

SEQ ID NO: 41661 - protein, 133 aa, Homo sapiens
  Payload ID: 8482
  Gene Symbol: IL7
  Gene Name: interleukin 7
  Uniprot ID: P13232
  ENSP ID: ENSP00000427750
MFHVSFRYIFGLPPLILVLLPVASSDCDIEGKDGKQYESVLMVSIDQLLDSMKEIGSNCLNNEFNFFKRHICDANKVKGRKPAALGEAQPTKSLEENKSLKEQKKLNDLCFLKRLLQEIKTCWNKILMGTKEH

SEQ ID NO: 41662 - protein, 37 aa, Homo sapiens
  Payload ID: 8482
  Gene Symbol: IL7
  Gene Name: interleukin 7
  ENSP ID: ENSP00000427800
MFHVSFRYIFGLPPLILVLLPVASSDCDIEGQHERNW

SEQ ID NO: 41663 - protein, 37 aa, Homo sapiens; identical to SEQ ID NO: 41662
  Payload ID: 8482
  Gene Symbol: IL7
  Gene Name: interleukin 7
  ENSP ID: ENSP00000428364

SEQ ID NO: 41664 - protein, 71 aa, Homo sapiens
  Payload ID: 8482
  Gene Symbol: IL7
  Gene Name: interleukin 7
  ENSP ID: ENSP00000430272
MFHVSFRYIFGLPPLILVLLPVASSDCDIEGKDGKQYESVLMVSIDQLLNQPYKKKEKRTERKQQSAMSNN

SEQ ID NO: 41665 - protein, 159 aa, Homo sapiens
  Payload ID: 8482
  Gene Symbol: IL7
  Gene Name: interleukin 7
  ENSP ID: ENSP00000438922
MFHVSFRYIFGLPPLILVLLPVASSDCDIEGKDGKQYESVLMVSIDQLLDSMKEIGSNCLNNEFNFFKRHICDANKEGMFLFRAARKLRQFLKMNSTGDFDLHLLKVSEGTTILLNCTGQEENKSLKEQKKLNDLCFLKRLLQEIKTCWNKILMGTKEH

SEQ ID NO: 41666 - protein, 459 aa, Homo sapiens
  Payload ID: 8483
  Gene Symbol: IL7R
  Gene Name: interleukin 7 receptor
  Uniprot ID: P16871
  ENSP ID: ENSP00000306157
MTILGTTFGMVFSLLQVVSGESGYAQNGDLEDAELDDYSFSCYSQLEVNGSQHSLTCAFEDPDVNITNLEFEICGALVEVKCLNFRKLQEIYFIETKKFLLIGKSNICVKVGEKSLTCKKIDLTTIVKPEAPFDLSVVYREGANDFVVTFNTSHLQKKYVKVLMHDVAYRQEKDENKWTHVNLSSTKLTLLQRKLQPAAMYEIKVRSIPDHYFKGFWSEWSPSYYFRTPEINNSSGEMDPILLTISILSFFSVALLVILACVLWKKRIKPIVWPSLPDHKKTLEHLCKKPRKNLNVSFNPESFLDCQIHRVDDIQARDEVEGFLQDTFPQQLEESEKQRLGGDVQSPNCPSEDVVITPESFGRDSSLTCLAGNVSACDAPILSSSRSLDCRESGKNGPHVYQDLLLSLGTTNSTLPPPFSLQSGILTLNPVAQGQPILTSLGSNQEEAYVTMSSFYQNQ

SEQ ID NO: 41667 - protein, 261 aa, Homo sapiens
  Payload ID: 8483
  Gene Symbol: IL7R
  Gene Name: interleukin 7 receptor
  ENSP ID: ENSP00000421207
MTILGTTFGMVFSLLQVVSGESGYAQNGDLEDAELDDYSFSCYSQLEVNGSQHSLTCAFEDPDVNITNLEFEICGALVEVKCLNFRKLQEIYFIETKKFLLIGKSNICVKVGEKSLTCKKIDLTTIVKPEAPFDLSVVYREGANDFVVTFNTSHLQKKYVKVLMHDVAYRQEKDENKWTHVNLSSTKLTLLQRKLQPAAMYEIKVRSIPDHYFKGFWSEWSPSYYFRTPEINNSSGLSLSYGPVSPIIRRLWNIFVRNQEK

SEQ ID NO: 41668 - protein, 150 aa, Homo sapiens
  Payload ID: 8483
  Gene Symbol: IL7R
  Gene Name: interleukin 7 receptor
  ENSP ID: ENSP00000425309
MTILGTTFGMVFSLLQVVSGESGYAQNGDLEDAELDDYSFSCYSQLEVNGSQHSLTCAFEDPDVNITNLEFEICGALVEVKCLNFRKLQEIYFIETKKFLLIGKSNICVKVGEKSLTCKKIDLTTIGKKLYIKVWLSLLGYLKTLCLDIL

SEQ ID NO: 41669 - protein, 52 aa, Homo sapiens
  Payload ID: 8483
  Gene Symbol: IL7R
  Gene Name: interleukin 7 receptor
  ENSP ID: ENSP00000425538
MTILGTTFGMVFSLLQVVSGESGYAQNGDLEDAELDDYSFSCYSQLEVNGSQ

SEQ ID NO: 41670 - protein, 65 aa, Homo sapiens
  Payload ID: 8483
  Gene Symbol: IL7R
  Gene Name: interleukin 7 receptor
  ENSP ID: ENSP00000426069
AAMYEIKVRSIPDHYFKGFWSEWSPSYYFRTPEINNSSGLSLSYGPVSPIIRRLWNIFVRNQEKI

SEQ ID NO: 41671 - protein, 59 aa, Homo sapiens
  Payload ID: 8483
  Gene Symbol: IL7R
  Gene Name: interleukin 7 receptor
  ENSP ID: ENSP00000426426
MTILGTTFGMVFSLLQVVSGESGYAQNGDLEDAELDDYSFSCYSQLEVNGSQHSLTCAF

SEQ ID NO: 41672 - protein, 180 aa, Homo sapiens
  Payload ID: 8483
  Gene Symbol: IL7R
  Gene Name: interleukin 7 receptor
  ENSP ID: ENSP00000427688
MTILGTTFGMVFSLLQVVSGESGYAQNGDLEDAELDDYSFSCYSQLEVNGSQHSLTCAFEDPDVNITNLEFEICGALVEVKCLNFRKLQEIYFIETKKFLLIGKSNICVKVGEKSLTCKKIDLTTIVKPEAPFDLSVVYREGANDFVVTFNTSHLQKKYVKVLMHDVAYRQEKDENKWTD

SEQ ID NO: 41673 - protein, 144 aa, Homo sapiens
  Payload ID: 8484
  Gene Symbol: IL9
  Gene Name: interleukin 9
  Uniprot ID: P15248
  ENSP ID: ENSP00000274520
MLLAMVLTSALLLCSVAGQGCPTLAGILDINFLINKMQEDPASKCHCSANVTSCLCLGIPSDNCTRPCFSERLSQMTNTTMQTRYPLIFSRVKKSVEVLKNNKCPYFSCEQPCNQTTAGNALTFLKSLLEIFQKEKMRGMRGKI

SEQ ID NO: 41674 - protein, 521 aa, Homo sapiens
  Payload ID: 8485
  Gene Symbol: IL9R
  Gene Name: interleukin 9 receptor
  Uniprot ID: Q01113
  ENSP ID: ENSP00000244174
MGLGRCIWEGWTLESEALRRDMGTWLLACICICTCVCLGVSVTGEGQGPRSRTFTCLTNNILRIDCHWSAPELGQGSSPWLLFTSNQAPGGTHKCILRGSECTVVLPPEAVLVPSDNFTITFHHCMSGREQVSLVDPEYLPRRHVKLDPPSDLQSNISSGHCILTWSISPALEPMTTLLSYELAFKKQEEAWEQAQHRDHIVGVTWLILEAFELDPGFIHEARLRVQMATLEDDVVEEERYTGQWSEWSQPVCFQAPQRQGPLIPPWGWPGNTLVAVSIFLLLTGPTYLLFKLSPRVKRIFYQNVPSPAMFFQPLYSVHNGNFQTWMGAHGAGVLLSQDCAGTPQGALEPCVQEATALLTCGPARPWKSVALEEEQEGPGTRLPGNLSSEDVLPAGCTEWRVQTLAYLPQEDWAPTSLTRPAPPDSEGSRSSSSSSSSNNNNYCALGCYGGWHLSALPGNTQSSGPIPALACGLSCDHQGLETQQGVAWVLAGHCQRPGLHEDLQGMLLPSVLSKARSWTF

SEQ ID NO: 41675 - protein, 342 aa, Homo sapiens
  Payload ID: 8485
  Gene Symbol: IL9R
  Gene Name: interleukin 9 receptor
  Uniprot ID: Q01113
  ENSP ID: ENSP00000358431
MPQTCDGTGQMHLGSNCCKNGQTLLQRTCHGVSCCGWWFQAARSILGKGPSAQSLAGWTLESEALRRDMGTWLLACICICTCVCLGVSVTGEGQGPRSRTFTCLTNNILRIDCHWSAPELGQGSSPWLLFTRLLAAHISASCGAVSAPSCCHLRQCSCHLTISPSLSTTACLGGSRSAWWTRSTCPGDTSNISSGHCILTWSISPALEPMTTLLSYELAFKKQEEAWEQAQHRDHIVGVTWLILEAFELDPGFIHEARLRVQMATLEDDVVEEERYTGQWSEWSQPVCFQAPQRQGPLIPPWGWPGNTLVAVSIFLLLTGPTYLLFKLSPRLGWGPTGPVCC

SEQ ID NO: 41676 - protein, 390 aa, Homo sapiens
  Payload ID: 8486
  Gene Symbol: ILF2
  Gene Name: interleukin enhancer binding factor 2
  Uniprot ID: Q12905
  ENSP ID: ENSP00000355011
MRGDRGRGRGGRFGSRGGPGGGFRPFVPHIPFDFYLCEMAFPRVKPAPDETSFSEALLKRNQDLAPNSAEQASILSLVTKINNVIDNLIVAPGTFEVQIEEVRQVGSYKKGTMTTGHNVADLVVILKILPTLEAVAALGNKVVESLRAQDPSEVLTMLTNETGFEISSSDATVKILITTVPPNLRKLDPELHLDIKVLQSALAAIRHARWFEENASQSTVKVLIRLLKDLRIRFPGFEPLTPWILDLLGHYAVMNNPTRQPLALNVAYRRCLQILAAGLFLPGSVGITDPCESGNFRVHTVMTLEQQDMVCYTAQTLVRILSHGGFRKILGQEGDASYLASEISTWDGVIVTPSEKAYEKPPEKKEGEEEEENTEEPPQGEEEESMETQE

SEQ ID NO: 41677 - protein, 150 aa, Homo sapiens
  Payload ID: 8486
  Gene Symbol: ILF2
  Gene Name: interleukin enhancer binding factor 2
  ENSP ID: ENSP00000357670
MRGDRGRGRGGRFGSRGGPGGGFRPFVPHIPFDFYLCEMAFPRVKPAPDETSFSEALLKRNQDLAPNSAEQASILSLVTKINNVIDNLIVAPGTFEVQIEEVRQVGSYKKGTMTTGHNVADLVVILKILPTCECACFWSWEQNIALGLGV

SEQ ID NO: 41678 - protein, 115 aa, Homo sapiens
  Payload ID: 8486
  Gene Symbol: ILF2
  Gene Name: interleukin enhancer binding factor 2
  ENSP ID: ENSP00000357673
MAFPRVKPAPDETSFSEALLKRNQDLAPNSAEQASILSLVTKINNVIDNLIVAPGTFEVQIEEVRQVGSYKKGTMTTGHNVADLVVILKILPTLEAVAALGNKVVESLRAQDPSE

SEQ ID NO: 41679 - protein, 352 aa, Homo sapiens
  Payload ID: 8486
  Gene Symbol: ILF2
  Gene Name: interleukin enhancer binding factor 2
  ENSP ID: ENSP00000482909
MAFPRVKPAPDETSFSEALLKRNQDLAPNSAEQASILSLVTKINNVIDNLIVAPGTFEVQIEEVRQVGSYKKGTMTTGHNVADLVVILKILPTLEAVAALGNKVVESLRAQDPSEVLTMLTNETGFEISSSDATVKILITTVPPNLRKLDPELHLDIKVLQSALAAIRHARWFEENASQSTVKVLIRLLKDLRIRFPGFEPLTPWILDLLGHYAVMNNPTRQPLALNVAYRRCLQILAAGLFLPGSVGITDPCESGNFRVHTVMTLEQQDMVCYTAQTLVRILSHGGFRKILGQEGDASYLASEISTWDGVIVTPSEKAYEKPPEKKEGEEEEENTEEPPQGEEEESMETQE

SEQ ID NO: 41680 - protein, 690 aa, Homo sapiens
  Payload ID: 8487
  Gene Symbol: ILF3
  Gene Name: interleukin enhancer binding factor 3, 90kDa
  Uniprot ID: Q12906
  ENSP ID: ENSP00000250241
MRPMRIFVNDDRHVMAKHSSVYPTQEELEAVQNMVSHTERALKAVSDWIDEQEKGSSEQAESDNMDVPPEDDSKEGAGEQKTEHMTRTLRGVMRVGLVAKGLLLKGDLDLELVLLCKEKPTTALLDKVADNLAIQLAAVTEDKYEILQSVDDAAIVIKNTKEPPLSLTIHLTSPVVREEMEKVLAGETLSVNDPPDVLDRQKCLAALASLRHAKWFQARANGLKSCVIVIRVLRDLCTRVPTWGPLRGWPLELLCEKSIGTANRPMGAGEALRRVLECLASGIVMPDGSGIYDPCEKEATDAIGHLDRQQREDITQSAQHALRLAAFGQLHKVLGMDPLPSKMPKKPKNENPVDYTVQIPPSTTYAITPMKRPMEEDGEEKSPSKKKKKIQKKEEKAEPPQAMNALMRLNQLKPGLQYKLVSQTGPVHAPIFTMSVEVDGNSFEASGPSKKTAKLHVAVKVLQDMGLPTGAEGRDSSKGEDSAEETEAKPAVVAPAPVVEAVSTPSAAFPSDATAEQGPILTKHGKNPVMELNEKRRGLKYELISETGGSHDKRFVMEVEVDGQKFQGAGSNKKVAKAYAALAALEKLFPDTPLALDANKKKRAPVPVRGGPKFAAKPHNPGFGMGGPMHNEVPPPPNLRGRGRGGSIRGRGRGRGFGGANHGGYMNAGAGYGSYGYGGNSATAGYTGFV

SEQ ID NO: 41681 - protein, 706 aa, Homo sapiens
  Payload ID: 8487
  Gene Symbol: ILF3
  Gene Name: interleukin enhancer binding factor 3, 90kDa
  Uniprot ID: Q12906
  ENSP ID: ENSP00000384660
MRPMRIFVNDDRHVMAKHSSVYPTQEELEAVQNMVSHTERALKAVSDWIDEQEKGSSEQAESDNMDVPPEDDSKEGAGEQKTEHMTRTLRGVMRVGLVAKGLLLKGDLDLELVLLCKEKPTTALLDKVADNLAIQLAAVTEDKYEILQSVDDAAIVIKNTKEPPLSLTIHLTSPVVREEMEKVLAGETLSVNDPPDVLDRQKCLAALASLRHAKWFQARANGLKSCVIVIRVLRDLCTRVPTWGPLRGWPLELLCEKSIGTANRPMGAGEALRRVLECLASGIVMPDGSGIYDPCEKEATDAIGHLDRQQREDITQSAQHALRLAAFGQLHKVLGMDPLPSKMPKKPKNENPVDYTVQIPPSTTYAITPMKRPMEEDGEEKSPSKKKKKIQKKEEKAEPPQAMNALMRLNQLKPGLQYKLVSQTGPVHAPIFTMSVEVDGNSFEASGPSKKTAKLHVAVKVLQDMGLPTGAEGRDSSKGEDSAEETEAKPAVVAPAPVVEAVSTPSAAFPSDATAENVKQQGPILTKHGKNPVMELNEKRRGLKYELISETGGSHDKRFVMEVEVDGQKFQGAGSNKKVAKAYAALAALEKLFPDTPLALDANKKKRAPVPVRGGPKFAAKPHNPGFGMGGPMHNEVPPPPNLRGRGRGGSIRGRGRGRGFGGANHGGYMNAGAGYGSYGYGGNSATAGYSDFFTDCYGYHDFGSS

SEQ ID NO: 41682 - protein, 898 aa, Homo sapiens
  Payload ID: 8487
  Gene Symbol: ILF3
  Gene Name: interleukin enhancer binding factor 3, 90kDa
  Uniprot ID: Q12906
  ENSP ID: ENSP00000404121
MRPMRIFVNDDRHVMAKHSSVYPTQEELEAVQNMVSHTERALKAVSDWIDEQEKGSSEQAESDNMDVPPEDDSKEGAGEQKTEHMTRTLRGVMRVGLVAKGLLLKGDLDLELVLLCKEKPTTALLDKVADNLAIQLAAVTEDKYEILQSVDDAAIVIKNTKEPPLSLTIHLTSPVVREEMEKVLAGETLSVNDPPDVLDRQKCLAALASLRHAKWFQARANGLKSCVIVIRVLRDLCTRVPTWGPLRGWPLELLCEKSIGTANRPMGAGEALRRVLECLASGIVMPDGSGIYDPCEKEATDAIGHLDRQQREDITQSAQHALRLAAFGQLHKVLGMDPLPSKMPKKPKNENPVDYTVQIPPSTTYAITPMKRPMEEDGEEKSPSKKKKKIQKKEEKAEPPQAMNALMRLNQLKPGLQYKLVSQTGPVHAPIFTMSVEVDGNSFEASGPSKKTAKLHVAVKVLQDMGLPTGAEGRDSSKGEDSAEETEAKPAVVAPAPVVEAVSTPSAAFPSDATAENVKQQGPILTKHGKNPVMELNEKRRGLKYELISETGGSHDKRFVMEVEVDGQKFQGAGSNKKVAKAYAALAALEKLFPDTPLALDANKKKRAPVPVRGGPKFAAKPHNPGFGMGGPMHNEVPPPPNLRGRGRGGSIRGRGRGRGFGGANHGGYMNAGAGYGSYGYGGNSATAGYSQFYSNGGHSGNASGGGGGGGGGSSGYGSYYQGDNYNSPVPPKHAGKKQPHGGQQKPSYGSGYQSHQGQQQSYNQSPYSNYGPPQGKQKGYNHGQGSYSYSNSYNSPGGGGGSDYNYESKFNYSGSGGRSGGNSYGSGGASYNPGSHGGYGGGSGGGSSYQGKQGGYSQSNYNSPGSGQNYSGPPSSYQSSQGGYGRNADHSMNYQYR

SEQ ID NO: 41683 - protein, 122 aa, Homo sapiens
  Payload ID: 8487
  Gene Symbol: ILF3
  Gene Name: interleukin enhancer binding factor 3, 90kDa
  ENSP ID: ENSP00000464974
MRIFVNDDRHVMAKHSSVYPTQEELEAVQNMVSHTERALKAVSDWIDEQEKGSSEQAESDNMDVPPEDDSKEGAGEQKTEHMTRTLRGVMRVGLVAKGLLLKGDLDLELVLLCKEKPTTALL

SEQ ID NO: 41684 - protein, 702 aa, Homo sapiens
  Payload ID: 8487
  Gene Symbol: ILF3
  Gene Name: interleukin enhancer binding factor 3, 90kDa
  Uniprot ID: Q12906
  ENSP ID: ENSP00000465219
MRPMRIFVNDDRHVMAKHSSVYPTQEELEAVQNMVSHTERALKAVSDWIDEQEKGSSEQAESDNMDVPPEDDSKEGAGEQKTEHMTRTLRGVMRVGLVAKGLLLKGDLDLELVLLCKEKPTTALLDKVADNLAIQLAAVTEDKYEILQSVDDAAIVIKNTKEPPLSLTIHLTSPVVREEMEKVLAGETLSVNDPPDVLDRQKCLAALASLRHAKWFQARANGLKSCVIVIRVLRDLCTRVPTWGPLRGWPLELLCEKSIGTANRPMGAGEALRRVLECLASGIVMPDGSGIYDPCEKEATDAIGHLDRQQREDITQSAQHALRLAAFGQLHKVLGMDPLPSKMPKKPKNENPVDYTVQIPPSTTYAITPMKRPMEEDGEEKSPSKKKKKIQKKEEKAEPPQAMNALMRLNQLKPGLQYKLVSQTGPVHAPIFTMSVEVDGNSFEASGPSKKTAKLHVAVKVLQDMGLPTGAEGRDSSKGEDSAEETEAKPAVVAPAPVVEAVSTPSAAFPSDATAEQGPILTKHGKNPVMELNEKRRGLKYELISETGGSHDKRFVMEVEVDGQKFQGAGSNKKVAKAYAALAALEKLFPDTPLALDANKKKRAPVPVRGGPKFAAKPHNPGFGMGGPMHNEVPPPPNLRGRGRGGSIRGRGRGRGFGGANHGGYMNAGAGYGSYGYGGNSATAGYSDFFTDCYGYHDFGSS

SEQ ID NO: 41685 - protein, 698 aa, Homo sapiens
  Payload ID: 8487
  Gene Symbol: ILF3
  Gene Name: interleukin enhancer binding factor 3, 90kDa
  Uniprot ID: Q12906
  ENSP ID: ENSP00000465515
MRPMRIFVNDDRHVMAKHSSVYPTQEELEAVQNMVSHTERALKAVSDWIDEQEKGSSEQAESDNMDVPPEDDSKEGAGEQKTEHMTRTLRGVMRVGLVAKGLLLKGDLDLELVLLCKEKPTTALLDKVADNLAIQLAAVTEDKYEILQSVDDAAIVIKNTKEPPLSLTIHLTSPVVREEMEKVLAGETLSVNDPPDVLDRQKCLAALASLRHAKWFQARANGLKSCVIVIRVLRDLCTRVPTWGPLRGWPLELLCEKSIGTANRPMGAGEALRRVLECLASGIVMPDGSGIYDPCEKEATDAIGHLDRQQREDITQSAQHALRLAAFGQLHKVLGMDPLPSKMPKKPKNENPVDYTVQIPPSTTYAITPMKRPMEEDGEEKSPSKKKKKIQKKEEKAEPPQAMNALMRLNQLKPGLQYKLVSQTGPVHAPIFTMSVEVDGNSFEASGPSKKTAKLHVAVKVLQDMGLPTGAEGRDSSKGEDSAEETEAKPAVVAPAPVVEAVSTPSAAFPSDATAENVKQQGPILTKHGKNPVMELNEKRRGLKYELISETGGSHDKRFVMEVEVDGQKFQGAGSNKKVAKAYAALAALEKLFPDTPLALDANKKKRAPVPVRGGPKFAAKPHNPGFGMGGPMHNEVPPPPNLRGRGRGGSIRGRGRGRGFGGANHGGYMNAGAGYGSYGYGGNSATAGYSKCAFLSV

SEQ ID NO: 41686 - protein, 254 aa, Homo sapiens
  Payload ID: 8487
  Gene Symbol: ILF3
  Gene Name: interleukin enhancer binding factor 3, 90kDa
  ENSP ID: ENSP00000465654
MRPMRIFVNDDRHVMAKHSSVYPTQEELEAVQNMVSHTERALKAVSDWIDEQEKGSSEQAESDNMDVPPEDDSKEGAGEQKTEHMTRTLRGVMRVGLVAKGLLLKGDLDLELVLLCKEKPTTALLDKVADNLAIQLAAVTEDKYEILQSVDDAAIVIKNTKEPPLSLTIHLTSPVVREEMEKVLAGETLSVNDPPDVLDRQKCLAALASLRHAKWFQARANGLKSCVIVIRVLRDLCTRVPTWGPLRGWPLELL

SEQ ID NO: 41687 - protein, 158 aa, Homo sapiens
  Payload ID: 8487
  Gene Symbol: ILF3
  Gene Name: interleukin enhancer binding factor 3, 90kDa
  ENSP ID: ENSP00000465831
  MOD_RES (1)..(1): Any amino acid
XPPEDDSKEGAGEQKTEHMTRTLRGVMRVGLVAKGLLLKGDLDLELVLLCKEKPTTALLDKVADNLAIQLAAVTEDKYEILQSVDDAAIVIKNTKEPPLSLTIHLTSPVVREEMEKVLAGGQSQRAEVLCHCDPGLEGPVHSRAHLGSPPRLASRAPV

SEQ ID NO: 41688 - protein, 116 aa, Homo sapiens
  Payload ID: 8487
  Gene Symbol: ILF3
  Gene Name: interleukin enhancer binding factor 3, 90kDa
  ENSP ID: ENSP00000466235
GGANHGGYMNAGAGYGSYGYGGNSATAGYNYSGSGGRSGGNSYGSGGASYNPGSHGGYGGGSGGGSSYQGKQGGYSQSNYNSPGSGQNYSGPPSSYQSSQGGYGRNADHSMNYQYR

SEQ ID NO: 41689 - protein, 99 aa, Homo sapiens
  Payload ID: 8487
  Gene Symbol: ILF3
  Gene Name: interleukin enhancer binding factor 3, 90kDa
  ENSP ID: ENSP00000466396
MRPMRIFVNDDRHVMAKHSSVYPTQEELEAVQNMVSHTERALKAVSDWIDEQEKGSSEQAESDNMDVPPEDDSKEGAGEQKTEHMTRTLRGVMRVGLVA

SEQ ID NO: 41690 - protein, 113 aa, Homo sapiens
  Payload ID: 8487
  Gene Symbol: ILF3
  Gene Name: interleukin enhancer binding factor 3, 90kDa
  ENSP ID: ENSP00000466724
  MOD_RES (1)..(1): Any amino acid
XGGPKFAAKPHNPGFGMGGPMHNEVPPPPNLRGRGRGGSIRGRGRGRGFGGANHGGYMNAGAGYGSYGYGGNSATAGYMMKTISPHLNPEKPAFFLIASMLKRWEHVGNCILR

SEQ ID NO: 41691 - protein, 79 aa, Homo sapiens
  Payload ID: 8487
  Gene Symbol: ILF3
  Gene Name: interleukin enhancer binding factor 3, 90kDa
  ENSP ID: ENSP00000466991
MRPMRIFVNDDRHVMAKHSSVYPTQEELEAVQNMVSHTERALKAVSDWIDEQEKGSSEQAESDNMDVPPEDDSKEGAGL

SEQ ID NO: 41692 - protein, 73 aa, Homo sapiens
  Payload ID: 8487
  Gene Symbol: ILF3
  Gene Name: interleukin enhancer binding factor 3, 90kDa
  ENSP ID: ENSP00000467372
DAAIVIKNTKEPPLSLTIHLTSPVVREEMEKVLAGGQSQRAEVLCHCDPGLEGPVHSRAHLGSPPRLASRAPV

SEQ ID NO: 41693 - protein, 55 aa, Homo sapiens
  Payload ID: 8487
  Gene Symbol: ILF3
  Gene Name: interleukin enhancer binding factor 3, 90kDa
  ENSP ID: ENSP00000467704
PTQEELEAVQNMVSHTERALKAVSDWIDEQEKGRNALLPWRPSDTPSGSRPEPTG

SEQ ID NO: 41694 - protein, 180 aa, Homo sapiens
  Payload ID: 8487
  Gene Symbol: ILF3
  Gene Name: interleukin enhancer binding factor 3, 90kDa
  ENSP ID: ENSP00000467950
  MOD_RES (1)..(1): Any amino acid
XPTTALLDKVADNLAIQLAAVTEDKYEILQSVDDAAIVIKNTKEPPLSLTIHLTSPVVREEMEKVLAGETLSVNDPPDVLDRQKCLAALASLRHAKWFQARANGLKSCVIVIRVLRDLCTRVPTWGPLRGWPLELLCEKSIGTANRPMGAGEALRRVLECLASGIVMPARTAARCLRPAP

SEQ ID NO: 41695 - protein, 79 aa, Homo sapiens; identical to SEQ ID NO: 41691
  Payload ID: 8487
  Gene Symbol: ILF3
  Gene Name: interleukin enhancer binding factor 3, 90kDa
  ENSP ID: ENSP00000468092

SEQ ID NO: 41696 - protein, 161 aa, Homo sapiens
  Payload ID: 8487
  Gene Symbol: ILF3
  Gene Name: interleukin enhancer binding factor 3, 90kDa
  ENSP ID: ENSP00000468134
MRPMRIFVNDDRHVMAKHSSVYPTQEELEAVQNMVSHTERALKAVSDWIDEQEKGSSEQAESDNMDVPPEDDSKEGAGEQKTEHMTRTLRGVMRVGLVAKGLLLKGDLDLELVLLCKEKPTTALLDKVADNLAIQLAAVTEDKYEILQSVDDAAIVIKNTK

SEQ ID NO: 41697 - protein, 894 aa, Homo sapiens
  Payload ID: 8487
  Gene Symbol: ILF3
  Gene Name: interleukin enhancer binding factor 3, 90kDa
  Uniprot ID: Q12906
  ENSP ID: ENSP00000468156
MRPMRIFVNDDRHVMAKHSSVYPTQEELEAVQNMVSHTERALKAVSDWIDEQEKGSSEQAESDNMDVPPEDDSKEGAGEQKTEHMTRTLRGVMRVGLVAKGLLLKGDLDLELVLLCKEKPTTALLDKVADNLAIQLAAVTEDKYEILQSVDDAAIVIKNTKEPPLSLTIHLTSPVVREEMEKVLAGETLSVNDPPDVLDRQKCLAALASLRHAKWFQARANGLKSCVIVIRVLRDLCTRVPTWGPLRGWPLELLCEKSIGTANRPMGAGEALRRVLECLASGIVMPDGSGIYDPCEKEATDAIGHLDRQQREDITQSAQHALRLAAFGQLHKVLGMDPLPSKMPKKPKNENPVDYTVQIPPSTTYAITPMKRPMEEDGEEKSPSKKKKKIQKKEEKAEPPQAMNALMRLNQLKPGLQYKLVSQTGPVHAPIFTMSVEVDGNSFEASGPSKKTAKLHVAVKVLQDMGLPTGAEGRDSSKGEDSAEETEAKPAVVAPAPVVEAVSTPSAAFPSDATAEQGPILTKHGKNPVMELNEKRRGLKYELISETGGSHDKRFVMEVEVDGQKFQGAGSNKKVAKAYAALAALEKLFPDTPLALDANKKKRAPVPVRGGPKFAAKPHNPGFGMGGPMHNEVPPPPNLRGRGRGGSIRGRGRGRGFGGANHGGYMNAGAGYGSYGYGGNSATAGYSQFYSNGGHSGNASGGGGGGGGGSSGYGSYYQGDNYNSPVPPKHAGKKQPHGGQQKPSYGSGYQSHQGQQQSYNQSPYSNYGPPQGKQKGYNHGQGSYSYSNSYNSPGGGGGSDYNYESKFNYSGSGGRSGGNSYGSGGASYNPGSHGGYGGGSGGGSSYQGKQGGYSQSNYNSPGSGQNYSGPPSSYQSSQGGYGRNADHSMNYQYR

SEQ ID NO: 41698 - protein, 898 aa, Homo sapiens; identical to SEQ ID NO: 41682
  Payload ID: 8487
  Gene Symbol: ILF3
  Gene Name: interleukin enhancer binding factor 3, 90kDa
  Uniprot ID: Q12906
  ENSP ID: ENSP00000468181

SEQ ID NO: 41699 - protein, 77 aa, Homo sapiens
  Payload ID: 8487
  Gene Symbol: ILF3
  Gene Name: interleukin enhancer binding factor 3, 90kDa
  ENSP ID: ENSP00000468323
MRPMRIFVNDDRHVMAKHSSVYPTQEELEAVQNMVSHTERALKAVSDWIDEQEKGSSEQAESDNMDVPPEDDSKEGA

SEQ ID NO: 41700 - protein, 339 aa, Homo sapiens
  Payload ID: 8488
  Gene Symbol: IRAK1
  Gene Name: interleukin-1 receptor-associated kinase 1
  ENSP ID: ENSP00000358990
MAGGPGPGEPAAPGAQHFLYEVPPWVMCRFYKVMDALEPADWCQFGGWRRAAGGREARGLLAPTPDAPRPAAALIVRDQTELRLCERSGQRTASVLWPWINRNARVADLVHILTHLQLLRARDIITAWHPPAPLPSPGTTAPRPSSIPAPAEAEAWSPRKLPSSASTFLSPAFPGSQTHSGPELGLVPSPASLWPPPPSPAPSSTKPGPESSVSLLQGARPFPFCWPLCEISRGTHNFSEELKIGEGGFGCVYRAVMRNTVYAVKRLKENADLEWTAVKQSFLTEVEQLSRPRPAHLSPGLSDWTSFWVQPGQFSFYIRTAPASSMETSRVPTSFWMRG

SEQ ID NO: 41701 - protein, 633 aa, Homo sapiens
  Payload ID: 8488
  Gene Symbol: IRAK1
  Gene Name: interleukin-1 receptor-associated kinase 1
  Uniprot ID: P51617
  ENSP ID: ENSP00000358991
MAGGPGPGEPAAPGAQHFLYEVPPWVMCRFYKVMDALEPADWCQFAALIVRDQTELRLCERSGQRTASVLWPWINRNARVADLVHILTHLQLLRARDIITAWHPPAPLPSPGTTAPRPSSIPAPAEAEAWSPRKLPSSASTFLSPAFPGSQTHSGPELGLVPSPASLWPPPPSPAPSSTKPGPESSVSLLQGARPFPFCWPLCEISRGTHNFSEELKIGEGGFGCVYRAVMRNTVYAVKRLKENADLEWTAVKQSFLTEVEQLSRFRHPNIVDFAGYCAQNGFYCLVYGFLPNGSLEDRLHCQTQACPPLSWPQRLDILLGTARAIQFLHQDSPSLIHGDIKSSNVLLDERLTPKLGDFGLARFSRFAGSSPSQSSMVARTQTVRGTLAYLPEEYIKTGRLAVDTDTFSFGVVVLETLAGQRAVKTHGARTKYLVYERLEKLQAVVAGVPGHSEAASCIPPSPQENSYVSSTGRAHSGAAPWQPLAAPSGASAQAAEQLQRGPNQPVESDESLGGLSAALRSWHLTPSCPLDPAPLREAGCPQGDTAGESSWGSGPGSRPTAVEGLALGSSASSSSEPPQIIINPARQKMVQKLALYEDGALDSLQLLSSSSLPGLGLEQDRQGPEESDEFQS

SEQ ID NO: 41702 - protein, 712 aa, Homo sapiens
  Payload ID: 8488
  Gene Symbol: IRAK1
  Gene Name: interleukin-1 receptor-associated kinase 1
  Uniprot ID: P51617
  ENSP ID: ENSP00000358997
MAGGPGPGEPAAPGAQHFLYEVPPWVMCRFYKVMDALEPADWCQFAALIVRDQTELRLCERSGQRTASVLWPWINRNARVADLVHILTHLQLLRARDIITAWHPPAPLPSPGTTAPRPSSIPAPAEAEAWSPRKLPSSASTFLSPAFPGSQTHSGPELGLVPSPASLWPPPPSPAPSSTKPGPESSVSLLQGARPFPFCWPLCEISRGTHNFSEELKIGEGGFGCVYRAVMRNTVYAVKRLKENADLEWTAVKQSFLTEVEQLSRFRHPNIVDFAGYCAQNGFYCLVYGFLPNGSLEDRLHCQTQACPPLSWPQRLDILLGTARAIQFLHQDSPSLIHGDIKSSNVLLDERLTPKLGDFGLARFSRFAGSSPSQSSMVARTQTVRGTLAYLPEEYIKTGRLAVDTDTFSFGVVVLETLAGQRAVKTHGARTKYLKDLVEEEAEEAGVALRSTQSTLQAGLAADAWAAPIAMQIYKKHLDPRPGPCPPELGLGLGQLACCCLHRRAKRRPPMTQVYERLEKLQAVVAGVPGHSEAASCIPPSPQENSYVSSTGRAHSGAAPWQPLAAPSGASAQAAEQLQRGPNQPVESDESLGGLSAALRSWHLTPSCPLDPAPLREAGCPQGDTAGESSWGSGPGSRPTAVEGLALGSSASSSSEPPQIIINPARQKMVQKLALYEDGALDSLQLLSSSSLPGLGLEQDRQGPEESDEFQS

SEQ ID NO: 41703 - protein, 682 aa, Homo sapiens
  Payload ID: 8488
  Gene Symbol: IRAK1
  Gene Name: interleukin-1 receptor-associated kinase 1
  Uniprot ID: P51617
  ENSP ID: ENSP00000377291
MAGGPGPGEPAAPGAQHFLYEVPPWVMCRFYKVMDALEPADWCQFAALIVRDQTELRLCERSGQRTASVLWPWINRNARVADLVHILTHLQLLRARDIITAWHPPAPLPSPGTTAPRPSSIPAPAEAEAWSPRKLPSSASTFLSPAFPGSQTHSGPELGLVPSPASLWPPPPSPAPSSTKPGPESSVSLLQGARPFPFCWPLCEISRGTHNFSEELKIGEGGFGCVYRAVMRNTVYAVKRLKENADLEWTAVKQSFLTEVEQLSRFRHPNIVDFAGYCAQNGFYCLVYGFLPNGSLEDRLHCQTQACPPLSWPQRLDILLGTARAIQFLHQDSPSLIHGDIKSSNVLLDERLTPKLGDFGLARFSRFAGSSPSQSSMVARTQTVRGTLAYLPEEYIKTGRLAVDTDTFSFGVVVLETLAGQRAVKTHGARTKYLKDLVEEEAEEAGVALRSTQSTLQAGLAADAWAAPIAMQIYKKHLDPRPGPCPPELGLGLGQLACCCLHRRAKRRPPMTQENSYVSSTGRAHSGAAPWQPLAAPSGASAQAAEQLQRGPNQPVESDESLGGLSAALRSWHLTPSCPLDPAPLREAGCPQGDTAGESSWGSGPGSRPTAVEGLALGSSASSSSEPPQIIINPARQKMVQKLALYEDGALDSLQLLSSSSLPGLGLEQDRQGPEESDEFQS

SEQ ID NO: 41704 - protein, 708 aa, Homo sapiens
  Payload ID: 8488
  Gene Symbol: IRAK1
  Gene Name: interleukin-1 receptor-associated kinase 1
  ENSP ID: ENSP00000392662
MAGGPGPGEPAAPGAQHFLYEVPPWVMCRFYKVMDALEPADWCQFGGWRRAAGGREARGLLAPTPDAPRPAAALIVRDQTELRLCERSGQRTASVLWPWINRNARVADLVHILTHLQLLRARDIITAWHPPAPLPSPGTTAPRPSSIPAPAEAEAWSPRKLPSSASTFLSPAFPGSQTHSGPELGLVPSPASLWPPPPSPAPSSTKPGPESSVSLLQGARPFPFCWPLCEISRGTHNFSEELKIGEGGFGCVYRAVMRNTVYAVKRLKENADLEWTAVKQSFLTEVEQLSRFRHPNIVDFAGYCAQNGFYCLVYGFLPNGSLEDRLHCQTQACPPLSWPQRLDILLGTARAIQFLHQDSPSLIHGDIKSSNVLLDERLTPKLGDFGLARFSRFAGSSPSQSSMVARTQTVRGTLAYLPEEYIKTGRLAVDTDTFSFGVVVLETLAGQRAVKTHGARTKYLKDLVEEEAEEAGVALRSTQSTLQAGLAADAWAAPIAMQIYKKHLDPRPGPCPPELGLGLGQLACCCLHRRAKRRPPMTQENSYVSSTGRAHSGAAPWQPLAAPSGASAQAAEQLQRGPNQPVESDESLGGLSAALRSWHLTPSCPLDPAPLREAGCPQGDTAGESSWGSGPGSRPTAVEGLALGSSASSSSEPPQIIINPARQKMVQKLALYEDGALDSLQLLSSSSLPGLGLEQDRQGPEESDEFQS

SEQ ID NO: 41705 - protein, 234 aa, Homo sapiens
  Payload ID: 8488
  Gene Symbol: IRAK1
  Gene Name: interleukin-1 receptor-associated kinase 1
  ENSP ID: ENSP00000399974
PGPGEPAAPGAQHFLYEVPPWVMCRFYKVMDALEPADWCQFAALIVRDQTELRLCERSGQRTASVLWPWINRNARVADLVHILTHLQLLRARDIITAWHPPAPLPSPGTTAPRPSSIPAPAEAEAWSPRKLPSSASTFLSPAFPGSQTHSGPELGLVPSPASLWPPPPSPAPSSTKQDPVSKRKTLGKVKYGCKSHGSVLARSENSEILQKVEQHPPPTSGQCLQALLGTCELA

SEQ ID NO: 41706 - protein, 392 aa, Homo sapiens
  Payload ID: 8488
  Gene Symbol: IRAK1
  Gene Name: interleukin-1 receptor-associated kinase 1
  ENSP ID: ENSP00000403730
  MOD_RES (1)..(1): Any amino acid
XMRNTVYAVKRLKENADLEWTAVKQSFLTEVEQLSRFRHPNIVDFAGYCAQNGFYCLVYGFLPNGSLEDRLHCQTQACPPLSWPQRLDILLGTARAIQFLHQDSPSLIHGDIKSSNVLLDERLTPKLGDFGLARFSRFAGSSPSQSSMVARTQTVRGTLAYLPEEYIKTGRLAVDTDTFSFGVKDLVEEEAEEAGVALRSTQSTLQAGLAADAWAAPIAMQIYKKHLDPRPGPCPPELGLGLGQLACCCLHRRAKRRPPMTQVYERLEKLQAVVAGVPGHSEAASCIPPSPQENSYVSSTGRAHSGAAPWQPLAAPSGASAQAAEQLQRGPNQPVESDESLGGLSAALRSWHLTPSCPLDPAPLREAGCPQGDTAGESSWGSGPGSRPTAVE

SEQ ID NO: 41707 - protein, 276 aa, Homo sapiens
  Payload ID: 8488
  Gene Symbol: IRAK1
  Gene Name: interleukin-1 receptor-associated kinase 1
  ENSP ID: ENSP00000406249
  MOD_RES (1)..(1): Any amino acid
XLHQDSPSLIHGDIKSSNVLLDERLTPKLGDFGLARFSRFAGSSPSQSSMVARTQTVRGTLAYLPEEYIKTGRLAVDTDTFSFGVVVLETLAGQRAVKTHGARTKYLENSYVSSTGRAHSGAAPWQPLAAPSGASAQAAEQLQRGPNQPVESDESLGGLSAALRSWHLTPSCPLDPAPLREAGCPQGDTAGESSWGSGPGSRPTAVEGLALGSSASSSSEPPQIIINPARQKMVQKLALYEDGALDSLQLLSSSSLPGLGLEQDRQGPEESDEFQS

SEQ ID NO: 41708 - protein, 218 aa, Homo sapiens
  Payload ID: 8488
  Gene Symbol: IRAK1
  Gene Name: interleukin-1 receptor-associated kinase 1
  ENSP ID: ENSP00000410953
  MOD_RES (1)..(1): Any amino acid
XGVALRSTQSTLQAGLAADAWAAPIAMQIYKKHLDPRPGPCPPELGLGLGQLACCCLHRRAKRRPPMTQVYERLEKLQAVVAGVPGHSEAASCIPPSPQENSYVSSTGRAHSGAAPWQPLAAPSGASAQAAEQLQRGPNQPVESDESLGGLSAALRSWHLTPSCPLDPAPLREAGCPQGDTAGESSWGSGPGSRPTAVEGLGLEQDRQGPEESDEFQS

SEQ ID NO: 41709 - protein, 212 aa, Homo sapiens
  Payload ID: 8488
  Gene Symbol: IRAK1
  Gene Name: interleukin-1 receptor-associated kinase 1
  ENSP ID: ENSP00000411809
QRAVKTHGARTKYLKDLVEEEAEEAGVALRSTQSTLQAGLAADAWAAPIAMQIYKKHLDPRPGPCPPELGLGLGQLACCCLHRRAKRRPPMTQDWPLAALHHRRQSHRRLSSTLPDRRWSRSWPCTRMGPWTACSCCRPAPSQAWAWNRTGRGPKKVMNFRADVFTWADPPNPEVKVLMVRSSHGARVLSTLPAVGVGAHARGGEKEVALLF

SEQ ID NO: 41710 - protein, 260 aa, Homo sapiens
  Payload ID: 8489
  Gene Symbol: IRAK1BP1
  Gene Name: interleukin-1 receptor-associated kinase 1 binding protein 1
  Uniprot ID: Q5VVH5
  ENSP ID: ENSP00000358956
MSLQKTPPTRVFVELVPWADRSRENNLASGRETLPGLRHPLSSTQAQTATREVQVSGTSEVSAGPDRAQVVVRVSSTKEAAAEAKKSVCRRLDYITQSLQQQGVQAENITVTKDFRRVENAYHMEAEVCITFTEFGKMQNICNFLVEKLDSSVVISPPQFYHTPGSVENLRRQACLVAVENAWRKAQEVCNLVGQTLGKPLLIKEEETKEWEGQIDDHQSSRLSSSLTVQQKIKSATIHAASKVFITFEVKGKEKRKKHL

SEQ ID NO: 41711 - protein, 44 aa, Homo sapiens
  Payload ID: 8489
  Gene Symbol: IRAK1BP1
  Gene Name: interleukin-1 receptor-associated kinase 1 binding protein 1
  ENSP ID: ENSP00000475395
  MOD_RES (1)..(1): Any amino acid
XIDDHQSSRLSSSLTVQQKIKSATIHAASKVFITFEKLLRRGGV

SEQ ID NO: 41712 - protein, 192 aa, Homo sapiens
  Payload ID: 8489
  Gene Symbol: IRAK1BP1
  Gene Name: interleukin-1 receptor-associated kinase 1 binding protein 1
  ENSP ID: ENSP00000475503
MNGKRPQHLHPLGSDNSEAENITVTKDFRRVENAYHMEAEVCITFTEFGKMQNICNFLVEKLDSSVVISPPQFYHTPGSVENLRRQACLVAVENAWRKAQEVCNLVGQTLGKPLLIKEEETKEWEGQIDDHQSSRLSSSLTVQQKIKSATIHAASKVFITFEQLLESFFNIPTNNYSQIAMSPVNYHESHIK

SEQ ID NO: 41713 - protein, 177 aa, Homo sapiens
  Payload ID: 8489
  Gene Symbol: IRAK1BP1
  Gene Name: interleukin-1 receptor-associated kinase 1 binding protein 1
  ENSP ID: ENSP00000475570
VFVELVPWADRSRENNLASGRETLPGLRHPLSSTQAQTATREVQVSGTSEVSAGPDRAQVVVRVSSTKEAAAEAKKSVCRRLDYITQSLQQQGVQAENITVTKDFRRVENAYHMEAEVCITFTEFGKMQNICNFLVEKLDSSVVISPPQFYHTPGSVENLRNSWNPSSTSQPTITPR

SEQ ID NO: 41714 - protein, 625 aa, Homo sapiens
  Payload ID: 8490
  Gene Symbol: IRAK2
  Gene Name: interleukin-1 receptor-associated kinase 2
  Uniprot ID: O43187
  ENSP ID: ENSP00000256458
MACYIYQLPSWVLDDLCRNMDALSEWDWMEFASYVITDLTQLRKIKSMERVQGVSITRELLWWWGMRQATVQQLVDLLCRLELYRAAQIILNWKPAPEIRCPIPAFPDSVKPEKPLAASVRKAEDEQEEGQPVRMATFPGPGSSPARAHQPAFLQPPEEDAPHSLRSDLPTSSDSKDFSTSIPKQEKLLSLAGDSLFWSEADVVQATDDFNQNRKISQGTFADVYRGHRHGKPFVFKKLRETACSSPGSIERFFQAELQICLRCCHPNVLPVLGFCAARQFHSFIYPYMANGSLQDRLQGQGGSDPLPWPQRVSICSGLLCAVEYLHGLEIIHSNVKSSNVLLDQNLTPKLAHPMAHLCPVNKRSKYTMMKTHLLRTSAAYLPEDFIRVGQLTKRVDIFSCGIVLAEVLTGIPAMDNNRSPVYLKDLLLSDIPSSTASLCSRKTGVENVMAKEICQKYLEKGAGRLPEDCAEALATAACLCLRRRNTSLQEVCGSVAAVEERLRGRETLLPWSGLSEGTGSSSNTPEETDDVDNSSLDASSSMSVAPWAGAATPLLPTENGEGRLRVIVGREADSSSEACVGLEPPQDVTETSWQIEINEAKRKLMENILLYKEEKVDSIELFGP

SEQ ID NO: 41715 - protein, 596 aa, Homo sapiens
  Payload ID: 8491
  Gene Symbol: IRAK3
  Gene Name: interleukin-1 receptor-associated kinase 3
  Uniprot ID: Q9Y616
  ENSP ID: ENSP00000261233
MAGNCGARGALSAHTLLFDLPPALLGELCAVLDSCDGALGWRGLAERLSSSWLDVRHIEKYVDQGKSGTRELLWSWAQKNKTIGDLLQVLQEMGHRRAIHLITNYGAVLSPSEKSYQEGGFPNILFKETANVTVDNVLIPEHNEKGILLKSSISFQNIIEGTRNFHKDFLIGEGEIFEVYRVEIQNLTYAVKLFKQEKKMQCKKHWKRFLSELEVLLLFHHPNILELAAYFTETEKFCLIYPYMRNGTLFDRLQCVGDTAPLPWHIRIGILIGISKAIHYLHNVQPCSVICGSISSANILLDDQFQPKLTDFAMAHFRSHLEHQSCTINMTSSSSKHLWYMPEEYIRQGKLSIKTDVYSFGIVIMEVLTGCRVVLDDPKHIQLRDLLRELMEKRGLDSCLSFLDKKVPPCPRNFSAKLFCLAGRCAATRAKLRPSMDEVLNTLESTQASLYFAEDPPTSLKSFRCPSPLFLENVPSIPVEDDESQNNNLLPSDEGLRIDRMTQKTPFECSQSEVMFLSLDKKPESKRNEEACNMPSSSCEESWFPKYIVPSQDLRPYKVNIDPSSEAPGHSCRSRPVESSCSSKFSWDEYEQYKKE

SEQ ID NO: 41716 - protein, 535 aa, Homo sapiens
  Payload ID: 8491
  Gene Symbol: IRAK3
  Gene Name: interleukin-1 receptor-associated kinase 3
  Uniprot ID: Q9Y616
  ENSP ID: ENSP00000409852
MAGNCGARGALSAHTLLFDLPPALLGELCAVLDSCDGALGWRGLGAVLSPSEKSYQEGGFPNILFKETANVTVDNVLIPEHNEKGILLKSSISFQNIIEGTRNFHKDFLIGEGEIFEVYRVEIQNLTYAVKLFKQEKKMQCKKHWKRFLSELEVLLLFHHPNILELAAYFTETEKFCLIYPYMRNGTLFDRLQCVGDTAPLPWHIRIGILIGISKAIHYLHNVQPCSVICGSISSANILLDDQFQPKLTDFAMAHFRSHLEHQSCTINMTSSSSKHLWYMPEEYIRQGKLSIKTDVYSFGIVIMEVLTGCRVVLDDPKHIQLRDLLRELMEKRGLDSCLSFLDKKVPPCPRNFSAKLFCLAGRCAATRAKLRPSMDEVLNTLESTQASLYFAEDPPTSLKSFRCPSPLFLENVPSIPVEDDESQNNNLLPSDEGLRIDRMTQKTPFECSQSEVMFLSLDKKPESKRNEEACNMPSSSCEESWFPKYIVPSQDLRPYKVNIDPSSEAPGHSCRSRPVESSCSSKFSWDEYEQYKKE

SEQ ID NO: 41717 - protein, 93 aa, Homo sapiens
  Payload ID: 8491
  Gene Symbol: IRAK3
  Gene Name: interleukin-1 receptor-associated kinase 3
  ENSP ID: ENSP00000441321
MAGNCGARGALSAHTLLFDLPPALLGELCAVLDSCDGALGWRGLVSKNKLCENGVLILQGFWHVVVCKYKDSKYGCVALFEKTPSETYLHMET

SEQ ID NO: 41718 - protein, 336 aa, Homo sapiens
  Payload ID: 8492
  Gene Symbol: IRAK4
  Gene Name: interleukin-1 receptor-associated kinase 4
  Uniprot ID: Q9NWZ3
  ENSP ID: ENSP00000390327
MPFCDKDRTLMTPVQNLEQSYMPPDSSSPENKSLEVSDTRFHSFSFYELKNVTNNFDERPISVGGNKMGEGGFGVVYKGYVNNTTVAVKKLAAMVDITTEELKQQFDQEIKVMAKCQHENLVELLGFSSDGDDLCLVYVYMPNGSLLDRLSCLDGTPPLSWHMRCKIAQGAANGINFLHENHHIHRDIKSANILLDEAFTAKISDFGLARASEKFAQTVMTSRIVGTTAYMAPEALRGEITPKSDIYSFGVVLLEIITGLPAVDEHREPQLLLDIKEEIEDEEKTIEDYIDKKMNDADSTSVEAMYSVASQCLHEKKNKRPDIKKVQQLLQEMTAS

SEQ ID NO: 41719 - protein, 218 aa, Homo sapiens
  Payload ID: 8492
  Gene Symbol: IRAK4
  Gene Name: interleukin-1 receptor-associated kinase 4
  ENSP ID: ENSP00000390651
MNKPITPSTYVRCLNVGLIRKLSDFIDPQEGWKKLAVAIKKPSGDDRYNQFHIRRFEALLQTGKSPTSELLFDWGTTNCTVGDLVDLLIQNEFFAPASLLLPDAVPKTANTLPSKEAITVQQKQMPFCDKDRTLMTPVQNLEQSYMPPDSSSPENKSLEVSDTRFHSFSFYELKNVTNNFDERPISVGGNKMGEGGFGVVYKGYVNNNCGSEEACSNG

SEQ ID NO: 41720 - protein, 336 aa, Homo sapiens; identical to SEQ ID NO: 41718
  Payload ID: 8492
  Gene Symbol: IRAK4
  Gene Name: interleukin-1 receptor-associated kinase 4
  Uniprot ID: Q9NWZ3
  ENSP ID: ENSP00000408734

SEQ ID NO: 41721 - protein, 460 aa, Homo sapiens
  Payload ID: 8492
  Gene Symbol: IRAK4
  Gene Name: interleukin-1 receptor-associated kinase 4
  Uniprot ID: Q9NWZ3
  ENSP ID: ENSP00000446490
MNKPITPSTYVRCLNVGLIRKLSDFIDPQEGWKKLAVAIKKPSGDDRYNQFHIRRFEALLQTGKSPTSELLFDWGTTNCTVGDLVDLLIQNEFFAPASLLLPDAVPKTANTLPSKEAITVQQKQMPFCDKDRTLMTPVQNLEQSYMPPDSSSPENKSLEVSDTRFHSFSFYELKNVTNNFDERPISVGGNKMGEGGFGVVYKGYVNNTTVAVKKLAAMVDITTEELKQQFDQEIKVMAKCQHENLVELLGFSSDGDDLCLVYVYMPNGSLLDRLSCLDGTPPLSWHMRCKIAQGAANGINFLHENHHIHRDIKSANILLDEAFTAKISDFGLARASEKFAQTVMTSRIVGTTAYMAPEALRGEITPKSDIYSFGVVLLEIITGLPAVDEHREPQLLLDIKEEIEDEEKTIEDYIDKKMNDADSTSVEAMYSVASQCLHEKKNKRPDIKKVQQLLQEMTAS

SEQ ID NO: 41722 - protein, 89 aa, Homo sapiens
  Payload ID: 8492
  Gene Symbol: IRAK4
  Gene Name: interleukin-1 receptor-associated kinase 4
  ENSP ID: ENSP00000446571
MNKPITPSTYVRCLNVGLIRKLSDFIDPQEGWKKLAVAIKKPSGDDRYNQFHIRRFEALLQTGKSPTSELLFDWGTTNCTVGDLVDLLI

SEQ ID NO: 41723 - protein, 60 aa, Homo sapiens
  Payload ID: 8492
  Gene Symbol: IRAK4
  Gene Name: interleukin-1 receptor-associated kinase 4
  ENSP ID: ENSP00000448197
MNKPITPSTYVRCLNVGLIRKLSDFIDPQEGWKKLAVAIKKPSGDDRYNQFHIRCCSQNC

SEQ ID NO: 41724 - protein, 54 aa, Homo sapiens
  Payload ID: 8492
  Gene Symbol: IRAK4
  Gene Name: interleukin-1 receptor-associated kinase 4
  ENSP ID: ENSP00000449317
MNKPITPSTYVRCLNVGLIRKLSDFIDPQEGWKKLAVAIKKPSGDDRYNQFHIR

SEQ ID NO: 41725 - protein, 60 aa, Homo sapiens; identical to SEQ ID NO: 41723
  Payload ID: 8492
  Gene Symbol: IRAK4
  Gene Name: interleukin-1 receptor-associated kinase 4
  ENSP ID: ENSP00000449553

SEQ ID NO: 41726 - protein, 60 aa, Homo sapiens; identical to SEQ ID NO: 41723
  Payload ID: 8492
  Gene Symbol: IRAK4
  Gene Name: interleukin-1 receptor-associated kinase 4
  ENSP ID: ENSP00000449693

SEQ ID NO: 41727 - protein, 54 aa, Homo sapiens; identical to SEQ ID NO: 41724
  Payload ID: 8492
  Gene Symbol: IRAK4
  Gene Name: interleukin-1 receptor-associated kinase 4
  ENSP ID: ENSP00000449848

SEQ ID NO: 41728 - protein, 60 aa, Homo sapiens; identical to SEQ ID NO: 41723
  Payload ID: 8492
  Gene Symbol: IRAK4
  Gene Name: interleukin-1 receptor-associated kinase 4
  ENSP ID: ENSP00000449859

SEQ ID NO: 41729 - protein, 460 aa, Homo sapiens; identical to SEQ ID NO: 41721
  Payload ID: 8492
  Gene Symbol: IRAK4
  Gene Name: interleukin-1 receptor-associated kinase 4
  Uniprot ID: Q9NWZ3
  ENSP ID: ENSP00000479889

SEQ ID NO: 41730 - protein, 562 aa, Homo sapiens
  Payload ID: 8493
  Gene Symbol: IFFO1
  Gene Name: intermediate filament family orphan 1
  Uniprot ID: Q0D2I5
  ENSP ID: ENSP00000337593
MNPLFGPNLFLLQQEQQGLAGPLGDSLGGDHFAGGGDLPPAPLSPAGPAAYSPPGPGPAPPAAMALRNDLGSNINVLKTLNLRFRCFLAKVHELERRNRLLEKQLQQALEEGKQGRRGLGRRDQAVQTGFVSPIRPLGLQLGARPAAVCSPSARVLGSPARSPAGPLAPSAASLSSSSTSTSTTYSSSARFMPGTIWSFSHARRLGPGLEPTLVQGPGLSWVHPDGVGVQIDTITPEIRALYNVLAKVKRERDEYKRRWEEEYTVRIQLQDRVNELQEEAQEADACQEELALKVEQLKAELVVFKGLMSNNLSELDTKIQEKAMKVDMDICRRIDITAKLCDVAQQRNCEDMIQMFQKKLVPSMGGRKRERKAAVEEDTSLSESEGPRQPDGDEEESTALSINEEMQRMLNQLREYDFEDDCDSLTWEETEETLLLWEDFSGYAMAAAEAQGEQEDSLEKVIKDTESLFKTREKEYQETIDQIELELATAKNDMNRHLHEYMEMCSMKRGLDVQMETCRRLITQSGDRKSPAFTAVPLSDPPPPPSEAEDSDRDVSSDSSMR

SEQ ID NO: 41731 - protein, 563 aa, Homo sapiens
  Payload ID: 8493
  Gene Symbol: IFFO1
  Gene Name: intermediate filament family orphan 1
  Uniprot ID: Q0D2I5
  ENSP ID: ENSP00000349364
MNPLFGPNLFLLQQEQQGLAGPLGDSLGGDHFAGGGDLPPAPLSPAGPAAYSPPGPGPAPPAAMALRNDLGSNINVLKTLNLRFRCFLAKVHELERRNRLLEKQLQQALEEGKQGRRGLGRRDQAVQTGFVSPIRPLGLQLGARPAAVCSPSARVLGSPARSPAGPLAPSAASLSSSSTSTSTTYSSSARFMPGTIWSFSHARRLGPGLEPTLVQGPGLSWVHPDGVGVQIDTITPEIRALYNVLAKVKRERDEYKRRWEEEYTVRIQLQDRVNELQEEAQEADACQEELALKVEQLKAELVVFKGLMSNNLSELDTKIQEKAMKVDMDICRRIDITAKLCDVAQQRNCEDMIQMFQKKLVPSMGGRKRERKAAVEEDTSLSESEGPRQPDGDEEESTALSINEEMQRMLNQLREYDFEDDCDSLTWEETEETLLLWEDFSGYAMAAAEAQGEQQEDSLEKVIKDTESLFKTREKEYQETIDQIELELATAKNDMNRHLHEYMEMCSMKRGLDVQMETCRRLITQSGDRKSPAFTAVPLSDPPPPPSEAEDSDRDVSSDSSMR

SEQ ID NO: 41732 - protein, 559 aa, Homo sapiens
  Payload ID: 8493
  Gene Symbol: IFFO1
  Gene Name: intermediate filament family orphan 1
  Uniprot ID: Q0D2I5
  ENSP ID: ENSP00000380052
MNPLFGPNLFLLQQEQQGLAGPLGDSLGGDHFAGGGDLPPAPLSPAGPAAYSPPGPGPAPPAAMALRNDLGSNINVLKTLNLRFRCFLAKVHELERRNRLLEKQLQQALEEGKQGRRGLGRRDQAVQTGFVSPIRPLGLQLGARPAAVCSPSARVLGSPARSPAGPLAPSAASLSSSSTSTSTTYSSSARFMPGTIWSFSHARRLGPGLEPTLVQGPGLSWVHPDGVGVQIDTITPEIRALYNVLAKVKRERDEYKRRWEEEYTVRIQLQDRVNELQEEAQEADACQEELALKVEQLKAELVVFKGLMSNNLSELDTKIQEKAMKVDMDICRRIDITAKLCDVAQQRNCEDMIQMFQVPSMGGRKRERKAAVEEDTSLSESEGPRQPDGDEEESTALSINEEMQRMLNQLREYDFEDDCDSLTWEETEETLLLWEDFSGYAMAAAEAQGEQEDSLEKVIKDTESLFKTREKEYQETIDQIELELATAKNDMNRHLHEYMEMCSMKRGLDVQMETCRRLITQSGDRKSPAFTAVPLSDPPPPPSEAEDSDRDVSSDSSMR

SEQ ID NO: 41733 - protein, 256 aa, Homo sapiens
  Payload ID: 8493
  Gene Symbol: IFFO1
  Gene Name: intermediate filament family orphan 1
  ENSP ID: ENSP00000390721
MSNNLSELDTKIQEKAMKVDMDICRRIDITAKLCDVAQQRNCEDMIQMFQKKLVPSMGGRKRERKAAVEEDTSLSESEGPRQPDGDEEESTALSINEEMQRMLNQLREYDFEDDCDSLTWEETEETLLLWEDFSGYAMAAAEAQGEQQEDSLEKVIKDTESLFKTREKEYQETIDQIELELATAKNDMNRHLHEYMEMCSMKRGLDVQMETCRRLITQSGDRKSPAFTAVPLSDPPPPPSEAEDSDRDVSSDSSMR

SEQ ID NO: 41734 - protein, 264 aa, Homo sapiens
  Payload ID: 8493
  Gene Symbol: IFFO1
  Gene Name: intermediate filament family orphan 1
  Uniprot ID: Q0D2I5
  ENSP ID: ENSP00000432493
MNPLFGPNLFLLQQEQQGLAGPLGDSLGGDHFAGGGDLPPAPLSPAGPAAYSPPGPGPAPPAAMALRNDLGSNINVLKTLNLRFRCFLAKVHELERRNRLLEKQLQQALEEGKQGRRGLGRRDQAVQTGFVSPIRPLGLQLGARPAAVCSPSARVLGSPARSPAGPLAPSAASLSSSSTSTSTTYSSSARFMPGTIWSFSHARRLGPGLEPTLVQGPGLSWVHPDGVGVQIDTITPEIRALYNVLAKVKRERDEYKRRCFYRVK

SEQ ID NO: 41735 - protein, 255 aa, Homo sapiens
  Payload ID: 8493
  Gene Symbol: IFFO1
  Gene Name: intermediate filament family orphan 1
  ENSP ID: ENSP00000436261
MSNNLSELDTKIQEKAMKVDMDICRRIDITAKLCDVAQQRNCEDMIQMFQKKLVPSMGGRKRERKAAVEEDTSLSESEGPRQPDGDEEESTALSINEEMQRMLNQLREYDFEDDCDSLTWEETEETLLLWEDFSGYAMAAAEAQGEQEDSLEKVIKDTESLFKTREKEYQETIDQIELELATAKNDMNRHLHEYMEMCSMKRGLDVQMETCRRLITQSGDRKSPAFTAVPLSDPPPPPSEAEDSDRDVSSDSSMR

SEQ ID NO: 41736 - protein, 571 aa, Homo sapiens
  Payload ID: 8493
  Gene Symbol: IFFO1
  Gene Name: intermediate filament family orphan 1
  ENSP ID: ENSP00000482285
MNPLFGPNLFLLQQEQQGLAGPLGDSLGGDHFAGGGDLPPAPLSPAGPAAYSPPGPGPAPPAAMALRNDLGSNINVLKTLNLRFRCFLAKVHELERRNRLLEKQLQQALEEGKQGRRGLGRRDQAVQTGFVSPIRPLGLQLGARPAAVCSPSARVLGSPARSPAGPLAPSAASLSSSSTSTSTTYSSSARFMPGTIWSFSHARRLGPGLEPTLVQGPGLSWVHPDGVGVQIDTITPEIRALYNVLAKVKRERDEYKRRWEEEYTVRIQLQDRVNELQEEAQEADACQEELALKVEQLKAELVVFKGLMSNNLSELDTKIQEKAMKVDMDICRRIDITAKLCDVAQQRNCEDMIQMFQKKLSLHLSPIKVPSMGGRKRERKAAVEEDTSLSESEGPRQPDGDEEESTALSINEEMQRMLNQLREYDFEDDCDSLTWEETEETLLLWEDFSGYAMAAAEAQGEQQEDSLEKVIKDTESLFKTREKEYQETIDQIELELATAKNDMNRHLHEYMEMCSMKRGLDVQMETCRRLITQSGDRKSPAFTAVPLSDPPPPPSEAEDSDRDVSSDSSMR

SEQ ID NO: 41737 - protein, 256 aa, Homo sapiens; identical to SEQ ID NO: 41733
  Payload ID: 8493
  Gene Symbol: IFFO1
  Gene Name: intermediate filament family orphan 1
  ENSP ID: ENSP00000482340

SEQ ID NO: 41738 - protein, 88 aa, Homo sapiens
  Payload ID: 8494
  Gene Symbol: IFFO2
  Gene Name: intermediate filament family orphan 2
  ENSP ID: ENSP00000347820
CNPTIDLQGELELATAKSDMNRHLHEYMEMCSMKRGLDVQMETCRRLIKGSADRNSPSPSSVASSDSGSTDEIQDEFEREADVEPMVS

SEQ ID NO: 41739 - protein, 517 aa, Homo sapiens
  Payload ID: 8494
  Gene Symbol: IFFO2
  Gene Name: intermediate filament family orphan 2
  Uniprot ID: Q5TF58
  ENSP ID: ENSP00000387941
MVNSLLFGEMALAFGCPPGGGGGGCPGGGGGGGGAGPGPSPVTAALRDDLGSNIHLLKGLNVRFRCFLAKVHELERRNRLLEKQLEQQQSERERRLRYKTFSREQAVQTGPELLRPPAPGGGHGLSSGAAAGANANAVALGGLPPGGGSHPQHYGRLPGTIWSYTQVRRTGGGGVETVQGPGVSWVHPDGVGVQIDTITPEIRALYNVLAKVKRERDEYKRRWEEELAKRMNLQTMVDTLQEAAQEADAIQEEMNEKIERLKAELVVFKGLMSDPMTDLDTKIQEKAMKVDMDICRRIDITAKLCDVAQQRNSEDVSKIFQVVPKKKERKVASDDDISEQDGEVNRFSDDEVGSMNITDEMKRMFNQLRETFDFDDDCDSLTWEENEDTLLLWEDFTNCNPTIDLQGEQEENLGNLIHETESFFKTRDKEYQETIGQIELELATAKSDMNRHLHEYMEMCSMKRGLDVQMETCRRLIKGSADRNSPSPSSVASSDSGSTDEIQDEFEREADVEPMVS

SEQ ID NO: 41740 - protein, 259 aa, Homo sapiens
  Payload ID: 8494
  Gene Symbol: IFFO2
  Gene Name: intermediate filament family orphan 2
  ENSP ID: ENSP00000394655
  MOD_RES (1)..(1): Any amino acid
XKRERDEYKRRWEEELAKRMNLQTMVDTLQEAAQEADAIQEEMNEKIERLKAELVVFKGLMSDVVPKKKERKVASDDDISEQDGEVNRFSDDEVGSMNITDEMKRMFNQLRETFDFDDDCDSLTWEENEDTLLLWEDFTNCNPTIDLQGEQEENLGNLIHETESFFKTRDKEYQETIGQIELELATAKSDMNRHLHEYMEMCSMKRGLDVQMETCRRLIKGSADRNSPSPSSVASSDSGSTDEIQDEFEREADVEPMVS

SEQ ID NO: 41741 - protein, 499 aa, Homo sapiens
  Payload ID: 8495
  Gene Symbol: INA
  Gene Name: internexin neuronal intermediate filament protein, alpha
  Uniprot ID: Q16352
  ENSP ID: ENSP00000358865
MSFGSEHYLCSSSSYRKVFGDGSRLSARLSGAGGAGGFRSQSLSRSNVASSAACSSASSLGLGLAYRRPPASDGLDLSQAAARTNEYKIIRTNEKEQLQGLNDRFAVFIEKVHQLETQNRALEAELAALRQRHAEPSRVGELFQRELRDLRAQLEEASSARSQALLERDGLAEEVQRLRARCEEESRGREGAERALKAQQRDVDGATLARLDLEKKVESLLDELAFVRQVHDEEVAELLATLQASSQAAAEVDVTVAKPDLTSALREIRAQYESLAAKNLQSAEEWYKSKFANLNEQAARSTEAIRASREEIHEYRRQLQARTIEIEGLRGANESLERQILELEERHSAEVAGYQDSIGQLENDLRNTKSEMARHLREYQDLLNVKMALDIEIAAYRKLLEGEETRFSTSGLSISGLNPLPNPSYLLPPRILSATTSKVSSTGLSLKKEEEEEEASKVASKKTSQIGESFEEILEETVISTKKTEKSNIEETTISSQKI

SEQ ID NO: 41742 - protein, 496 aa, Homo sapiens
  Payload ID: 8495
  Gene Symbol: INA
  Gene Name: internexin neuronal intermediate filament protein, alpha
  ENSP ID: ENSP00000481793
MSFGSEHYLCSSSSYRKVFGDGSRLSARLSGAGGAGASAQSLSRSNVASSAACSSASSLGLGLAYRRPPASDGLDLSQAAARTNEYKIIRTNEKEQLQGLNDRFAVFIEKVHQLETQNRALEAELARCDSHAEPSRVGELFQRELRDLRAQLEEASSARSQALLERDGLAEEVQRLRARCEEESRGRERRARLKAQQRDVDGATLARLDLEKKVESLLDELAFVRQVHDEEVAELLATLQASSQAAAEVDVTVAKPDLTSALREIRAQYESLAAKNLQSAEEWYKSKFANLNEQAARSTEAIRASREEIHEYRRQLQARTIEIEGLRGANESLERQILELEERHSAEVAGYQDSIGQLENDLRNTKSEMARHLREYQDLLNVKMALDIEIAAYRKLLEGEETRFSTSGLSISGLNPLPNPSYLLPPRILSATTSKVSSTGLSLKKEEEEEEASKVASKKTSQIGESFEEILEETVISTKKTEKSNIEETTISSQKI

SEQ ID NO: 41743 - protein, 797 aa, Homo sapiens
  Payload ID: 8496
  Gene Symbol: IMPG1
  Gene Name: interphotoreceptor matrix proteoglycan 1
  Uniprot ID: Q17R60
  ENSP ID: ENSP00000358966
MYLETRRAIFVFWIFLQVQGTKDISINIYHSETKDIDNPPRNETTESTEKMYKMSTMRRIFDLAKHRTKRSAFFPTGVKVCPQESMKQILDSLQAYYRLRVCQEAVWEAYRIFLDRIPDTGEYQDWVSICQQETFCLFDIGKNFSNSQEHLDLLQQRIKQRSFPDRKDEISAEKTLGEPGETIVISTDVANVSLGPFPLTPDDTLLNEILDNTLNDTKMPTTERETEFAVLEEQRVELSVSLVNQKFKAELADSQSPYYQELAGKSQLQMQKIFKKLPGFKKIHVLGFRPKKEKDGSSSTEMQLTAIFKRHSAEAKSPASDLLSFDSNKIESEEVYHGTMEEDKQPEIYLTATDLKRLISKALEEEQSLDVGTIQFTDEIAGSLPAFGPDTQSELPTSFAVITEDATLSPELPPVEPQLETVDGAEHGLPDTSWSPPAMASTSLSEAPPFFMASSIFSLTDQGTTDTMATDQTMLVPGLTIPTSDYSAISQLALGISHPPASSDDSRSSAGGEDMVRHLDEMDLSDTPAPSEVPELSEYVSVPDHFLEDTTPVSALQYITTSSMTIAPKGRELVVFFSLRVANMAFSNDLFNKSSLEYRALEQQFTQLLVPYLRSNLTGFKQLEILNFRNGSVIVNSKMKFAKSVPYNLTKAVHGVLEDFRSAAAQQLHLEIDSYSLNIEPADQADPCKFLACGEFAQCVKNERTEEAECRCKPGYDSQGSLDGLEPGLCGPGTKECEVLQGKGAPCRLPDHSENQAYKTSVKKFQNQQNNKVISKRNSELLTVEYEEFNHQDWEGN

SEQ ID NO: 41744 - protein, 158 aa, Homo sapiens
  Payload ID: 8496
  Gene Symbol: IMPG1
  Gene Name: interphotoreceptor matrix proteoglycan 1
  ENSP ID: ENSP00000358968
ERPNGTSAQPAQVKPEFYRQAELKPCPWTGSNQRRCITFCPTPDQADPCKFLACGEFAQCVKNERTEEAECRCKPGYDSQGSLDGLEPGLCGPGTKECEVLQGKGAPCRLPDHSENQAYKTSVKKFQNQQNNKVISKRNSELLTVEYEEFNHQDWEGN

SEQ ID NO: 41745 - protein, 140 aa, Homo sapiens
  Payload ID: 8496
  Gene Symbol: IMPG1
  Gene Name: interphotoreceptor matrix proteoglycan 1
  ENSP ID: ENSP00000358980
MKQILDSLQAYYRLRVCQEAVWEAYRIFLDRIPDTGEYQDWVSICQQETFCLFDIGKNFSNSQEHLDLLQQRIKQRSFPDRKDEISAEKTLGEPGETIVISTEKNKGKTKPFNILQFGNNHHEHLLPIFCLLSSIIYTYY

SEQ ID NO: 41746 - protein, 719 aa, Homo sapiens
  Payload ID: 8496
  Gene Symbol: IMPG1
  Gene Name: interphotoreceptor matrix proteoglycan 1
  ENSP ID: ENSP00000481913
MYLETRRAIFVFWIFLQVQGTKVCQEAVWEAYRIFLDRIPDTGEYQDWVSICQQETFCLFDIGKNFSNSQEHLDLLQQRIKQRSFPDRKDEISAEKTLGEPGETIVISTDVANVSLGPFPLTPDDTLLNEILDNTLNDTKMPTTERETEFAVLEEQRVELSVSLVNQKFKAELADSQSPYYQELAGKSQLQMQKIFKKLPGFKKIHVLGFRPKKEKDGSSSTEMQLTAIFKRHSAEAKSPASDLLSFDSNKIESEEVYHGTMEEDKQPEIYLTATDLKRLISKALEEEQSLDVGTIQFTDEIAGSLPAFGPDTQSELPTSFAVITEDATLSPELPPVEPQLETVDGAEHGLPDTSWSPPAMASTSLSEAPPFFMASSIFSLTDQGTTDTMATDQTMLVPGLTIPTSDYSAISQLALGISHPPASSDDSRSSAGGEDMVRHLDEMDLSDTPAPSEVPELSEYVSVPDHFLEDTTPVSALQYITTSSMTIAPKGRELVVFFSLRVANMAFSNDLFNKSSLEYRALEQQFTQLLVPYLRSNLTGFKQLEILNFRNGSVIVNSKMKFAKSVPYNLTKAVHGVLEDFRSAAAQQLHLEIDSYSLNIEPADQADPCKFLACGEFAQCVKNERTEEAECRCKPGYDSQGSLDGLEPGLCGPGTKECEVLQGKGAPCRLPDHSENQAYKTSVKKFQNQQNNKVISKRNSELLTVEYEEFNHQDWEGN

SEQ ID NO: 41747 - protein, 1241 aa, Homo sapiens
  Payload ID: 8497
  Gene Symbol: IMPG2
  Gene Name: interphotoreceptor matrix proteoglycan 2
  Uniprot ID: Q9BZV3
  ENSP ID: ENSP00000193391
MIMFPLFGKISLGILIFVLIEGDFPSLTAQTYLSIEEIQEPKSAVSFLLPEESTDLSLATKKKQPLDRRETERQWLIRRRRSILFPNGVKICPDESVAEAVANHVKYFKVRVCQEAVWEAFRTFWDRLPGREEYHYWMNLCEDGVTSIFEMGTNFSESVEHRSLIMKKLTYAKETVSSSELSSPVPVGDTSTLGDTTLSVPHPEVDAYEGASESSLERPEESISNEIENVIEEATKPAGEQIAEFSIHLLGKQYREELQDSSSFHHQHLEEEFISEVENAFTGLPGYKEIRVLEFRSPKENDSGVDVYYAVTFNGEAISNTTWDLISLHSNKVENHGLVELDDKPTVVYTISNFRDYIAETLQQNFLLGNSSLNPDPDSLQLINVRGVLRHQTEDLVWNTQSSSLQATPSSILDNTFQAAWPSADESITSSIPPLDFSSGPPSATGRELWSESPLGDLVSTHKLAFPSKMGLSSSPEVLEVSSLTLHSVTPAVLQTGLPVASEERTSGSHLVEDGLANVEESEDFLSIDSLPSSSFTQPVPKETIPSMEDSDVSLTSSPYLTSSIPFGLDSLTSKVKDQLKVSPFLPDASMEKELIFDGGLGSGSGQKVDLITWPWSETSSEKSAEPLSKPWLEDDDSLLPAEIEDKKLVLVDKMDSTDQISKHSKYEHDDRSTHFPEEEPLSGPAVPIFADTAAESASLTLPKHISEVPGVDDYSVTKAPLILTSVAISASTDKSDQADAILREDMEQITESSNYEWFDSEVSMVKPDMQTLWTILPESERVWTRTSSLEKLSRDILASTPQSADRLWLSVTQSTKLPPTTISTLLEDEVIMGVQDISLELDRIGTDYYQPEQVQEQNGKVGSYVEMSTSVHSTEMVSVAWPTEGGDDLSYTQTSGALVVFFSLRVTNMMFSEDLFNKNSLEYKALEQRFLELLVPYLQSNLTGFQNLEILNFRNGSIVVNSRMKFANSVPPNVNNAVYMILEDFCTTAYNTMNLAIDKYSLDVESGDEANPCKFQACNEFSECLVNPWSGEAKCRCFPGYLSVEERPCQSLCDLQPDFCLNDGKCDIMPGHGAICRCRVGENWWYRGKHCEEFVSEPVIIGITIASVVGLLVIFSAIIYFFIRTLQAHHDRSERESPFSGSSRQPDSLSSIENAVKYNPVYESHRAGCEKYEGPYPQHPFYSSASGDVIGGLSREEIRQMYESSELSREEIQERMRVLELYANDPEFAAFVREQQVEEV

SEQ ID NO: 41748 - protein, 237 aa, Homo sapiens
  Payload ID: 8498
  Gene Symbol: ITSN1
  Gene Name: intersectin 1 (SH3 domain protein)
  ENSP ID: ENSP00000369294
MGGIASMPPLTAVAPVPMGSIPVVGMSPTLVSSVPTAAVPPLANGAPPVIQPLPAFAHPAATLPKSSSFSRSGPGSQLNTKLQKAQSFDVASVPPVAEWAVPQSSRLKYRQLFNSHDKTMSGHLTGPQARTILMQSSLPQAQLASIWNLSDIDQDGKLTAEEFILAMHLIDVAMSGQPLPPVLPPEYIPPSFRRVRSGSGISVISSTSVDQRLPEEPVLEDEQQQLEKKLPVAVFLV

SEQ ID NO: 41749 - protein, 361 aa, Homo sapiens
  Payload ID: 8498
  Gene Symbol: ITSN1
  Gene Name: intersectin 1 (SH3 domain protein)
  ENSP ID: ENSP00000370683
MAQFPTPFGGSLDIWAITVEERAKHDQQFHSLKPISGFITGDQARNFFFQSGLPQPVLAQIWALADMNNDGRMDQVEFSIAMKLIKLKLQGYQLPSALPPVMKQQPVAISSAPAFAATLPKSSSFSRSGPGSQLNTKLQKAQSFDVASVPPVAEWAVPQSSRLKYRQLFNSHDKTMSGHLTGPQARTILMQSSLPQAQLASIWNLSDIDQDGKLTAEEFILAMHLIDVAMSGQPLPPVLPPEYIPPSFRRVRSGSGISVISSTSVDQRLPEEPVLEDEQQQLEKKLPVTFEDKKRENFERGNLELEKRRQALLEQQRKEQERLAQLERAEQERKERERQEQERKRQLELEKQLEKQRELER

SEQ ID NO: 41750 - protein, 317 aa, Homo sapiens
  Payload ID: 8498
  Gene Symbol: ITSN1
  Gene Name: intersectin 1 (SH3 domain protein)
  ENSP ID: ENSP00000370684
  MOD_RES (1)..(1): Any amino acid
XPLMESELLTEKEVAMIFVNWKELIMCNIKLLKALRVRKKMSGEKMPVKMIGDILSAQLPHMQPYIRFCSRQLNGAALIQQKTDEAPDFKEFVKRLAMDPRCKGMPLSSFILKPMQRVTRYPLIIKNQLVFNSVTNCLGPRKFLHSGKLYKAKSNKELYGFLFNDFLLLTQITKPLGSSGTDKVFSPKSNLQYKMYKTPIFLNEVLVKLPTDPSGDEPIFHISHIDRVYTLRAESINERTAWVQKIKAASELYIETEKKKREKAYLVRSQRATGIGRLMVNVVEGIELKPCRSHGKSNPYCEVTMGSQCHITKTIQD

SEQ ID NO: 41751 - protein, 877 aa, Homo sapiens
  Payload ID: 8498
  Gene Symbol: ITSN1
  Gene Name: intersectin 1 (SH3 domain protein)
  ENSP ID: ENSP00000370685
MAQFPTPFGGSLDIWAITVEERAKHDQQFHSLKPISGFITGDQARNFFFQSGLPQPVLAQIWALADMNNDGRMDQVEFSIAMKLIKLKLQGYQLPSALPPVMKQQPVAISSAPAFAAVPPLANGAPPVIQPLPAFAHPAATLPKSSSFSRSGPGSQLNTKLQKAQSFDVASVPPVAEWAVPQSSRLKYRQLFNSHDKTMSGHLTGPQARTILMQSSLPQAQLASIWNLSDIDQDGKLTAEEFILAMHLIDVAMSGQPLPPVLPPEYIPPSFRRVRSGSGISVISSTSVDQRLPEEPVLEDEQQQLEKKLPVTFEDKKRENFERGNLELEKRRQALLEQQRKEQERLAQLERAEQERKERERQEQERKRQLELEKQLEKQRELERQREEERRKEIERREAAKRELERQRQLEWERNRRQELLNQRNKEQEDIVVLKAKKKTLEFELEALNDKKHQLEGKLQDIRCRLTTQRQEIESTNKSRELRIAEITHLQQQLQESQQMLGRLIPEKQILNDQLKQVQQNSLHRDSLVTLKRALEAKELARQHLRDQLDEVEKETRSKLQEIDIFNNQLKELREIHNKQQLQKQKSMEAERLKQKEQERKIIELEKQKEEAQRRAQERDKQWLEHVQQEDEHQRPRKLHEEEKLKREESVKKKDGEEKGKQEAQDKLGRLFHQHQEPAKPAVQAPWSTAEKGPLTISAQENVKVVYYRALYPFESRSHDEITIQPGDIVMVDESQTGEPGWLGGELKGKTGWFPANYAEKIPENEVPAPVKPVTDSTSAPAPKLALRETPAPLAVTSSEPSTTPNNWADFSSTWPTSTNEKPETDNWDAWAAQPSLTVPSAGQLRQRSAFTPATATGSSPSPVLGQHGFWFFRESC

SEQ ID NO: 41752 - protein, 1220 aa, Homo sapiens
  Payload ID: 8498
  Gene Symbol: ITSN1
  Gene Name: intersectin 1 (SH3 domain protein)
  Uniprot ID: Q15811
  ENSP ID: ENSP00000370691
MAQFPTPFGGSLDIWAITVEERAKHDQQFHSLKPISGFITGDQARNFFFQSGLPQPVLAQIWALADMNNDGRMDQVEFSIAMKLIKLKLQGYQLPSALPPVMKQQPVAISSAPAFGMGGIASMPPLTAVAPVPMGSIPVVGMSPTLVSSVPTAAVPPLANGAPPVIQPLPAFAHPAATLPKSSSFSRSGPGSQLNTKLQKAQSFDVASVPPVAEWAVPQSSRLKYRQLFNSHDKTMSGHLTGPQARTILMQSSLPQAQLASIWNLSDIDQDGKLTAEEFILAMHLIDVAMSGQPLPPVLPPEYIPPSFRRVRSGSGISVISSTSVDQRLPEEPVLEDEQQQLEKKLPVTFEDKKRENFERGNLELEKRRQALLEQQRKEQERLAQLERAEQERKERERQEQERKRQLELEKQLEKQRELERQREEERRKEIERREAAKRELERQRQLEWERNRRQELLNQRNKEQEDIVVLKAKKKTLEFELEALNDKKHQLEGKLQDIRCRLTTQRQEIESTNKSRELRIAEITHLQQQLQESQQMLGRLIPEKQILNDQLKQVQQNSLHRDSLVTLKRALEAKELARQHLRDQLDEVEKETRSKLQEIDIFNNQLKELREIHNKQQLQKQKSMEAERLKQKEQERKIIELEKQKEEAQRRAQERDKQWLEHVQQEDEHQRPRKLHEEEKLKREESVKKKDGEEKGKQEAQDKLGRLFHQHQEPAKPAVQAPWSTAEKGPLTISAQENVKVVYYRALYPFESRSHDEITIQPGDIVMVKGEWVDESQTGEPGWLGGELKGKTGWFPANYAEKIPENEVPAPVKPVTDSTSAPAPKLALRETPAPLAVTSSEPSTTPNNWADFSSTWPTSTNEKPETDNWDAWAAQPSLTVPSAGQLRQRSAFTPATATGSSPSPVLGQGEKVEGLQAQALYPWRAKKDNHLNFNKNDVITVLEQQDMWWFGEVQGQKGWFPKSYVKLISGPIRKSTSMDSGSSESPASLKRVASPAAKPVVSGEEFIAMYTYESSEQGDLTFQQGDVILVTKKDGDWWTGTVGDKAGVFPSNYVRLKDSEGSGTAGKTGSLGKKPEIAQVIASYTATGPEQLTLAPGQLILIRKKNPGGWWEGELQARGKKRQIGWFPANYVKLLSPGTSKITPTEPPKSTALAAVCQVIGMYDYTAQNDDELAFNKGQIINVLNKEDPDWWKGEVNGQVGLFPSNYVKLTTDMDPSQQ

SEQ ID NO: 41753 - protein, 1721 aa, Homo sapiens
  Payload ID: 8498
  Gene Symbol: ITSN1
  Gene Name: intersectin 1 (SH3 domain protein)
  Uniprot ID: Q15811
  ENSP ID: ENSP00000370719
MAQFPTPFGGSLDIWAITVEERAKHDQQFHSLKPISGFITGDQARNFFFQSGLPQPVLAQIWALADMNNDGRMDQVEFSIAMKLIKLKLQGYQLPSALPPVMKQQPVAISSAPAFGMGGIASMPPLTAVAPVPMGSIPVVGMSPTLVSSVPTAAVPPLANGAPPVIQPLPAFAHPAATLPKSSSFSRSGPGSQLNTKLQKAQSFDVASVPPVAEWAVPQSSRLKYRQLFNSHDKTMSGHLTGPQARTILMQSSLPQAQLASIWNLSDIDQDGKLTAEEFILAMHLIDVAMSGQPLPPVLPPEYIPPSFRRVRSGSGISVISSTSVDQRLPEEPVLEDEQQQLEKKLPVTFEDKKRENFERGNLELEKRRQALLEQQRKEQERLAQLERAEQERKERERQEQERKRQLELEKQLEKQRELERQREEERRKEIERREAAKRELERQRQLEWERNRRQELLNQRNKEQEDIVVLKAKKKTLEFELEALNDKKHQLEGKLQDIRCRLTTQRQEIESTNKSRELRIAEITHLQQQLQESQQMLGRLIPEKQILNDQLKQVQQNSLHRDSLVTLKRALEAKELARQHLRDQLDEVEKETRSKLQEIDIFNNQLKELREIHNKQQLQKQKSMEAERLKQKEQERKIIELEKQKEEAQRRAQERDKQWLEHVQQEDEHQRPRKLHEEEKLKREESVKKKDGEEKGKQEAQDKLGRLFHQHQEPAKPAVQAPWSTAEKGPLTISAQENVKVVYYRALYPFESRSHDEITIQPGDIVMVKGEWVDESQTGEPGWLGGELKGKTGWFPANYAEKIPENEVPAPVKPVTDSTSAPAPKLALRETPAPLAVTSSEPSTTPNNWADFSSTWPTSTNEKPETDNWDAWAAQPSLTVPSAGQLRQRSAFTPATATGSSPSPVLGQGEKVEGLQAQALYPWRAKKDNHLNFNKNDVITVLEQQDMWWFGEVQGQKGWFPKSYVKLISGPIRKSTSMDSGSSESPASLKRVASPAAKPVVSGEEFIAMYTYESSEQGDLTFQQGDVILVTKKDGDWWTGTVGDKAGVFPSNYVRLKDSEGSGTAGKTGSLGKKPEIAQVIASYTATGPEQLTLAPGQLILIRKKNPGGWWEGELQARGKKRQIGWFPANYVKLLSPGTSKITPTEPPKSTALAAVCQVIGMYDYTAQNDDELAFNKGQIINVLNKEDPDWWKGEVNGQVGLFPSNYVKLTTDMDPSQQWCSDLHLLDMLTPTERKRQGYIHELIVTEENYVNDLQLVTEIFQKPLMESELLTEKEVAMIFVNWKELIMCNIKLLKALRVRKKMSGEKMPVKMIGDILSAQLPHMQPYIRFCSRQLNGAALIQQKTDEAPDFKEFVKRLAMDPRCKGMPLSSFILKPMQRVTRYPLIIKNILENTPENHPDHSHLKHALEKAEELCSQVNEGVREKENSDRLEWIQAHVQCEGLSEQLVFNSVTNCLGPRKFLHSGKLYKAKSNKELYGFLFNDFLLLTQITKPLGSSGTDKVFSPKSNLQYKMYKTPIFLNEVLVKLPTDPSGDEPIFHISHIDRVYTLRAESINERTAWVQKIKAASELYIETEKKKREKAYLVRSQRATGIGRLMVNVVEGIELKPCRSHGKSNPYCEVTMGSQCHITKTIQDTLNPKWNSNCQFFIRDLEQEVLCITVFERDQFSPDDFLGRTEIRVADIKKDQGSKGPVTKCLLLHEVPTGEIVVRLDLQLFDEP

SEQ ID NO: 41754 - protein, 1020 aa, Homo sapiens
  Payload ID: 8498
  Gene Symbol: ITSN1
  Gene Name: intersectin 1 (SH3 domain protein)
  Uniprot ID: Q15811
  ENSP ID: ENSP00000382275
MAQFPTPFGGSLDIWAITVEERAKHDQQFHSLKPISGFITGDQARNFFFQSGLPQPVLAQIWALADMNNDGRMDQVEFSIAMKLIKLKLQGYQLPSALPPVMKQQPVAISSAPAFGMGGIASMPPLTAVAPVPMGSIPVVGMSPTLVSSVPTAAVPPLANGAPPVIQPLPAFAHPAATLPKSSSFSRSGPGSQLNTKLQKAQSFDVASVPPVAEWAVPQSSRLKYRQLFNSHDKTMSGHLTGPQARTILMQSSLPQAQLASIWNLSDIDQDGKLTAEEFILAMHLIDVAMSGQPLPPVLPPEYIPPSFRRVRSGSGISVISSTSVDQRLPEEPVLEDEQQQLEKKLPVTFEDKKRENFERGNLELEKRRQALLEQQRKEQERLAQLERAEQERKERERQEQERKRQLELEKQLEKQRELERQREEERRKEIERREAAKRELERQRQLEWERNRRQELLNQRNKEQEDIVVLKAKKKTLEFELEALNDKKHQLEGKLQDIRCRLTTQRQEIESTNKSRELRIAEITHLQQQLQESQQMLGRLIPEKQILNDQLKQVQQNSLHRDSLVTLKRALEAKELARQHLRDQLDEVEKETRSKLQEIDIFNNQLKELREIHNKQQLQKQKSMEAERLKQKEQERKIIELEKQKEEAQRRAQERDKQWLEHVQQEDEHQRPRKLHEEEKLKREESVKKKDGEEKGKQEAQDKLGRLFHQHQEPAKPAVQAPWSTAEKGPLTISAQENVKVVYYRALYPFESRSHDEITIQPGDIVMVDESQTGEPGWLGGELKGKTGWFPANYAEKIPENEVPAPVKPVTDSTSAPAPKLALRETPAPLAVTSSEPSTTPNNWADFSSTWPTSTNEKPETDNWDAWAAQPSLTVPSAGQLRQRSAFTPATATGSSPSPVLGQPDFLLHPSMRLGHMQPRIVLLFPDPLQCSTSRLLPMLRPRPGVPFLRSPSCQSPSHPSRPISDAAPSVKFTLMPPGRIHPCFLFIPAVNSRNSFLVYFILPGGTLGCFYLCLPHYL

SEQ ID NO: 41755 - protein, 1144 aa, Homo sapiens
  Payload ID: 8498
  Gene Symbol: ITSN1
  Gene Name: intersectin 1 (SH3 domain protein)
  Uniprot ID: Q15811
  ENSP ID: ENSP00000382286
MAQFPTPFGGSLDIWAITVEERAKHDQQFHSLKPISGFITGDQARNFFFQSGLPQPVLAQIWALADMNNDGRMDQVEFSIAMKLIKLKLQGYQLPSALPPVMKQQPVAISSAPAFGMGGIASMPPLTAVAPVPMGSIPVVGMSPTLVSSVPTAAVPPLANGAPPVIQPLPAFAHPAATLPKSSSFSRSGPGSQLNTKLQKAQSFDVASVPPVAEWAVPQSSRLKYRQLFNSHDKTMSGHLTGPQARTILMQSSLPQAQLASIWNLSDIDQDGKLTAEEFILAMHLIDVAMSGQPLPPVLPPEYIPPSFRRVRSGSGISVISSTSVDQRLPEEPVLEDEQQQLEKKLPVTFEDKKRENFERGNLELEKRRQALLEQQRKEQERLAQLERAEQERKERERQEQERKRQLELEKQLEKQRELERQREEERRKEIERREAAKRELERQRQLEWERNRRQELLNQRNKEQEDIVVLKAKKKTLEFELEALNDKKHQLEGKLQDIRCRLTTQRQEIESTNKSRELRIAEITHLQQQLQESQQMLGRLIPEKQILNDQLKQVQQNSLHRDSLVTLKRALEAKELARQHLRDQLDEVEKETRSKLQEIDIFNNQLKELREIHNKQQLQKQKSMEAERLKQKEQERKIIELEKQKEEAQRRAQERDKQWLEHVQQEDEHQRPRKLHEEEKLKREESVKKKDGEEKGKQEAQDKLGRLFHQHQEPAKPAVQAPWSTAEKGPLTISAQENVKVVYYRALYPFESRSHDEITIQPGDIVMVDESQTGEPGWLGGELKGKTGWFPANYAEKIPENEVPAPVKPVTDSTSAPAPKLALRETPAPLAVTSSEPSTTPNNWADFSSTWPTSTNEKPETDNWDAWAAQPSLTVPSAGQLRQRSAFTPATATGSSPSPVLGQGEKVEGLQAQALYPWRAKKDNHLNFNKNDVITVLEQQDMWWFGEVQGQKGWFPKSYVKLISGPIRKSTSMDSGSSESPASLKRVASPAAKPVVSGEEIAQVIASYTATGPEQLTLAPGQLILIRKKNPGGWWEGELQARGKKRQIGWFPANYVKLLSPGTSKITPTEPPKSTALAAVCQVIGMYDYTAQNDDELAFNKGQIINVLNKEDPDWWKGEVNGQVGLFPSNYVKLTTDMDPSQQ

SEQ ID NO: 41756 - protein, 1215 aa, Homo sapiens
  Payload ID: 8498
  Gene Symbol: ITSN1
  Gene Name: intersectin 1 (SH3 domain protein)
  Uniprot ID: Q15811
  ENSP ID: ENSP00000382289
MAQFPTPFGGSLDIWAITVEERAKHDQQFHSLKPISGFITGDQARNFFFQSGLPQPVLAQIWALADMNNDGRMDQVEFSIAMKLIKLKLQGYQLPSALPPVMKQQPVAISSAPAFGMGGIASMPPLTAVAPVPMGSIPVVGMSPTLVSSVPTAAVPPLANGAPPVIQPLPAFAHPAATLPKSSSFSRSGPGSQLNTKLQKAQSFDVASVPPVAEWAVPQSSRLKYRQLFNSHDKTMSGHLTGPQARTILMQSSLPQAQLASIWNLSDIDQDGKLTAEEFILAMHLIDVAMSGQPLPPVLPPEYIPPSFRRVRSGSGISVISSTSVDQRLPEEPVLEDEQQQLEKKLPVTFEDKKRENFERGNLELEKRRQALLEQQRKEQERLAQLERAEQERKERERQEQERKRQLELEKQLEKQRELERQREEERRKEIERREAAKRELERQRQLEWERNRRQELLNQRNKEQEDIVVLKAKKKTLEFELEALNDKKHQLEGKLQDIRCRLTTQRQEIESTNKSRELRIAEITHLQQQLQESQQMLGRLIPEKQILNDQLKQVQQNSLHRDSLVTLKRALEAKELARQHLRDQLDEVEKETRSKLQEIDIFNNQLKELREIHNKQQLQKQKSMEAERLKQKEQERKIIELEKQKEEAQRRAQERDKQWLEHVQQEDEHQRPRKLHEEEKLKREESVKKKDGEEKGKQEAQDKLGRLFHQHQEPAKPAVQAPWSTAEKGPLTISAQENVKVVYYRALYPFESRSHDEITIQPGDIVMVDESQTGEPGWLGGELKGKTGWFPANYAEKIPENEVPAPVKPVTDSTSAPAPKLALRETPAPLAVTSSEPSTTPNNWADFSSTWPTSTNEKPETDNWDAWAAQPSLTVPSAGQLRQRSAFTPATATGSSPSPVLGQGEKVEGLQAQALYPWRAKKDNHLNFNKNDVITVLEQQDMWWFGEVQGQKGWFPKSYVKLISGPIRKSTSMDSGSSESPASLKRVASPAAKPVVSGEEFIAMYTYESSEQGDLTFQQGDVILVTKKDGDWWTGTVGDKAGVFPSNYVRLKDSEGSGTAGKTGSLGKKPEIAQVIASYTATGPEQLTLAPGQLILIRKKNPGGWWEGELQARGKKRQIGWFPANYVKLLSPGTSKITPTEPPKSTALAAVCQVIGMYDYTAQNDDELAFNKGQIINVLNKEDPDWWKGEVNGQVGLFPSNYVKLTTDMDPSQQ

SEQ ID NO: 41757 - protein, 1178 aa, Homo sapiens
  Payload ID: 8498
  Gene Symbol: ITSN1
  Gene Name: intersectin 1 (SH3 domain protein)
  Uniprot ID: Q15811
  ENSP ID: ENSP00000382290
MAQFPTPFGGSLDIWAITVEERAKHDQQFHSLKPISGFITGDQARNFFFQSGLPQPVLAQIWALADMNNDGRMDQVEFSIAMKLIKLKLQGYQLPSALPPVMKQQPVAISSAPAFAAVPPLANGAPPVIQPLPAFAHPAATLPKSSSFSRSGPGSQLNTKLQKAQSFDVASVPPVAEWAVPQSSRLKYRQLFNSHDKTMSGHLTGPQARTILMQSSLPQAQLASIWNLSDIDQDGKLTAEEFILAMHLIDVAMSGQPLPPVLPPEYIPPSFRRVRSGSGISVISSTSVDQRLPEEPVLEDEQQQLEKKLPVTFEDKKRENFERGNLELEKRRQALLEQQRKEQERLAQLERAEQERKERERQEQERKRQLELEKQLEKQRELERQREEERRKEIERREAAKRELERQRQLEWERNRRQELLNQRNKEQEDIVVLKAKKKTLEFELEALNDKKHQLEGKLQDIRCRLTTQRQEIESTNKSRELRIAEITHLQQQLQESQQMLGRLIPEKQILNDQLKQVQQNSLHRDSLVTLKRALEAKELARQHLRDQLDEVEKETRSKLQEIDIFNNQLKELREIHNKQQLQKQKSMEAERLKQKEQERKIIELEKQKEEAQRRAQERDKQWLEHVQQEDEHQRPRKLHEEEKLKREESVKKKDGEEKGKQEAQDKLGRLFHQHQEPAKPAVQAPWSTAEKGPLTISAQENVKVVYYRALYPFESRSHDEITIQPGDIVMVDESQTGEPGWLGGELKGKTGWFPANYAEKIPENEVPAPVKPVTDSTSAPAPKLALRETPAPLAVTSSEPSTTPNNWADFSSTWPTSTNEKPETDNWDAWAAQPSLTVPSAGQLRQRSAFTPATATGSSPSPVLGQGEKVEGLQAQALYPWRAKKDNHLNFNKNDVITVLEQQDMWWFGEVQGQKGWFPKSYVKLISGPIRKSTSMDSGSSESPASLKRVASPAAKPVVSGEEFIAMYTYESSEQGDLTFQQGDVILVTKKDGDWWTGTVGDKAGVFPSNYVRLKDSEGSGTAGKTGSLGKKPEIAQVIASYTATGPEQLTLAPGQLILIRKKNPGGWWEGELQARGKKRQIGWFPANYVKLLSPGTSKITPTEPPKSTALAAVCQVIGMYDYTAQNDDELAFNKGQIINVLNKEDPDWWKGEVNGQVGLFPSNYVKLTTDMDPSQQ

SEQ ID NO: 41758 - protein, 1149 aa, Homo sapiens
  Payload ID: 8498
  Gene Symbol: ITSN1
  Gene Name: intersectin 1 (SH3 domain protein)
  ENSP ID: ENSP00000382292
MAQFPTPFGGSLDIWAITVEERAKHDQQFHSLKPISGFITGDQARNFFFQSGLPQPVLAQIWALADMNNDGRMDQVEFSIAMKLIKLKLQGYQLPSALPPVMKQQPVAISSAPAFGMGGIASMPPLTAVAPVPMGSIPVVGMSPTLVSSVPTAAVPPLANGAPPVIQPLPAFAHPAATLPKSSSFSRSGPGSQLNTKLQKAQSFDVASVPPVAEWAVPQSSRLKYRQLFNSHDKTMSGHLTGPQARTILMQSSLPQAQLASIWNLSDIDQDGKLTAEEFILAMHLIDVAMSGQPLPPVLPPEYIPPSFRRVRSGSGISVISSTSVDQRLPEEPVLEDEQQQLEKKLPVTFEDKKRENFERGNLELEKRRQALLEQQRKEQERLAQLERAEQERKERERQEQERKRQLELEKQLEKQRELERQREEERRKEIERREAAKRELERQRQLEWERNRRQELLNQRNKEQEDIVVLKAKKKTLEFELEALNDKKHQLEGKLQDIRCRLTTQRQEIESTNKSRELRIAEITHLQQQLQESQQMLGRLIPEKQILNDQLKQVQQNSLHRDSLVTLKRALEAKELARQHLRDQLDEVEKETRSKLQEIDIFNNQLKELREIHNKQQLQKQKSMEAERLKQKEQERKIIELEKQKEEAQRRAQERDKQWLEHVQQEDEHQRPRKLHEEEKLKREESVKKKDGEEKGKQEAQDKLGRLFHQHQEPAKPAVQAPWSTAEKGPLTISAQENVKVVYYRALYPFESRSHDEITIQPGDIVMVKGEWVDESQTGEPGWLGGELKGKTGWFPANYAEKIPENEVPAPVKPVTDSTSAPAPKLALRETPAPLAVTSSEPSTTPNNWADFSSTWPTSTNEKPETDNWDAWAAQPSLTVPSAGQLRQRSAFTPATATGSSPSPVLGQGEKVEGLQAQALYPWRAKKDNHLNFNKNDVITVLEQQDMWWFGEVQGQKGWFPKSYVKLISGPIRKSTSMDSGSSESPASLKRVASPAAKPVVSGEEIAQVIASYTATGPEQLTLAPGQLILIRKKNPGGWWEGELQARGKKRQIGWFPANYVKLLSPGTSKITPTEPPKSTALAAVCQVIGMYDYTAQNDDELAFNKGQIINVLNKEDPDWWKGEVNGQVGLFPSNYVKLTTDMDPSQQ

SEQ ID NO: 41759 - protein, 1716 aa, Homo sapiens
  Payload ID: 8498
  Gene Symbol: ITSN1
  Gene Name: intersectin 1 (SH3 domain protein)
  Uniprot ID: Q15811
  ENSP ID: ENSP00000382301
MAQFPTPFGGSLDIWAITVEERAKHDQQFHSLKPISGFITGDQARNFFFQSGLPQPVLAQIWALADMNNDGRMDQVEFSIAMKLIKLKLQGYQLPSALPPVMKQQPVAISSAPAFGMGGIASMPPLTAVAPVPMGSIPVVGMSPTLVSSVPTAAVPPLANGAPPVIQPLPAFAHPAATLPKSSSFSRSGPGSQLNTKLQKAQSFDVASVPPVAEWAVPQSSRLKYRQLFNSHDKTMSGHLTGPQARTILMQSSLPQAQLASIWNLSDIDQDGKLTAEEFILAMHLIDVAMSGQPLPPVLPPEYIPPSFRRVRSGSGISVISSTSVDQRLPEEPVLEDEQQQLEKKLPVTFEDKKRENFERGNLELEKRRQALLEQQRKEQERLAQLERAEQERKERERQEQERKRQLELEKQLEKQRELERQREEERRKEIERREAAKRELERQRQLEWERNRRQELLNQRNKEQEDIVVLKAKKKTLEFELEALNDKKHQLEGKLQDIRCRLTTQRQEIESTNKSRELRIAEITHLQQQLQESQQMLGRLIPEKQILNDQLKQVQQNSLHRDSLVTLKRALEAKELARQHLRDQLDEVEKETRSKLQEIDIFNNQLKELREIHNKQQLQKQKSMEAERLKQKEQERKIIELEKQKEEAQRRAQERDKQWLEHVQQEDEHQRPRKLHEEEKLKREESVKKKDGEEKGKQEAQDKLGRLFHQHQEPAKPAVQAPWSTAEKGPLTISAQENVKVVYYRALYPFESRSHDEITIQPGDIVMVDESQTGEPGWLGGELKGKTGWFPANYAEKIPENEVPAPVKPVTDSTSAPAPKLALRETPAPLAVTSSEPSTTPNNWADFSSTWPTSTNEKPETDNWDAWAAQPSLTVPSAGQLRQRSAFTPATATGSSPSPVLGQGEKVEGLQAQALYPWRAKKDNHLNFNKNDVITVLEQQDMWWFGEVQGQKGWFPKSYVKLISGPIRKSTSMDSGSSESPASLKRVASPAAKPVVSGEEFIAMYTYESSEQGDLTFQQGDVILVTKKDGDWWTGTVGDKAGVFPSNYVRLKDSEGSGTAGKTGSLGKKPEIAQVIASYTATGPEQLTLAPGQLILIRKKNPGGWWEGELQARGKKRQIGWFPANYVKLLSPGTSKITPTEPPKSTALAAVCQVIGMYDYTAQNDDELAFNKGQIINVLNKEDPDWWKGEVNGQVGLFPSNYVKLTTDMDPSQQWCSDLHLLDMLTPTERKRQGYIHELIVTEENYVNDLQLVTEIFQKPLMESELLTEKEVAMIFVNWKELIMCNIKLLKALRVRKKMSGEKMPVKMIGDILSAQLPHMQPYIRFCSRQLNGAALIQQKTDEAPDFKEFVKRLAMDPRCKGMPLSSFILKPMQRVTRYPLIIKNILENTPENHPDHSHLKHALEKAEELCSQVNEGVREKENSDRLEWIQAHVQCEGLSEQLVFNSVTNCLGPRKFLHSGKLYKAKSNKELYGFLFNDFLLLTQITKPLGSSGTDKVFSPKSNLQYKMYKTPIFLNEVLVKLPTDPSGDEPIFHISHIDRVYTLRAESINERTAWVQKIKAASELYIETEKKKREKAYLVRSQRATGIGRLMVNVVEGIELKPCRSHGKSNPYCEVTMGSQCHITKTIQDTLNPKWNSNCQFFIRDLEQEVLCITVFERDQFSPDDFLGRTEIRVADIKKDQGSKGPVTKCLLLHEVPTGEIVVRLDLQLFDEP

SEQ ID NO: 41760 - protein, 237 aa, Homo sapiens; identical to SEQ ID NO: 41748
  Payload ID: 8498
  Gene Symbol: ITSN1
  Gene Name: intersectin 1 (SH3 domain protein)
  ENSP ID: ENSP00000387377

SEQ ID NO: 41761 - protein, 260 aa, Homo sapiens
  Payload ID: 8498
  Gene Symbol: ITSN1
  Gene Name: intersectin 1 (SH3 domain protein)
  ENSP ID: ENSP00000396054
  MOD_RES (1)..(1): Any amino acid
XVMVKGEWVDESQTGEPGWLGGELKGKTGWFPANYAEKIPENEVPAPVKPVTDSTSAPAPKLALRETPAPLAVTSSEPSTTPNNWADFSSTWPTSTNEKPETDNWDAWAAQPSLTVPSAGQLRQRSAFTPATATGSSPSPVLGQPDFLLHPSMRLGHMQPRIVLLFPDPLQCSTSRLLPMLRPRPGVPFLRSPSCQSPSHPSRPISDAAPSVKFTLMPPGRIHPCFLFIPAVNSRNSFLVYFILPGGTLGCFYLCLPHYL

SEQ ID NO: 41762 - protein, 115 aa, Homo sapiens
  Payload ID: 8498
  Gene Symbol: ITSN1
  Gene Name: intersectin 1 (SH3 domain protein)
  ENSP ID: ENSP00000400079
MAQFPTPFGGSLDIWAITVEERAKHDQQFHSLKPISGFITGDQARNFFFQSGLPQPVLAQIWALADMNNDGRMDQVEFSIAMKLIKLKLQGYQLPSALPPVMKQQPVAISSAPAF

SEQ ID NO: 41763 - protein, 78 aa, Homo sapiens
  Payload ID: 8498
  Gene Symbol: ITSN1
  Gene Name: intersectin 1 (SH3 domain protein)
  ENSP ID: ENSP00000407132
MAQFPTPFGGSLDIWAITVEERAKHDQQFHSLKPISGFITGDQARNFFFQSGLPQPVLAQIWALADMNNDGRMDQVEF

SEQ ID NO: 41764 - protein, 66 aa, Homo sapiens
  Payload ID: 8498
  Gene Symbol: ITSN1
  Gene Name: intersectin 1 (SH3 domain protein)
  ENSP ID: ENSP00000408319
  MOD_RES (1)..(1): Any amino acid
XENTPENHPDHSHLKHALEKAEELCSQVNEGVREKENSDRLEWIQAHVQCEGLSEDCLGAENQSCF

SEQ ID NO: 41765 - protein, 173 aa, Homo sapiens
  Payload ID: 8498
  Gene Symbol: ITSN1
  Gene Name: intersectin 1 (SH3 domain protein)
  ENSP ID: ENSP00000409800
ENTPENHPDHSHLKHALEKAEELCSQVNEGVREKENSDRLEWIQAHVQCEGLSEPIFLNEVLVKLPTDPSGDEPIFHISHIDRVYTLRAESINERTAWVQKIKAASELYIETEKKKREKAYLVRSQRATGIGRLMVNVVEGIELKPCRSHGKSNPYCEVTMGSQCHITKTIQD

SEQ ID NO: 41766 - protein, 60 aa, Homo sapiens
  Payload ID: 8498
  Gene Symbol: ITSN1
  Gene Name: intersectin 1 (SH3 domain protein)
  ENSP ID: ENSP00000411464
  MOD_RES (1)..(1): Any amino acid
XRALADMNNDGRMDQVEFSIAMKLIKLKLQGYQLPSALPPVMKQQPVAISSAPAFGGNSV

SEQ ID NO: 41767 - protein, 77 aa, Homo sapiens
  Payload ID: 8498
  Gene Symbol: ITSN1
  Gene Name: intersectin 1 (SH3 domain protein)
  ENSP ID: ENSP00000413290
  MOD_RES (1)..(1): Any amino acid
XWWFGEVQGQKGWFPKSYVKLISGPIRKSTSMDSGSSESPASLKRVASPAAKPVVSGEGLWNCWENREFRKKTWSLL

SEQ ID NO: 41768 - protein, 77 aa, Homo sapiens
  Payload ID: 8498
  Gene Symbol: ITSN1
  Gene Name: intersectin 1 (SH3 domain protein)
  ENSP ID: ENSP00000415302
HQHQEPAKPAVQAPWSTAEKGPLTISAQENVKVVYYRALYPFESRSHDEITIQPGDIVMGNGWMKAKLENPAGLEEN

SEQ ID NO: 41769 - protein, 1697 aa, Homo sapiens
  Payload ID: 8499
  Gene Symbol: ITSN2
  Gene Name: intersectin 2
  Uniprot ID: Q9NZM3
  ENSP ID: ENSP00000347244
MMAQFPTAMNGGPNMWAITSEERTKHDRQFDNLKPSGGYITGDQARNFFLQSGLPAPVLAEIWALSDLNKDGKMDQQEFSIAMKLIKLKLQGQQLPVVLPPIMKQPPMFSPLISARFGMGSMPNLSIPQPLPPAAPITSLSSATSGTNLPPLMMPTPLVPSVSTSSLPNGTASLIQPLPIPYSSSTLPHGSSYSLMMGGFGGASIQKAQSLIDLGSSSSTSSTASLSGNSPKTGTSEWAVPQPTRLKYRQKFNTLDKSMSGYLSGFQARNALLQSNLSQTQLATIWTLADVDGDGQLKAEEFILAMHLTDMAKAGQPLPLTLPPELVPPSFRGGKQIDSINGTLPSYQKMQEEEPQKKLPVTFEDKRKANYERGNMELEKRRQALMEQQQREAERKAQKEKEEWERKQRELQEQEWKKQLELEKRLEKQRELERQREEERRKDIERREAAKQELERQRRLEWERIRRQELLNQKNREQEEIVRLNSKKKNLHLELEALNGKHQQISGRLQDVRLKKQTQKTELEVLDKQCDLEIMEIKQLQQELQEYQNKLIYLVPEKQLLNERIKNMQFSNTPDSGVSLLHKKSLEKEELCQRLKEQLDALEKETASKLSEMDSFNNQLKCGNMDDSVLQCLLSLLSCLNNLFLLLKELRETYNTQQLALEQLYKIKRDKLKEIERKRLELMQKKKLEDEAARKAKQGKENLWKENLRKEEEEKQKRLQEEKTQEKIQEEERKAEEKQRKDKDTLKAEEKKRETASVLVNYRALYPFEARNHDEMSFNSGDIIQVDEKTVGEPGWLYGSFQGNFGWFPCNYVEKMPSSENEKAVSPKKALLPPTVSLSATSTSSEPLSSNQPASVTDYQNVSFSNLTVNTSWQKKSAFTRTVSPGSVSPIHGQGQVVENLKAQALCSWTAKKDNHLNFSKHDIITVLEQQENWWFGEVHGGRGWFPKSYVKIIPGSEVKREEPEALYAAVNKKPTSAAYSVGEEYIALYPYSSVEPGDLTFTEGEEILVTQKDGEWWTGSIGDRSGIFPSNYVKPKDQESFGSASKSGASNKKPEIAQVTSAYVASGSEQLSLAPGQLILILKKNTSGWWQGELQARGKKRQKGWFPASHVKLLGPSSERATPAFHPVCQVIAMYDYAANNEDELSFSKGQLINVMNKDDPDWWQGEINGVTGLFPSNYVKMTTDSDPSQQWCADLQTLDTMQPIERKRQGYIHELIQTEERYMADLQLVVEVFQKRMAESGFLTEGEMALIFVNWKELIMSNTKLLKALRVRKKTGGEKMPVQMIGDILAAELSHMQAYIRFCSCQLNGAALLQQKTDEDTDFKEFLKKLASDPRCKGMPLSSFLLKPMQRITRYPLLIRSILENTPESHADHSSLKLALERAEELCSQVNEGVREKENSDRLEWIQAHVQCEGLAEQLIFNSLTNCLGPRKLLHSGKLYKTKSNKELHGFLFNDFLLLTYMVKQFAVSSGSEKLFSSKSNAQFKMYKTPIFLNEVLVKLPTDPSSDEPVFHISHIDRVYTLRTDNINERTAWVQKIKAASEQYIDTEKKKREKAYQARSQKTSGIGRLMVHVIEATELKACKPNGKSNPYCEISMGSQSYTTRTIQDTLNPKWNFNCQFFIKDLYQDVLCLTLFDRDQFSPDDFLGRTEIPVAKIRTEQESKGPMTRRLLLHEVPTGEVWVRFDLQLFEQKTLL

SEQ ID NO: 41770 - protein, 1670 aa, Homo sapiens
  Payload ID: 8499
  Gene Symbol: ITSN2
  Gene Name: intersectin 2
  Uniprot ID: Q9NZM3
  ENSP ID: ENSP00000354561
MMAQFPTAMNGGPNMWAITSEERTKHDRQFDNLKPSGGYITGDQARNFFLQSGLPAPVLAEIWALSDLNKDGKMDQQEFSIAMKLIKLKLQGQQLPVVLPPIMKQPPMFSPLISARFGMGSMPNLSIPQPLPPAAPITSLSSATSGTNLPPLMMPTPLVPSVSTSSLPNGTASLIQPLPIPYSSSTLPHGSSYSLMMGGFGGASIQKAQSLIDLGSSSSTSSTASLSGNSPKTGTSEWAVPQPTRLKYRQKFNTLDKSMSGYLSGFQARNALLQSNLSQTQLATIWTLADVDGDGQLKAEEFILAMHLTDMAKAGQPLPLTLPPELVPPSFRGGKQIDSINGTLPSYQKMQEEEPQKKLPVTFEDKRKANYERGNMELEKRRQALMEQQQREAERKAQKEKEEWERKQRELQEQEWKKQLELEKRLEKQRELERQREEERRKDIERREAAKQELERQRRLEWERIRRQELLNQKNREQEEIVRLNSKKKNLHLELEALNGKHQQISGRLQDVRLKKQTQKTELEVLDKQCDLEIMEIKQLQQELQEYQNKLIYLVPEKQLLNERIKNMQFSNTPDSGVSLLHKKSLEKEELCQRLKEQLDALEKETASKLSEMDSFNNQLKELRETYNTQQLALEQLYKIKRDKLKEIERKRLELMQKKKLEDEAARKAKQGKENLWKENLRKEEEEKQKRLQEEKTQEKIQEEERKAEEKQRKDKDTLKAEEKKRETASVLVNYRALYPFEARNHDEMSFNSGDIIQVDEKTVGEPGWLYGSFQGNFGWFPCNYVEKMPSSENEKAVSPKKALLPPTVSLSATSTSSEPLSSNQPASVTDYQNVSFSNLTVNTSWQKKSAFTRTVSPGSVSPIHGQGQVVENLKAQALCSWTAKKDNHLNFSKHDIITVLEQQENWWFGEVHGGRGWFPKSYVKIIPGSEVKREEPEALYAAVNKKPTSAAYSVGEEYIALYPYSSVEPGDLTFTEGEEILVTQKDGEWWTGSIGDRSGIFPSNYVKPKDQESFGSASKSGASNKKPEIAQVTSAYVASGSEQLSLAPGQLILILKKNTSGWWQGELQARGKKRQKGWFPASHVKLLGPSSERATPAFHPVCQVIAMYDYAANNEDELSFSKGQLINVMNKDDPDWWQGEINGVTGLFPSNYVKMTTDSDPSQQWCADLQTLDTMQPIERKRQGYIHELIQTEERYMADLQLVVEVFQKRMAESGFLTEGEMALIFVNWKELIMSNTKLLKALRVRKKTGGEKMPVQMIGDILAAELSHMQAYIRFCSCQLNGAALLQQKTDEDTDFKEFLKKLASDPRCKGMPLSSFLLKPMQRITRYPLLIRSILENTPESHADHSSLKLALERAEELCSQVNEGVREKENSDRLEWIQAHVQCEGLAEQLIFNSLTNCLGPRKLLHSGKLYKTKSNKELHGFLFNDFLLLTYMVKQFAVSSGSEKLFSSKSNAQFKMYKTPIFLNEVLVKLPTDPSSDEPVFHISHIDRVYTLRTDNINERTAWVQKIKAASEQYIDTEKKKREKAYQARSQKTSGIGRLMVHVIEATELKACKPNGKSNPYCEISMGSQSYTTRTIQDTLNPKWNFNCQFFIKDLYQDVLCLTLFDRDQFSPDDFLGRTEIPVAKIRTEQESKGPMTRRLLLHEVPTGEVWVRFDLQLFEQKTLL

SEQ ID NO: 41771 - protein, 1249 aa, Homo sapiens
  Payload ID: 8499
  Gene Symbol: ITSN2
  Gene Name: intersectin 2
  Uniprot ID: Q9NZM3
  ENSP ID: ENSP00000384499
MMAQFPTAMNGGPNMWAITSEERTKHDRQFDNLKPSGGYITGDQARNFFLQSGLPAPVLAEIWALSDLNKDGKMDQQEFSIAMKLIKLKLQGQQLPVVLPPIMKQPPMFSPLISARFGMGSMPNLSIPQPLPPAAPITSLSSATSGTNLPPLMMPTPLVPSVSTSSLPNGTASLIQPLPIPYSSSTLPHGSSYSLMMGGFGGASIQKAQSLIDLGSSSSTSSTASLSGNSPKTGTSEWAVPQPTRLKYRQKFNTLDKSMSGYLSGFQARNALLQSNLSQTQLATIWTLADVDGDGQLKAEEFILAMHLTDMAKAGQPLPLTLPPELVPPSFRGGKQIDSINGTLPSYQKMQEEEPQKKLPVTFEDKRKANYERGNMELEKRRQALMEQQQREAERKAQKEKEEWERKQRELQEQEWKKQLELEKRLEKQRELERQREEERRKDIERREAAKQELERQRRLEWERIRRQELLNQKNREQEEIVRLNSKKKNLHLELEALNGKHQQISGRLQDVRLKKQTQKTELEVLDKQCDLEIMEIKQLQQELQEYQNKLIYLVPEKQLLNERIKNMQFSNTPDSGVSLLHKKSLEKEELCQRLKEQLDALEKETASKLSEMDSFNNQLKCGNMDDSVLQCLLSLLSCLNNLFLLLKELRETYNTQQLALEQLYKIKRDKLKEIERKRLELMQKKKLEDEAARKAKQGKENLWKENLRKEEEEKQKRLQEEKTQEKIQEEERKAEEKQRKDKDTLKAEEKKRETASVLVNYRALYPFEARNHDEMSFNSGDIIQVDEKTVGEPGWLYGSFQGNFGWFPCNYVEKMPSSENEKAVSPKKALLPPTVSLSATSTSSEPLSSNQPASVTDYQNVSFSNLTVNTSWQKKSAFTRTVSPGSVSPIHGQGQVVENLKAQALCSWTAKKDNHLNFSKHDIITVLEQQENWWFGEVHGGRGWFPKSYVKIIPGSEVKREEPEALYAAVNKKPTSAAYSVGEEYIALYPYSSVEPGDLTFTEGEEILVTQKDGEWWTGSIGDRSGIFPSNYVKPKDQESFGSASKSGASNKKPEIAQVTSAYVASGSEQLSLAPGQLILILKKNTSGWWQGELQARGKKRQKGWFPASHVKLLGPSSERATPAFHPVCQVIAMYDYAANNEDELSFSKGQLINVMNKDDPDWWQGEINGVTGLFPSNYVKMTTDSDPSQQWCADLQTLDTMQPIERKRQGYIHELIQTEERYMADLQLVVEVRRLLLASSRGICCLS

SEQ ID NO: 41772 - protein, 120 aa, Homo sapiens
  Payload ID: 8499
  Gene Symbol: ITSN2
  Gene Name: intersectin 2
  ENSP ID: ENSP00000389013
  MOD_RES (1)..(1): Any amino acid
XLAPGQLILILKKNTSGWWQGELQARGKKRQKGWFPASHVKLLGPSSERATPAFHPVCQVIAMYDYAANNEDELSFSKGQLINVMNKDDPDWWQGEINGVTGLFPSNYVKMTTDSDPSQQ

SEQ ID NO: 41773 - protein, 609 aa, Homo sapiens
  Payload ID: 8499
  Gene Symbol: ITSN2
  Gene Name: intersectin 2
  ENSP ID: ENSP00000391224
MMAQFPTAMNGGPNMWAITSEERTKHDRQFDNLKPSGGYITGDQARNFFLQSGLPAPVLAEIWALSDLNKDGKMDQQEFSIAMKLIKLKLQGQQLPVVLPPIMKQPPMFSPLISARFGMGSMPNLSIPQPLPPAAPITSLSSATSGTNLPPLMMPTPLVPSVSTSSLPNGTASLIQPLPIPYSSSTLPHGSSYSLMMGGFGGASIQKAQSLIDLGSSRSWSSGSSAHSPATHRAPLSSPVPNSSTSSTASLSGNSPKTGTSEWAVPQPTRLKYRQKFNTLDKSMSGYLSGFQARNALLQSNLSQTQLATIWTLADVDGDGQLKAEEFILAMHLTDMAKAGQPLPLTLPPELVPPSFRGGKQIDSINGTLPSYQKMQEEEPQKKLPVTFEDKRKANYERGNMELEKRRQALMEQQQREAERKAQKEKEEWERKQRELQEQEWKKQLELEKRLEKQRELERQREEERRKDIERREAAKQELERQRRLEWERIRRQELLNQKNREQEEIVRLNSKKKNLHLELEALNGKHQQISGRLQDVRLKKQTQKTELEVLDKQCDLEIMEIKQLQQELQEYQNKLIYLVPEKQLLNERIKNMQFSNTPDSGVSLLHKK

SEQ ID NO: 41774 - protein, 183 aa, Homo sapiens
  Payload ID: 8499
  Gene Symbol: ITSN2
  Gene Name: intersectin 2
  ENSP ID: ENSP00000391715
MWAITSEERTKHDRQFDNLKPSGGYITGDQARNFFLQSGLPAPVLAEIWALSDLNKDGKMDQQEFSIAMKLIKLKLQGQQLPVVLPPIMKQPPMFSPLISARFGMGSMPNLSIPQPLPPAAPITSLSSATSGTNLPPLMMPTPLVPSVSTSSLPNGTASLIQPLPIPYSSSTLPHGSSYSLMM

SEQ ID NO: 41775 - protein, 55 aa, Homo sapiens
  Payload ID: 8499
  Gene Symbol: ITSN2
  Gene Name: intersectin 2
  ENSP ID: ENSP00000395682
  MOD_RES (1)..(1): Any amino acid
XELHGFLFNDFLLLTYMVKQFAVSSGSEKLFSSKSNAQFKMYKTDRLGAEDQGGV

SEQ ID NO: 41776 - protein, 36 aa, Homo sapiens
  Payload ID: 8499
  Gene Symbol: ITSN2
  Gene Name: intersectin 2
  ENSP ID: ENSP00000411319
  MOD_RES (1)..(1): Any amino acid
XAWVQKIKAASEQYIDTEKKKREKAYQGFPHFVIYS

SEQ ID NO: 41777 - protein, 1680 aa, Homo sapiens
  Payload ID: 8499
  Gene Symbol: ITSN2
  Gene Name: intersectin 2
  ENSP ID: ENSP00000479408
MAESQGKLRTMMAQFPTAMNGGPNMWAITSEERTKHDRQFDNLKPSGGYITGDQARNFFLQSGLPAPVLAEIWALSDLNKDGKMDQQEFSIAMKLIKLKLQGQQLPVVLPPIMKQPPMFSPLISARFGMGSMPNLSIPQPLPPAAPITSLSSATSGTNLPPLMMPTPLVPSVSTSSLPNGTASLIQPLPIPYSSSTLPHGSSYSLMMGGFGGASIQKAQSLIDLGSSSSTSSTASLSGNSPKTGTSEWAVPQPTRLKYRQKFNTLDKSMSGYLSGFQARNALLQSNLSQTQLATIWTLADVDGDGQLKAEEFILAMHLTDMAKAGQPLPLTLPPELVPPSFRGGKQIDSINGTLPSYQKMQEEEPQKKLPVTFEDKRKANYERGNMELEKRRQALMEQQQREAERKAQKEKEEWERKQRELQEQEWKKQLELEKRLEKQRELERQREEERRKDIERREAAKQELERQRRLEWERIRRQELLNQKNREQEEIVRLNSKKKNLHLELEALNGKHQQISGRLQDVRLKKQTQKTELEVLDKQCDLEIMEIKQLQQELQEYQNKLIYLVPEKQLLNERIKNMQFSNTPDSGVSLLHKKSLEKEELCQRLKEQLDALEKETASKLSEMDSFNNQLKELRETYNTQQLALEQLYKIKRDKLKEIERKRLELMQKKKLEDEAARKAKQGKENLWKENLRKEEEEKQKRLQEEKTQEKIQEEERKAEEKQRKDKDTLKAEEKKRETASVLVNYRALYPFEARNHDEMSFNSGDIIQVDEKTVGEPGWLYGSFQGNFGWFPCNYVEKMPSSENEKAVSPKKALLPPTVSLSATSTSSEPLSSNQPASVTDYQNVSFSNLTVNTSWQKKSAFTRTVSPGSVSPIHGQGQVVENLKAQALCSWTAKKDNHLNFSKHDIITVLEQQENWWFGEVHGGRGWFPKSYVKIIPGSEVKREEPEALYAAVNKKPTSAAYSVGEEYIALYPYSSVEPGDLTFTEGEEILVTQKDGEWWTGSIGDRSGIFPSNYVKPKDQESFGSASKSGASNKKPEIAQVTSAYVASGSEQLSLAPGQLILILKKNTSGWWQGELQARGKKRQKGWFPASHVKLLGPSSERATPAFHPVCQVIAMYDYAANNEDELSFSKGQLINVMNKDDPDWWQGEINGVTGLFPSNYVKMTTDSDPSQQWCADLQTLDTMQPIERKRQGYIHELIQTEERYMADLQLVVEVFQKRMAESGFLTEGEMALIFVNWKELIMSNTKLLKALRVRKKTGGEKMPVQMIGDILAAELSHMQAYIRFCSCQLNGAALLQQKTDEDTDFKEFLKKLASDPRCKGMPLSSFLLKPMQRITRYPLLIRSILENTPESHADHSSLKLALERAEELCSQVNEGVREKENSDRLEWIQAHVQCEGLAEQLIFNSLTNCLGPRKLLHSGKLYKTKSNKELHGFLFNDFLLLTYMVKQFAVSSGSEKLFSSKSNAQFKMYKTPIFLNEVLVKLPTDPSSDEPVFHISHIDRVYTLRTDNINERTAWVQKIKAASEQYIDTEKKKREKAYQARSQKTSGIGRLMVHVIEATELKACKPNGKSNPYCEISMGSQSYTTRTIQDTLNPKWNFNCQFFIKDLYQDVLCLTLFDRDQFSPDDFLGRTEIPVAKIRTEQESKGPMTRRLLLHEVPTGEVWVRFDLQLFEQKTLL

SEQ ID NO: 41778 - protein, 632 aa, Homo sapiens
  Payload ID: 8500
  Gene Symbol: ICK
  Gene Name: intestinal cell (MAK-like) kinase
  Uniprot ID: Q9UPZ9
  ENSP ID: ENSP00000263043
MNRYTTIRQLGDGTYGSVLLGRSIESGELIAIKKMKRKFYSWEECMNLREVKSLKKLNHANVVKLKEVIRENDHLYFIFEYMKENLYQLIKERNKLFPESAIRNIMYQILQGLAFIHKHGFFHRDLKPENLLCMGPELVKIADFGLAREIRSKPPYTDYVSTRWYRAPEVLLRSTNYSSPIDVWAVGCIMAEVYTLRPLFPGASEIDTIFKICQVLGTPKKTDWPEGYQLSSAMNFRWPQCVPNNLKTLIPNASSEAVQLLRDMLQWDPKKRPTASQALRYPYFQVGHPLGSTTQNLQDSEKPQKGILEKAGPPPYIKPVPPAQPPAKPHTRISSRQHQASQPPLHLTYPYKAEVSRTDHPSHLQEDKPSPLLFPSLHNKHPQSKITAGLEHKNGEIKPKSRRRWGLISRSTKDSDDWADLDDLDFSPSLSRIDLKNKKRQSDDTLCRFESVLDLKPSEPVGTGNSAPTQTSYQRRDTPTLRSAAKQHYLKHSRYLPGISIRNGILSNPGKEFIPPNPWSSSGLSGKSSGTMSVISKVNSVGSSSTSSSGLTGNYVPSFLKKEIGSAMQRVHLAPIPDPSPGYSSLKAMRPHPGRPFFHTQPRSTPGLIPRPPAAQPVHGRTDWASKYASRR

SEQ ID NO: 41779 - protein, 632 aa, Homo sapiens; identical to SEQ ID NO: 41778
  Payload ID: 8500
  Gene Symbol: ICK
  Gene Name: intestinal cell (MAK-like) kinase
  Uniprot ID: Q9UPZ9
  ENSP ID: ENSP00000349458

SEQ ID NO: 41780 - protein, 245 aa, Homo sapiens
  Payload ID: 8501
  Gene Symbol: ISX
  Gene Name: intestine-specific homeobox
  Uniprot ID: Q2M1V0
  ENSP ID: ENSP00000311492
MCAEVGPALCRGMERNSLGCCEAPKKLSLSFSIEAILKRPARRSDMDRPEGPGEEGPGEAAASGSGLEKPPKDQPQEGRKSKRRVRTTFTTEQLHELEKIFHFTHYPDVHIRSQLAARINLPEARVQIWFQNQRAKWRKQEKIGNLGAPQQLSEASVALPTNLDVAGPTWTSTALRRLAPPTSCCPSAQDQLASAWFPAWITLLPAHPWETQPVPGLPIHQTCIPVLCILPPPHPKWGSICATST

SEQ ID NO: 41781 - protein, 245 aa, Homo sapiens; identical to SEQ ID NO: 41780
  Payload ID: 8501
  Gene Symbol: ISX
  Gene Name: intestine-specific homeobox
  Uniprot ID: Q2M1V0
  ENSP ID: ENSP00000386037

SEQ ID NO: 41782 - protein, 582 aa, Homo sapiens
  Payload ID: 8502
  Gene Symbol: IPP
  Gene Name: intracisternal A particle-promoted polypeptide
  Uniprot ID: Q9Y573
  ENSP ID: ENSP00000353024
MANEDCPKAADSPFSSDKHAQLILAQINKMRNGQHFCDVQLQVGQESFKAHRLVLAASSPYFAALFTGGMKESSKDVVPILGIEAGIFQILLDFIYTGIVNIGVNNVQELIIAADMLQLTEVVHLCCEFLKGQIDPLNCIGIFQFSEQIACHDLLEFSENYIHVHFLEVHSGEEFLALTKDQLIKILRSEELSIEDEYQVFLAAMQWILKDLGKRRKHVVEVLDPIRFPLLPPQRLLKYIEGVSDFNLRVALQTLLKEYCEVCKSPKENKFCSFLQTSKVRPRKKARKYLYAVGGYTRLQGGRWSDSRALSCVERFDTFSQYWTTVSSLHQARSGLGVTVLGGMVYAIGGEKDSMIFDCTECYDPVTKQWTTVASMNHPRCGLGVCVCYGAIYALGGWVGAEIGNTIERFDPDENKWEVVGNMAVSRYYFGCCEMQGLIYVIGGISNEGIELRSFEVYDPLSKRWSPLPPMGTRRAYLGVAALNDCIYSVGGWNETQDALHTVEKYSFEEEKWVEVASMKVPRAGMCVVAVNGLLYVSGGRSSSHDFLAPDTHRYEVFRLKWENMCILFNDHKTLTKGIFNL

SEQ ID NO: 41783 - protein, 584 aa, Homo sapiens
  Payload ID: 8502
  Gene Symbol: IPP
  Gene Name: intracisternal A particle-promoted polypeptide
  Uniprot ID: Q9Y573
  ENSP ID: ENSP00000379739
MANEDCPKAADSPFSSDKHAQLILAQINKMRNGQHFCDVQLQVGQESFKAHRLVLAASSPYFAALFTGGMKESSKDVVPILGIEAGIFQILLDFIYTGIVNIGVNNVQELIIAADMLQLTEVVHLCCEFLKGQIDPLNCIGIFQFSEQIACHDLLEFSENYIHVHFLEVHSGEEFLALTKDQLIKILRSEELSIEDEYQVFLAAMQWILKDLGKRRKHVVEVLDPIRFPLLPPQRLLKYIEGVSDFNLRVALQTLLKEYCEVCKSPKENKFCSFLQTSKVRPRKKARKYLYAVGGYTRLQGGRWSDSRALSCVERFDTFSQYWTTVSSLHQARSGLGVTVLGGMVYAIGGEKDSMIFDCTECYDPVTKQWTTVASMNHPRCGLGVCVCYGAIYALGGWVGAEIGNTIERFDPDENKWEVVGNMAVSRYYFGCCEMQGLIYVIGGISNEGIELRSFEVYDPLSKRWSPLPPMGTRRAYLGVAALNDCIYSVGGWNETQDALHTVEKYSFEEEKWVEVASMKVPRAGMCVVAVNGLLYVSGGRSSSHDFLAPGTLDSVEVYNPHSDTWTEIGNMITSRCEGGVAVL

SEQ ID NO: 41784 - protein, 1292 aa, Homo sapiens
  Payload ID: 8503
  Gene Symbol: IFT122
  Gene Name: intraflagellar transport 122
  Uniprot ID: Q9HBG6
  ENSP ID: ENSP00000296266
MRAVLTWRDKAEHCINDIAFKPDGTQLILAAGSRLLVYDTSDGTLLQPLKGHKDTVYCVAYAKDGKRFASGSADKSVIIWTSKLEGILKYTSWSVMSSLHLHLPFLGLHKTVRVTATDKAPKGQGGRIDCLRPSVQNQPGQKHNDAIQCVSYNPITHQLASCSSSDFGLWSPEQKSVSKHKSSSKIICCSWTNDGQYLALGMFNGIISIRNKNGEEKVKIERPGGSLSPIWSICWNPSSRWESFWMNRENEDAEDVIVNRYIQEIPSTLKSAVYSSQGSEAEEEEPEEEDDSPRDDNLEERNDILAVADWGQKVSFYQLSGKQIGKDRALNFDPCCISYFTKGEYILLGGSDKQVSLFTKDGVRLGTVGEQNSWVWTCQAKPDSNYVVVGCQDGTISFYQLIFSTVHGLYKDRYAYRDSMTDVIVQHLITEQKVRIKCKELVKKIAIYRNRLAIQLPEKILIYELYSEDLSDMHYRVKEKIIKKFECNLLVVCANHIILCQEKRLQCLSFSGVKEREWQMESLIRYIKVIGGPPGREGLLVGLKNGQILKIFVDNLFAIVLLKQATAVRCLDMSASRKKLAVVDENDTCLVYDIDTKELLFQEPNANSVAWNTQCEDMLCFSGGGYLNIKASTFPVHRQKLQGFVVGYNGSKIFCLHVFSISAVEVPQSAPMYQYLDRKLFKEAYQIACLGVTDTDWRELAMEALEGLDFETAKKAFIRVQDLRYLELISSIEERKKRGETNNDLFLADVFSYQGKFHEAAKLYKRSGHENLALEMYTDLCMFEYAKDFLGSGDPKETKMLITKQADWARNIKEPKAAVEMYISAGEHVKAIEICGDHGWVDMLIDIARKLDKAEREPLLLCATYLKKLDSPGYAAETYLKMGDLKSLVQLHVETQRWDEAFALGEKHPEFKDDIYMPYAQWLAENDRFEEAQKAFHKAGRQREAVQVLEQLTNNAVAESRFNDAAYYYWMLSMQCLDIAQDPAQKDTMLGKFYHFQRLAELYHGYHAIHRHTEDPFSVHRPETLFNISRFLLHSLPKDTPSGISKVKILFTLAKQSKALGAYRLARHAYDKLRGLYIPARFQKSIELGTLTIRAKPFHDSEELVPLCYRCSTNNPLLNNLGNVCINCRQPFIFSASSYDVLHLVEFYLEEGITDEEAISLIDLEVLRPKRDDRQLEIANNSSQILRLVETKDSIGDEDPFTAKLSFEQGGSEFVPVVVSRLVLRSMSRRDVLIKRWPPPLRWQYFRSLLPDASITMCPSCFQMFHSEDYELLVLQHGCCPYCRRCKDDPGP

SEQ ID NO: 41785 - protein, 1182 aa, Homo sapiens
  Payload ID: 8503
  Gene Symbol: IFT122
  Gene Name: intraflagellar transport 122
  Uniprot ID: Q9HBG6
  ENSP ID: ENSP00000323973
MRAVLTWRDKAEHCINDIAFKPDGTQLILAAGSRLLVYDTSDGTLLQPLKGHKDTVYCVAYAKDGKRFASGSADKSVIIWTSKLEGILKYTHNDAIQCVSYNPITHQLASCSSSDFGLWSPEQKSVSKHKSSSKIICCSWTNDGQYLALGMFNGIISIRNKNGEEKVKIERPGGSLSPIWSICWNPSREERNDILAVADWGQKVSFYQLSGKQIGKDRALNFDPCCISYFTKGEYILLGGSDKQVSLFTKDGVRLGTVGEQNSWVWTCQAKPDSNYVVVGCQDGTISFYQLIFSTVHGLYKDRYAYRDSMTDVIVQHLITEQKVRIKCKELVKKIAIYRNRLAIQLPEKILIYELYSEDLSDMHYRVKEKIIKKFECNLLVVCANHIILCQEKRLQCLSFSGVKEREWQMESLIRYIKVIGGPPGREGLLVGLKNGQILKIFVDNLFAIVLLKQATAVRCLDMSASRKKLAVVDENDTCLVYDIDTKELLFQEPNANSVAWNTQCEDMLCFSGGGYLNIKASTFPVHRQKLQGFVVGYNGSKIFCLHVFSISAVEVPQSAPMYQYLDRKLFKEAYQIACLGVTDTDWRELAMEALEGLDFETAKKAFIRVQDLRYLELISSIEERKKRGETNNDLFLADVFSYQGKFHEAAKLYKRSGHENLALEMYTDLCMFEYAKDFLGSGDPKETKMLITKQADWARNIKEPKAAVEMYISAGEHVKAIEICGDHGWVDMLIDIARKLDKAEREPLLLCATYLKKLDSPGYAAETYLKMGDLKSLVQLHVETQRWDEAFALGEKHPEFKDDIYMPYAQWLAENDRFEEAQKAFHKAGRQREAVQVLEQLTNNAVAESRFNDAAYYYWMLSMQCLDIAQDPAQKDTMLGKFYHFQRLAELYHGYHAIHRHTEDPFSVHRPETLFNISRFLLHSLPKDTPSGISKVKILFTLAKQSKALGAYRLARHAYDKLRGLYIPARFQKSIELGTLTIRAKPFHDSEELVPLCYRCSTNNPLLNNLGNVCINCRQPFIFSASSYDVLHLVEFYLEEGITDEEAISLIDLEVLRPKRDDRQLEIANNSSQILRLVETKDSIGDEDPFTAKLSFEQGGSEFVPVVVSRLVLRSMSRRDVLIKRWPPPLRWQYFRSLLPDASITMCPSCFQMFHSEDYELLVLQHGCCPYCRRCKDDPGP

SEQ ID NO: 41786 - protein, 1241 aa, Homo sapiens
  Payload ID: 8503
  Gene Symbol: IFT122
  Gene Name: intraflagellar transport 122
  Uniprot ID: Q9HBG6
  ENSP ID: ENSP00000324005
MRAVLTWRDKAEHCINDIAFKPDGTQLILAAGSRLLVYDTSDGTLLQPLKGHKDTVYCVAYAKDGKRFASGSADKSVIIWTSKLEGILKYTHNDAIQCVSYNPITHQLASCSSSDFGLWSPEQKSVSKHKSSSKIICCSWTNDGQYLALGMFNGIISIRNKNGEEKVKIERPGGSLSPIWSICWNPSSRWESFWMNRENEDAEDVIVNRYIQEIPSTLKSAVYSSQGSEAEEEEPEEEDDSPRDDNLEERNDILAVADWGQKVSFYQLSGKQIGKDRALNFDPCCISYFTKGEYILLGGSDKQVSLFTKDGVRLGTVGEQNSWVWTCQAKPDSNYVVVGCQDGTISFYQLIFSTVHGLYKDRYAYRDSMTDVIVQHLITEQKVRIKCKELVKKIAIYRNRLAIQLPEKILIYELYSEDLSDMHYRVKEKIIKKFECNLLVVCANHIILCQEKRLQCLSFSGVKEREWQMESLIRYIKVIGGPPGREGLLVGLKNGQILKIFVDNLFAIVLLKQATAVRCLDMSASRKKLAVVDENDTCLVYDIDTKELLFQEPNANSVAWNTQCEDMLCFSGGGYLNIKASTFPVHRQKLQGFVVGYNGSKIFCLHVFSISAVEVPQSAPMYQYLDRKLFKEAYQIACLGVTDTDWRELAMEALEGLDFETAKKAFIRVQDLRYLELISSIEERKKRGETNNDLFLADVFSYQGKFHEAAKLYKRSGHENLALEMYTDLCMFEYAKDFLGSGDPKETKMLITKQADWARNIKEPKAAVEMYISAGEHVKAIEICGDHGWVDMLIDIARKLDKAEREPLLLCATYLKKLDSPGYAAETYLKMGDLKSLVQLHVETQRWDEAFALGEKHPEFKDDIYMPYAQWLAENDRFEEAQKAFHKAGRQREAVQVLEQLTNNAVAESRFNDAAYYYWMLSMQCLDIAQDPAQKDTMLGKFYHFQRLAELYHGYHAIHRHTEDPFSVHRPETLFNISRFLLHSLPKDTPSGISKVKILFTLAKQSKALGAYRLARHAYDKLRGLYIPARFQKSIELGTLTIRAKPFHDSEELVPLCYRCSTNNPLLNNLGNVCINCRQPFIFSASSYDVLHLVEFYLEEGITDEEAISLIDLEVLRPKRDDRQLEIANNSSQILRLVETKDSIGDEDPFTAKLSFEQGGSEFVPVVVSRLVLRSMSRRDVLIKRWPPPLRWQYFRSLLPDASITMCPSCFQMFHSEDYELLVLQHGCCPYCRRCKDDPGP

SEQ ID NO: 41787 - protein, 1131 aa, Homo sapiens
  Payload ID: 8503
  Gene Symbol: IFT122
  Gene Name: intraflagellar transport 122
  Uniprot ID: Q9HBG6
  ENSP ID: ENSP00000324165
MRAVLTWRDKAEHCINDIAFKPDGTQLILAAGSRLLVYDTSDGTLLQPLKGHKDTVYCVAYAKDGLWSPEQKSVSKHKSSSKIICCSWTNDGQYLALGMFNGIISIRNKNGEEKVKIERPGGSLSPIWSICWNPSREERNDILAVADWGQKVSFYQLSGKQIGKDRALNFDPCCISYFTKGEYILLGGSDKQVSLFTKDGVRLGTVGEQNSWVWTCQAKPDSNYVVVGCQDGTISFYQLIFSTVHGLYKDRYAYRDSMTDVIVQHLITEQKVRIKCKELVKKIAIYRNRLAIQLPEKILIYELYSEDLSDMHYRVKEKIIKKFECNLLVVCANHIILCQEKRLQCLSFSGVKEREWQMESLIRYIKVIGGPPGREGLLVGLKNGQILKIFVDNLFAIVLLKQATAVRCLDMSASRKKLAVVDENDTCLVYDIDTKELLFQEPNANSVAWNTQCEDMLCFSGGGYLNIKASTFPVHRQKLQGFVVGYNGSKIFCLHVFSISAVEVPQSAPMYQYLDRKLFKEAYQIACLGVTDTDWRELAMEALEGLDFETAKKAFIRVQDLRYLELISSIEERKKRGETNNDLFLADVFSYQGKFHEAAKLYKRSGHENLALEMYTDLCMFEYAKDFLGSGDPKETKMLITKQADWARNIKEPKAAVEMYISAGEHVKAIEICGDHGWVDMLIDIARKLDKAEREPLLLCATYLKKLDSPGYAAETYLKMGDLKSLVQLHVETQRWDEAFALGEKHPEFKDDIYMPYAQWLAENDRFEEAQKAFHKAGRQREAVQVLEQLTNNAVAESRFNDAAYYYWMLSMQCLDIAQADPAQKDTMLGKFYHFQRLAELYHGYHAIHRHTEDPFSVHRPETLFNISRFLLHSLPKDTPSGISKVKILFTLAKQSKALGAYRLARHAYDKLRGLYIPARFQKSIELGTLTIRAKPFHDSEELVPLCYRCSTNNPLLNNLGNVCINCRQPFIFSASSYDVLHLVEFYLEEGITDEEAISLIDLEVLRPKRDDRQLEIANNSSQILRLVETKDSIGDEDPFTAKLSFEQGGSEFVPVVVSRLVLRSMSRRDVLIKRWPPPLRWQYFRSLLPDASITMCPSCFQMFHSEDYELLVLQHGCCPYCRRCKDDPGP

SEQ ID NO: 41788 - protein, 1032 aa, Homo sapiens
  Payload ID: 8503
  Gene Symbol: IFT122
  Gene Name: intraflagellar transport 122
  Uniprot ID: Q9HBG6
  ENSP ID: ENSP00000401569
MFNGIISIRNKNGEEKVKIERPGGSLSPIWSICWNPSREERNDILAVADWGQKVSFYQLSGKQIGKDRALNFDPCCISYFTKGEYILLGGSDKQVSLFTKDGVRLGTVGEQNSWVWTCQAKPDSNYVVVGCQDGTISFYQLIFSTVHGLYKDRYAYRDSMTDVIVQHLITEQKVRIKCKELVKKIAIYRNRLAIQLPEKILIYELYSEDLSDMHYRVKEKIIKKFECNLLVVCANHIILCQEKRLQCLSFSGVKEREWQMESLIRYIKVIGGPPGREGLLVGLKNGQILKIFVDNLFAIVLLKQATAVRCLDMSASRKKLAVVDENDTCLVYDIDTKELLFQEPNANSVAWNTQCEDMLCFSGGGYLNIKASTFPVHRQKLQGFVVGYNGSKIFCLHVFSISAVEVPQSAPMYQYLDRKLFKEAYQIACLGVTDTDWRELAMEALEGLDFETAKKAFIRVQDLRYLELISSIEERKKRGETNNDLFLADVFSYQGKFHEAAKLYKRSGHENLALEMYTDLCMFEYAKDFLGSGDPKETKMLITKQADWARNIKEPKAAVEMYISAGEHVKAIEICGDHGWVDMLIDIARKLDKAEREPLLLCATYLKKLDSPGYAAETYLKMGDLKSLVQLHVETQRWDEAFALGEKHPEFKDDIYMPYAQWLAENDRFEEAQKAFHKAGRQREAVQVLEQLTNNAVAESRFNDAAYYYWMLSMQCLDIAQDPAQKDTMLGKFYHFQRLAELYHGYHAIHRHTEDPFSVHRPETLFNISRFLLHSLPKDTPSGISKVKILFTLAKQSKALGAYRLARHAYDKLRGLYIPARFQKSIELGTLTIRAKPFHDSEELVPLCYRCSTNNPLLNNLGNVCINCRQPFIFSASSYDVLHLVEFYLEEGITDEEAISLIDLEVLRPKRDDRQLEIANNSSQILRLVETKDSIGDEDPFTAKLSFEQGGSEFVPVVVSRLVLRSMSRRDVLIKRWPPPLRWQYFRSLLPDASITMCPSCFQMFHSEDYELLVLQHGCCPYCRRCKDDPGP

SEQ ID NO: 41789 - protein, 1091 aa, Homo sapiens
  Payload ID: 8503
  Gene Symbol: IFT122
  Gene Name: intraflagellar transport 122
  Uniprot ID: Q9HBG6
  ENSP ID: ENSP00000410946
MFNGIISIRNKNGEEKVKIERPGGSLSPIWSICWNPSSRWESFWMNRENEDAEDVIVNRYIQEIPSTLKSAVYSSQGSEAEEEEPEEEDDSPRDDNLEERNDILAVADWGQKVSFYQLSGKQIGKDRALNFDPCCISYFTKGEYILLGGSDKQVSLFTKDGVRLGTVGEQNSWVWTCQAKPDSNYVVVGCQDGTISFYQLIFSTVHGLYKDRYAYRDSMTDVIVQHLITEQKVRIKCKELVKKIAIYRNRLAIQLPEKILIYELYSEDLSDMHYRVKEKIIKKFECNLLVVCANHIILCQEKRLQCLSFSGVKEREWQMESLIRYIKVIGGPPGREGLLVGLKNGQILKIFVDNLFAIVLLKQATAVRCLDMSASRKKLAVVDENDTCLVYDIDTKELLFQEPNANSVAWNTQCEDMLCFSGGGYLNIKASTFPVHRQKLQGFVVGYNGSKIFCLHVFSISAVEVPQSAPMYQYLDRKLFKEAYQIACLGVTDTDWRELAMEALEGLDFETAKKAFIRVQDLRYLELISSIEERKKRGETNNDLFLADVFSYQGKFHEAAKLYKRSGHENLALEMYTDLCMFEYAKDFLGSGDPKETKMLITKQADWARNIKEPKAAVEMYISAGEHVKAIEICGDHGWVDMLIDIARKLDKAEREPLLLCATYLKKLDSPGYAAETYLKMGDLKSLVQLHVETQRWDEAFALGEKHPEFKDDIYMPYAQWLAENDRFEEAQKAFHKAGRQREAVQVLEQLTNNAVAESRFNDAAYYYWMLSMQCLDIAQDPAQKDTMLGKFYHFQRLAELYHGYHAIHRHTEDPFSVHRPETLFNISRFLLHSLPKDTPSGISKVKILFTLAKQSKALGAYRLARHAYDKLRGLYIPARFQKSIELGTLTIRAKPFHDSEELVPLCYRCSTNNPLLNNLGNVCINCRQPFIFSASSYDVLHLVEFYLEEGITDEEAISLIDLEVLRPKRDDRQLEIANNSSQILRLVETKDSIGDEDPFTAKLSFEQGGSEFVPVVVSRLVLRSMSRRDVLIKRWPPPLRWQYFRSLLPDASITMCPSCFQMFHSEDYELLVLQHGCCPYCRRCKDDPGP

SEQ ID NO: 41790 - protein, 110 aa, Homo sapiens
  Payload ID: 8503
  Gene Symbol: IFT122
  Gene Name: intraflagellar transport 122
  ENSP ID: ENSP00000421140
  MOD_RES (1)..(1): Any amino acid
XINDIAFKPDGTQLILAAGSRLLVYDTSDGTLLQPLKGHKDTVHNDAIQCVSYNPITHQLASCSSSDFGLWSPEQKSVSKHKSSSKIICCSWTNDGQYLALGMFNGIISI

SEQ ID NO: 41791 - protein, 80 aa, Homo sapiens
  Payload ID: 8503
  Gene Symbol: IFT122
  Gene Name: intraflagellar transport 122
  ENSP ID: ENSP00000421953
MRAVLTWRDKAEHCINDIAFKPDGTQLILAAGSRLLVYDTSDGTLLQPLKGHKDTVYCVAYAKDGNESSSVACLGHAAGQ

SEQ ID NO: 41792 - protein, 1118 aa, Homo sapiens
  Payload ID: 8503
  Gene Symbol: IFT122
  Gene Name: intraflagellar transport 122
  Uniprot ID: Q9HBG6
  ENSP ID: ENSP00000422179
MRAVLTWRDKAEHCINDIAFKPDGTQLILAAGSRLLVYDTSDGTLLQPLKGHKDTVYCVAYAKDVLCIEGLWSPEQKSVSKHKSSSKIICCSWTNDGQYLALGMFNGIISIRNKNGEEKVKIERPGGSLSPIWSICWNPSREERNDILAVADWGQKVSFYQLSGKQIGKDRALNFDPCCISYFTKGEYILLGGSDKQVSLFTKDGVRLGTVGEQNSWVWTCQAKPDSNYVVVGCQDGTISFYQLIFSTVHGLYKDRYAYRDSMTDVIVQHLITEQKVRIKCKELVKKIAIYRNRLAIQLPEKILIYELYSEDLSDMHYRVKEKIIKKFECNLLVVCANHIILCQEKRLQCLSFSGVKEREWQMESLIRYIKVIGGPPGREGLLVGLKNGQILKIFVDNLFAIVLLKQATAVRCLDMSASRKKLAVVDENDTCLVYDIDTKELLFQEPNANSVAWNTQCEDMLCFSGGGYLNIKASTFPVHRQKLQGFVVGYNGSKIFCLHVFSISAVEVPQSAPMYQYLDRKLFKEAYQIACLGVTDTDWRELAMEALEGLDFETAKKERKKRGETNNDLFLADVFSYQGKFHEAAKLYKRSGHENLALEMYTDLCMFEYAKDFLGSGDPKETKMLITKQADWARNIKEPKAAVEMYISAGEHVKAIEICGDHGWVDMLIDIARKLDKAEREPLLLCATYLKKLDSPGYAAETYLKMGDLKSLVQLHVETQRWDEAFALGEKHPEFKDDIYMPYAQWLAENDRFEEAQKAFHKAGRQREAVQVLEQLTNNAVAESRFNDAAYYYWMLSMQCLDIAQADPAQKDTMLGKFYHFQRLAELYHGYHAIHRHTEDPFSVHRPETLFNISRFLLHSLPKDTPSGISKVKILFTLAKQSKALGAYRLARHAYDKLRGLYIPARFQKSIELGTLTIRAKPFHDSEELVPLCYRCSTNNPLLNNLGNVCINCRQPFIFSASSYDVLHLVEFYLEEGITDEEAISLIDLEVLRPKRDDRQLEIANNSSQILRLVETKDSIGDEDPFTAKLSFEQGGSEFVPVVVSRLVLRSMSRRDVLIKRWPPPLRWQYFRSLLPDASITMCPSCFQMFHSEDYELLVLQHGCCPYCRRCKDDPGP

SEQ ID NO: 41793 - protein, 96 aa, Homo sapiens
  Payload ID: 8503
  Gene Symbol: IFT122
  Gene Name: intraflagellar transport 122
  ENSP ID: ENSP00000422237
MFNGIISIRNKNGEEKVKIERPGGSLSPIWSICWNPSREERNDILAVADWGQKVSFYQLSGKQIGKDRALNFDPCCISYFTKGEYILLGGSDKQVS

SEQ ID NO: 41794 - protein, 321 aa, Homo sapiens
  Payload ID: 8503
  Gene Symbol: IFT122
  Gene Name: intraflagellar transport 122
  ENSP ID: ENSP00000423288
  MOD_RES (1)..(1): Any amino acid
XINDIAFKPDGTQLILAAGSRLLVYDTSDGTLLQPLKGHKDTVYCVAYAKDGLWSPEQKSVSKHKSSSKIICCREERNDILAVADWGQKVSFYQLSGKQIGKDRALNFDPCCISYFTKGEYILLGGSDKQVSLFTKDGVRLGTVGEQNSWVWTCQAKPDSNYVVVGCQDGTISFYQLIFSTVHGLYKDRYAYRDSMTDVIVQHLITEQKVRIKCKELVKKIAIYRNRLAIQLPEKILIYELYSEDLSDMHYRVKEKIIKKFECNLLVVCANHIILCQEKRLQCLSFSGVKEREWQMESLIRYIKVIGGPPGREGLLVGLKN

SEQ ID NO: 41795 - protein, 112 aa, Homo sapiens
  Payload ID: 8503
  Gene Symbol: IFT122
  Gene Name: intraflagellar transport 122
  ENSP ID: ENSP00000423902
  MOD_RES (1)..(1): Any amino acid
XINDIAFKPDGTQLILAAGSRLLVYDTSDGTLLQPLKGHKDTVYCVAYAKDGKRFASGSADKSVIIWTSKLEGILKYTVLLCCPGWSAVARSRLTASSTSQVHAILLPQPPE

SEQ ID NO: 41796 - protein, 99 aa, Homo sapiens
  Payload ID: 8503
  Gene Symbol: IFT122
  Gene Name: intraflagellar transport 122
  ENSP ID: ENSP00000423921
  MOD_RES (1)..(1): Any amino acid
XINDIAFKPDGTQLILAAGSRLLVYDTSDGTLLQPLKGHKDTVYCVAYAKDGTMMLYNVSPTILLLINWHLVPPVTLGCGLLNRSLSPNTNQAARSSAA

SEQ ID NO: 41797 - protein, 245 aa, Homo sapiens
  Payload ID: 8503
  Gene Symbol: IFT122
  Gene Name: intraflagellar transport 122
  ENSP ID: ENSP00000424206
  MOD_RES (1)..(1): Any amino acid
XINDIAFKPDGTQLILAAGSRLLVYDTSDGTLLQPLKGHKDTVYCVAYAKDGKRFASGSADKSVIIWTSKLEGILKYTHNDAIQCVSYNPITHQLASCSSSDFGLWSPEQKSVSKHKSSSKIICCREERNDILAVADWGQKVSFYQLSGKQIGKDRALNFDPCCISYFTKGEYILLGGSDKQVSLFTKDGVRLGTVGEQNSWVWTCQAKPDSNYVVVGCQDGTISFYQLIFSTVHGLYKDRYAYR

SEQ ID NO: 41798 - protein, 380 aa, Homo sapiens
  Payload ID: 8503
  Gene Symbol: IFT122
  Gene Name: intraflagellar transport 122
  ENSP ID: ENSP00000424727
EGLLVGLKNGQILKIFVDNLFAIVLLKQATAVRCLDMSASRKKLAVVDENDTCLVYDIDTKELLFQEPNANSVAWNTQCEDMLCFSGGGYLNIKASTFPVHRQKLQGFVVGYNGSKIFCLHVFSISAVEVPQSAPMYQYLDRKLFKEAYQIACLGVTDTDWRELAMEALEGLDFETAKKERKKRGETNNDLFLADVFSYQGKFHEAAKLYKRSGHENLALEMYTDLCMFEYAKDFLGSGDPKETKMLITKQADWARNIKEPKAAVEMYISAGEHVKAIEICGDHGWVDMLIDIARKLDKAEREPLLLCATYLKKLDSPGYAAETYLKMGDLKSLVQLHVETQRWDEAFALGEKHPEFKDDIYMPYAQWLAENDRFEEAQK

SEQ ID NO: 41799 - protein, 1234 aa, Homo sapiens
  Payload ID: 8503
  Gene Symbol: IFT122
  Gene Name: intraflagellar transport 122
  Uniprot ID: Q9HBG6
  ENSP ID: ENSP00000425536
MRAVLTWRDKAEHCINDIAFKPDGTQLILAAGSRLLVYDTSDGTLLQPLKGHKDTVYCVAYAKDGKRFASGSADKSVIIWTSKLEGILKYTSWSVMSSLHLHLPFLGLHKTVRVTATDKAPKGQGGRIDCLRPSVQNQPGQKHNDAIQCVSYNPITHQLASCSSSDFGLWSPEQKSVSKHKSSSKIICCSWTNDGQYLALGMFNGIISIRNKNGEEKVKIERPGGSLSPIWSICWNPSREERNDILAVADWGQKVSFYQLSGKQIGKDRALNFDPCCISYFTKGEYILLGGSDKQVSLFTKDGVRLGTVGEQNSWVWTCQAKPDSNYVVVGCQDGTISFYQLIFSTVHGLYKDRYAYRDSMTDVIVQHLITEQKVRIKCKELVKKIAIYRNRLAIQLPEKILIYELYSEDLSDMHYRVKEKIIKKFECNLLVVCANHIILCQEKRLQCLSFSGVKEREWQMESLIRYIKVIGGPPGREGLLVGLKNGQILKIFVDNLFAIVLLKQATAVRCLDMSASRKKLAVVDENDTCLVYDIDTKELLFQEPNANSVAWNTQCEDMLCFSGGGYLNIKASTFPVHRQKLQGFVVGYNGSKIFCLHVFSISAVEVPQSAPMYQYLDRKLFKEAYQIACLGVTDTDWRELAMEALEGLDFETAKKAFIRVQDLRYLELISSIEERKKRGETNNDLFLADVFSYQGKFHEAAKLYKRSGHENLALEMYTDLCMFEYAKDFLGSGDPKETKMLITKQADWARNIKEPKAAVEMYISAGEHVKAIEICGDHGWVDMLIDIARKLDKAEREPLLLCATYLKKLDSPGYAAETYLKMGDLKSLVQLHVETQRWDEAFALGEKHPEFKDDIYMPYAQWLAENDRFEEAQKAFHKAGRQREAVQVLEQLTNNAVAESRFNDAAYYYWMLSMQCLDIAQADPAQKDTMLGKFYHFQRLAELYHGYHAIHRHTEDPFSVHRPETLFNISRFLLHSLPKDTPSGISKVKILFTLAKQSKALGAYRLARHAYDKLRGLYIPARFQKSIELGTLTIRAKPFHDSEELVPLCYRCSTNNPLLNNLGNVCINCRQPFIFSASSYDVLHLVEFYLEEGITDEEAISLIDLEVLRPKRDDRQLEIANNSSQILRLVETKDSIGDEDPFTAKLSFEQGGSEFVPVVVSRLVLRSMSRRDVLIKRWPPPLRWQYFRSLLPDASITMCPSCFQMFHSEDYELLVLQHGCCPYCRRCKDDPGP

SEQ ID NO: 41800 - protein, 46 aa, Homo sapiens
  Payload ID: 8503
  Gene Symbol: IFT122
  Gene Name: intraflagellar transport 122
  ENSP ID: ENSP00000425540
  MOD_RES (1)..(1): Any amino acid
XINDIAFKPDGTQLILAAGSRLLASALLLDQLTKALLSGHQNWKAF

SEQ ID NO: 41801 - protein, 69 aa, Homo sapiens
  Payload ID: 8503
  Gene Symbol: IFT122
  Gene Name: intraflagellar transport 122
  ENSP ID: ENSP00000427027
  MOD_RES (1)..(1): Any amino acid
XINDIAFKPDGTQLILAAGSRLLVYDTSDGTLLQPLKGHKDTVYCVAYAKDVETGFHRVGQDGLDLLTS

SEQ ID NO: 41802 - protein, 67 aa, Homo sapiens
  Payload ID: 8503
  Gene Symbol: IFT122
  Gene Name: intraflagellar transport 122
  ENSP ID: ENSP00000427061
  MOD_RES (1)..(1): Any amino acid
XINDIAFKPDGTQLILAAGSRLLVYDTSDGTLLQPLKGHKDTVYCVAYAKDGNESSSVACLGHAAGQ

SEQ ID NO: 41803 - protein, 171 aa, Homo sapiens
  Payload ID: 8503
  Gene Symbol: IFT122
  Gene Name: intraflagellar transport 122
  ENSP ID: ENSP00000427515
MYQYLDRKLFKEAYQIACLGVTDTDWRELAMEALEGLDFETAKKERKKRGETNNDLFLADVFSYQGKFHEAAKLYKRSGHENLALEMYTDLCMFEYAKDFLGSGDPKETKMLITKQADWARNIKEPKAAVEMYISAGEHVKAIEICGDHGWVDMLIDIARKLDKAEREPLL

SEQ ID NO: 41804 - protein, 656 aa, Homo sapiens
  Payload ID: 8504
  Gene Symbol: IFT140
  Gene Name: intraflagellar transport 140
  Uniprot ID: Q96RY7
  ENSP ID: ENSP00000354895
MARMCVKTQRLDVAKVCLGNMGHARGARALREAEQEPELEARVAVLATQLGMLEDAEQLYRKCKRHDLLNKFYQAAGRWQEALQVAEHHDRVHLRSTYHRYAGHLEASADCSRALSYYEKSDTHRFEVPRMLSEDLPSLELYVNKMKDKTLWRWWAQYLESQGEMDAALHYYELARDHFSLVRIHCFQGNVQKAAQIANETGNLAASYHLARQYESQEEVGQAVHFYTRAQAFKNAIRLCKENGLDDQLMNLALLSSPEDMIEAARYYEEKGVQMDRAVMLYHKAGHFSKALELAFATQQFVALQLIAEDLDETSDPALLARCSDFFIEHSQYERAVELLLAARKYQEALQLCLGQNMSITEEMAEKMTVAKDSSDLPEESRRELLEQIADCCMRQGSYHLATKKYTQAGNKLKAMRALLKSGDTEKITFFASVSRQKEIYIMAANYLQSLDWRKEPEIMKNIIGFYTKGRALDLLAGFYDACAQVEIDEYQNYDKAHGALTEAYKCLAKAKAKSPLDQETRLAQLQSRMALVKRFIQARRTYTEDPKESIKQCELLLEEPDLDSTIRIGDVYGFLVEHYVRKEEYQTAYRFLEEMRRRLPLANMSYYVSPQAVDAVHRGLGLPLPRTVPEQVRHNSMEDARELDEEVVEEADDDP

SEQ ID NO: 41805 - protein, 206 aa, Homo sapiens
  Payload ID: 8504
  Gene Symbol: IFT140
  Gene Name: intraflagellar transport 140
  ENSP ID: ENSP00000380562
MALYYDHQIEAPDAAGSPSFISWHPVHPFLAVAYISTTSTGSVDIYLEQGECVPDTHVERPFRVASLCWHPTRLVLAVGWETGEVTVFNKQDKEQHTMPLTHTADITVLLGFQEEPAGSEQRHLRGHPQRAGHVVTLPPASGRHAGLPESAECVLPVHGGRTQPAHRHAHQWSVCHQGCCRSLERKAGGDLRAFWSRDTECRDLLV

SEQ ID NO: 41806 - protein, 1462 aa, Homo sapiens
  Payload ID: 8504
  Gene Symbol: IFT140
  Gene Name: intraflagellar transport 140
  Uniprot ID: Q96RY7
  ENSP ID: ENSP00000406012
MALYYDHQIEAPDAAGSPSFISWHPVHPFLAVAYISTTSTGSVDIYLEQGECVPDTHVERPFRVASLCWHPTRLVLAVGWETGEVTVFNKQDKEQHTMPLTHTADITVLRWSPSGNCLLSGDRLGVLLLWRLDQRGRVQGTPLLKHEYGKHLTHCIFRLPPPGEDLVQLAKAAVSGDEKALDMFNWKKSSSGSLLKMGSHEGLLFFVSLMDGTVHYVDEKGKTTQVVSADSTIQMLFYMEKREALVVVTENLRLSLYTVPPEGKAEEVMKVKLSGKTGRRADIALIEGSLLVMAVGEAALRFWDIERGENYILSPDEKFGFEKGENMNCVCYCKVKGLLAAGTDRGRVAMWRKVPDFLGSPGAEGKDRWALQTPTELQGNITQIQWGSRKNLLAVNSVISVAILSERAMSSHFHQQVAAMQVSPSLLNVCFLSTGVAHSLRTDMHISGVFATKDAVAVWNGRQVAIFELSGAAIRSAGTFLCETPVLAMHEENVYTVESNRVQVRTWQGTVKQLLLFSETEGNPCFLDICGNFLVVGTDLAHFKSFDLSRREAKAHCSCRSLAELVPGVGGIASLRCSSSGSTISILPSKADNSPDSKICFYDVEMDTVTVFDFKTGQIDRRETLSFNEQETNKSHLFVDEGLKNYVPVNHFWDQSEPRLFVCEAVQETPRSQPQSANGQPQDGRAGPAADVLILSFFISEEHGFLLHESFPRPATSHSLLGMEVPYYYFTRKPEEADREDEVEPGCHHIPQMVSRRPLRDFVGLEDCDKATRDAMLHFSFFVTIGDMDEAFKSIKLIKSEAVWENMARMCVKTQRLDVAKVCLGNMGHARGARALREAEQEPELEARVAVLATQLGMLEDAEQLYRKCKRHDLLNKFYQAAGRWQEALQVAEHHDRVHLRSTYHRYAGHLEASADCSRALSYYEKSDTHRFEVPRMLSEDLPSLELYVNKMKDKTLWRWWAQYLESQGEMDAALHYYELARDHFSLVRIHCFQGNVQKAAQIANETGNLAASYHLARQYESQEEVGQAVHFYTRAQAFKNAIRLCKENGLDDQLMNLALLSSPEDMIEAARYYEEKGVQMDRAVMLYHKAGHFSKALELAFATQQFVALQLIAEDLDETSDPALLARCSDFFIEHSQYERAVELLLAARKYQEALQLCLGQNMSITEEMAEKMTVAKDSSDLPEESRRELLEQIADCCMRQGSYHLATKKYTQAGNKLKAMRALLKSGDTEKITFFASVSRQKEIYIMAANYLQSLDWRKEPEIMKNIIGFYTKGRALDLLAGFYDACAQVEIDEYQNYDKAHGALTEAYKCLAKAKAKSPLDQETRLAQLQSRMALVKRFIQARRTYTEDPKESIKQCELLLEEPDLDSTIRIGDVYGFLVEHYVRKEEYQTAYRFLEEMRRRLPLANMSYYVSPQAVDAVHRGLGLPLPRTVPEQVRHNSMEDARELDEEVVEEADDDP

SEQ ID NO: 41807 - protein, 120 aa, Homo sapiens
  Payload ID: 8504
  Gene Symbol: IFT140
  Gene Name: intraflagellar transport 140
  ENSP ID: ENSP00000454781
MALYYDHQIEAPDAAGSPSFISWHPVHPFLAVAYISTTSTGSVDIYLEQGECVPDTHVERPFRVASLCWHPTRLVLAVGWETGEVTVFNKQDKEQHTMPLTHTADITVLRWSPSGNCLLS

SEQ ID NO: 41808 - protein, 113 aa, Homo sapiens
  Payload ID: 8504
  Gene Symbol: IFT140
  Gene Name: intraflagellar transport 140
  ENSP ID: ENSP00000457092
MALYYDHQIEAPDAAGSPSFISWHPVHPFLAVAYISTTSTGSVDIYLEQGECVPDTHVERPFRVASLCWHPTRLVLAVGWETGEVTVFNKQDKEQHTMPLTHTADITVLRWSP

SEQ ID NO: 41809 - protein, 125 aa, Homo sapiens
  Payload ID: 8504
  Gene Symbol: IFT140
  Gene Name: intraflagellar transport 140
  ENSP ID: ENSP00000458439
DEYQNYDKAHGALTEAYKCLAKAKAKSPLDQETRLAQLQSRMALVKRFIQARRTYTEDPKESIKQCELLLEEPDLDSTIRIGDVYGFLVEHYVRKEEYQTVRPECCSLAASRHTRLLKRRLNGSN

SEQ ID NO: 41810 - protein, 1749 aa, Homo sapiens
  Payload ID: 8505
  Gene Symbol: IFT172
  Gene Name: intraflagellar transport 172
  Uniprot ID: Q9UG01
  ENSP ID: ENSP00000260570
MHLKHLRTLLSPQDGAAKVTCMAWSQNNAKFAVCTVDRVVLLYDEHGERRDKFSTKPADMKYGRKSYMVKGMAFSPDSTKIAIGQTDNIIYVYKIGEDWGDKKVICNKFIQTSAVTCLQWPAEYIIVFGLAEGKVRLANTKTNKSSTIYGTESYVVSLTTNCSGKGILSGHADGTIVRYFFDDEGSGESQGKLVNHPCPPYALAWATNSIVAAGCDRKIVAYGKEGHMLQTFDYSRDPQEREFTTAVSSPGGQSVVLGSYDRLRVFNWIPRRSIWEEAKPKEITNLYTITALAWKRDGSRLCVGTLCGGVEQFDCCLRRSIYKNKFELTYVGPSQVIVKNLSSGTRVVLKSHYGYEVEEVKILGKERYLVAHTSETLLLGDLNTNRLSEIAWQGSGGNEKYFFENENVCMIFNAGELTLVEYGNNDTLGSVRTEFMNPHLISVRINERCQRGTEDNKKLAYLIDIKTIAIVDLIGGYNIGTVSHESRVDWLELNETGHKLLFRDRKLRLHLYDIESCSKTMILNFCSYMQWVPGSDVLVAQNRNSLCVWYNIEAPERVTMFTIRGDVIGLERGGGKTEVMVMEGVTTVAYTLDEGLIEFGTAIDDGNYIRATAFLETLEMTPETEAMWKTLSKLALEARQLHIAERCFSALGQVAKARFLHETNEIADQVSREYGGEGTDFYQVRARLAMLEKNYKLAEMIFLEQNAVEEAMGMYQELHRWDECIAVAEAKGHPALEKLRRSYYQWLMDTQQEERAGELQESQGDGLAAISLYLKAGLPAKAARLVLTREELLANTELVEHITAALIKGELYERAGDLFEKIHNPQKALECYRKGNAFMKAVELARLAFPVEVVKLEEAWGDHLVQQKQLDAAINHYIEARCSIKAIEAALGARQWKKAIYILDLQDRNTASKYYPLVAQHYASLQEYEIAEELYTKGDRTKDAIDMYTQAGRWEQAHKLAMKCMRPEDVSVLYITQAQEMEKQGKYREAERLYVTVQEPDLAITMYKKHKLYDDMIRLVGKHHPDLLSDTHLHLGKELEAEGRLQEAEYHYLEAQEWKATVNMYRASGLWEEAYRVARTQGGANAHKHVAYLWAKSLGGEAAVRLLNKLGLLEAAVDHAADNCSFEFAFELSRLALKHKTPEVHLKYAMFLEDEGKFEEAEAEFIRAGKPKEAVLMFVHNQDWEAAQRVAEAHDPDSVAEVLVGQARGALEEKDFQKAEGLLLRAQRPGLALNYYKEAGLWSDALRICKDYVPSQLEALQEEYEREATKKGARGVEGFVEQARHWEQAGEYSRAVDCYLKVRDSGNSGLAEKCWMKAAELSIKFLPPQRNMEVVLAVGPQLIGIGKHSAAAELYLNLDLVKEAIDAFIEGEEWNKAKRVAKELDPRYEDYVDQHYKEFLKNQGKVDSLVGVDVIAALDLYVEQGQWDKCIETATKQNYKILHKYVALYATHLIREGSSAQALALYVQHGAPANPQNFNIYKRIFTDMVSSPGTNCAEAYHSWADLRDVLFNLCENLVKSSEANSPAHEEFKTMLLIAHYYATRSAAQSVKQLETVAARLSVSLLRHTQLLPVDKAFYEAGIAAKAVGWDNMAFIFLNRFLDLTDAIEEGTLDGLDHSDFQDTDIPFEVPLPAKQHVPEAEREEVRDWVLTVSMDQRLEQVLPRDERGAYEASLVAASTGVRALPCLITGYPILRNKIEFKRPGKAANKDNWNKFLMAIKTSHSPVCQDVLKFISQWCGGLPSTSFSFQ

SEQ ID NO: 41811 - protein, 532 aa, Homo sapiens
  Payload ID: 8505
  Gene Symbol: IFT172
  Gene Name: intraflagellar transport 172
  Uniprot ID: Q9UG01
  ENSP ID: ENSP00000352443
MHLKHLRTLLSPQDGAAKVTCMAWSQNNAKFAVCTVDRVVLLYDEHGERRDKFSTKPADMKYGRKSYMVKGMAFSPDSTKIAIGQTDNIIYVYKIGEDWGDKKVICNKFIQTSAVTCLQWPAEYIIVFGLAEGKVRLANTKTNKSSTIYGTESYVVSLTTNCSGKGILSGHADGTIVRYFFDDEGSGESQGKLVNHPCPPYALAWATNSIVAAGCDRKIVAYGKEGHMLQTFDYSRDPQEREFTTAVSSPGGQSVVLGSYDRLRVFNWIPRRSIWEEAKPKEITNLYTITALAWKRDGSRLCVGTLCGGVEQFDCCLRRSIYKNKFELTYVGPSQVIVKNLSSGTRVVLKSHYGYEVEEVKILGKERYLVAHTSETLLLGDLNTNRLSEIAWQGSGGNEKYFFENENVCMIFNAGELTLVEYGNNDTLGSVRTEFMNPHLISVRINERCQRGTEDNKKLAYLIDIKTIAIVDLIGGYNIGTVSHESRVDWLELNETGHKLLFRDRKLRVRRATKALGIGWPTEGVRQAATRD

SEQ ID NO: 41812 - protein, 162 aa, Homo sapiens
  Payload ID: 8505
  Gene Symbol: IFT172
  Gene Name: intraflagellar transport 172
  ENSP ID: ENSP00000398633
NFNIYKRIFTDMVSSPGTNCAEAYHSWADLRDVLFNLCENLVKSSEANSPAHEEFKTMLLIAHYYATRSAAQSVKQLETVAARLSVSLLRHTQLLPVDKAFYEAGIAAKAVGWDNMAFIFLNRFLDLTDAIEEGTLDGLDHSDFQDTDIPFEVPLPAKQHVP

SEQ ID NO: 41813 - protein, 96 aa, Homo sapiens
  Payload ID: 8505
  Gene Symbol: IFT172
  Gene Name: intraflagellar transport 172
  ENSP ID: ENSP00000399017
AQRVAEAHDPDSVAEVLVGQARGALEEKDFQKAEGLLLRAQRPGLALNYYKGCGGICGTSSTLGAGWRVQPCRGLLPQSARLWKQRPGGEVLDEGS

SEQ ID NO: 41814 - protein, 196 aa, Homo sapiens
  Payload ID: 8505
  Gene Symbol: IFT172
  Gene Name: intraflagellar transport 172
  ENSP ID: ENSP00000404082
  MOD_RES (1)..(1): Any amino acid
XSRLALKHKTPEVHLKYAMFLEDEGKFEEAEAEFIRAGKPKEAVLMFVHNQDWEAAQRVAEAHDPDSVAEVLVGQARGALEEKDFQKAEGLLLRAQRPGLALNYYKEAGLWSDALRICKDYVPSQLEALQEEYEREATKKGARGVEGFVEQARHWEQAGEYSRAVDCYLKVRDSGNSGLAEKCWMKVAGIYGVPAG

SEQ ID NO: 41815 - protein, 511 aa, Homo sapiens
  Payload ID: 8505
  Gene Symbol: IFT172
  Gene Name: intraflagellar transport 172
  ENSP ID: ENSP00000407408
MAWSQNNAKFAVCTVDRVVLLYDEHGERRDKFSTKPADMKYGRKSYMVKGMAFSPDSTKIAIGQTDNIIYVYKIGEDWGDKKVICNKFIQTSAVTCLQWPAEYIIVFGLAEGKVRLANTKTNKSSTIYGTESYVVSLTTNCSGKGILSGHADGTIVRYFFDDEGSGESQGKLVNHPCPPYALAWATNSIVAAGCDRKIVAYGKEGHMLQTFDYSRDPQEREFTTAVSSPGGQSVVLGSYDRLRVFNWIPRRSIWEEAKPKEITNLYTITALAWKRDGSRLCVGTLCGGVEQFDCCLRRSIYKNKFELTYVGPSQVIVKNLSSGTRVVLKSHYGYEVEEVKILGKERYLVAHTSETLLLGDLNTNRLSEIAWQGSGGNEKYFFENENVCMIFNAGELTLVEYGNNDTLGSVRTEFMNPHLISVRINERCQRGTEDNKKLAYLIDIKTIAIVDLIGGYNIGTVSHESRVDWLELNETGHKLLFRDRKLRVRRATKALGIGWPTEGVRQAATRD

SEQ ID NO: 41816 - protein, 324 aa, Homo sapiens
  Payload ID: 8505
  Gene Symbol: IFT172
  Gene Name: intraflagellar transport 172
  ENSP ID: ENSP00000427255
  MOD_RES (1)..(1): Any amino acid
XLVGQARGALEEKDFQKAEGLLLRAQRPGLALNYYKEAGLWSDALRICKDYVPSQLEALQEEYEREATKKGARGVEGFVEQARHWEQAGEYSRAVDCYLKVRDSGNSGLAEKCWMKAAELSIKFLPPQRNMEVVLAVGPQLIGIGKHSAAAELYLNLDLVKEAIDAFIEGEEWNKAKRVAKELDPRYEDYVDQHYKEFLKNQGKVDSLVGVDVIAALDLYVEQGQWDKCIETATKQNYKILHKYVALYATHLIREGSSAQALALYVQHGAPANPQNFNIYKRIFTDMVSSPGTNCAEAYHSWADLRDVLFNLAVLSPSSSVKTW

SEQ ID NO: 41817 - protein, 148 aa, Homo sapiens
  Payload ID: 8506
  Gene Symbol: IFT20
  Gene Name: intraflagellar transport 20
  Uniprot ID: Q8IY31
  ENSP ID: ENSP00000350570
MAKDILGEAGLHFDELNKLRVLDPEVTQQTIELKEECKDFVDKIGQFQKIVGGLIELVDQLAKEAENEKMKSLAVSPRLECTGAISAHCKLCLSDSSDSPTSPSRVGGTTGHRCSELAQIYSKAERSSTAATSSPNSRKENAARKVSG

SEQ ID NO: 41818 - protein, 132 aa, Homo sapiens
  Payload ID: 8506
  Gene Symbol: IFT20
  Gene Name: intraflagellar transport 20
  Uniprot ID: Q8IY31
  ENSP ID: ENSP00000378809
MAKDILGEAGLHFDELNKLRVLDPEVTQQTIELKEECKDFVDKIGQFQKIVGGLIELVDQLAKEAENEKMKAIGARNLLKSIAKQREAQQQQLQALIAEKKMQLERYRVEYEALCKVEAEQNEFIDQFIFQK

SEQ ID NO: 41819 - protein, 85 aa, Homo sapiens
  Payload ID: 8506
  Gene Symbol: IFT20
  Gene Name: intraflagellar transport 20
  ENSP ID: ENSP00000462163
MTHLLLTATVTPSEQNSSREPGWETAMAKDILGEAGLHFDELNKLRVLDPEVTQQTIELKEECKDFVDKIGQFQKIVGGLIELVD

SEQ ID NO: 41820 - protein, 132 aa, Homo sapiens; identical to SEQ ID NO: 41818
  Payload ID: 8506
  Gene Symbol: IFT20
  Gene Name: intraflagellar transport 20
  Uniprot ID: Q8IY31
  ENSP ID: ENSP00000463138

SEQ ID NO: 41821 - protein, 114 aa, Homo sapiens
  Payload ID: 8506
  Gene Symbol: IFT20
  Gene Name: intraflagellar transport 20
  Uniprot ID: Q8IY31
  ENSP ID: ENSP00000463322
MAKDILGEAGLHFDELNKLRVLDPEVTQQTIELKEECKDFVDKIGQFQKIVGGLIELVDQLAKEAENEKMKAIGARNLLKSIAKQREAQQQQLQALIAEKKMQLERNELKISLL

SEQ ID NO: 41822 - protein, 132 aa, Homo sapiens
  Payload ID: 8506
  Gene Symbol: IFT20
  Gene Name: intraflagellar transport 20
  ENSP ID: ENSP00000464033
MTHLLLTATVTPSEQNSSREPGWETAMAKDILGEAGLHFDELNKLRVLDPEVTQQTIELKEECKDFVDKIGQFQKIVGGLIELVDQLAKEAENEKMKAIGARNLLKSIAKQREAQQQQLQALIAEKKMQLER

SEQ ID NO: 41823 - protein, 141 aa, Homo sapiens
  Payload ID: 8506
  Gene Symbol: IFT20
  Gene Name: intraflagellar transport 20
  ENSP ID: ENSP00000464147
MTHLLLTATVTPSEQNSSREPGWETAMAKDILGEAGLHFDELNKLRVLDPEVTQQTIELKEECKDFVDKIGQFQKIVGGLIELVDQLAKEAENEKMKAIGARNLLKSIAKQREAQQQQLQALIAEKKMQLERNSISLVILI

SEQ ID NO: 41824 - protein, 71 aa, Homo sapiens
  Payload ID: 8506
  Gene Symbol: IFT20
  Gene Name: intraflagellar transport 20
  ENSP ID: ENSP00000464210
DILGEAGLHFDELNKLRVLDPEVTQQTIELKEECKDFVDKIGQFQKIVGGLIELVDQLAKEAENEKMKVSG

SEQ ID NO: 41825 - protein, 158 aa, Homo sapiens
  Payload ID: 8506
  Gene Symbol: IFT20
  Gene Name: intraflagellar transport 20
  Uniprot ID: Q8IY31
  ENSP ID: ENSP00000464443
MTHLLLTATVTPSEQNSSREPGWETAMAKDILGEAGLHFDELNKLRVLDPEVTQQTIELKEECKDFVDKIGQFQKIVGGLIELVDQLAKEAENEKMKAIGARNLLKSIAKQREAQQQQLQALIAEKKMQLERYRVEYEALCKVEAEQNEFIDQFIFQK

SEQ ID NO: 41826 - protein, 74 aa, Homo sapiens
  Payload ID: 8506
  Gene Symbol: IFT20
  Gene Name: intraflagellar transport 20
  ENSP ID: ENSP00000484842
MAKDILGEAGLHFDELNKLRVLDPEVTQQTIELKEECKDFVDKIGQFQKIVGGLIELVDQLAKEAENEKMKVSG

SEQ ID NO: 41827 - protein, 185 aa, Homo sapiens
  Payload ID: 8507
  Gene Symbol: IFT22
  Gene Name: intraflagellar transport 22
  Uniprot ID: Q9H7X7
  ENSP ID: ENSP00000320359
MLKAKILFVGPCESGKTVLANFLTESSDITEYSPTQGVRILEFENPHVTSNNKGTGCEFELWDCGGDAKFESCWPALMKDAHGVVIVFNADIPSHRKEMEMWYSCFVQQPSLQDTQCMLIAHHKPGSGDDKGSLSLSPPLNKLKLVHSNLEDDPEEIRMEFIKYLKSIINSMSESRDREEMSIMT

SEQ ID NO: 41828 - protein, 37 aa, Homo sapiens
  Payload ID: 8507
  Gene Symbol: IFT22
  Gene Name: intraflagellar transport 22
  ENSP ID: ENSP00000389170
MLKAKILFVGPCEQRPLFALIFTEWKNCFGQLSDRIF

SEQ ID NO: 41829 - protein, 155 aa, Homo sapiens
  Payload ID: 8507
  Gene Symbol: IFT22
  Gene Name: intraflagellar transport 22
  Uniprot ID: Q9H7X7
  ENSP ID: ENSP00000390770
MLKAKILFVGPCESGKTVLANFLTESSDITEYSPTQGVRFESCWPALMKDAHGVVIVFNADIPSHRKEMEMWYSCFVQQPSLQDTQCMLIAHHKPGSGDDKGSLSLSPPLNKLKLVHSNLEDDPEEIRMEFIKYLKSIINSMSESRDREEMSIMT

SEQ ID NO: 41830 - protein, 185 aa, Homo sapiens; identical to SEQ ID NO: 41827
  Payload ID: 8507
  Gene Symbol: IFT22
  Gene Name: intraflagellar transport 22
  Uniprot ID: Q9H7X7
  ENSP ID: ENSP00000392087

SEQ ID NO: 41831 - protein, 108 aa, Homo sapiens
  Payload ID: 8507
  Gene Symbol: IFT22
  Gene Name: intraflagellar transport 22
  Uniprot ID: Q9H7X7
  ENSP ID: ENSP00000429202
MKDAHGVVIVFNADIPSHRKEMEMWYSCFVQQPSLQDTQCMLIAHHKPGSGDDKGSLSLSPPLNKLKLVHSNLEDDPEEIRMEFIKYLKSIINSMSESRDREEMSIMT

SEQ ID NO: 41832 - protein, 108 aa, Homo sapiens; identical to SEQ ID NO: 41831
  Payload ID: 8507
  Gene Symbol: IFT22
  Gene Name: intraflagellar transport 22
  Uniprot ID: Q9H7X7
  ENSP ID: ENSP00000429648

SEQ ID NO: 41833 - protein, 108 aa, Homo sapiens; identical to SEQ ID NO: 41831
  Payload ID: 8507
  Gene Symbol: IFT22
  Gene Name: intraflagellar transport 22
  Uniprot ID: Q9H7X7
  ENSP ID: ENSP00000478948

SEQ ID NO: 41834 - protein, 185 aa, Homo sapiens
  Payload ID: 8508
  Gene Symbol: IFT27
  Gene Name: intraflagellar transport 27
  Uniprot ID: Q9BW83
  ENSP ID: ENSP00000343593
MVKLAAKCILADPAVGKTALAQIFRSDGAHFQKSYTLTTGMDLVVKTVPVPDTGDSVELFIFDSAGKELFSEMLDKLWESPNVLCLVYDVTNEESFNNCSKWLEKARSQAPGISLPGVLVGNKTDLAGRRAVDSAEARAWALGQGLECFETSVKEMENFEAPFHCLAKQFHQLYREKVEVFRALA

SEQ ID NO: 41835 - protein, 116 aa, Homo sapiens
  Payload ID: 8508
  Gene Symbol: IFT27
  Gene Name: intraflagellar transport 27
  ENSP ID: ENSP00000390016
MVKLAAKCILADPAVGKTALAQIFRSDGAHFQKSYTLTTGMDLVVKTVPVPDTGDSVELFIFDSAGKELFSEMLDKLWESPNVLCLVYDVTNEESFNNCSKWLEKARSQAPGISLP

SEQ ID NO: 41836 - protein, 183 aa, Homo sapiens
  Payload ID: 8508
  Gene Symbol: IFT27
  Gene Name: intraflagellar transport 27
  ENSP ID: ENSP00000392016
MVKLAAKCILAVPVDKRLSRAEVCSGCCEVCRSVSWTCALPAASEQVPVRGDPAVGKTALAQIFRSDGAHFQKSYTLTTGMDLVVKTVPVPDTGDSVELFIFDSAGKELFSEMLDKLWESPNVLCLVYDVTNEESFNNCSKWLEKARSQAPGISLPGVLVGNKTDLAGRRAVDSAEARAWALG

SEQ ID NO: 41837 - protein, 186 aa, Homo sapiens
  Payload ID: 8508
  Gene Symbol: IFT27
  Gene Name: intraflagellar transport 27
  Uniprot ID: Q9BW83
  ENSP ID: ENSP00000393541
MVKLAAKCILAGDPAVGKTALAQIFRSDGAHFQKSYTLTTGMDLVVKTVPVPDTGDSVELFIFDSAGKELFSEMLDKLWESPNVLCLVYDVTNEESFNNCSKWLEKARSQAPGISLPGVLVGNKTDLAGRRAVDSAEARAWALGQGLECFETSVKEMENFEAPFHCLAKQFHQLYREKVEVFRALA

SEQ ID NO: 41838 - protein, 50 aa, Homo sapiens
  Payload ID: 8508
  Gene Symbol: IFT27
  Gene Name: intraflagellar transport 27
  ENSP ID: ENSP00000399606
MDLVVKTVPVPDTGDSVELFIFDSAGKELFSEMLDKLWESPNVLCLVYDV

SEQ ID NO: 41839 - protein, 129 aa, Homo sapiens
  Payload ID: 8508
  Gene Symbol: IFT27
  Gene Name: intraflagellar transport 27
  ENSP ID: ENSP00000404556
  MOD_RES (1)..(1): Any amino acid
XSDGAHFQKSYTLTTGMDLVVKTVPVPDTGDSVELFIFDSAGKELFSEMLDKLWESPNVLCLVYDVTNEESFNNCSKWLEKARSQAPGISLPGVLVGNKTDLAGRRAVDSAEARAWALGQGLECFETSV

SEQ ID NO: 41840 - protein, 213 aa, Homo sapiens
  Payload ID: 8509
  Gene Symbol: IFT43
  Gene Name: intraflagellar transport 43
  Uniprot ID: Q96FT9
  ENSP ID: ENSP00000238628
MEDLLDLDEELRYSLATSRAKMGRRAQQESAQAENHLNGKNSSLTLTGETSSAKLPRCRQGGWAGDSVKASNGTQTGKQQLDLNACYHKTHHRDLGLASLEEADIPIIPDLEEVQEEDFVLQVAAPPSIQIKRVMTYRDLDNDLMKYSAIQTLDGEIDLKLLTKVLAPEHEVREDDVGWDWDHLFTEVSSEVLTEWDPLQTEKEDPAGQARHT

SEQ ID NO: 41841 - protein, 208 aa, Homo sapiens
  Payload ID: 8509
  Gene Symbol: IFT43
  Gene Name: intraflagellar transport 43
  Uniprot ID: Q96FT9
  ENSP ID: ENSP00000324177
MEDLLDLDEELRYSLATSRAKMGRRAQQESAQAENHLNGKNSSLTLTGETSSAKLPRCRQGGWAGDSVKASKFRRKASEEIEDFRLRPQSLNGSDYGGDIPIIPDLEEVQEEDFVLQVAAPPSIQIKRVMTYRDLDNDLMKYSAIQTLDGEIDLKLLTKVLAPEHEVREDDVGWDWDHLFTEVSSEVLTEWDPLQTEKEDPAGQARHT

SEQ ID NO: 41842 - protein, 208 aa, Homo sapiens; identical to SEQ ID NO: 41841
  Payload ID: 8509
  Gene Symbol: IFT43
  Gene Name: intraflagellar transport 43
  Uniprot ID: Q96FT9
  ENSP ID: ENSP00000440064

SEQ ID NO: 41843 - protein, 113 aa, Homo sapiens
  Payload ID: 8509
  Gene Symbol: IFT43
  Gene Name: intraflagellar transport 43
  Uniprot ID: Q96FT9
  ENSP ID: ENSP00000451096
MEDLLDLDEELRYSLATSRAKMGRRAQQESAQAENHLNGKNSSLTLTGETSSAKLPRCRQGGWAGDSVKASKFRRKASEEIEEYVSSILILMVSYVDLGQQCSLGGHDLFHLC

SEQ ID NO: 41844 - protein, 32 aa, Homo sapiens
  Payload ID: 8509
  Gene Symbol: IFT43
  Gene Name: intraflagellar transport 43
  ENSP ID: ENSP00000452051
MEDLLDLDEELRYSLATSSPECELPQNRSITG

SEQ ID NO: 41845 - protein, 355 aa, Homo sapiens
  Payload ID: 8510
  Gene Symbol: IFT46
  Gene Name: intraflagellar transport 46
  Uniprot ID: Q9NQC8
  ENSP ID: ENSP00000264020
MADNSSDECEEENNKVLREGMPQAPGHRGKDMDPVPPAPASLKCHQTPSHVLERVGWYRESQKHRKEKKKTSQLTPQRGFSENEDDDDDDDDSSETDSDSDDDDEEHGAPLEGAYDPADYEHLPVSAEIKELFQYISRYTPQLIDLDHKLKPFIPDFIPAVGDIDAFLKVPRPDGKPDNLGLLVLDEPSTKQSDPTVLSLWLTENSKQHNITQHMKVKSLEDAEKNPKAIDTWIESISELHRSKPPATVHYTRPMPDIDTLMQEWSPEFEELLGKVSLPTAEIDCSLAEYIDMICAILDIPVYKSRIQSLHLLFSLYSEFKNSQHFKALAEGKKAFTPSSNSTSQAGDMETLTFS

SEQ ID NO: 41846 - protein, 304 aa, Homo sapiens
  Payload ID: 8510
  Gene Symbol: IFT46
  Gene Name: intraflagellar transport 46
  Uniprot ID: Q9NQC8
  ENSP ID: ENSP00000264021
MADNSSDECEEENNKEKKKTSQLTPQRGFSENEDDDDDDDDSSETDSDSDDDDEEHGAPLEGAYDPADYEHLPVSAEIKELFQYISRYTPQLIDLDHKLKPFIPDFIPAVGDIDAFLKVPRPDGKPDNLGLLVLDEPSTKQSDPTVLSLWLTENSKQHNITQHMKVKSLEDAEKNPKAIDTWIESISELHRSKPPATVHYTRPMPDIDTLMQEWSPEFEELLGKVSLPTAEIDCSLAEYIDMICAILDIPVYKSRIQSLHLLFSLYSEFKNSQHFKALAEGKKAFTPSSNSTSQAGDMETLTFS

SEQ ID NO: 41847 - protein, 297 aa, Homo sapiens
  Payload ID: 8510
  Gene Symbol: IFT46
  Gene Name: intraflagellar transport 46
  ENSP ID: ENSP00000432384
MADNSSDECEEENNKVLREGMPQAPGHRGKDMDPVPPAPASLKCHQTPSHVLERVGWYRESQKHRKEKKKTSQLTPQRGFSENEDDDDDDDDSSETDSDSDDDDEEHGAPLEGAYDPADYEHLPVSAEIKELFQYISRYTPQLIDLDHKLKPFIPDFIPAVGDIDAFLKVPRPDGKPDNLGLLVLDEPSTKQSDPTVLSLWLTENSKQHNITQHMKVKSLEDAEKNPKAIDTWIESISELHRSKPPATVHYTRPMPDIDTLMQEWSPEFEELLGKVSLPTAEIDCSLAEYIDMICAF

SEQ ID NO: 41848 - protein, 159 aa, Homo sapiens
  Payload ID: 8510
  Gene Symbol: IFT46
  Gene Name: intraflagellar transport 46
  ENSP ID: ENSP00000432982
MADNSSDECEEENNKVLREGMPQAPGHRGKDMDPVPPAPASLKCHQTPSHVLERVGWYRESQKHRKEKKKTSQLTPQRGFSENEDDDDDDDDSSETDSDSDDDDEEHGAPLEGAYDPADYEHLPVSAEIKELFQYISRYTPQLIDLDHKLKPFIPDFIP

SEQ ID NO: 41849 - protein, 194 aa, Homo sapiens
  Payload ID: 8510
  Gene Symbol: IFT46
  Gene Name: intraflagellar transport 46
  ENSP ID: ENSP00000434175
MADNSSDECEEENNKEKKKTSQLTPQRGFSENEDDDDDDDDSSETDSDSDDDDEEHGAPLEGAYDPADYEHLPVSAEIKELFQYISRYTPQLIDLDHKLKPFIPDFIPAVGDIDAFLKVPRPDGKPDNLGLLVLDEPSTKQSDPTVLSLWLTENSKQHNITQHMKVKSLEDAEKNPKAIDTWIESISELHRSKP

SEQ ID NO: 41850 - protein, 107 aa, Homo sapiens
  Payload ID: 8510
  Gene Symbol: IFT46
  Gene Name: intraflagellar transport 46
  ENSP ID: ENSP00000435278
MADNSSDECEEENNKEKKKTSQLTPQRGFSENEDDDDDDDDSSETDSDSDDDDEEHGAPLEGAYDPADYEHLPVSAEIKELFQYISRYTPQLIDLDHKLKPFIPDFI

SEQ ID NO: 41851 - protein, 61 aa, Homo sapiens
  Payload ID: 8510
  Gene Symbol: IFT46
  Gene Name: intraflagellar transport 46
  ENSP ID: ENSP00000435750
MADNSSDECEEENNKEKKKTSQLTPQRGFSENEDDDDDDDDSSETDSDSDDDDEEHGAPLE

SEQ ID NO: 41852 - protein, 196 aa, Homo sapiens
  Payload ID: 8510
  Gene Symbol: IFT46
  Gene Name: intraflagellar transport 46
  ENSP ID: ENSP00000435826
MADNSSDECEEENNKEKKKTSQLTPQRGFSENEDDDDDDDDSSETDSDSDDDDEEHGAPLEGAYDPADYEHLPVSAEIKELFQYISRYTPQLIDLDHKLKPFIPDFIPAVGDIDAFLKVPRPDGKPDNLGLLVLDEPSTKQSDPTVLSLWLTENSKQHNITQHMKVKSLEDAEKNPKAIDTWIESISELHRSKPPA

SEQ ID NO: 41853 - protein, 437 aa, Homo sapiens
  Payload ID: 8511
  Gene Symbol: IFT52
  Gene Name: intraflagellar transport 52
  Uniprot ID: Q9Y366
  ENSP ID: ENSP00000362121
MEKELRSTILFNAYKKEIFTTNNGYKSMQKKLRSNWKIQSLKDEITSEKLNGVKLWITAGPREKFTAAEFEILKKYLDTGGDVFVMLGEGGESRFDTNINFLLEEYGIMVNNDAVVRNVYHKYFHPKEALVSSGVLNREISRAAGKAVPGIIDEESSGNNAQALTFVYPFGATLSVMKPAVAVLSTGSVCFPLNRPILAFYHSKNQGGKLAVLGSCHMFSDQYLDKEENSKIMDVVFQWLTTGDIHLNQIDAEDPEISDYMMLPYTATLSKRNRECLQESDEIPRDFTTLFDLSIFQLDTTSFHSVIEAHEQLNVKHEPLQLIQPQFETPLPTLQPAVFPPSFRELPPPPLELFDLDETFSSEKARLAQITNKCTEEDLEFYVRKCGDILGVTSKLPKDQQDAKHILEHVFFQVVEFKKLNQEHDIDTSETAFQNNF

SEQ ID NO: 41854 - protein, 437 aa, Homo sapiens; identical to SEQ ID NO: 41853
  Payload ID: 8511
  Gene Symbol: IFT52
  Gene Name: intraflagellar transport 52
  Uniprot ID: Q9Y366
  ENSP ID: ENSP00000362130

SEQ ID NO: 41855 - protein, 429 aa, Homo sapiens
  Payload ID: 8512
  Gene Symbol: IFT57
  Gene Name: intraflagellar transport 57
  Uniprot ID: Q9NWB7
  ENSP ID: ENSP00000264538
MTAALAVVTTSGLEDGVPRSRGEGTGEVVLERGPGAAYHMFVVMEDLVEKLKLLRYEEEFLRKSNLKAPSRHYFALPTNPGEQFYMFCTLAAWLINKAGRPFEQPQEYDDPNATISNILSELRSFGRTADFPPSKLKSGYGEHVCYVLDCFAEEALKYIGFTWKRPIYPVEELEEESVAEDDAELTLNKVDEEFVEEETDNEENFIDLNVLKAQTYHLDMNETAKQEDILESTTDAAEWSLEVERVLPQLKVTIRTDNKDWRIHVDQMHQHRSGIESALKETKGFLDKLHNEITRTLEKISSREKYINNQLENLVQEYRAAQAQLSEAKERYQQGNGGVTERTRLLSEVMEELEKVKQEMEEKGSSMTDGAPLVKIKQSLTKLKQETVEMDIRIGIVEHTLLQSKLKEKSNMTRNMHATVIPEPATGFY

SEQ ID NO: 41856 - protein, 157 aa, Homo sapiens
  Payload ID: 8512
  Gene Symbol: IFT57
  Gene Name: intraflagellar transport 57
  ENSP ID: ENSP00000417439
MTAALAVVTTSGLEDGVPRSRGEGTGEVVLERGPGAAYHMFVVMEDLVEKLKLLRYEEEFLRKSNLKAPSRWVPASPSARVPASPQGDALLGPAGNQFRESGHYFALPTNPGEQFYMFCTLAAWLINKAGRPFEQPQEYDDPNATISNILSELRSFV

SEQ ID NO: 41857 - protein, 81 aa, Homo sapiens
  Payload ID: 8512
  Gene Symbol: IFT57
  Gene Name: intraflagellar transport 57
  ENSP ID: ENSP00000417768
MTAALAVVTTSGLEDGVPRSRGEGTGEVVLERGPGAAYHMFVVMEDLVEKLKLLRYEEEFLRKSNLKAPSREELQIFLLQN

SEQ ID NO: 41858 - protein, 600 aa, Homo sapiens
  Payload ID: 8513
  Gene Symbol: IFT74
  Gene Name: intraflagellar transport 74
  Uniprot ID: Q96LB3
  ENSP ID: ENSP00000369402
MASNHKSSAARPVSRGGVGLTGRPPSGIRPLSGNIRVATAMPPGTARPGSRGCPIGTGGVLSSQIKVAHRPVTQQGLTGMKTGTKGPQRQILDKSYYLGLLRSKISELTTEVNKLQKGIEMYNQENSVYLSYEKRAETLAVEIKELQGQLADYNMLVDKLNTNTEMEEVMNDYNMLKAQNDRETQSLDVIFTERQAKEKQIRSVEEEIEQEKQATDDIIKNMSFENQVKYLEMKTTNEKLLQELDTLQQQLDSQNMKKESLEAEIAHSQVKQEAVLLHEKLYELESHRDQMIAEDKSIGSPMEEREKLLKQIKDDNQEIASMERQLTDTKEKINQFIEEIRQLDMDLEEHQGEMNQKYKELKKREEHMDTFIETFEETKNQELKRKAQIEANIVALLEHCSRNINRIEQISSITNQELKMMQDDLNFKSTEVQKSQSTAQNLTSDIQRLQLDLQKMELLESKMTEEQHSLKSKIKQMTTDLEIYNDLPALKSSGEEKIKKLHQERMILSTHRNAFKKIMEKQNIEYEALKTQLQENETHSQLTNLERKWQHLEQNNFAMKEFIATKSQESDYQPIKKNVTKQIAEYNKTIVDALHSTSGN

SEQ ID NO: 41859 - protein, 600 aa, Homo sapiens; identical to SEQ ID NO: 41858
  Payload ID: 8513
  Gene Symbol: IFT74
  Gene Name: intraflagellar transport 74
  Uniprot ID: Q96LB3
  ENSP ID: ENSP00000389224

SEQ ID NO: 41860 - protein, 372 aa, Homo sapiens
  Payload ID: 8513
  Gene Symbol: IFT74
  Gene Name: intraflagellar transport 74
  Uniprot ID: Q96LB3
  ENSP ID: ENSP00000393907
MASNHKSSAARPVSRGGVGLTGRPPSGIRPLSGNIRVATAMPPGTARPGSRGCPIGTGGVLSSQIKVAHRPVTQQGLTGMKTGTKGPQRQILDKSYYLGLLRSKISELTTEVNKLQKGIEMYNQENSVYLSYEKRAETLAVEIKELQGQLADYNMLVDKLNTNTEMEEVMNDYNMLKAQNDRETQSLDVIFTERQAKEKQIRSVEEEIEQEKQATDDIIKNMSFENQVKYLEMKTTNEKLLQELDTLQQQLDSQNMKKESLEAEIAHSQVKQEAVLLHEKLYELESHRDQMIAEDKSIGSPMEEREKLLKQIKDDNQEIASMERQLTDTKEKINQFIEEIRQLDMDLEEHQDPTNYGWKILEKNTGSFKKQV

SEQ ID NO: 41861 - protein, 600 aa, Homo sapiens; identical to SEQ ID NO: 41858
  Payload ID: 8513
  Gene Symbol: IFT74
  Gene Name: intraflagellar transport 74
  Uniprot ID: Q96LB3
  ENSP ID: ENSP00000404122

SEQ ID NO: 41862 - protein, 175 aa, Homo sapiens
  Payload ID: 8513
  Gene Symbol: IFT74
  Gene Name: intraflagellar transport 74
  ENSP ID: ENSP00000430004
MASNHKSSAARPVSRGGVGLTGRPPSGIRPLSGNIRVATAMPPGTARPGSRGCPIGTGGVLSSQIKVAHRPVTQQGLTGMKTGTKGPQRQILDKSYYLGLLRSKISELTTEVNKLQKGIEMYNQENSVYLSYEKRAETLAVEIKELQGQLADYNMLVDKLNTNTEMEEVMNDYNM

SEQ ID NO: 41863 - protein, 126 aa, Homo sapiens
  Payload ID: 8513
  Gene Symbol: IFT74
  Gene Name: intraflagellar transport 74
  ENSP ID: ENSP00000430096
MASNHKSSAARPVSRGGVGLTGRPPSGIRPLSGNIRVATAMPPGTARPGSRGCPIGTGGVLSSQIKVAHRPVTQQGLTGMKTGTKGPQRQILDKSYYLGLLRSKISELTTEVNKLQKGIEMYNQEN

SEQ ID NO: 41864 - protein, 146 aa, Homo sapiens
  Payload ID: 8513
  Gene Symbol: IFT74
  Gene Name: intraflagellar transport 74
  ENSP ID: ENSP00000430526
MASNHKSSAARPVSRGGVGLTGRPPSGIRPLSGNIRVATAMPPGTARPGSRGCPIGTGGVLSSQIKVAHRPVTQQGLTGMKTGTKGPQRQILDKSYYLGLLRRSFACHPSWSAMMGSHVTATSTAWIQVILLPQPRACNLSKISEL

SEQ ID NO: 41865 - protein, 147 aa, Homo sapiens
  Payload ID: 8513
  Gene Symbol: IFT74
  Gene Name: intraflagellar transport 74
  ENSP ID: ENSP00000430742
MPMPPGTARPGSRGCPIGTGGVLSSQIKVAHRPVTQQGLTGMKTGTKGPQRQILDKSYYLGLLRSKISELTTEVNKLQKGIEMYNQENSVYLSYEKRAETLAVEIKELQGQLADYNMLVDKLNTNTEMEEVMNDYNMLKAQNDRETQ

SEQ ID NO: 41866 - protein, 777 aa, Homo sapiens
  Payload ID: 8514
  Gene Symbol: IFT80
  Gene Name: intraflagellar transport 80
  Uniprot ID: Q9P2H3
  ENSP ID: ENSP00000312778
MRLKISLLKEPKHQELVSCVGWTTAEELYSCSDDHQIVKWNLLTSETTQIVKLPDDIYPIDFHWFPKSLGVKKQTQAESFVLTSSDGKFHLISKLGRVEKSVEAHCGAVLAGRWNYEGTALVTVGEDGQIKIWSKTGMLRSTLAQQGTPVYSVAWGPDSEKVLYTAGKQLIIKPLQPNAKVLQWKAHDGIILKVDWNSVNDLILSAGEDCKYKVWDSYGRPLYNSQPHEHPITSVAWAPDGELFAVGSFHTLRLCDKTGWSYALEKPNTGSIFNIAWSIDGTQIAGACGNGHVVFAHVVEQHWEWKNFQVTLTKRRAMQVRNVLNDAVDLLEFRDRVIKASLNYAHLVVSTSLQCYVFSTKNWNTPIIFDLKEGTVSLILQAERHFLLVDGSSIYLYSYEGRFISSPKFPGMRTDILNAQTVSLSNDTIAIRDKADEKIIFLFEASTGKPLGDGKFLSHKNEILEIALDQKGLTNDRKIAFIDKNRDLCITSVKRFGKEEQIIKLGTMVHTLAWNDTCNILCGLQDTRFIVWYYPNTVYVDRDILPKTLYERDASEFSKNPHIVSFVGNQVTIRRADGSLVHISITPYPAILHEYVSSSKWEDAVRLCRFVKEQTMWACLAAMAVANRDMTTAEIAYAAIGEIDKVQYINSIKNLPSKESKMAHILLFSGNIQEAEIVLLQAGLVYQAIQININLYNWERALELAVKYKTHVDTVLAYRQKFLETFGKQETNKRYLHYAEGLQIDWEKIKAKIEMEITKEREQSSSSQSSKSIGLKP

SEQ ID NO: 41867 - protein, 42 aa, Homo sapiens
  Payload ID: 8514
  Gene Symbol: IFT80
  Gene Name: intraflagellar transport 80
  ENSP ID: ENSP00000417057
MLRSTLAQQGTPVYSVAWGPDSEKVLYTAGKQLIIKPLQPNA

SEQ ID NO: 41868 - protein, 122 aa, Homo sapiens
  Payload ID: 8514
  Gene Symbol: IFT80
  Gene Name: intraflagellar transport 80
  ENSP ID: ENSP00000417552
VRNVLNDAVDLLEFRDRVIKASLNYAHLVVSTSLQCYVFSTKNWNTPIIFDLKEGTVSLILQAERHFLLVDGSSIYLYSYEGRFISSPKFPGMRTDILNAQTVSLSNDTIAIRDKADEKSLL

SEQ ID NO: 41869 - protein, 32 aa, Homo sapiens
  Payload ID: 8514
  Gene Symbol: IFT80
  Gene Name: intraflagellar transport 80
  ENSP ID: ENSP00000417861
MLRSTLAQQGTPVYSVAWGPDSEKVLYTAGKQ

SEQ ID NO: 41870 - protein, 640 aa, Homo sapiens
  Payload ID: 8514
  Gene Symbol: IFT80
  Gene Name: intraflagellar transport 80
  Uniprot ID: Q9P2H3
  ENSP ID: ENSP00000418196
MLRSTLAQQGTPVYSVAWGPDSEKVLYTAGKQLIIKPLQPNAKVLQWKAHDGIILKVDWNSVNDLILSAGEDCKYKVWDSYGRPLYNSQPHEHPITSVAWAPDGELFAVGSFHTLRLCDKTGWSYALEKPNTGSIFNIAWSIDGTQIAGACGNGHVVFAHVVEQHWEWKNFQVTLTKRRAMQVRNVLNDAVDLLEFRDRVIKASLNYAHLVVSTSLQCYVFSTKNWNTPIIFDLKEGTVSLILQAERHFLLVDGSSIYLYSYEGRFISSPKFPGMRTDILNAQTVSLSNDTIAIRDKADEKIIFLFEASTGKPLGDGKFLSHKNEILEIALDQKGLTNDRKIAFIDKNRDLCITSVKRFGKEEQIIKLGTMVHTLAWNDTCNILCGLQDTRFIVWYYPNTVYVDRDILPKTLYERDASEFSKNPHIVSFVGNQVTIRRADGSLVHISITPYPAILHEYVSSSKWEDAVRLCRFVKEQTMWACLAAMAVANRDMTTAEIAYAAIGEIDKVQYINSIKNLPSKESKMAHILLFSGNIQEAEIVLLQAGLVYQAIQININLYNWERALELAVKYKTHVDTVLAYRQKFLETFGKQETNKRYLHYAEGLQIDWEKIKAKIEMEITKEREQSSSSQSSKSIGLKP

SEQ ID NO: 41871 - protein, 121 aa, Homo sapiens
  Payload ID: 8514
  Gene Symbol: IFT80
  Gene Name: intraflagellar transport 80
  ENSP ID: ENSP00000418455
MRLKISLLKEPKHQELVSCVGWTTAEELYSCSDDHQIVKWNLLTSETTQIVKLPDDIYPIDFHWFPKSLGVKKQTQAESFVLTSSDGKFHLISKLGRVEKSVEAHCGAVLAGRWNYEGTAL

SEQ ID NO: 41872 - protein, 95 aa, Homo sapiens
  Payload ID: 8514
  Gene Symbol: IFT80
  Gene Name: intraflagellar transport 80
  ENSP ID: ENSP00000418497
MRLKISLLKEPKHQELVSCVGWTTAEELYSCSDDHQIVKWNLLTSETTQIVKLPDDIYPIDFHWFPKSLGVKKQTQAESFVLTSSDDFSNVISFR

SEQ ID NO: 41873 - protein, 122 aa, Homo sapiens
  Payload ID: 8514
  Gene Symbol: IFT80
  Gene Name: intraflagellar transport 80
  ENSP ID: ENSP00000418602
MLRSTLAQQGTPVYSVAWGPDSEKVLYTAGKQLIIKPLQPNAKVLQWKAHDGIILKVDWNSVNDLILSAGEDCKYKVWDSYGRPLYNSQPHEHPITSVAWAPDGELFAVGSFHTLRLCDKTG

SEQ ID NO: 41874 - protein, 77 aa, Homo sapiens
  Payload ID: 8514
  Gene Symbol: IFT80
  Gene Name: intraflagellar transport 80
  ENSP ID: ENSP00000419458
MLRSTLAQQGTPVYSVAWGPDSEKVLYTAGKQLIIKPLQPNAKVLQWKAHDGIILKVDWNSVNDLILSAGEDCKYKV

SEQ ID NO: 41875 - protein, 64 aa, Homo sapiens
  Payload ID: 8514
  Gene Symbol: IFT80
  Gene Name: intraflagellar transport 80
  ENSP ID: ENSP00000419468
MRLKISLLKEPKHQELVSCVGWTTAEELYSCSDDHQIVKWNLLTSETTQIVKLPDDIYPIDFHW

SEQ ID NO: 41876 - protein, 179 aa, Homo sapiens
  Payload ID: 8514
  Gene Symbol: IFT80
  Gene Name: intraflagellar transport 80
  ENSP ID: ENSP00000420001
MRLKISLLKEPKHQELVSCVGWTTAEELYSCSDDHQIVKWNLLTSETTQIVKLPDDIYPIDFHWFPKSLGVKKQTQAESFVLTSSDGKFHLISKLGRVEKSVEAHCGAVLAGRWNYEGTALVTVGEDGQIKIWSKTGMLRSTLAQQGTPVYSVAWGPDSEKVLYTAGKQLIIKPLQPNA

SEQ ID NO: 41877 - protein, 55 aa, Homo sapiens
  Payload ID: 8514
  Gene Symbol: IFT80
  Gene Name: intraflagellar transport 80
  ENSP ID: ENSP00000420260
YEGTALVTVGEDGQIKIWSKTGMLRSTLAQQGTPVYSVAWGPDSEKVLYTAVESS

SEQ ID NO: 41878 - protein, 69 aa, Homo sapiens
  Payload ID: 8514
  Gene Symbol: IFT80
  Gene Name: intraflagellar transport 80
  ENSP ID: ENSP00000420401
  MOD_RES (1)..(1): Any amino acid
XKYKVWDSYGRPLYNSQPHEHPITSVAWAPDGELFAVGSFHTLRLCDKTGFLFHQMKDYKQAKVTYFKW

SEQ ID NO: 41879 - protein, 640 aa, Homo sapiens; identical to SEQ ID NO: 41870
  Payload ID: 8514
  Gene Symbol: IFT80
  Gene Name: intraflagellar transport 80
  Uniprot ID: Q9P2H3
  ENSP ID: ENSP00000420646

SEQ ID NO: 41880 - protein, 32 aa, Homo sapiens; identical to SEQ ID NO: 41869
  Payload ID: 8514
  Gene Symbol: IFT80
  Gene Name: intraflagellar transport 80
  ENSP ID: ENSP00000420758

SEQ ID NO: 41881 - protein, 676 aa, Homo sapiens
  Payload ID: 8515
  Gene Symbol: IFT81
  Gene Name: intraflagellar transport 81
  Uniprot ID: Q8WYA0
  ENSP ID: ENSP00000242591
MSDQIKFIMDSLNKEPFRKNYNLITFDSLEPMQLLQVLSDVLAEIDPKQLVDIREEMPEQTAKRMLSLLGILKYKPSGNATDMSTFRQGLVIGSKPVIYPVLHWLLQRTNELKKRAYLARFLIKLEVPSEFLQDETVADTNKQYEELMEAFKTLHKEYEQLKISGFSTAEIRKDISAMEEEKDQLIKRVEHLKKRVETAQNHQWMLKIARQLRVEKEREEYLAQQKQEQKNQLFHAVQRLQRVQNQLKSMRQAAADAKPESLMKRLEEEIKFNLYMVTEKFPKELENKKKELHFLQKVVSEPAMGHSDLLELESKINEINTEINQLIEKKMMRNEPIEGKLSLYRQQASIISRKKEAKAEELQEAKEKLASLEREASVKRNQTREFDGTEVLKGDEFKRYVNKLRSKSTVFKKKHQIIAELKAEFGLLQRTEELLKQRHENIQQQLQTMEEKKGISGYSYTQEELERVSALKSEVDEMKGRTLDDMSEMVKKLYSLVSEKKSALASVIKELRQLRQKYQELTQECDEKKSQYDSCAAGLESNRSKLEQEVRRLREECLQEESRYHYTNCMIKNLEVQLRRATDEMKAYISSDQQEKRKAIREQYTKNTAEQENLGKKLREKQKVIRESHGPNMKQAKMWRDLEQLMECKKQCFLKQQSQTSIGQVIQEGGEDRLIL

SEQ ID NO: 41882 - protein, 431 aa, Homo sapiens
  Payload ID: 8515
  Gene Symbol: IFT81
  Gene Name: intraflagellar transport 81
  Uniprot ID: Q8WYA0
  ENSP ID: ENSP00000355372
MSDQIKFIMDSLNKEPFRKNYNLITFDSLEPMQLLQVLSDVLAEIDPKQLVDIREEMPEQTAKRMLSLLGILKYKPSGNATDMSTFRQGLVIGSKPVIYPVLHWLLQRTNELKKRAYLARFLIKLEVPSEFLQDETVADTNKQYEELMEAFKTLHKEYEQLKISGFSTAEIRKDISAMEEEKDQLIKRVEHLKKRVETAQNHQWMLKIARQLRVEKEREEYLAQQKQEQKNQLFHAVQRLQRVQNQLKSMRQAAADAKPESLMKRLEEEIKFNLYMVTEKFPKELENKKKELHFLQKVVSEPAMGHSDLLELESKINEINTEINQLIEKKMMRNEPIEGKLSLYRQQASIISRKKEAKAEELQEAKEKLASLEREASVKRNQTREFDGTEVLKGDERQDLTLSPRLECGGVIMAYCSLKLLGSSDPPTSAS

SEQ ID NO: 41883 - protein, 624 aa, Homo sapiens
  Payload ID: 8515
  Gene Symbol: IFT81
  Gene Name: intraflagellar transport 81
  ENSP ID: ENSP00000446895
  MOD_RES (1)..(1): Any amino acid
XMQLLQVLSDVLAEIDPKQLVDIREEMPEQTAKRMLSLLGILKYKPSGNATDMSTFRQGLVIGSKPVIYPVLHWLLQRTNELKKRAYLARFLIKLEVPSEFLQDETVADTNKQYEELMEAFKTLHKEYEQLKISGFSTAEIRKDISAMEEEKDQLIKRVEHLKKRVETAQNHQWMLKIARQLRVEKEREEYLAQQKQEQKNQLFHAVQRLQRVQNQLKSMRQAAADAKPESLMKRLEEEIKFNLYMVTEKFPKELENKKKELHFLQKVVSEPAMGHSDLLELESKINEINTEINQLIEKKMMRNEPIEGKLSLYRQQASIISRKKEAKAEELQEAKEKLASLEREASVKRNQTREFDGTEVLKGDEFKRYVNKLRSKSTVFKKKHQIIAELKAEFGLLQRTEELLKQRHENIQQQLQTMEEKKGISGYSYTQEELERVSALKSEVDEMKGRTLDDMSEMVKKLYSLVSEKKSALASVIKELRQLRQKYQELTQECDEKKSQYDSCAAGLESNRSKLEQEVRRLREECLQEESRYHYTNCMIKNLEVQLRRATDEMKAYISSDQQEKRKAIREQYTKNTAEQENLGKRRNLTLLPRLECSGTILAHSAFQYRWDFTMLARLVSNS

SEQ ID NO: 41884 - protein, 366 aa, Homo sapiens
  Payload ID: 8515
  Gene Symbol: IFT81
  Gene Name: intraflagellar transport 81
  ENSP ID: ENSP00000446950
MSDQIKFIMDSLNKEPFRKNYNLITFDSLEPMQLLQVLSDVLAEIDPKQLVDIREEMPEQTAKRMLSLLGILKYKPSGNATDMSTFRQGLVIGSKPVIYPVLHWLLQRTNELKKRAYLARFLIKLEVPSEFLQDETVADTNKQDISAMEEEKDQLIKRVEHLKKRVETAQNHQWMLKIARQLRVEKEREEYLAQQKQEQKNQLFHAVQRLQRVQNQLKSMRQAAADAKPESLMKRLEEEIKFNLYMVTEKFPKELENKKKELHFLQKVVSEPAMGHSDLLELESKINEINTEINQLIEKKMMRNEPIEGKLSLYRQQASIISRKKEAKAEELQEAKEKLASLEREASVKRNQTREFDGTEVLKGDE

SEQ ID NO: 41885 - protein, 676 aa, Homo sapiens; identical to SEQ ID NO: 41881
  Payload ID: 8515
  Gene Symbol: IFT81
  Gene Name: intraflagellar transport 81
  Uniprot ID: Q8WYA0
  ENSP ID: ENSP00000449718

SEQ ID NO: 41886 - protein, 104 aa, Homo sapiens
  Payload ID: 8515
  Gene Symbol: IFT81
  Gene Name: intraflagellar transport 81
  ENSP ID: ENSP00000449964
  MOD_RES (1)..(1): Any amino acid
XQLKISGFSTAEIRKDISAMEEEKDQLIKRVEHLKKRVETAQNHQWMLKIARQLRVEKEREEYLAQQKQEQKNQLFHAVQRLQRVQNQLKSMRQAAADAKPENK

SEQ ID NO: 41887 - protein, 824 aa, Homo sapiens
  Payload ID: 8516
  Gene Symbol: IFT88
  Gene Name: intraflagellar transport 88
  Uniprot ID: Q13099
  ENSP ID: ENSP00000261632
MMQNVHLAPETDEDDLYSGYNDYNPIYDIEELENDAAFQQAVRTSHGRRPPITAKISSTAVTRPIATGYGSKTSLASSIGRPMTGAIQDGVTRPMTAVRAAGFTKAALRGSAFDPLSQSRGPASPLEAKKKDSPEEKIKQLEKEVNELVEESCIANSCGDLKLALEKAKDAGRKERVLVRQREQVTTPENINLDLTYSVLFNLASQYSVNEMYAEALNTYQVIVKNKMFSNAGILKMNMGNIYLKQRNYSKAIKFYRMALDQVPSVNKQMRIKIMQNIGVTFIQAGQYSDAINSYEHIMSMAPNLKAGYNLTICYFAIGDREKMKKAFQKLITVPLEIDEDKYISPSDDPHTNLVTEAIKNDHLRQMERERKAMAEKYIMTSAKLIAPVIETSFAAGYDWCVEVVKASQYVELANDLEINKAVTYLRQKDYNQAVEILKVLEKKDSRVKSAAATNLSALYYMGKDFAQASSYADIAVNSDRYNPAALTNKGNTVFANGDYEKAAEFYKEALRNDSSCTEALYNIGLTYEKLNRLDEALDCFLKLHAILRNSAEVLYQIANIYELMENPSQAIEWLMQVVSVIPTDPQVLSKLGELYDREGDKSQAFQYYYESYRYFPCNIEVIEWLGAYYIDTQFWEKAIQYFERASLIQPTQVKWQLMVASCFRRSGNYQKALDTYKDTHRKFPENVECLRFLVRLCTDLGLKDAQEYARKLKRLEKMKEIREQRIKSGRDGSGGSRGKREGSASGDSGQNYSASSKGERLSARLRALPGTNEPYESSSNKEIDASYVDPLGPQIERPKTAAKKRIDEDDFADEELGDDLLPE

SEQ ID NO: 41888 - protein, 833 aa, Homo sapiens
  Payload ID: 8516
  Gene Symbol: IFT88
  Gene Name: intraflagellar transport 88
  Uniprot ID: Q13099
  ENSP ID: ENSP00000323580
MKFTNTKVQMMQNVHLAPETDEDDLYSGYNDYNPIYDIEELENDAAFQQAVRTSHGRRPPITAKISSTAVTRPIATGYGSKTSLASSIGRPMTGAIQDGVTRPMTAVRAAGFTKAALRGSAFDPLSQSRGPASPLEAKKKDSPEEKIKQLEKEVNELVEESCIANSCGDLKLALEKAKDAGRKERVLVRQREQVTTPENINLDLTYSVLFNLASQYSVNEMYAEALNTYQVIVKNKMFSNAGILKMNMGNIYLKQRNYSKAIKFYRMALDQVPSVNKQMRIKIMQNIGVTFIQAGQYSDAINSYEHIMSMAPNLKAGYNLTICYFAIGDREKMKKAFQKLITVPLEIDEDKYISPSDDPHTNLVTEAIKNDHLRQMERERKAMAEKYIMTSAKLIAPVIETSFAAGYDWCVEVVKASQYVELANDLEINKAVTYLRQKDYNQAVEILKVLEKKDSRVKSAAATNLSALYYMGKDFAQASSYADIAVNSDRYNPAALTNKGNTVFANGDYEKAAEFYKEALRNDSSCTEALYNIGLTYEKLNRLDEALDCFLKLHAILRNSAEVLYQIANIYELMENPSQAIEWLMQVVSVIPTDPQVLSKLGELYDREGDKSQAFQYYYESYRYFPCNIEVIEWLGAYYIDTQFWEKAIQYFERASLIQPTQVKWQLMVASCFRRSGNYQKALDTYKDTHRKFPENVECLRFLVRLCTDLGLKDAQEYARKLKRLEKMKEIREQRIKSGRDGSGGSRGKREGSASGDSGQNYSASSKGERLSARLRALPGTNEPYESSSNKEIDASYVDPLGPQIERPKTAAKKRIDEDDFADEELGDDLLPE

SEQ ID NO: 41889 - protein, 50 aa, Homo sapiens
  Payload ID: 8516
  Gene Symbol: IFT88
  Gene Name: intraflagellar transport 88
  ENSP ID: ENSP00000374024
MMQNVHLAPETDEDDLYSGYNDYNPIYDIEELENDAAFQQAVRTSHGRRP

SEQ ID NO: 41890 - protein, 368 aa, Homo sapiens
  Payload ID: 8516
  Gene Symbol: IFT88
  Gene Name: intraflagellar transport 88
  ENSP ID: ENSP00000437719
  MOD_RES (1)..(1): Any amino acid
XALEKAKDAGRKERVLVRQREQVTTPENINLDLTYSVLFNLASQYSVNEMYAEALNTYQVIVKNKMFSNAGILKMNMGNIYLKQRNYSKAIKFYRMALDQVPSVNKQMRIKIMQNIGVTFIQADREKMKKAFQKLITVPLEIDEDKYISPSDDPHTNLVTEAIKNDHLRQMERERKAMAEKYIMTSAKLIAPVIETSFAAGYDWCVEVVKASQYVELANDLEINKAVTYLRQKDYNQAVEILKVLEKKDSRVKSAAATNLSALYYMGKDFAQASSYADIAVNSDRYNPAALTNKGNTVFANGDYEKAAEFYKEALRNDSSCTEALYNIGLTYEKLNRLDEALDCFLKLHAILRNSAEVLYQIANMYLI

SEQ ID NO: 41891 - protein, 55 aa, Homo sapiens
  Payload ID: 8517
  Gene Symbol: INIP
  Gene Name: INTS3 and NABP interacting protein
  ENSP ID: ENSP00000363351
MQNQSSTNHPGASMLMHIHLDTSSLKTLHLGTLFFLFYLALTQNEENICDGKVTL

SEQ ID NO: 41892 - protein, 74 aa, Homo sapiens
  Payload ID: 8517
  Gene Symbol: INIP
  Gene Name: INTS3 and NABP interacting protein
  ENSP ID: ENSP00000363353
MQNQSSTNHPGASIALSRPSLNKDFRDHAEQQHIAAQQKAALQHAHAHSSGYFITQDSAFGNLILPVLPRLDPE

SEQ ID NO: 41893 - protein, 104 aa, Homo sapiens
  Payload ID: 8517
  Gene Symbol: INIP
  Gene Name: INTS3 and NABP interacting protein
  Uniprot ID: Q9NRY2
  ENSP ID: ENSP00000363360
MAANSSGQGFQNKNRVAILAELDKEKRKLLMQNQSSTNHPGASIALSRPSLNKDFRDHAEQQHIAAQQKAALQHAHAHSSGYFITQDSAFGNLILPVLPRLDPE

SEQ ID NO: 41894 - protein, 942 aa, Homo sapiens
  Payload ID: 8518
  Gene Symbol: INTU
  Gene Name: inturned planar cell polarity protein
  Uniprot ID: Q9ULD6
  ENSP ID: ENSP00000334003
MASVASCDSRPSSDELPGDPSSQEEDEDYDFEDRVSDSGSYSSASSDYDDLEPEWLDSVQKNGELFYLELSEDEEESLLPETPTVNHVRFSENEIIIEDDYKERKKYEPKLKQFTKILRRKRLLPKRCNKKNSNDNGPVSILKHQSNQKTGVIVQQRYKDVNVYVNPKKLTVIKAKEQLKLLEVLVGIIHQTKWSWRRTGKQGDGERLVVHGLLPGGSAMKSGQVLIGDVLVAVNDVDVTTENIERVLSCIPGPMQVKLTFENAYDVKRETSHPRQKKTQSNTSDLVKLLWGEEVEGIQQSGLNTPHIIMYLTLQLDSETSKEEQEILYHYPMSEASQKLKSVRGIFLTLCDMLENVTGTQVTSSSLLLNGKQIHVAYWKESDKLLLIGLPAEEVPLPRLRNMIENVIQTLKFMYGSLDSAFCQIENVPRLDHFFNLFFQRALQPAKLHSSASPSAQQYDASSAVLLDNLPGVRWLTLPLEIKMELDMALSDLEAADFAELSEDYYDMRRLYTILGSSLFYKGYLICSHLPKDDLIDIAVYCRHYCLLPLAAKQRIGQLIIWREVFPQHHLRPLADSSTEVFPEPEGRYFLLVVGLKHYMLCVLLEAGGCASKAIGSPGPDCVYVDQVKTTLHQLDGVDSRIDERLASSPVPCLSCADWFLTGSREKTDSLTTSPILSRLQGTSKVATSPTCRRTLFGDYSLKTRKPSPSCSSGGSDNGCEGGEDDGFSPHTTPDAVRKQRESQGSDGLEESGTLLKVTKKKSTLPNPFHLGNLKKDLPEKELEIYNTVKLTSGPENTLFHYVALETVQGIFITPTLEEVAQLSGSIHPQLIKNFHQCCLSIRAVFQQTLVEEKKKGLNSGDHSDSAKSVSSLNPVKEHGVLFECSPGNWTDQKKAPPVMAYWVVGRLFLHPKPQELYVCFHDSVTEIAIEIAFKLFFGLTL

SEQ ID NO: 41895 - protein, 435 aa, Homo sapiens
  Payload ID: 8518
  Gene Symbol: INTU
  Gene Name: inturned planar cell polarity protein
  Uniprot ID: Q9ULD6
  ENSP ID: ENSP00000421995
MASVASCDSRPSSDELPGDPSSQEEDEDYDFEDRVSDSGSYSSASSDYDDLEPEWLDSVQKNGELFYLELSEDEEESLLPETPTVNHVRFSENEIIIEDDYKERKKYEPKLKQFTKILRRKRLLPKRCNKKNSNDNGPVSILKHQSNQKTGVIVQQRYKDVNVYVNPKKLTVIKAKEQLKLLEVLVGIIHQTKWSWRRTGKQGDGERLVVHGLLPGGSAMKSGQVLIGDVLVAVNDVDVTTENIERVLSCIPGPMQVKLTFENAYDVKRETSHPRQKKTQSNTSDLVKLLWGEEVEGIQQSGLNTPHIIMYLTLQLDSETSKEEQEILYHYPMSEASQKLKSVRGIFLTLCDMLENVTGTQVTSSSLLLNGKQIHVAYWKESDKLLLIGLPAEEVPLPRLRNMIENVIQTLKFMYGSLDSIMKEFSVIVSSGKII

SEQ ID NO: 41896 - protein, 201 aa, Homo sapiens
  Payload ID: 8518
  Gene Symbol: INTU
  Gene Name: inturned planar cell polarity protein
  ENSP ID: ENSP00000422550
MFQVGRSSIPKPAPRSLEDLDSVQRVLLHSDLEPEWLDSVQKNGELFYLELSEDEEESLLPETPTVNHVRFSENEIIIEDDYKERKKYEPKLKQFTKILRRKRLLPKRCNKKNSNDNGPVSILKHQSNQKTGVIVQQRYKDVNVYVNPKKLTVIKAKEQLKLLEVLVGIIHQTKWSWRRTGKQGDGERLVVHGLLPGGSAM

SEQ ID NO: 41897 - protein, 96 aa, Homo sapiens
  Payload ID: 8518
  Gene Symbol: INTU
  Gene Name: inturned planar cell polarity protein
  ENSP ID: ENSP00000426171
LLDNLPGVRWLTLPLEIKMELDMALSDLEAADFAELGYLICSHLPKDDLIDIAVYCRHYCLLPLAAKQRIGQLIIWREVFPQHHLRPLADSSTEVF

SEQ ID NO: 41898 - protein, 408 aa, Homo sapiens
  Payload ID: 8518
  Gene Symbol: INTU
  Gene Name: inturned planar cell polarity protein
  Uniprot ID: Q9ULD6
  ENSP ID: ENSP00000426287
MASVASCDSRPSSDELPGDPSSQEEDEDYDFEDRVSDSGSYSSASSDYDDLEPEWLDSVQKNGELFYLELSEDEEESLLPETPTVNHVRFSENEIIIEDDYKERKKYEPKLKQFTKILRRKRLLPKRCNKKNSNDNGPVSILKHQSNQKTGVIVQQRYKDVNVYVNPKKLTVIKAKEQLKLLEVLVGIIHQTKWSWRRTGKQGDGERLVVHGLLPGGSAMKSGQVLIGDVLVAVNDVDVTTENIERVLSCIPGPMQVKLTFENAYDVKRETSHPRQKKTQSNTSDLVKLLWGEEVEGIQQSGLNTPHIIMYLTLQLDSETSKEEQEILYHYPMSEASQKLKSVRGIFLTLCDMLENVTGTQVTSSSLLLNGKQIHVAYWKESDKLLLIGLPAEEIELPSSAHTHGERN

SEQ ID NO: 41899 - protein, 93 aa, Homo sapiens
  Payload ID: 8518
  Gene Symbol: INTU
  Gene Name: inturned planar cell polarity protein
  ENSP ID: ENSP00000427150
  MOD_RES (1)..(1): Any amino acid
XKTRKPSPSCSSGGSDNGCEGGEDDGFSPHTTPDAVRKQRESQGSDGLEESGTLLKVTKKKSTLPNPFHLGNLKKDLPEKELEIYNTVKKRKD

SEQ ID NO: 41900 - protein, 895 aa, Homo sapiens
  Payload ID: 8519
  Gene Symbol: INVS
  Gene Name: inversin
  Uniprot ID: Q9Y283
  ENSP ID: ENSP00000262456
MNKSENLLFAGSSLASQVHAAAVNGDKGALQRLIVGNSALKDKEDQFGRTPLMYCVLADRLDCADALLKAGADVNKTDHSQRTALHLAAQKGNYRFMKLLLTRRANWMQKDLEEMTPLHLTTRHRSPKCLALLLKFMAPGEVDTQDKNKQTALHWSAYYNNPEHVKLLIKHDSNIGIPDVEGKIPLHWAANHKDPSAVHTVRCILDAAPTESLLNWQDYEGRTPLHFAVADGNVTVVDVLTSYESCNITSYDNLFRTPLHWAALLGHAQIVHLLLERNKSGTIPSDSQGATPLHYAAQSNFAETVKVFLKHPSVKDDSDLEGRTSFMWAAGKGSDDVLRTMLSLKSDIDINMADKYGGTALHAAALSGHVSTVKLLLENNAQVDATDVMKHTPLFRACEMGHKDVIQTLIKGGARVDLVDQDGHSLLHWAALGGNADVCQILIENKINPNVQDYAGRTPLQCAAYGGYINCMAVLMENNADPNIQDKEGRTALHWSCNNGYLDAIKLLLDFAAFPNQMENNEERYTPLDYALLGERHEVIQFMLEHGALSIAAIQDIAAFKIQAVYKGYKVRKAFRDRKNLLMKHEQLRKDAAAKKREEENKRKEAEQQKGRRSPDSCRPQALPCLPSTQDVPSRQSRAPSKQPPAGNVAQGPEPRDSRGSPGGSLGGALQKEQHVSSDLQGTNSRRPNETAREHSKGQSACVHFRPNEGSDGSRHPGVPSVEKSRELRLQIIQRERRRKELFRKKNKAAAVIQRAWRSYQLRKHLSHLRHMKQLGAGDVDRWRQESTALLLQVWRKELELKFPQTTAVSKAPKSPSKGTSGTKSTKHSVLKQIYGCSHEGKIHHPTRSVKASSVLRLNSVSNLQCIHLLENSGRSKNFSYNLQSATQPKNKTKP

SEQ ID NO: 41901 - protein, 1065 aa, Homo sapiens
  Payload ID: 8519
  Gene Symbol: INVS
  Gene Name: inversin
  Uniprot ID: Q9Y283
  ENSP ID: ENSP00000262457
MNKSENLLFAGSSLASQVHAAAVNGDKGALQRLIVGNSALKDKEDQFGRTPLMYCVLADRLDCADALLKAGADVNKTDHSQRTALHLAAQKGNYRFMKLLLTRRANWMQKDLEEMTPLHLTTRHRSPKCLALLLKFMAPGEVDTQDKNKQTALHWSAYYNNPEHVKLLIKHDSNIGIPDVEGKIPLHWAANHKDPSAVHTVRCILDAAPTESLLNWQDYEGRTPLHFAVADGNVTVVDVLTSYESCNITSYDNLFRTPLHWAALLGHAQIVHLLLERNKSGTIPSDSQGATPLHYAAQSNFAETVKVFLKHPSVKDDSDLEGRTSFMWAAGKGSDDVLRTMLSLKSDIDINMADKYGGTALHAAALSGHVSTVKLLLENNAQVDATDVMKHTPLFRACEMGHKDVIQTLIKGGARVDLVDQDGHSLLHWAALGGNADVCQILIENKINPNVQDYAGRTPLQCAAYGGYINCMAVLMENNADPNIQDKEGRTALHWSCNNGYLDAIKLLLDFAAFPNQMENNEERYTPLDYALLGERHEVIQFMLEHGALSIAAIQDIAAFKIQAVYKGYKVRKAFRDRKNLLMKHEQLRKDAAAKKREEENKRKEAEQQKGRRSPDSCRPQALPCLPSTQDVPSRQSRAPSKQPPAGNVAQGPEPRDSRGSPGGSLGGALQKEQHVSSDLQGTNSRRPNETAREHSKGQSACVHFRPNEGSDGSRHPGVPSVEKSRGETAGDERCAKGKGFVKQPSCIRVAGPDEKGEDSRRAAASLPPHDSHWKPSRRHDTEPKAKCAPQKRRTQELRGGRCSPAGSSRPGSARGEAVHAGQNPPHHRTPRNKVTQAKLTGGLYSHLPQSTEELRSGARRLETSTLSEDFQVSKETDPAPGPLSGQSVNIDLLPVELRLQIIQRERRRKELFRKKNKAAAVIQRAWRSYQLRKHLSHLRHMKQLGAGDVDRWRQESTALLLQVWRKELELKFPQTTAVSKAPKSPSKGTSGTKSTKHSVLKQIYGCSHEGKIHHPTRSVKASSVLRLNSVSNLQCIHLLENSGRSKNFSYNLQSATQPKNKTKP

SEQ ID NO: 41902 - protein, 101 aa, Homo sapiens
  Payload ID: 8519
  Gene Symbol: INVS
  Gene Name: inversin
  Uniprot ID: Q9Y283
  ENSP ID: ENSP00000364056
MNKSENLLFAGSSLASQVHAAAVNGDKGALQRLIVGNSALKDKEDQFGRTPLMYCVLADRLDCADALLKAGADVNKTDHSQRTALHLAAQKALRTISTGRI

SEQ ID NO: 41903 - protein, 717 aa, Homo sapiens
  Payload ID: 8520
  Gene Symbol: INF2
  Gene Name: inverted formin, FH2 and WH2 domain containing
  ENSP ID: ENSP00000252527
GMEEVIVAQVDHGLGSAWVPSHRRVNPPTLRMKKLNWQKLPSNVAREHNSMWASLSSPDAEAVEPDFSSIERLFSFPAAKPKEPTMVAPRARKEPKEITFLDAKKSLNLNIFLKQFKCSNEEVAAMIRAGDTTKFDVEVLKQLLKLLPEKHEIENLRAFTEERAKLASADHFYLLLLAIPCYQLRIECMLLCEGAAAVLDMVRPKAQLVLAACESLLTSRQLPIFCQLILRIGNFLNYGSHTGDADGFKISTLLKLTETKSQQNRVTLLHHVLEEAEKSHPDLLQLPRDLEQPSQAAGINLEIIRSEASSNLKKLLETERKVSASVAEVQEQYTERLQASISAFRALDELFEAIEQKQRELADYLCEDAQQLSLEDTFSTMKAFRDLFLRALKENKDRKEQAAKAERRKQQLAEEEARRPRGEDGKPVRKGPGKQEEVCVIDALLADIRKGFQLRKTARGRGDTDGGSKAASMDPPRATEPVATSNPAGDPVGSTRCPASEPGLDATTASESRGWDLVDAVTPGPQPTLEQLEEGGPRPLERRSSWYVDASDVLTTEDPQCPQPLEGAWPVTLGDAQALKPLKFSSNQPPAAGSSRQDAKDPTSLLGVLQAEADSTSEGLEDAVHSRGARPPAAGPGGDEDEDEEDTAPESALDTSLDKSFSEDAVTDSSGSGTLPRARGRASKGTGKRRKKRPSRSQEEVPPDSDDNKTKKLCVIQ

SEQ ID NO: 41904 - protein, 1240 aa, Homo sapiens
  Payload ID: 8520
  Gene Symbol: INF2
  Gene Name: inverted formin, FH2 and WH2 domain containing
  Uniprot ID: Q27J81
  ENSP ID: ENSP00000376406
MSVKEGAQRKWAALKEKLGPQDSDPTEANLESADPELCIRLLQMPSVVNYSGLRKRLEGSDGGWMVQFLEQSGLDLLLEALARLSGRGVARISDALLQLTCVSCVRAVMNSRQGIEYILSNQGYVRQLSQALDTSNVMVKKQVFELLAALCIYSPEGHVLTLDALDHYKTVCSQQYRFSIVMNELSGSDNVPYVVTLLSVINAVILGPEDLRARTQLRNEFIGLQLLDVLARLRDLEDADLLIQLEAFEEAKAEDEEELLRVSGGVDMSSHQEVFASLFHKVSCSPVSAQLLSVLQGLLHLEPTLRSSQLLWEALESLVNRAVLLASDAQECTLEEVVERLLSVKGRPRPSPLVKAHKSVQANLDQSQRGSSPQNTTTPKPSVEGQQPAAAAACEPVDHAQSESILKVSQPRALEQQASTPPPPPPPPLLPGSSAEPPPPPPPPPLPSVGAKALPTAPPPPPLPGLGAMAPPAPPLPPPLPGSCEFLPPPPPPLPGLGCPPPPPPLLPGMGWGPPPPPPPLLPCTCSPPVAGGMEEVIVAQVDHGLGSAWVPSHRRVNPPTLRMKKLNWQKLPSNVAREHNSMWASLSSPDAEAVEPDFSSIERLFSFPAAKPKEPTMVAPRARKEPKEITFLDAKKSLNLNIFLKQFKCSNEEVAAMIRAGDTTKFDVEVLKQLLKLLPEKHEIENLRAFTEERAKLASADHFYLLLLAIPCYQLRIECMLLCEGAAAVLDMVRPKAQLVLAACESLLTSRQLPIFCQLILRIGNFLNYGSHTGDADGFKISTLLKLTETKSQQNRVTLLHHVLEEAEKSHPDLLQLPRDLEQPSQAAGINLEIIRSEASSNLKKLLETERKVSASVAEVQEQYTERLQASISAFRALDELFEAIEQKQRELADYLCEDAQQLSLEDTFSTMKAFRDLFLRALKENKDRKEQAAKAERRKQQLAEEEARRPRGEDGKPVRKGPGKQEEVCVIDALLADIRKGFQLRKTARGRGDTDGGSKAASMDPPRATEPVATSNPAGDPVGSTRCPASEPGLDATTASESRGWDLVDAVTPGPQPTLEQLEEGGPRPLERRSSWYVDASDVLTTEDPQCPQPLEGAWPVTLGDAQALKPLKFSSNQPPAAGSSRQDAKDPTSLLGVLQAEADSTSEGLEDAVHSRGARPPAAGPGGDEDEDEEDTAPESALDTSLDKSFSEDAVTDSSGSGTLPRARGRASKGTGKRRKKRPSRSQEGLRPRPKAK

SEQ ID NO: 41905 - protein, 1249 aa, Homo sapiens
  Payload ID: 8520
  Gene Symbol: INF2
  Gene Name: inverted formin, FH2 and WH2 domain containing
  Uniprot ID: Q27J81
  ENSP ID: ENSP00000376410
MSVKEGAQRKWAALKEKLGPQDSDPTEANLESADPELCIRLLQMPSVVNYSGLRKRLEGSDGGWMVQFLEQSGLDLLLEALARLSGRGVARISDALLQLTCVSCVRAVMNSRQGIEYILSNQGYVRQLSQALDTSNVMVKKQVFELLAALCIYSPEGHVLTLDALDHYKTVCSQQYRFSIVMNELSGSDNVPYVVTLLSVINAVILGPEDLRARTQLRNEFIGLQLLDVLARLRDLEDADLLIQLEAFEEAKAEDEEELLRVSGGVDMSSHQEVFASLFHKVSCSPVSAQLLSVLQGLLHLEPTLRSSQLLWEALESLVNRAVLLASDAQECTLEEVVERLLSVKGRPRPSPLVKAHKSVQANLDQSQRGSSPQNTTTPKPSVEGQQPAAAAACEPVDHAQSESILKVSQPRALEQQASTPPPPPPPPLLPGSSAEPPPPPPPPPLPSVGAKALPTAPPPPPLPGLGAMAPPAPPLPPPLPGSCEFLPPPPPPLPGLGCPPPPPPLLPGMGWGPPPPPPPLLPCTCSPPVAGGMEEVIVAQVDHGLGSAWVPSHRRVNPPTLRMKKLNWQKLPSNVAREHNSMWASLSSPDAEAVEPDFSSIERLFSFPAAKPKEPTMVAPRARKEPKEITFLDAKKSLNLNIFLKQFKCSNEEVAAMIRAGDTTKFDVEVLKQLLKLLPEKHEIENLRAFTEERAKLASADHFYLLLLAIPCYQLRIECMLLCEGAAAVLDMVRPKAQLVLAACESLLTSRQLPIFCQLILRIGNFLNYGSHTGDADGFKISTLLKLTETKSQQNRVTLLHHVLEEAEKSHPDLLQLPRDLEQPSQAAGINLEIIRSEASSNLKKLLETERKVSASVAEVQEQYTERLQASISAFRALDELFEAIEQKQRELADYLCEDAQQLSLEDTFSTMKAFRDLFLRALKENKDRKEQAAKAERRKQQLAEEEARRPRGEDGKPVRKGPGKQEEVCVIDALLADIRKGFQLRKTARGRGDTDGGSKAASMDPPRATEPVATSNPAGDPVGSTRCPASEPGLDATTASESRGWDLVDAVTPGPQPTLEQLEEGGPRPLERRSSWYVDASDVLTTEDPQCPQPLEGAWPVTLGDAQALKPLKFSSNQPPAAGSSRQDAKDPTSLLGVLQAEADSTSEGLEDAVHSRGARPPAAGPGGDEDEDEEDTAPESALDTSLDKSFSEDAVTDSSGSGTLPRARGRASKGTGKRRKKRPSRSQEEVPPDSDDNKTKKLCVIQ

SEQ ID NO: 41906 - protein, 234 aa, Homo sapiens
  Payload ID: 8520
  Gene Symbol: INF2
  Gene Name: inverted formin, FH2 and WH2 domain containing
  Uniprot ID: Q27J81
  ENSP ID: ENSP00000381380
MSVKEGAQRKWAALKEKLGPQDSDPTEANLESADPELCIRLLQMPSVVNYSGLRKRLEGSDGGWMVQFLEQSGLDLLLEALARLSGRGVARISDALLQLTCVSCVRAVMNSRQGIEYILSNQGYVRQLSQALDTSNVMVKKQVFELLAALCIYSPEGHVLTLDALDHYKTVCSQQYRFSIVMNELSGSDNVPYVVTLLSVINAVILGPEDLRARTQLRNEFIGLQLLDVLARLR

SEQ ID NO: 41907 - protein, 142 aa, Homo sapiens
  Payload ID: 8520
  Gene Symbol: INF2
  Gene Name: inverted formin, FH2 and WH2 domain containing
  ENSP ID: ENSP00000483829
MQCFASLYCLEVAELGALGRGKLAGSAMAGQGPLPWGLAPVPACPAPEVGVGGGLPLLPLPGLCPAAETWPSHQQKTPPSASCPAWAGPGDNTGPPEGLQGDTQQPLPPHCPPSEGSLPEPAPCQVCALRLAAGCVANKKQT

SEQ ID NO: 41908 - protein, 585 aa, Homo sapiens
  Payload ID: 8521
  Gene Symbol: IVL
  Gene Name: involucrin
  Uniprot ID: P07476
  ENSP ID: ENSP00000357753
MSQQHTLPVTLSPALSQELLKTVPPPVNTHQEQMKQPTPLPPPCQKVPVELPVEVPSKQEEKHMTAVKGLPEQECEQQQKEPQEQELQQQHWEQHEEYQKAENPEQQLKQEKTQRDQQLNKQLEEEKKLLDQQLDQELVKRDEQLGMKKEQLLELPEQQEGHLKHLEQQEGQLKHPEQQEGQLELPEQQEGQLELPEQQEGQLELPEQQEGQLELPEQQEGQLELPEQQEGQLELPQQQEGQLELSEQQEGQLELSEQQEGQLKHLEHQEGQLEVPEEQMGQLKYLEQQEGQLKHLDQQEKQPELPEQQMGQLKHLEQQEGQPKHLEQQEGQLEQLEEQEGQLKHLEQQEGQLEHLEHQEGQLGLPEQQVLQLKQLEKQQGQPKHLEEEEGQLKHLVQQEGQLKHLVQQEGQLEQQERQVEHLEQQVGQLKHLEEQEGQLKHLEQQQGQLEVPEQQVGQPKNLEQEEKQLELPEQQEGQVKHLEKQEAQLELPEQQVGQPKHLEQQEKHLEHPEQQDGQLKHLEQQEGQLKDLEQQKGQLEQPVFAPAPGQVQDIQPALPTKGEVLLPVEHQQQKQEVQWPPKHK

SEQ ID NO: 41909 - protein, 293 aa, Homo sapiens
  Payload ID: 8522
  Gene Symbol: IYD
  Gene Name: iodotyrosine deiodinase
  Uniprot ID: Q6PHW0
  ENSP ID: ENSP00000229447
MYFLTPILVAILCILVVWIFKNADRSMEKKKGEPRTRAEARPWVDEDLKDSSDLHQAEEDADEWQESEENVEHIPFSHNHYPEKEMVKRSQEFYELLNKRRSVRFISNEQVPMEVIDNVIRTAGTAPSGAHTEPWTFVVVKDPDVKHKIRKIIEEEEEINYMKRMGHRWVTDLKKLRTNWIKEYLDTAPILILIFKQVHGFAANGKKKVHYYNEISVSIACGILLAALQVNNGITMRHQTARHRHLIEGPGRSSEACSKLSSQGCPECRSGDCHYHSSQLWPSTEGAPGPPRT

SEQ ID NO: 41910 - protein, 289 aa, Homo sapiens
  Payload ID: 8522
  Gene Symbol: IYD
  Gene Name: iodotyrosine deiodinase
  Uniprot ID: Q6PHW0
  ENSP ID: ENSP00000343763
MYFLTPILVAILCILVVWIFKNADRSMEKKKGEPRTRAEARPWVDEDLKDSSDLHQAEEDADEWQESEENVEHIPFSHNHYPEKEMVKRSQEFYELLNKRRSVRFISNEQVPMEVIDNVIRTAGTAPSGAHTEPWTFVVVKDPDVKHKIRKIIEEEEEINYMKRMGHRWVTDLKKLRTNWIKEYLDTAPILILIFKQVHGFAANGKKKVHYYNEISVSIACGILLAALQNAGLVTVTTTPLNCGPRLRVLLGRPAHEKLLMLLPVGYPSKEATVPDLKRKPLDQIMVTV

SEQ ID NO: 41911 - protein, 247 aa, Homo sapiens
  Payload ID: 8522
  Gene Symbol: IYD
  Gene Name: iodotyrosine deiodinase
  Uniprot ID: Q6PHW0
  ENSP ID: ENSP00000356304
MYFLTPILVAILCILVVWIFKNADRSMEKKKGEPRTRAEARPWVDEDLKDSSDLHQAEEDADEWQESEENVEHIPFSHNHYPEKEMVKRSQEFYELLNKRRSVRFISNEQVPMEVIDNVIRTAGTAPSGAHTEPWTFVVVKDPDVKHKIRKIIEEEEEINYMKRMGHRWVTDLKKLRTNWIKEYLDTAPILILIFKQVHGFAANGKKKVHYYNEISVSIACGILLAALQVFGKIILKELALISFLNL

SEQ ID NO: 41912 - protein, 270 aa, Homo sapiens
  Payload ID: 8522
  Gene Symbol: IYD
  Gene Name: iodotyrosine deiodinase
  ENSP ID: ENSP00000376084
MYFLTPILVAILCILVVWIFKNADRSMEKKKGEPRTRAEARPWVDEDLKDSSDLHQAEEDADEWQESEENVEHIPFSHNHYPEKEMVKRSQEFYELLNKRRSVRFISNEQVPMEVIDNVIRTAGTAPSGAHTEPWTFVVVKDPDVKHKIRKIIEEEEEINYMKRMGHRWVTDLKKLRTNWIKEYLDTAPILILIFKQVHGFAANGKKKVHYYNEISVSIACGILLAALQVNNGITMRHQTARHRHLIEGPGRSSEACSKLSSQGCPGFYC

SEQ ID NO: 41913 - protein, 247 aa, Homo sapiens; identical to SEQ ID NO: 41911
  Payload ID: 8522
  Gene Symbol: IYD
  Gene Name: iodotyrosine deiodinase
  Uniprot ID: Q6PHW0
  ENSP ID: ENSP00000376085

SEQ ID NO: 41914 - protein, 192 aa, Homo sapiens
  Payload ID: 8522
  Gene Symbol: IYD
  Gene Name: iodotyrosine deiodinase
  ENSP ID: ENSP00000390081
MKEADADEWQESEENVEHIPFSHNHYPEKEMVKRSQEFYELLNKRRSVRFISNEQVPMEVIDNVIRTAGTAPSGAHTEPWTFVVVKDPDVKHKIRKIIEEEEEINYMKRMGHRWVTDLKKLRTNWIKEYLDTAPILILIFKQVHGFAANGKKKVHYYNEISVSIACGILLAALQVFGKIILKELALISFLNL

SEQ ID NO: 41915 - protein, 89 aa, Homo sapiens
  Payload ID: 8522
  Gene Symbol: IYD
  Gene Name: iodotyrosine deiodinase
  ENSP ID: ENSP00000397342
PWVDEDLKDSSDLHQAEEDADEWQESEENVEHIPFSHNHYPEKEMVKRSQEFYELLNKRRNSPEWGSHRALDLRGCEGPRREAQDSKDH

SEQ ID NO: 41916 - protein, 284 aa, Homo sapiens
  Payload ID: 8522
  Gene Symbol: IYD
  Gene Name: iodotyrosine deiodinase
  ENSP ID: ENSP00000441276
MYFLTPILVAILCILVVWIFKNADRSMEKKKGEPRTRAEARPWVDEDLKDSSDLHQAEEDADEWQESEENVEHIPFSHNHYPEKEMVKRSQEFYELLNKRRSVRFISNEQVPMEVIDNVIRTAGTAPSGAHTEPWTFVVVKDPDVKHKIRKIIEEEEEINYMKRMGHRWVTDLKKLRTNWIKEYLDTAPILILIFKQVHGFAANGKKKVHYYNEISVSIACGILLAALQVNNGITMRHQTARHRHLIEGPGRSSEACSKLSSQGCPGASAAGSLFHFAIEFAAP

SEQ ID NO: 41917 - protein, 963 aa, Homo sapiens
  Payload ID: 8523
  Gene Symbol: IQSEC1
  Gene Name: IQ motif and Sec7 domain 1
  Uniprot ID: Q6DN90
  ENSP ID: ENSP00000273221
MWCLHCNSERTQSLLELELDSGVEGEAPSSETGTSLDSPSAYPQGPLVPGSSLSPDHYEHTSVGAYGLYSGPPGQQQRTRRPKLQHSTSILRKQAEEEAIKRSRSLSESYELSSDLQDKQVEMLERKYGGRLVTRHAARTIQTAFRQYQMNKNFERLRSSMSENRMSRRIVLSNMRMQFSFEGPEKVHSSYFEGKQVSVTNDGSQLGALVSPECGDLSEPTTLKSPAPSSDFADAITELEDAFSRQVKSLAESIDDALNCRSLHTEEAPALDAARARDTEPQTALHGMDHRKLDEMTASYSDVTLYIDEEELSPPLPLSQAGDRPSSTESDLRLRAGGAAPDYWALAHKEDKADTDTSCRSTPSLERQEQRLRVEHLPLLTIEPPSDSSVDLSDRSERGSLKRQSAYERSLGGQQGSPKHGPHSGAPKSLPREEPELRPRPPRPLDSHLAINGSANRQSKSESDYSDGDNDSINSTSNSNDTINCSSESSSRDSLREQTLSKQTYHKEARNSWDSPAFSNDVIRKRHYRIGLNLFNKKPEKGVQYLIERGFVPDTPVGVAHFLLQRKGLSRQMIGEFLGNRQKQFNRDVLDCVVDEMDFSTMELDEALRKFQAHIRVQGEAQKVERLIEAFSQRYCICNPGVVRQFRNPDTIFILAFAIILLNTDMYSPNVKPERKMKLEDFIKNLRGVDDGEDIPREMLMGIYERIRKRELKTNEDHVSQVQKVEKLIVGKKPIGSLHPGLGCVLSLPHRRLVCYCRLFEVPDPNKPQKLGLHQREIFLFNDLLVVTKIFQKKKNSVTYSFRQSFSLYGMQVLLFENQYYPNGIRLTSSVPGADIKVLINFNAPNPQDRKKFTDDLRESIAEVQEMEKHRIESELEKQKGVVRPSMSQCSSLKKESGNGTLSRACLDDSYASGEGLKRSALSSSLRDLSEAGKRGRRSSAGSLESNVEFQPFEPLQPSVLCS

SEQ ID NO: 41918 - protein, 814 aa, Homo sapiens
  Payload ID: 8523
  Gene Symbol: IQSEC1
  Gene Name: IQ motif and Sec7 domain 1
  ENSP ID: ENSP00000478001
MLERKYGGRLVTRHAARTIQTAFRQYQMNKNFERLRSSMSENRMSRRIVLSNMRMQFSFEGPEKVHSSYFEGKQVSVTNDGSQLGALVSPECGDLSEPTTLKSPAPSSDFADAITELEDAFSRQVKSLAESIDDALNCRSLHTEEAPALDAARARDTEPQTALHGMDHRKLDEMTASYSDVTLYIDEEELSPPLPLSQAGDRPSSTESDLRLRAGGAAPDYWALAHKEDKADTDTSCRSTPSLERQEQRLRVEHLPLLTIEPPSDSSVDLSDRSERGSLKRQSAYERSLGGQQGSPKHGPHSGAPKSLPREEPELRPRPPRPLDSHLAINGSANRQSKSESDYSDGDNDSINSTSNSNDTINCSSESSSRDSLREQTLSKQTYHKEARNSWDSPAFSNDVIRKRHYRIGLNLFNKKPEKGVQYLIERGFVPDTPVGVAHFLLQRKGLSRQMIGEFLGNRQKQFNRDVLDCVVDEMDFSTMELDEALRKFQAHIRVQGEAQKVERLIEAFSQRYCICNPGVVRQFRNPDTIFILAFAIILLNTDMYSPNVKPERKMKLEDFIKNLRGVDDGEDIPREMLMGIYERIRKRELKTNEDHVSQVQKVEKLIVGKKPIGSLHPGLGCVLSLPHRRLVCYCRLFEVPDPNKPQKLGLHQREIFLFNDLLVVTKIFQKKKNSVTYSFRQSFSLYGMQVLLFENQYYPNGIRLTSSVPGADIKVLINFNAPNPQDRKKFTDDLRESIAEVQEMEKHRIESELEKQKGVVRPSMSQCSSLKKESGNGTLSRACLDDSYASGEGLKRSALSSSLRDLSEAGVHH

SEQ ID NO: 41919 - protein, 1114 aa, Homo sapiens
  Payload ID: 8523
  Gene Symbol: IQSEC1
  Gene Name: IQ motif and Sec7 domain 1
  ENSP ID: ENSP00000480301
MACRRRYFVEGEAPSSETGTSLDSPSAYPQGPLVPGSSLSPDHYEHTSVGAYGLYSGPPGQQQRTRRPKLQHSTSILRKQAEEEAIKRSRSLSESYELSSDLQDKQVEMLERKYGGRLVTRHAARTIQTAFRQYQMNKNFERLRSSMSENRMSRRIVLSNMRMQFSFEGPEKVHSSYFEGKQVSVTNDGSQLGALVSPECGDLSEPTTLKSPAPSSDFADAITELEDAFSRQVKSLAESIDDALNCRSLHTEEAPALDAARARDTEPQTALHGMDHRKLDEMTASYSDVTLYIDEEELSPPLPLSQAGDRPSSTESDLRLRAGGAAPDYWALAHKEDKADTDTSCRSTPSLERQEQRLRVEHLPLLTIEPPSDSSVDLSDRSERGSLKRQSAYERSLGGQQGSPKHGPHSGAPKSLPREEPELRPRPPRPLDSHLAINGSANRQSKSESDYSDGDNDSINSTSNSNDTINCSSESSSRDSLREQTLSKQTYHKEARNSWDSPAFSNDVIRKRHYRIGLNLFNKKPEKGVQYLIERGFVPDTPVGVAHFLLQRKGLSRQMIGEFLGNRQKQFNRDVLDCVVDEMDFSTMELDEALRKFQAHIRVQGEAQKVERLIEAFSQRYCICNPGVVRQFRNPDTIFILAFAIILLNTDMYSPNVKPERKMKLEDFIKNLRGVDDGEDIPREMLMGIYERIRKRELKTNEDHVSQVQKVEKLIVGKKPIGSLHPGLGCVLSLPHRRLVCYCRLFEVPDPNKPQKLGLHQREIFLFNDLLVVTKIFQKKKNSVTYSFRQSFSLYGMQVLLFENQYYPNGIRLTSSVPGADIKVLINFNAPNPQDRKKFTDDLRESIAEVQEMEKHRIESELEKQKGVVRPSMSQCSSLKKESGNGTLSRACLDDSYASGEGLKRSALSSSLRDLSEAGKRGRRSSAGSLESNVEGSIISSPHMRRRATSTRECPSRPHQTMPNSSSLLGSLFGSKRGKPPPQAHLPSAPALPPPHPPVVLPHLQHSVAGHHLGPPEGLPQAAMHGHHTQYCHMQNPPPYHHHHHHHPPQHIQHAHQYHHGPHGGHPAYGAHAHGHPPLPSAHVGHTVHHHGQPPAPPPPTSSKAKPSGISTIV

SEQ ID NO: 41920 - protein, 949 aa, Homo sapiens
  Payload ID: 8524
  Gene Symbol: IQSEC2
  Gene Name: IQ motif and Sec7 domain 2
  Uniprot ID: Q5JU85
  ENSP ID: ENSP00000364514
MEPPGRSSRSTASHTLHQYCCPTQVLDSMKLTPSGRLAESSVEGDAPGSDLSTAVDSPGSQPPYRLSQLPPSSSHMGGPPAGVGLPWAQRARLQPASVALRKQEEEEIKRSKALSDSYELSTDLQDKKVEMLERKYGGSFLSRRAARTIQTAFRQYRMNKNFERLRSSASESRMSRRIILSNMRMQFSFEEYEKAQNPAYFEGKPASLDEGAMAGARSHRLERGLPYGGSCGGGIDGGGSSVTTSGEFSNDITELEDSFSKQVKSLAESIDEALNCHPSGPMSEEPGSAQLEKRESKEQQEDSSATSFSDLPLYLDDTVPQQSPERLPSTEPPPQGRPEFWAPAPLPPVPPPVPSGTREDGSREEGTRRGPGCLECRDFRLRAAHLPLLTIEPPSDSSVDLSDRSDRGSVHRQLVYEADGCSPHGTLKHKGPPGRAPIPHRHYPAPEGPAPAPPGPLPPAPNSGTGPSGVAGGRRLGKCEAAGENSDGGDNESLESSSNSNETINCSSGSSSRDSLREPPATGLCKQTYQRETRHSWDSPAFNNDVVQRRHYRIGLNLFNKKPEKGIQYLIERGFLSDTPVGVAHFILERKGLSRQMIGEFLGNRQKQFNRDVLDCVVDEMDFSSMDLDDALRKFQSHIRVQGEAQKVERLIEAFSQRYCVCNPALVRQFRNPDTIFILAFAIILLNTDMYSPSVKAERKMKLDDFIKNLRGVDNGEDIPRDLLVGIYQRIQGRELRTNDDHVSQVQAVERMIVGKKPVLSLPHRRLVCCCQLYEVPDPNRPQRLGLHQREVFLFNDLLVVTKIFQKKKILVTYSFRQSFPLVEMHMQLFQNSYYQFGIKLLSAVPGGERKVLIIFNAPSLQDRLRFTSDLRESIAEVQEMEKYRVESELEKQKGMMRPNASQPGGAKDSVNGTMARSSLEDTYGAGDGLKRGALSSSLRDLSDAGVCY

SEQ ID NO: 41921 - protein, 1488 aa, Homo sapiens
  Payload ID: 8524
  Gene Symbol: IQSEC2
  Gene Name: IQ motif and Sec7 domain 2
  Uniprot ID: Q5JU85
  ENSP ID: ENSP00000379712
MEAGSGPPGGPGSESPNRAVEYLLELNNIIESQQQLLETQRRRIEELEGQLDQLTQENRDLREESQLHRGELHRDPHGARDSPGRESQYQNLRETQFHHRELRESQFHQAARDVGYPNREGAYQNREAVYRDKERDASYPLQDTTGYTARERDVAQCHLHHENPALGRERGGREAGPAHPGREKEAGYSAAVGVGPRPPRERGQLSRGASRSSSPGAGGGHSTSTSTSPATTLQRKSDGENSRTVSVEGDAPGSDLSTAVDSPGSQPPYRLSQLPPSSSHMGGPPAGVGLPWAQRARLQPASVALRKQEEEEIKRSKALSDSYELSTDLQDKKVEMLERKYGGSFLSRRAARTIQTAFRQYRMNKNFERLRSSASESRMSRRIILSNMRMQFSFEEYEKAQNPAYFEGKPASLDEGAMAGARSHRLERGLPYGGSCGGGIDGGGSSVTTSGEFSNDITELEDSFSKQVKSLAESIDEALNCHPSGPMSEEPGSAQLEKRESKEQQEDSSATSFSDLPLYLDDTVPQQSPERLPSTEPPPQGRPEFWAPAPLPPVPPPVPSGTREDGSREEGTRRGPGCLECRDFRLRAAHLPLLTIEPPSDSSVDLSDRSDRGSVHRQLVYEADGCSPHGTLKHKGPPGRAPIPHRHYPAPEGPAPAPPGPLPPAPNSGTGPSGVAGGRRLGKCEAAGENSDGGDNESLESSSNSNETINCSSGSSSRDSLREPPATGLCKQTYQRETRHSWDSPAFNNDVVQRRHYRIGLNLFNKKPEKGIQYLIERGFLSDTPVGVAHFILERKGLSRQMIGEFLGNRQKQFNRDVLDCVVDEMDFSSMDLDDALRKFQSHIRVQGEAQKVERLIEAFSQRYCVCNPALVRQFRNPDTIFILAFAIILLNTDMYSPSVKAERKMKLDDFIKNLRGVDNGEDIPRDLLVGIYQRIQGRELRTNDDHVSQVQAVERMIVGKKPVLSLPHRRLVCCCQLYEVPDPNRPQRLGLHQREVFLFNDLLVVTKIFQKKKILVTYSFRQSFPLVEMHMQLFQNSYYQFGIKLLSAVPGGERKVLIIFNAPSLQDRLRFTSDLRESIAEVQEMEKYRVESELEKQKGMMRPNASQPGGAKDSVNGTMARSSLEDTYGAGDGLKRGALSSSLRDLSDAGKRGRRNSVGSLDSTIEGSVISSPRPHQRMPPPPPPPPPEEYKSQRPVSNSSSFLGSLFGSKRGKGPFQMPPPPTGQASASSSSASSTHHHHHHHHHGHSHGGLGVLPDGQSKLQALHAQYCQGPGPAPPPYLPPQQPSLPPPPQQPPPLPQLGSIPPPPASAPPVGPHRHFHAHGPVPGPQHYTLGRPGRAPRRGAGGHPQFAPHGRHPLHQPTSPLPLYSPAPQHPPAHKQGPKHFIFSHHPQMMPAAGAAGGPGSRPPGGSYSHPHHPQSPLSPHSPIPPHPSYPPLPPPSPHTPHSPLPPTSPHGPLHASGPPGTANPPSANPKAKPSRISTVV

SEQ ID NO: 41922 - protein, 759 aa, Homo sapiens
  Payload ID: 8525
  Gene Symbol: IQSEC3
  Gene Name: IQ motif and Sec7 domain 3
  Uniprot ID: Q9UPP2
  ENSP ID: ENSP00000372292
MLEHKYGGHLVSRRAACTIQTAFRQYQLSKNFEKIRNSLLESRLPRRISLRKVRSPTAESLAAEKALMEGYGLVGLPLVRSPSLPPTFAGTLTELEDSFTEQVQSLAKSIDDALSTWSLKTMCSLRESGAYQLHQALQAAAGPPGLEAEGRAPESAGPGPGDDAAETPGLPPAHSGTLMMAFRDVTVQIANQNISVSSSTALSVANCLGAQTVQAPAEPAAGKAEQGETSGREAPEAPAVGREDASAEDSCAEAAASGAADGATAPKTEEEEEEEETAEVGRGAEAEAGDLEQLSSSSTSTKSAKSGSEASASASKDALQAMILSLPRYHCENPASCKSPTLSTDTLRKRLYRIGLNLFNINPDKGIQFLISRGFIPDTPIGVAHFLLQRKGLSRQMIGEFLGNSKKQFNRDVLDCVVDEMDFSSMELDEALRKFQAHIRVQGEAQKVERLIEAFSQRYCMCNPEVVQQFHNPDTIFILAFAIILLNTDMYSPNIKPDRKMMLEDFIRNLRGVDDGADIPRELVVGIYERIQQKELKSNEDHVTYVTKVEKSIVGMKTVLSVPHRRLVCCSRLFEVTDVNKLQKQAAHQREVFLFNDLLVILKLCPKKKSSSTYTFCKSVGLLGMQFQLFENEYYSHGITLVTPLSGSEKKQVLHFCALGSDEMQKFVEDLKESIAEVTELEQIRIEWELEKQQGTKTLSFKPCGAQGDPQSKQGSPTAKREAALRERPAESTVEVLINASPARLTILPISRDTIKSYC

SEQ ID NO: 41923 - protein, 1182 aa, Homo sapiens
  Payload ID: 8525
  Gene Symbol: IQSEC3
  Gene Name: IQ motif and Sec7 domain 3
  Uniprot ID: Q9UPP2
  ENSP ID: ENSP00000437554
MESLLENPVRAVLYLKELTAIVQNQQSLIHTQRERIDELERRLDELSAENRSLWEHQQLLQAQPPPGLVPPSSAPLPAAPATAPAAAARAQEPLQDQGQRSAAAPHPAPDRPPRQHHGQLLEQPQRGPGSRAHTPQSPHKHLGTQGAVTDKEKERPPSCCAAAGALLQHKSPSALGKGVLSRRPENETVLHQFCCPAADACSDLASQSDGSCTQAGGGMEDSVVAAAAVAAGRPSAHAPKAQAQELQEEEERPGAGAASPRAGPQHKASPGRQQPALATALCPHAPAASDYELSLDLKNKQIEMLEHKYGGHLVSRRAACTIQTAFRQYQLSKNFEKIRNSLLESRLPRRISLRKVRSPTAESLAAEKALMEGYGLVGLPLVRSPSLPPTFAGTLTELEDSFTEQVQSLAKSIDDALSTWSLKTMCSLRESGAYQLHQALQAAAGPPGLEAEGRAPESAGPGPGDDAAETPGLPPAHSGTLMMAFRDVTVQIANQNISVSSSTALSVANCLGAQTVQAPAEPAAGKAEQGETSGREAPEAPAVGREDASAEDSCAEAAASGAADGATAPKTEEEEEEEETAEVGRGAEAEAGDLEQLSSSSTSTKSAKSGSEASASASKDALQAMILSLPRYHCENPASCKSPTLSTDTLRKRLYRIGLNLFNINPDKGIQFLISRGFIPDTPIGVAHFLLQRKGLSRQMIGEFLGNSKKQFNRDVLDCVVDEMDFSSMELDEALRKFQAHIRVQGEAQKVERLIEAFSQRYCMCNPEVVQQFHNPDTIFILAFAIILLNTDMYSPNIKPDRKMMLEDFIRNLRGVDDGADIPRELVVGIYERIQQKELKSNEDHVTYVTKVEKSIVGMKTVLSVPHRRLVCCSRLFEVTDVNKLQKQAAHQREVFLFNDLLVILKLCPKKKSSSTYTFCKSVGLLGMQFQLFENEYYSHGITLVTPLSGSEKKQVLHFCALGSDEMQKFVEDLKESIAEVTELEQIRIEWELEKQQGTKTLSFKPCGAQGDPQSKQGSPTAKREAALRERPAESTVEVSIHNRLQTSQHNSGLGAERGAPVPPPDLQPSPPRQQTPPLPPPPPTPPGTLVQCQQIVKVIVLDKPCLARMEPLLSQALSCYTSSSSDSCGSTPLGGPGSPVKVTHQPPLPPPPPPYNHPHQFCPPGSLLHGHRYSSGSRSLV

SEQ ID NO: 41924 - protein, 759 aa, Homo sapiens; identical to SEQ ID NO: 41922
  Payload ID: 8525
  Gene Symbol: IQSEC3
  Gene Name: IQ motif and Sec7 domain 3
  Uniprot ID: Q9UPP2
  ENSP ID: ENSP00000461043

SEQ ID NO: 41925 - protein, 1038 aa, Homo sapiens
  Payload ID: 8525
  Gene Symbol: IQSEC3
  Gene Name: IQ motif and Sec7 domain 3
  ENSP ID: ENSP00000461496
MESLLENPVRAVLYLKELTAIVQNQQSLIHTQRERIDELERRLDELSAENRSLWEHQQLLQAQPPPGLVPPSSAPLPAAPATAPAAAARAQEPLQDQGQRSAAAPHPAPDRPPRQHHGQLLEQPQRGPGSRAHTPQSPHKHLGTQGAVTDKEKERPPSCCAAAGALLQHKSPSALGKGVLSRRPENETVLHQFCCPAADACSDLASQSDGSCTQAGGGMEDSVVAAAAVAAGRPSAHAPKAQAQELQEEEERPGAGAASPRAGPQHKASPGRQQPALATALCPHAPAASDYELSLDLKNKQIEMLEHKYGGHLVSRRAACTIQTAFRQYQLSKNFEKIRNSLLESRLPRRISLRKVRSPTAESLAAEKALMEGYGLVGLPLVRSPSLPPTFAGTLTELEDSFTEQVQSLAKSIDDALSTWSLKTMCSLRESGAYQLHQALQAAAGPPGLEAEGRAPESAGPGPGDDAAETPGLPPAHSGTLMMAFRDVTVQIANQNISVSSSTALSVANCLGAQTVQAPAEPAAGKAEQGETSGREAPEAPAVGREDASAEDSCAEAAASGAADGATAPKTEEEEEEEETAEVGRGAEAEAGDLEQLSSSSTSTKSAKSGSEASASASKDALQAMILSLPRYHCENPASCKSPTLSTDTLRKRLYRIGLNLFNINPDKGIQFLISRGFIPDTPIGVAHFLLQRKGLSRQMIGEFLGNSKKQFNRDVLDCVVDEMDFSSMELDEALRKFQAHIRVQGEAQKVERLIEAFSQRYCMCNPEVVQQFHNPDTIFILAFAIILLNTDMYSPNIKPDRKMMLEDFIRNLRGVDDGADIPRELVVGIYERIQQKELKSNEDHVTYVTKVEKSIVGMKTVLSVPHRRLVCCSRLFEVTDVNKLQKQAAHQREVFLFNDLLVILKLCPKKKSSSTYTFCKSVGLLGMQFQLFENEYYSHGITLVTPLSGSEKKQVLHFCALGSDEMQKFVEDLKESIAEVTELEQIRIEWELEKQQGTKTLSFKPCGAQGDPQSKQGSPTAKREAALRERPAESTVE

SEQ ID NO: 41926 - protein, 791 aa, Homo sapiens
  Payload ID: 8526
  Gene Symbol: IQUB
  Gene Name: IQ motif and ubiquitin domain containing
  Uniprot ID: Q8NA54
  ENSP ID: ENSP00000324882
MSNQQEKYEAQNIVNSTEESDDAFDTVTIPVPSEEPQESDQTEEHESGIEQFSESHAIHVEEQSDQSFSSLEPDNEQLMEEVISPRQVSYTPQHHEKQYAMQRPNDDSLAFLDKIKSVKESLQESVEDSLATVKVVLIPVGQEIVIPFKVDTILKYLKDHFSHLLGIPHSVLQIRYSGKILKNNETLVQHGVKPQEIVQVEIFSTNPDLYPVRRIDGLTDVSQIITVTVQTGLDQYQQVPVEIVKSDFHKPFLGGFRHKVTGVEYHNAGTQTVPKRIPERLSIFCRDTQTVFQKKNLQQTTNTTSTQMTNIGVYVSNMTDKLVTPGKYFSAAEYHAQRLKAVIVIQTYYRQWHAKIFVENLRRQKSLRLEWETQQELRKIREKEEWIKLDYHRRHNPKTNEDFEFLYNALEFWRQEELTRINQSFTGAERKAALCELLEKETQIIASIGRHRYIAYMANQEAAIQAFLDKCSAPKIWRTPNGKTIEMDTQFTIRARELQNIYKCIMLKNISQDERLDVLLTLKHTVKEHECKLTQEILELIDREVDLMMRGVKHHNLEGLRKRIATLFFHYIKTPLFNPEVAKYLKVPQDPLKFYKKIYFCHSCQLYLPSTEFSVSSTSRRIYRCRNCINLQNEAQKRESFLKYKCLLQQLYYTEADYEDDSKIAFLMQLQDIQYLTENIWASQSVLSACDNLSDLVMVRWNKSLEWSPWNCILLTKDEAAAHLKLTSIEEGYERSFIHKIKHKHILAKNYFSQVPVLASFILDDGEIDEIRWKYHSDTTPKIIESQRPPH

SEQ ID NO: 41927 - protein, 596 aa, Homo sapiens
  Payload ID: 8526
  Gene Symbol: IQUB
  Gene Name: IQ motif and ubiquitin domain containing
  Uniprot ID: Q8NA54
  ENSP ID: ENSP00000417285
MSNQQEKYEAQNIVNSTEESDDAFDTVTIPVPSEEPQESDQTEEHESGIEQFSESHAIHVEEQSDQSFSSLEPDNEQLMEEVISPRQVSYTPQHHEKQYAMQRPNDDSLAFLDKIKSVKESLQESVEDSLATVKVVLIPVGQEIVIPFKVDTILKYLKDHFSHLLGIPHSVLQIRYSGKILKNNETLVQHGVKPQEIVQVEIFSTNPDLYPVRRIDGLTDVSQIITVTVQTGLDQYQQVPVEIVKSDFHKPFLGGFRHKVTGVEYHNAGTQTVPKRIPERLSIFCRDTQTVFQKKNLQQTTNTTSTQMTNIGVYVSNMTDKLVTPGKYFSAAEYHAQRLKAVIVIQTYYRQWHAKIFVENLRRQKSLRLEWETQQELRKIREKEEWIKLDYHRRHNPKTNEDFEFLYNALEFWRQEELTRINQSFTGAERKAALCELLEKETQIIASIGRHRYIAYMANQEAAIQAFLDKCSAPKIWRTPNGKTIEMDTQFTIRARELQNIYKCIMLKNISQDERLDVLLTLKHTVKEHECKLTQEILELIDREVDLMMRGVKHHNLEGLRKRIATLFFHYIKTPLFNPEVAKYLKMGGEYLSMAL

SEQ ID NO: 41928 - protein, 421 aa, Homo sapiens
  Payload ID: 8526
  Gene Symbol: IQUB
  Gene Name: IQ motif and ubiquitin domain containing
  ENSP ID: ENSP00000417636
MSNQQEKYEAQNIVNSTEESDDAFDTVTIPVPSEEPQESDQTEEHESGIEQFSESHAIHVEEQSDQSFSSLEPDNEQLMEEVISPRQVSYTPQHHEKQYAMQRPNDDSLAFLDKIKSVKESLQESVEDSLATVKVVLIPVGQEIVIPFKVDTILKYLKDHFSHLLGIPHSVLQIRYSGKILKNNETLVQHGVKPQEIVQVEIFSTNPDLYPVRRIDGLTDVSQIITVTVQTGLDQYQQVPVEIVKSDFHKPFLGGFRHKVTGVEYHNAGTQTVPKRIPERLSIFCRDTQTVFQKKNLQQTTNTTSTQMTNIGVYVSNMTDKLVTPGKYFSAAEYHAQRLKAVIVIQTYYRQWHAKIFVENLRRQKSLRLEWETQQELRKIREKEEWIKLDYHRRHNPKTNEDFEFLYNALELFSSKNMENP

SEQ ID NO: 41929 - protein, 791 aa, Homo sapiens; identical to SEQ ID NO: 41926
  Payload ID: 8526
  Gene Symbol: IQUB
  Gene Name: IQ motif and ubiquitin domain containing
  Uniprot ID: Q8NA54
  ENSP ID: ENSP00000417769

SEQ ID NO: 41930 - protein, 598 aa, Homo sapiens
  Payload ID: 8527
  Gene Symbol: IQCB1
  Gene Name: IQ motif containing B1
  Uniprot ID: Q15051
  ENSP ID: ENSP00000311505
MKPTGTDPRILSIAAEVAKSPEQNVPVILLKLKEIINITPLGSSELKKIKQDIYCYDLIQYCLLVLSQDYSRIQGGWTTISQLTQILSHCCVGLEPGEDAEEFYNELLPSAAENFLVLGRQLQTCFINAAKAEEKDELLHFFQIVTDSLFWLLGGHVELIQNVLQSDHFLHLLQADNVQIGSAVMMMLQNILQINSGDLLRIGRKALYSILDEVIFKLFSTPSPVIRSTATKLLLLMAESHQEILILLRQSTCYKGLRRLLSKQETGTEFSQELRQLVGLLSPMVYQEVEEQKLHQAACLIQAYWKGFQTRKRLKKLPSAVIALQRSFRSKRSKMLLEINRQKEEEDLKLQLQLQRQRAMRLSRELQLSMLEIVHPGQVEKHYREMEEKSALIIQKHWRGYRERKNFHQQRQSLIEYKAAVTLQRAALKFLAKCRKKKKLFAPWRGLQELTDARRVELKKRVDDYVRRHLGSPMSDVVSRELHAQAQERLQHYFMGRALEERAQQHREALIAQISTNVEQLMKAPSLKEAEGKEPELFLSRSRPVAAKAKQAHLTTLKHIQAPWWKKLGEESGDEIDVPKDELSIELENLFIGGTKPP

SEQ ID NO: 41931 - protein, 465 aa, Homo sapiens
  Payload ID: 8527
  Gene Symbol: IQCB1
  Gene Name: IQ motif containing B1
  Uniprot ID: Q15051
  ENSP ID: ENSP00000323756
MKPTGTDPRILSIAAEVAKSPEQNVPVILLKLKEIINITPLGSSELKKIKQDIYCYDLIQYCLLVLSQDYSRIQGGWTTISQLTQILSHCCVGLEPGEDAEEFYNELLPSAAENFLVLGRQLQTCFINAAKAEEKDELLHFFQIVTDSLFWLLGGHVELIQNVLQSDHFLHLLQADNVQIGSAVMMMLQNILQINRSKRSKMLLEINRQKEEEDLKLQLQLQRQRAMRLSRELQLSMLEIVHPGQVEKHYREMEEKSALIIQKHWRGYRERKNFHQQRQSLIEYKAAVTLQRAALKFLAKCRKKKKLFAPWRGLQELTDARRVELKKRVDDYVRRHLGSPMSDVVSRELHAQAQERLQHYFMGRALEERAQQHREALIAQISTNVEQLMKAPSLKEAEGKEPELFLSRSRPVAAKAKQAHLTTLKHIQAPWWKKLGEESGDEIDVPKDELSIELENLFIGGTKPP

SEQ ID NO: 41932 - protein, 303 aa, Homo sapiens
  Payload ID: 8527
  Gene Symbol: IQCB1
  Gene Name: IQ motif containing B1
  Uniprot ID: Q15051
  ENSP ID: ENSP00000377261
MKPTGTDPRILSIAAEVAKSPEQNVPVILLKLKEIINITPLGSSELKKIKQDIYCYDLIQYCLLVLSQDYSRIQGGWTTISQLTQILSHCCVGLEPGEDAEEFYNELLPSAAENFLVLGRQLQTCFINAAKAEEKDELLHFFQIVTDSLFWLLGGHVELIQNVLQSDHFLHLLQADNVQIGSAVMMMLQNILQINSGDLLRIGRKALYSILDEVIFKLFSTPSPVIRSTATKLLLLMAESHQEILILLRQSTCYKGLRRLLSKQETGTEFSQELRQLVGLLSPMVYQEVEEQIQTIKDVAGDK

SEQ ID NO: 41933 - protein, 84 aa, Homo sapiens
  Payload ID: 8527
  Gene Symbol: IQCB1
  Gene Name: IQ motif containing B1
  ENSP ID: ENSP00000417832
MMMLQNILQINSGDLLRIGRKALYSILDEVIFKLFSTPSPVIRSTATKLLLLMAESHQEILILLRQSTCYKGLRRLLSKQETGT

SEQ ID NO: 41934 - protein, 143 aa, Homo sapiens
  Payload ID: 8527
  Gene Symbol: IQCB1
  Gene Name: IQ motif containing B1
  ENSP ID: ENSP00000419168
MMMLQNILQINSGDLLRIGRKALYSILDEVIFKLFSTPSPVIRSTATKLLLLMAESHQEILILLRQSTCYKGLRRLLSKQETGTEFSQELRQLVGLLSPMVYQEVEEQKLHQAACLIQAYWKGFQTRKRLKKLPSAVIALQRS

SEQ ID NO: 41935 - protein, 87 aa, Homo sapiens
  Payload ID: 8527
  Gene Symbol: IQCB1
  Gene Name: IQ motif containing B1
  ENSP ID: ENSP00000419376
MKPTGTDPRILSIAAEVAKSPEQNVPVILLKLKEIINITPLGSSELKKIKQDIYCYDLIQYCLLVLSQDYSRIQGGWTTISQLTQIL

SEQ ID NO: 41936 - protein, 466 aa, Homo sapiens
  Payload ID: 8528
  Gene Symbol: IQCC
  Gene Name: IQ motif containing C
  Uniprot ID: Q4KMZ1
  ENSP ID: ENSP00000291358
MEPELLVRKVSALQACVRGFLVRRQFQSLRAEYEAIVREVEGDLGTLQWTEGRIPRPRFLPEKAKSHQTWKAGDRVANPEQGLWNHFPCEESEGEATWEEMVLKKSGESSANQGSLCRDHSSWLQMKQNRKPSQEKTRDTTRMENPEATDQRLPHSQPQLQELQYHRSHLAMELLWLQQAINSRKEYLLLKQTLRSPEAGPIREEPRVFLEHGEQACERDQSQPSAPLEDQSYRDRTTGELEQEDDSCHRVKSPHRSPGSLATTQKNIAGAKCREPCYSKSGPPSSIPSNSQALGDRLTKGPDDGRQTFGGTCLLQMKILEDQTPRGLKPRNHCPRKSRTQLSALYEDSNIKEMSPRKLDHKEPDCRTVRTQELGLSEDHIIWDGTLGGPEHSVLDLWRTKPPKGQAPTDRSSRDGTSNEPSHEGQKKQRTIPWRSKSPEILSSTKAGCTGEEQWRGRPWKTEPPG

SEQ ID NO: 41937 - protein, 546 aa, Homo sapiens
  Payload ID: 8528
  Gene Symbol: IQCC
  Gene Name: IQ motif containing C
  Uniprot ID: Q4KMZ1
  ENSP ID: ENSP00000442291
MEPELLVRKVSALQVRGRARGSQDFSFREIMGSRTWTSQRDATTFSPLTARQPLEIPAVPNRAEESWDPRTPCPARPHSHHTLAPDQGNGKSLKACVRGFLVRRQFQSLRAEYEAIVREVEGDLGTLQWTEGRIPRPRFLPEKAKSHQTWKAGDRVANPEQGLWNHFPCEESEGEATWEEMVLKKSGESSANQGSLCRDHSSWLQMKQNRKPSQEKTRDTTRMENPEATDQRLPHSQPQLQELQYHRSHLAMELLWLQQAINSRKEYLLLKQTLRSPEAGPIREEPRVFLEHGEQACERDQSQPSAPLEDQSYRDRTTGELEQEDDSCHRVKSPHRSPGSLATTQKNIAGAKCREPCYSKSGPPSSIPSNSQALGDRLTKGPDDGRQTFGGTCLLQMKILEDQTPRGLKPRNHCPRKSRTQLSALYEDSNIKEMSPRKLDHKEPDCRTVRTQELGLSEDHIIWDGTLGGPEHSVLDLWRTKPPKGQAPTDRSSRDGTSNEPSHEGQKKQRTIPWRSKSPEILSSTKAGCTGEEQWRGRPWKTEPPG

SEQ ID NO: 41938 - protein, 347 aa, Homo sapiens
  Payload ID: 8529
  Gene Symbol: IQCD
  Gene Name: IQ motif containing D
  Uniprot ID: Q96DY2
  ENSP ID: ENSP00000299732
MALDILAMAPLYQAPAINRIGPKTDPSKRPADPLKPLVLSRTKLTTIEAKRIMSILDEAIYKVELVTLLSYVASNREDMEGMLGEDVMRAVREHEDLCQVLLENVRCLKEKERQLQEQKEAEEEGWLRDRLLSIELQKSSLSPLMQQIKDSTKNVLRLLLSNPQAARLLQMQTQGRSAEAQNFIDSLIELRGFLFEKLLTSPMEARDKAQFLQDISRQNSNNQQIIDTLEKELAERMKNRNAEEELEDLDAVHREEKISLEELRRRHKVLVGEFAQIREEREINSKKRMEAEQEMVRMVRAATLIQALWKGYLVRSLLRSKKKRGKGKAKDKEKGKQKGKEKGKGKK

SEQ ID NO: 41939 - protein, 449 aa, Homo sapiens
  Payload ID: 8529
  Gene Symbol: IQCD
  Gene Name: IQ motif containing D
  Uniprot ID: Q96DY2
  ENSP ID: ENSP00000400669
MALDILAMAPLYQAPAINRIGPKTDPSKRPADPLKPLVLSRTKLTTIEAKRIMSILDEAIYKVELVTLLSYVASNREDMEGMLGEDVMRAVREHEDLCQVLLENVRCLKEKERQLQEQKEAEEEGWLRDRLLSIELQKSSLSPLMQQIKDSTKNVLRLLLSNPQAARLLQMQTQGRSAEAQNFIDSLIELRGFLFEKLLTSPMEARDKAQFLQDISRQNSNNQQIIDTLEKELAERMKNRNAEVEKENFVIQELKNHLHQVLKFSENSLVRTKQEAEKQQKADFRASQARVAKIQQEILQLQSQFYNLVMENREAEQALRKKKYKVETEIENWIQKYDTEMGEKQEELEDLDAVHREEKISLEELRRRHKVLVGEFAQIREEREINSKKRMEAEQEMVRMVRAATLIQALWKGYLVRSLLRSKKKRGKGKAKDKEKGKQKGKEKGKGKK

SEQ ID NO: 41940 - protein, 412 aa, Homo sapiens
  Payload ID: 8529
  Gene Symbol: IQCD
  Gene Name: IQ motif containing D
  ENSP ID: ENSP00000446623
MALDILAMAPLYQAPAINRIGPKTDPSKRPADPLKPLVLSRTKLTTIEAKRIMSILDEAIYKVELVTLLSYVASNREDMEGMLGEDVMRAVREHEDLCQVLLENVRCLKEKERQLQEQKEAEEEGWLRDRLLSIELQKSSLSPLMQQIKDSTKNVLRLLLSNPQAARLLQMQTQGRSAEAQNFIDSLIELRGFLFEKLLTSPMEARDKAQFLQDISRQNSNNQQIIDTLEKELAERMKNRNAEVEKENFVIQELKNHLHQVLKFSENSLVRTKQEAEKQQKADFRASQARVAKIQQEILQLQSQFYNLVMENREAEQALRKVPREAARMGRGGPWWGGWVGLFHHSWRSSSVGQGRTAPATQEVAWWRGRAQEQGRPKSKPVSPGRQEGAAHRPGDRGQTGILSQHCCMPAL

SEQ ID NO: 41941 - protein, 630 aa, Homo sapiens
  Payload ID: 8530
  Gene Symbol: IQCE
  Gene Name: IQ motif containing E
  Uniprot ID: Q6IPM2
  ENSP ID: ENSP00000313772
MPLGGRASLTPQKLWLGTAKPGSLTQALNSPLTWEHAWTGVPGGTPDCLTDTFRVKRPHLRRSASNGHVPGTPVYREKEDMYDEIIELKKSLHVQKSDVDLMRTKLRRLEEENSRKDRQIEQLLDPSRGTDFVRTLAEKRPDASWVINGLKQRILKLEQQCKEKDGTISKLQTDMKTTNLEEMRIAMETYYEEVHRLQTLLASSETTGKKPLGEKKTGAKRQKKMGSALLSLSRSVQELTEENQSLKEDLDRVLSTSPTISKTQGYVEWSKPRLLRRIVELEKKLSVMESSKSHAAEPVRSHPPACLASSSALHRQPRGDRNKDHERLRGAVRDLKEERTALQEQLLQRDLEVKQLLQAKADLEKELECAREGEEERREREEVLREEIQTLTSKLQELQEMKKEEKEDCPEVPHKAQELPAPTPSSRHCEQDWPPDSSEEGLPRPRSPCSDGRRDAAARVLQAQWKVYKHKKKKAVLDEAAVVLQAAFRGHLTRTKLLASKAHGSEPPSVPGLPDQSSPVPRVPSPIAQATGSPVQEEAIVIIQSALRAHLARARHSATGKRTTTAASTRRRSASATHGDASSPPFLAALPDPSPSGPQALAPLPGDDVNSDDSDDIVIAPSLPTKNFPV

SEQ ID NO: 41942 - protein, 42 aa, Homo sapiens
  Payload ID: 8530
  Gene Symbol: IQCE
  Gene Name: IQ motif containing E
  ENSP ID: ENSP00000314011
MFLGTGEPALDTSHLISLSREKWPPGGPSGRQGACLWAAERP

SEQ ID NO: 41943 - protein, 695 aa, Homo sapiens
  Payload ID: 8530
  Gene Symbol: IQCE
  Gene Name: IQ motif containing E
  Uniprot ID: Q6IPM2
  ENSP ID: ENSP00000385597
MFLGTGEPALDTGDDSLSAVTFDSDVETKAKRKAFHKPPPTSPKSPYLSKPRKVASWRSLRTAGSMPLGGRASLTPQKLWLGTAKPGSLTQALNSPLTWEHAWTGVPGGTPDCLTDTFRVKRPHLRRSASNGHVPGTPVYREKEDMYDEIIELKKSLHVQKSDVDLMRTKLRRLEEENSRKDRQIEQLLDPSRGTDFVRTLAEKRPDASWVINGLKQRILKLEQQCKEKDGTISKLQTDMKTTNLEEMRIAMETYYEEVHRLQTLLASSETTGKKPLGEKKTGAKRQKKMGSALLSLSRSVQELTEENQSLKEDLDRVLSTSPTISKTQGYVEWSKPRLLRRIVELEKKLSVMESSKSHAAEPVRSHPPACLASSSALHRQPRGDRNKDHERLRGAVRDLKEERTALQEQLLQRDLEVKQLLQAKADLEKELECAREGEEERREREEVLREEIQTLTSKLQELQEMKKEEKEDCPEVPHKAQELPAPTPSSRHCEQDWPPDSSEEGLPRPRSPCSDGRRDAAARVLQAQWKVYKHKKKKAVLDEAAVVLQAAFRGHLTRTKLLASKAHGSEPPSVPGLPDQSSPVPRVPSPIAQATGSPVQEEAIVIIQSALRAHLARARHSATGKRTTTAASTRRRSASATHGDASSPPFLAALPDPSPSGPQALAPLPGDDVNSDDSDDIVIAPSLPTKNFPV

SEQ ID NO: 41944 - protein, 644 aa, Homo sapiens
  Payload ID: 8530
  Gene Symbol: IQCE
  Gene Name: IQ motif containing E
  Uniprot ID: Q6IPM2
  ENSP ID: ENSP00000385945
MFLGTGEPALDTSHLISLSRASLTPQKLWLGTAKPGSLTQALNSPLTWEHAWTGVPGGTPDCLTDTFRVKRPHLRRSASNGHVPGTPVYREKEDMYDEIIELKKSLHVQKSDVDLMRTKLRRLEEENSRKDRQIEQLLDPSRGTDFVRTLAEKRPDASWVINGLKQRILKLEQQCKEKDGTISKLQTDMKTTNLEEMRIAMETYYEEVHRLQTLLASSETTGKKPLGEKKTGAKRQKKMGSALLSLSRSVQELTEENQSLKEDLDRVLSTSPTISKTQGYVEWSKPRLLRRIVELEKKLSVMESSKSHAAEPVRSHPPACLASSSALHRQPRGDRNKDHERLRGAVRDLKEERTALQEQLLQRDLEVKQLLQAKADLEKELECAREGEEERREREEVLREEIQTLTSKLQELQEMKKEEKEDCPEVPHKAQELPAPTPSSRHCEQDWPPDSSEEGLPRPRSPCSDGRRDAAARVLQAQWKVYKHKKKKAVLDEAAVVLQAAFRGHLTRTKLLASKAHGSEPPSVPGLPDQSSPVPRVPSPIAQATGSPVQEEAIVIIQSALRAHLARARHSATGKRTTTAASTRRRSASATHGDASSPPFLAALPDPSPSGPQALAPLPGDDVNSDDSDDIVIAPSLPTKNFPV

SEQ ID NO: 41945 - protein, 679 aa, Homo sapiens
  Payload ID: 8530
  Gene Symbol: IQCE
  Gene Name: IQ motif containing E
  Uniprot ID: Q6IPM2
  ENSP ID: ENSP00000396178
MFLGTGEPALDTKAKRKAFHKPPPTSPKSPYLSKPRKVASWRSLRTAGSMPLGGRASLTPQKLWLGTAKPGSLTQALNSPLTWEHAWTGVPGGTPDCLTDTFRVKRPHLRRSASNGHVPGTPVYREKEDMYDEIIELKKSLHVQKSDVDLMRTKLRRLEEENSRKDRQIEQLLDPSRGTDFVRTLAEKRPDASWVINGLKQRILKLEQQCKEKDGTISKLQTDMKTTNLEEMRIAMETYYEEVHRLQTLLASSETTGKKPLGEKKTGAKRQKKMGSALLSLSRSVQELTEENQSLKEDLDRVLSTSPTISKTQGYVEWSKPRLLRRIVELEKKLSVMESSKSHAAEPVRSHPPACLASSSALHRQPRGDRNKDHERLRGAVRDLKEERTALQEQLLQRDLEVKQLLQAKADLEKELECAREGEEERREREEVLREEIQTLTSKLQELQEMKKEEKEDCPEVPHKAQELPAPTPSSRHCEQDWPPDSSEEGLPRPRSPCSDGRRDAAARVLQAQWKVYKHKKKKAVLDEAAVVLQAAFRGHLTRTKLLASKAHGSEPPSVPGLPDQSSPVPRVPSPIAQATGSPVQEEAIVIIQSALRAHLARARHSATGKRTTTAASTRRRSASATHGDASSPPFLAALPDPSPSGPQALAPLPGDDVNSDDSDDIVIAPSLPTKNFPV

SEQ ID NO: 41946 - protein, 128 aa, Homo sapiens
  Payload ID: 8530
  Gene Symbol: IQCE
  Gene Name: IQ motif containing E
  ENSP ID: ENSP00000402108
MPLGGRASLTPQKLWLGTAKPGSLTQALNSPLTWEHAWTGVPGGTPDCLTDTFRVKRPHLRRSASNGHVPGTPVYREKEDMYDEIIELKKSLHVQKSDVDLMRTKLRRLEEENSRKDRQIEQLLDPSR

SEQ ID NO: 41947 - protein, 246 aa, Homo sapiens
  Payload ID: 8530
  Gene Symbol: IQCE
  Gene Name: IQ motif containing E
  ENSP ID: ENSP00000404643
MFLGTGEPALDTGDDSLSAVTFDSDVETKAKRKAFHKPPPTSPKSPYLSKPRKVASWRSLRTAGSMPLGGRASLTPQKLWLGTAKPGSLTQALNSPLTWEHAWTGVPGGTPDCLTDTFRVKRPHLRRSASNVSFFLETESRCVAQAGLKFLDSSDPLTLASQNPGITGHVPGTPVYREKEDMYDEIIELKKSLHVQKSDVDLMRTKLRRLEEENSRKDRQIEQLLDPSRGTDFVRTLAEKRPDASW

SEQ ID NO: 41948 - protein, 269 aa, Homo sapiens
  Payload ID: 8530
  Gene Symbol: IQCE
  Gene Name: IQ motif containing E
  ENSP ID: ENSP00000405982
MLRCADTQVTILGRLHSQVPRNRRQGTQGHAGAARRPGGGRVVRKTWARAFIMRRRGRGEAQELPAPTPSSRHCEQDWPPDSSEEGLPRPRSPCSDGRRDAAARVLQAQWKVYKHKKKKAVLDEAAVVLQAAFRGHLTRTKLLASKAHGSEPPSVPGLPDQSSPVPRVPSPIAQATGSPVQEEAIVIIQSALRAHLARARHSATGKRTTTAASTRRRSASATHGDASSPPFLAALPGNFIHLDSGTRAAGLLRSQPKSGHLQEARAVSG

SEQ ID NO: 41949 - protein, 128 aa, Homo sapiens; identical to SEQ ID NO: 41946
  Payload ID: 8530
  Gene Symbol: IQCE
  Gene Name: IQ motif containing E
  ENSP ID: ENSP00000413570

SEQ ID NO: 41950 - protein, 193 aa, Homo sapiens
  Payload ID: 8530
  Gene Symbol: IQCE
  Gene Name: IQ motif containing E
  ENSP ID: ENSP00000415261
KNIRILSPLSKTFTEKEVINGLKQRILKLEQQCKEKDGTISKLQTDMKTTNLEEMRIAMETYYEEVHRLQTLLASSETTGKKPLGEKKTGAKRQKKMGSALLSLSRSVQELTEENQSLKEDLDRVLSTSPTISKTQGYVEWSKPRLLRRIVELEKKLSVMESSKSHAAEPVRSHPPACLASSSALHRQPRGDR

SEQ ID NO: 41951 - protein, 686 aa, Homo sapiens
  Payload ID: 8530
  Gene Symbol: IQCE
  Gene Name: IQ motif containing E
  ENSP ID: ENSP00000480668
MFLGTGEPALDTKAKRKAFHKPPPTSPKSPYLSKPRKVASWRSLRTAGSMPLGGRASLTPQKLWLGTAKPGSLTQALNSPLTWEHAWTGVPGGTPDCLTDTFRVKRPHLRRSASNGHVPGTPVYREKEDMYDEIIELKKSLHVQKSDVDLMRTKLRRLEEENSRKDRQIEQLLDPSRGTDFVRTLAEKRPDASWVINGLKQRILKLEQQCKEKDGTISKLQTDMKTTNLEEMRIAMETYYEEVHRLQTLLASSETTGKKPLGEKKTGAKRQKKMGSALLSLSRSVQELTEENQSLKEDLDRVLSTSPTISKTQGYVEWSKPRLLRRIVELEKKLSVMESSKSHAAEPVRSHPPACLASSSALHRQPRGDRNKDHERLRGAVRDLKEERTALQEQLLQRDLEVKQLLQAKADLEKELECAREGEEERREREEVLREEIQTLTSKLQELQEMKKEEKEDCPEVPHKAQELPAPTPSSRHCEQDWPPDSSEEGLPRPRSPCSDGRRDAAARVLQAQWKVYKHKKKKAVLDEAAVVLQAAFRGHLTRTKLLASKAHGSEPPSVPGLPDQSSPVPRVPSPIAQATGSPVQEEAIVIIQSALRAHLARARHSATGKRTTTAASTRRRSASATHGDASSPPFLAALPGNFIHLDSGTRAAGLLRSQPKSGHLQEARAVSGRKGGVSHLELPLN

SEQ ID NO: 41952 - protein, 702 aa, Homo sapiens
  Payload ID: 8530
  Gene Symbol: IQCE
  Gene Name: IQ motif containing E
  ENSP ID: ENSP00000480715
MFLGTGEPALDTGDDSLSAVTFDSDVETKAKRKAFHKPPPTSPKSPYLSKPRKVASWRSLRTAGSMPLGGRASLTPQKLWLGTAKPGSLTQALNSPLTWEHAWTGVPGGTPDCLTDTFRVKRPHLRRSASNGHVPGTPVYREKEDMYDEIIELKKSLHVQKSDVDLMRTKLRRLEEENSRKDRQIEQLLDPSRGTDFVRTLAEKRPDASWVINGLKQRILKLEQQCKEKDGTISKLQTDMKTTNLEEMRIAMETYYEEVHRLQTLLASSETTGKKPLGEKKTGAKRQKKMGSALLSLSRSVQELTEENQSLKEDLDRVLSTSPTISKTQGYVEWSKPRLLRRIVELEKKLSVMESSKSHAAEPVRSHPPACLASSSALHRQPRGDRNKDHERLRGAVRDLKEERTALQEQLLQRDLEVKQLLQAKADLEKELECAREGEEERREREEVLREEIQTLTSKLQELQEMKKEEKEDCPEVPHKAQELPAPTPSSRHCEQDWPPDSSEEGLPRPRSPCSDGRRDAAARVLQAQWKVYKHKKKKAVLDEAAVVLQAAFRGHLTRTKLLASKAHGSEPPSVPGLPDQSSPVPRVPSPIAQATGSPVQEEAIVIIQSALRAHLARARHSATGKRTTTAASTRRRSASATHGDASSPPFLAALPGNFIHLDSGTRAAGLLRSQPKSGHLQEARAVSGRKGGVSHLELPLN

SEQ ID NO: 41953 - protein, 630 aa, Homo sapiens; identical to SEQ ID NO: 41941
  Payload ID: 8530
  Gene Symbol: IQCE
  Gene Name: IQ motif containing E
  Uniprot ID: Q6IPM2
  ENSP ID: ENSP00000485601

SEQ ID NO: 41954 - protein, 205 aa, Homo sapiens
  Payload ID: 8531
  Gene Symbol: IQCF1
  Gene Name: IQ motif containing F1
  Uniprot ID: Q8N6M8
  ENSP ID: ENSP00000307958
MEEKQPQKTKEPSKEDEPQQKEMPTHLSLGAESKAEAKTPVLVETQTVDNANEKSEKPPENQKKLSDKDTVATKIQAWWRGTLVRRALLHAALSACIIQCWWRLILSKILKKRRQAALEAFSRKEWAAVTLQSQARMWRIRRRYCQVLNAVRIIQAYWRCRSCASRGFIKGQYRVTANQLHLQLEILLDSGPCIVTECIPFSIKE

SEQ ID NO: 41955 - protein, 42 aa, Homo sapiens
  Payload ID: 8531
  Gene Symbol: IQCF1
  Gene Name: IQ motif containing F1
  ENSP ID: ENSP00000317715
MEEKQPQKTKEPSKEDEPQQKEMPTHLSLGAESKAEQGKVLL

SEQ ID NO: 41956 - protein, 164 aa, Homo sapiens
  Payload ID: 8532
  Gene Symbol: IQCF2
  Gene Name: IQ motif containing F2
  Uniprot ID: Q8IXL9
  ENSP ID: ENSP00000329904
MRVRFCTKGNLILVIIEDVEESIEWKTLQKKKQQKIKEKLRIRTKAAVKIQAWWRGTLVRRTLLHAALRAWIIQCWWRMTLSRVLEKKRQAALIAYATRERAVIKLQSLVRMWRVRWRYCQVLNAIYIIQGHWQCHNCQTCALLQGHCVVTATHLQFHIEIINS

SEQ ID NO: 41957 - protein, 154 aa, Homo sapiens
  Payload ID: 8533
  Gene Symbol: IQCF3
  Gene Name: IQ motif containing F3
  Uniprot ID: P0C7M6
  ENSP ID: ENSP00000401767
MGSKCCKGGPDEDAVERQRRQKLLLAQLHHRKRVKAAGQIQAWWRGVLVRRTLLVAALRAWMIQCWWRTLVQRRIRQRRQALLRVYVIQEQATVKLQSCIRMWQCRQCYRQMCNALCLFQVPESSLAFQTDGFLQVQYAIPSKQPEFHIEILSI

SEQ ID NO: 41958 - protein, 154 aa, Homo sapiens; identical to SEQ ID NO: 41957
  Payload ID: 8533
  Gene Symbol: IQCF3
  Gene Name: IQ motif containing F3
  Uniprot ID: P0C7M6
  ENSP ID: ENSP00000402012

SEQ ID NO: 41959 - protein, 93 aa, Homo sapiens
  Payload ID: 8533
  Gene Symbol: IQCF3
  Gene Name: IQ motif containing F3
  ENSP ID: ENSP00000402530
MGSKCCKGGPDEDAVERQRRQKGLDDSVLVEDVGAETDPSAAAGPVEGLRHPGAGDGQAPVLHPHVAVPAMLPPNVQCSLLVPGPREQPCLPD

SEQ ID NO: 41960 - protein, 154 aa, Homo sapiens; identical to SEQ ID NO: 41957
  Payload ID: 8533
  Gene Symbol: IQCF3
  Gene Name: IQ motif containing F3
  Uniprot ID: P0C7M6
  ENSP ID: ENSP00000409373

SEQ ID NO: 41961 - protein, 154 aa, Homo sapiens; identical to SEQ ID NO: 41957
  Payload ID: 8533
  Gene Symbol: IQCF3
  Gene Name: IQ motif containing F3
  Uniprot ID: P0C7M6
  ENSP ID: ENSP00000415609

SEQ ID NO: 41962 - protein, 148 aa, Homo sapiens
  Payload ID: 8534
  Gene Symbol: IQCF5
  Gene Name: IQ motif containing F5
  Uniprot ID: A8MTL0
  ENSP ID: ENSP00000394653
MGPEEKTIMTERSAAVFIQAWWRGMLVRRTLLHAALRAWIIQCWWRQVLEKLLAKRRRMVLEFYVQQEWAAVRLQSWVRMWCVRQRYCRLLNAVRIIQVYWRWHSCHSRVFIEGHYELKENQLNIQLEISLGLQACKVQQCIPLPLKE

SEQ ID NO: 41963 - protein, 107 aa, Homo sapiens
  Payload ID: 8535
  Gene Symbol: IQCF6
  Gene Name: IQ motif containing F6
  Uniprot ID: A8MYZ5
  ENSP ID: ENSP00000381760
MVRRTLLQAALRAWVIQCWWRSMQAKMLEQRRRLALRLYTCQEWAVVKVQAQVRMWQARRRFLQARQAACIIQSHWRWHASQTRGLIRGHYEVRASRLELDIEILMT

SEQ ID NO: 41964 - protein, 443 aa, Homo sapiens
  Payload ID: 8536
  Gene Symbol: IQCG
  Gene Name: IQ motif containing G
  Uniprot ID: Q9H095
  ENSP ID: ENSP00000265239
MEEDSLEDSNLPPKVWHSEMTVSVTGEPPSTVEEEGIPKETDIEIIPEIPETLEPLSLPDVLRISAVLEDTTDQLSILNYIMPVQYEGRQSICVKSREMNLEGTNLDKLPMASTITKIPSPLITEEGPNLPEIRHRGRFAVEFNKMQDLVFKKPTRQTIMTTETLKKIQIDRQFFSDVIADTIKELQDSATYNSLLQALSKERENKMHFYDIIAREEKGRKQIISLQKQLINVKKEWQFEVQSQNEYIANLKDQLQEMKAKSNLENRYMKTNTELQIAQTQKKCNRTEELLVEEIEKLRMKTEEEARTHTEIEMFLRKEQQKLEERLEFWMEKYDKDTEMKQNELNALKATKASDLAHLQDLAKMIREYEQVIIEDRIEKERSKKKVKQDLLELKSVIKLQAWWRGTMIRREIGGFKMPKDKVDSKDSKGKGKGKDKRRGKKK

SEQ ID NO: 41965 - protein, 310 aa, Homo sapiens
  Payload ID: 8536
  Gene Symbol: IQCG
  Gene Name: IQ motif containing G
  ENSP ID: ENSP00000389897
MEEDSLEDSNLPPKVWHSEMTVSVTGEPPSTVEEEGIPKETDIEIIPEIPETLEPLSLPDVLRISAVLEDTTDQLSILNYIMPVQYEGRQSICVKSREMNLEGTNLDKLPMASTITKIPSPLITEEGPNLPEIRHRGRFAVEFNKMQDLVFKKPTRQTIMTTETLKKIQIDRQFFSDVIADTIKELQDSATYNSLLQALSKERENKMHFYDIIAREEKGRKQIISLQKQLINVKKEWQFEVQSQNEYIANLKDQLQEMKAKSNLENRYMKTNTELQIAQTQKKCNRTEELLVEEIEVIPGTLAKNPGDGN

SEQ ID NO: 41966 - protein, 54 aa, Homo sapiens
  Payload ID: 8536
  Gene Symbol: IQCG
  Gene Name: IQ motif containing G
  ENSP ID: ENSP00000393743
MEEDSLEDSNLPPKVWHSEMTVSVTGEPPSTVEEEGIPKETDIEIIPEIPETLE

SEQ ID NO: 41967 - protein, 198 aa, Homo sapiens
  Payload ID: 8536
  Gene Symbol: IQCG
  Gene Name: IQ motif containing G
  ENSP ID: ENSP00000406411
MTVSVTGEPPSTVEEEGIPKETDIEIIPEIPETLEPLSLPDVLRISAVLEDTTDQLSILNYIMPVQYEGRQSICVKSREMNLEGTNLDKLPMASTITKIPSPLITEEGPNLPEIRHRGRFAVEFNKMQDLVFKKPTRQTIMTTETLKKIQIDRQFFSDVIADTIKELQDSATYNSLLQALSKERENKMHFYDIIAREE

SEQ ID NO: 41968 - protein, 443 aa, Homo sapiens; identical to SEQ ID NO: 41964
  Payload ID: 8536
  Gene Symbol: IQCG
  Gene Name: IQ motif containing G
  Uniprot ID: Q9H095
  ENSP ID: ENSP00000407736

SEQ ID NO: 41969 - protein, 1657 aa, Homo sapiens
  Payload ID: 8537
  Gene Symbol: IQGAP1
  Gene Name: IQ motif containing GTPase activating protein 1
  Uniprot ID: P46940
  ENSP ID: ENSP00000268182
MSAADEVDGLGVARPHYGSVLDNERLTAEEMDERRRQNVAYEYLCHLEEAKRWMEACLGEDLPPTTELEEGLRNGVYLAKLGNFFSPKVVSLKKIYDREQTRYKATGLHFRHTDNVIQWLNAMDEIGLPKIFYPETTDIYDRKNMPRCIYCIHALSLYLFKLGLAPQIQDLYGKVDFTEEEINNMKTELEKYGIQMPAFSKIGGILANELSVDEAALHAAVIAINEAIDRRIPADTFAALKNPNAMLVNLEEPLASTYQDILYQAKQDKMTNAKNRTENSERERDVYEELLTQAEIQGNINKVNTFSALANIDLALEQGDALALFRALQSPALGLRGLQQQNSDWYLKQLLSDKQQKRQSGQTDPLQKEELQSGVDAANSAAQQYQRRLAAVALINAAIQKGVAEKTVLELMNPEAQLPQVYPFAADLYQKELATLQRQSPEHNLTHPELSVAVEMLSSVALINRALESGDVNTVWKQLSSSVTGLTNIEEENCQRYLDELMKLKAQAHAENNEFITWNDIQACVDHVNLVVQEEHERILAIGLINEALDEGDAQKTLQALQIPAAKLEGVLAEVAQHYQDTLIRAKREKAQEIQDESAVLWLDEIQGGIWQSNKDTQEAQKFALGIFAINEAVESGDVGKTLSALRSPDVGLYGVIPECGETYHSDLAEAKKKKLAVGDNNSKWVKHWVKGGYYYYHNLETQEGGWDEPPNFVQNSMQLSREEIQSSISGVTAAYNREQLWLANEGLITRLQARCRGYLVRQEFRSRMNFLKKQIPAITCIQSQWRGYKQKKAYQDRLAYLRSHKDEVVKIQSLARMHQARKRYRDRLQYFRDHINDIIKIQAFIRANKARDDYKTLINAEDPPMVVVRKFVHLLDQSDQDFQEELDLMKMREEVITLIRSNQQLENDLNLMDIKIGLLVKNKITLQDVVSHSKKLTKKNKEQLSDMMMINKQKGGLKALSKEKREKLEAYQHLFYLLQTNPTYLAKLIFQMPQNKSTKFMDSVIFTLYNYASNQREEYLLLRLFKTALQEEIKSKVDQIQEIVTGNPTVIKMVVSFNRGARGQNALRQILAPVVKEIMDDKSLNIKTDPVDIYKSWVNQMESQTGEASKLPYDVTPEQALAHEEVKTRLDSSIRNMRAVTDKFLSAIVSSVDKIPYGMRFIAKVLKDSLHEKFPDAGEDELLKIIGNLLYYRYMNPAIVAPDAFDIIDLSAGGQLTTDQRRNLGSIAKMLQHAASNKMFLGDNAHLSIINEYLSQSYQKFRRFFQTACDVPELQDKFNVDEYSDLVTLTKPVIYISIGEIINTHTLLLDHQDAIAPEHNDPIHELLDDLGEVPTIESLIGESSGNLNDPNKEALAKTEVSLTLTNKFDVPGDENAEMDARTILLNTKRLIVDVIRFQPGETLTEILETPATSEQEAEHQRAMQRRAIRDAKTPDKMKKSKSVKEDSNLTLQEKKEKIQTGLKKLTELGTVDPKNKYQELINDIARDIRNQRRYRQRRKAELVKLQQTYAALNSKATFYGEQVDYYKSYIKTCLDNLASKGKVSKKPREMKGKKSKKISLKYTAARLHEKGVLLEIEDLQVNQFKNVIFEISPTEEVGDFEVKAKFMGVQMETFMLHYQDLLQLQYEGVAVMKLFDRAKVNVNLLIFLLNKKFYGK

SEQ ID NO: 41970 - protein, 43 aa, Homo sapiens
  Payload ID: 8537
  Gene Symbol: IQGAP1
  Gene Name: IQ motif containing GTPase activating protein 1
  ENSP ID: ENSP00000452723
MPRCIYCIHALSLYLFKLGLAPQIQDLYGKVDFTEEEINNMKT

SEQ ID NO: 41971 - protein, 1085 aa, Homo sapiens
  Payload ID: 8537
  Gene Symbol: IQGAP1
  Gene Name: IQ motif containing GTPase activating protein 1
  ENSP ID: ENSP00000453181
MSAADEVDGLGVARPHYGSVLDNERLTAEEMDERRRGIWQSNKDTQEAQKFALGIFAINEAVESGDVGKTLSALRSPDVGLYGVIPECGETYHSDLAEAKKKKLAVGDNNSKWVKHWVKGGYYYYHNLETQEGGWDEPPNFVQNSMQLSREEIQSSISGVTAAYNREQLWLANEGLITRLQARCRGYLVRQEFRSRMNFLKKQIPAITCIQSQWRGYKQKKAYQDRLAYLRSHKDEVVKIQSLARMHQARKRYRDRLQYFRDHINDIIKIQAFIRANKARDDYKTLINAEDPPMVVVRKFVHLLDQSDQDFQEELDLMKMREEVITLIRSNQQLENDLNLMDIKIGLLVKNKITLQDVVSHSKKLTKKNKEQLSDMMMINKQKGGLKALSKEKREKLEAYQHLFYLLQTNPTYLAKLIFQMPQNKSTKFMDSVIFTLYNYASNQREEYLLLRLFKTALQEEIKSKVDQIQEIVTGNPTVIKMVVSFNRGARGQNALRQILAPVVKEIMDDKSLNIKTDPVDIYKSWVNQMESQTGEASKLPYDVTPEQALAHEEVKTRLDSSIRNMRAVTDKFLSAIVSSVDKIPYGMRFIAKVLKDSLHEKFPDAGEDELLKIIGNLLYYRYMNPAIVAPDAFDIIDLSAGGQLTTDQRRNLGSIAKMLQHAASNKMFLGDNAHLSIINEYLSQSYQKFRRFFQTACDVPELQDKFNVDEYSDLVTLTKPVIYISIGEIINTHTLLLDHQDAIAPEHNDPIHELLDDLGEVPTIESLIGESSGNLNDPNKEALAKTEVSLTLTNKFDVPGDENAEMDARTILLNTKRLIVDVIRFQPGETLTEILETPATSEQEAEHQRAMQRRAIRDAKTPDKMKKSKSVKEDSNLTLQEKKEKIQTGLKKLTELGTVDPKNKYQELINDIARDIRNQRRYRQRRKAELVKLQQTYAALNSKATFYGEQVDYYKSYIKTCLDNLASKGKVSKKPREMKGKKSKKISLKYTAARLHEKGVLLEIEDLQVNQFKNVIFEISPTEEVGDFEVKAKFMGVQMETFMLHYQDLLQLQYEGVAVMKLFDRAKVNVNLLIFLLNKKFYGK

SEQ ID NO: 41972 - protein, 107 aa, Homo sapiens
  Payload ID: 8537
  Gene Symbol: IQGAP1
  Gene Name: IQ motif containing GTPase activating protein 1
  ENSP ID: ENSP00000480393
VKGGYYYYHNLETQEGGWDEPPNFVQNSMQLSREEIQSSISGVTAAYNREQLWLANEGLITRLQARCRGYLVRQEFRSRMNFLKKQIPAITCIQVFQNLSHRQQAGI

SEQ ID NO: 41973 - protein, 48 aa, Homo sapiens
  Payload ID: 8537
  Gene Symbol: IQGAP1
  Gene Name: IQ motif containing GTPase activating protein 1
  ENSP ID: ENSP00000484647
  MOD_RES (1)..(1): Any amino acid
XEVDGLGVARPHYGSVLDNERLTAEEMDERRRQNVAYEYLCHLEEAKR

SEQ ID NO: 41974 - protein, 1191 aa, Homo sapiens
  Payload ID: 8537
  Gene Symbol: IQGAP1
  Gene Name: IQ motif containing GTPase activating protein 1
  ENSP ID: ENSP00000488618
MSAADEVDGLGVARPHYGSVLDNERLTAEEMDERRRQNVAYEYLCHLEEAKRWMEACLGEDLPPTTELEEGLRNGVYLAKLGNFFSPKVVSLKKIYDREQTRYKATGLHFRHTDNVIQWLNAMDEIGLPKIFYPETTDIYDRKNMPRCIYCIHALSLYLFKLGLAPQIQDLYGKVDFTEEEINNMKTELEKYGIQMPAFSKIGGILANELSVDEAALHAAVIAINEAIDRRIPADTFAALKNPNAMLVNLEEPLASTYQDILYQAKQDKMTNAKNRTENSERERDVYEELLTQAEIQGNINKVNTFSALANIDLALEQGDALALFRALQSPALGLRGLQQQNSDWYLKQLLSDKQQKRQSGQTDPLQKEELQSGVDAANSAAQQYQRRLAAVALINAAIQKGVAEKTVLELMNPEAQLPQVYPFAADLYQKELATLQRQSPEHNLTHPELSVAVEMLSSVALINRALESGDVNTVWKQLSSSVTGLTNIEEENCQRYLDELMKLKAQAHAENNEFITWNDIQACVDHVNLVVQEEHERILAIGLINEALDEGDAQKTLQALQIPAAKLEGVLAEVAQHYQDTLIRAKREKAQEIQDESAVLWLDEIQGGIWQSNKDTQEAQKFALGIFAINEAVESGDVGKTLSALRSPDVGLYGVIPECGETYHSDLAEAKKKKLAVGDNNSKWVKHWVKGGYYYYHNLETQEGGWDEPPNFVQNSMQLSREEIQSSISGVTAAYNREQLWLANEGLITRLQARCRGYLVRQEFRSRMNFLKKQIPAITCIQSQWRGYKQKKAYQDRLAYLRSHKDEVVKIQSLARMHQARKRYRDRLQYFRDHINDIIKIQAFIRANKARDDYKTLINAEDPPMVVVRKFVHLLDQSDQDFQEELDLMKMREEVITLIRSNQQLENDLNLMDIKIGLLVKNKITLQDVVSHSKKLTKKNKEQLSDMMMINKQKGGLKALSKEKREKLEAYQHLFYLLQTNPTYLAKLIFQMPQNKSTKFMDSVIFTLYNYASNQREEYLLLRLFKTALQEEIKSKVDQIQEIVTGNPTVIKMVVSFNRGARGQNALRQILAPVVKEIMDDKSLNIKTDPVDIYKSWVNQMESQTGEASKLPYDVTPEQALAHEEVKTRLDSSIRNMRAVTDKFLSAIVSSVDKIPYGMRFIAKVLKDSLHEKFPDAGEDELLKFCAFLQ

SEQ ID NO: 41975 - protein, 1575 aa, Homo sapiens
  Payload ID: 8538
  Gene Symbol: IQGAP2
  Gene Name: IQ motif containing GTPase activating protein 2
  Uniprot ID: Q13576
  ENSP ID: ENSP00000274364
MPHEELPSLQRPRYGSIVDDERLSAEEMDERRRQNIAYEYLCHLEEAKRWMEVCLVEELPPTTELEEGLRNGVYLAKLAKFFAPKMVSEKKIYDVEQTRYKKSGLHFRHTDNTVQWLRAMESIGLPKIFYPETTDVYDRKNIPRMIYCIHALSLYLFKLGIAPQIQDLLGKVDFTEEEISNMRKELEKYGIQMPSFSKIGGILANELSVDEAALHAAVIAINEAVEKGIAEQTVVTLRNPNAVLTLVDDNLAPEYQKELWDAKKKKEENARLKNSCISEEERDAYEELLTQAEIQGNINKVNRQAAVDHINAVIPEGDPENTLLALKKPEAQLPAVYPFAAAMYQNELFNLQKQNTMNYLAHEELLIAVEMLSAVALLNQALESNDLVSVQNQLRSPAIGLNNLDKAYVERYANTLLSVKLEVLSQGQDNLSWNEIQNCIDMVNAQIQEENDRVVAVGYINEAIDEGNPLRTLETLLLPTANISDVDPAHAQHYQDVLYHAKSQKLGDSESVSKVLWLDEIQQAVDDANVDKDRAKQWVTLVVDVNQCLEGKKSSDILSVLKSSTSNANDIIPECADKYYDALVKAKELKSERVSSDGSWLKLNLHKKYDYYYNTDSKESSWVTPESCLYKESWLTGKEIEDIIEEVTVGYIRENIWSASEELLLRFQATSSGPILREEFEARKSFLHEQEENVVKIQAFWKGYKQRKEYMHRRQTFIDNTDSIVKIQSWFRMATARKSYLSRLQYFRDHNNEIVKIQSLLRANKARDDYKTLVGSENPPLTVIRKFVYLLDQSDLDFQEELEVARLREEVVTKIRANQQLEKDLNLMDIKIGLLVKNRITLEDVISHSKKLNKKKGGEMEILNNTDNQGIKSLSKERRKTLETYQQLFYLLQTNPLYLAKLIFQMPQNKSTKFMDTVIFTLYNYASNQREEYLLLKLFKTALEEEIKSKVDQVQDIVTGNPTVIKMVVSFNRGARGQNTLRQLLAPVVKEIIDDKSLIINTNPVEVYKAWVNQLETQTGEASKLPYDVTTEQALTYPEVKNKLEASIENLRRVTDKVLNSIISSLDLLPYGLRYIAKVLKNSIHEKFPDATEDELLKIVGNLLYYRYMNPAIVAPDGFDIIDMTAGGQINSDQRRNLGSVAKVLQHAASNKLFEGENEHLSSMNNYLSETYQEFRKYFKEACNVPEPEEKFNMDKYTDLVTVSKPVIYISIEEIISTHSLLLEHQDAIAPEKNDLLSELLGSLGEVPTVESFLGEGAVDPNDPNKANTLSQLSKTEISLVLTSKYDIEDGEAIDSRSLMIKTKKLIIDVIRNQPGNTLTEILETPATAQQEVDHATDMVSRAMIDSRTPEEMKHSQSMIEDAQLPLEQKKRKIQRNLRTLEQTGHVSSENKYQDILNEIAKDIRNQRIYRKLRKAELAKLQQTLNALNKKAAFYEEQINYYDTYIKTCLDNLKRKNTRRSIKLDGKGEPKGAKRAKPVKYTAAKLHEKGVLLDIDDLQTNQFKNVTFDIIATEDVGIFDVRSKFLGVEMEKVQLNIQDLLQMQYEGVAVMKMFDKVKVNVNLLIYLLNKKFYGK

SEQ ID NO: 41976 - protein, 1071 aa, Homo sapiens
  Payload ID: 8538
  Gene Symbol: IQGAP2
  Gene Name: IQ motif containing GTPase activating protein 2
  Uniprot ID: Q13576
  ENSP ID: ENSP00000379535
MHSLPGVVAVGYINEAIDEGNPLRTLETLLLPTANISDVDPAHAQHYQDVLYHAKSQKLGDSESVSKVLWLDEIQQAVDDANVDKDRAKQWVTLVVDVNQCLEGKKSSDILSVLKSSTSNANDIIPECADKYYDALVKAKELKSERVSSDGSWLKLNLHKKYDYYYNTDSKESSWVTPESCLYKESWLTGKEIEAFWKGYKQRKEYMHRRQTFIDNTDSIVKIQSWFRMATARKSYLSRLQYFRDHNNEIVKIQSLLRANKARDDYKTLVGSENPPLTVIRKFVYLLDQSDLDFQEELEVARLREEVVTKIRANQQLEKDLNLMDIKIGLLVKNRITLEDVISHSKKLNKKKGGEMEILNNTDNQGIKSLSKERRKTLETYQQLFYLLQTNPLYLAKLIFQMPQNKSTKFMDTVIFTLYNYASNQREEYLLLKLFKTALEEEIKSKVDQVQDIVTGNPTVIKMVVSFNRGARGQNTLRQLLAPVVKEIIDDKSLIINTNPVEVYKAWVNQLETQTGEASKLPYDVTTEQALTYPEVKNKLEASIENLRRVTDKVLNSIISSLDLLPYGLRYIAKVLKNSIHEKFPDATEDELLKIVGNLLYYRYMNPAIVAPDGFDIIDMTAGGQINSDQRRNLGSVAKVLQHAASNKLFEGENEHLSSMNNYLSETYQEFRKYFKEACNVPEPEEKFNMDKYTDLVTVSKPVIYISIEEIISTHSLLLEHQDAIAPEKNDLLSELLGSLGEVPTVESFLGEGAVDPNDPNKANTLSQLSKTEISLVLTSKYDIEDGEAIDSRSLMIKTKKLIIDVIRNQPGNTLTEILETPATAQQEVDHATDMVSRAMIDSRTPEEMKHSQSMIEDAQLPLEQKKRKIQRNLRTLEQTGHVSSENKYQDILNEIAKDIRNQRIYRKLRKAELAKLQQTLNALNKKAAFYEEQINYYDTYIKTCLDNLKRKNTRRSIKLDGKGEPKGAKRAKPVKYTAAKLHEKGVLLDIDDLQTNQFKNVTFDIIATEDVGIFDVRSKFLGVEMEKVQLNIQDLLQMQYEGVAVMKMFDKVKVNVNLLIYLLNKKFYGK

SEQ ID NO: 41977 - protein, 1402 aa, Homo sapiens
  Payload ID: 8538
  Gene Symbol: IQGAP2
  Gene Name: IQ motif containing GTPase activating protein 2
  ENSP ID: ENSP00000421097
MEVCLVEELPPTTELEEGLRNGVYLAKLAKFFAPKMVSEKKIYDVEQTRYKKSGLHFRHTDNTVQWLRAMESIGLPKIFYPETTDVYDRKNIPRMIYCIHALSLYLFKLGIAPQIQDLLGKVDFTEEEISNMRKELEKYGIQMPSFSKIGGILANELSVDEAALHAAVIAINEAVEKGIAEQTVVTLRNPNAVLTLVDDNLAPEYQKELWDAKKKKEENARLKNSCISEEERDAYEELLTQAEIQGNINKVNRQAAVDHINAVIPEGDPENTLLALKKPEAQLPAVYPFAAAMYQNELFNLQKQNTMNYLAHEELLIAVEMLSAVALLNQALESNDLVSVQNQLRSPAIGLNNLDKAYVERYANTLLSVKLEVLSQGQDNLSWNEIQNCIDMVNAQIQEENDRVVAVGYINEAIDEGNPLRTLETLLLPTANISDVDPAHAQHYQDVLYHAKSQKLGDSESVSKVLWLDEIQQAVDDANVDKDRAKQWVTLVVDVNQCLEGKKSSDILSVLKSSTSNANDIIPECADKYYDALVKAKELKSERVSSDGSWLKLNLHKKYDYYYNTDSKESSWVTPESCLYKESWLTGKEIEDIIEEVTVGYIRENIWSASEELLLRFQATSSGPILREEFEARKSFLHEQEENVVKIQAFWKGYKQRKEYMHRRQTFIDNTDSIVKIQSWFRMATARKSYLSRLQYFRDHNNEIVKIQSLLRANKARDDYKTLVGSENPPLTVIRKFVYLLDQSDLDFQEELEVARLREEVVTKIRANQQLEKDLNLMDIKIGLLVKNRITLEDVISHSKKLNKKKGGEMEILNNTDNQGIKSLSKERRKTLETYQQLFYLLQTNPLYLAKLIFQMPQNKSTKFMDTVIFTLYNYASNQREEYLLLKLFKTALEEEIKSKVDQVQDIVTGNPTVIKMVVSFNRGARGQNTLRQLLAPVVKEIIDDKSLIINTNPVEVYKAWVNQLETQTGEASKLPYDVTTEQALTYPEVKNKLEASIENLRRVTDKVLNSIISSLDLLPYGLRYIAKVLKNSIHEKFPDATEDELLKIVGNLLYYRYMNPAIVAPDGFDIIDMTAGGQINSDQRRNLGSVAKVLQHAASNKLFEGENEHLSSMNNYLSETYQEFRKYFKEACNVPEPEEKFNMDKYTDLVTVSKPVIYISIEEIISTHSLLLEHQDAIAPEKNDLLSELLGSLGEVPTVESFLGEGAVDPNDPNKANTLSQLSKTEISLVLTSKYDIEDGEAIDSRSLMIKTKKLIIDVIRNQPGNTLTEILETPATAQQEVDHATDMVSRAMIDSRTPEEMKHSQSMIEDAQLPLEQKKRKIQRNLRTLEQTGHVSSENKYQDILNEIAKDIRNQRIYRKLRKAELAKLQQTLNALNKKAAFYEEQINYYDTYIKTCLDN

SEQ ID NO: 41978 - protein, 110 aa, Homo sapiens
  Payload ID: 8538
  Gene Symbol: IQGAP2
  Gene Name: IQ motif containing GTPase activating protein 2
  ENSP ID: ENSP00000421319
MGCFKGVVAVGYINEAIDEGNPLRTLETLLLPTANISDVDPAHAQHYQDVLYHAKSQKLGDSESVSKVLWLDEIQQAVDDANVDKDRAKQYGLFNLGSICEKHLGFISLA

SEQ ID NO: 41979 - protein, 509 aa, Homo sapiens
  Payload ID: 8538
  Gene Symbol: IQGAP2
  Gene Name: IQ motif containing GTPase activating protein 2
  ENSP ID: ENSP00000422661
MGCFKGVVAVGYINEAIDEGNPLRTLETLLLPTANISDVDPAHAQHYQDVLYHAKSQKLGDSESVSKVLWLDEIQQAVDDANVDKDRAKQWVTLVVDVNQCLEGKKSSDILSVLKSSTSNANDIIPECADKYYDALVKAKELKSERVSSDGSWLKLNLHKKYDYYYNTDSKESSWVTPESCLYKESWLTGKEIEDIIEEVTVGYIRENIWSASEELLLRFQATSSGPILREEFEARKSFLHEQEENVVKIQAFWKGYKQRKEYMHRRQTFIDNTDSIVKIQSWFRMATARKSYLSRLQYFRDHNNEIVKIQSLLRANKARDDYKTLVGSENPPLTVIRKFVYLLDQSDLDFQEELEVARLREEVVTKIRANQQLEKDLNLMDIKIGLLVKNRITLEDVISHSKKLNKKKGGEMEILNNTDNQGIKSLSKERRKTLETYQQLFYLLQTNPLYLAKLIFQMPQNKSTKFMDTVIFTLYNYASNQREEYLLLKLFKTALEEEIKSKVDQVQD

SEQ ID NO: 41980 - protein, 60 aa, Homo sapiens
  Payload ID: 8538
  Gene Symbol: IQGAP2
  Gene Name: IQ motif containing GTPase activating protein 2
  ENSP ID: ENSP00000423258
MHSLPGVVAVGYINEAIDEGNPLRTLETLLLPTANISDVDPAHAQHYQDVLYHAKSQKLG

SEQ ID NO: 41981 - protein, 824 aa, Homo sapiens
  Payload ID: 8538
  Gene Symbol: IQGAP2
  Gene Name: IQ motif containing GTPase activating protein 2
  ENSP ID: ENSP00000423672
MDERRRQNIAYEYLCHLEEAKRWMEVCLVEELPPTTELEEGLRNGVYLAKLAKFFAPKMVSEKKIYDVEQTRYKKSGLHFRHTDNTVQWLRAMESIGLPKIFYPETTDVYDRKNIPRMIYCIHALSLYLFKLGIAPQIQDLLGKVDFTEEEISNMRKELEKYGIQMPSFSKIGGILANELSVDEAALHAAVIAINEAVEKGIAEQTVVTLRNPNAVLTLVDDNLAPEYQKELWDAKKKKEENARLKNSCISEEERDAYEELLTQAEIQGNINKVNRQAAVDHINAVIPEGDPENTLLALKKPEAQLPAVYPFAAAMYQNELFNLQKQNTMNYLAHEELLIAVEMLSAVALLNQALESNDLVSVQNQLRSPAIGLNNLDKAYVERYANTLLSVKLEVLSQGQDNLSWNEIQNCIDMVNAQIQEENDRVVAVGYINEAIDEGNPLRTLETLLLPTANISDVDPAHAQHYQDVLYHAKSQKLGDSESVSKVLWLDEIQQAVDDANVDKDRAKQWVTLVVDVNQCLEGKKSSDILSVLKSSTSNANDIIPECADKYYDALVKAKELKSERVSSDGSWLKLNLHKKYDYYYNTDSKESSWVTPESCLYKESWLTGKEIEDIIEEVTVGYIRENIWSASEELLLRFQATSSGPILREEFEARKSFLHEQEENVVKIQAFWKGYKQRKEYMHRRQTFIDNTDSIVKIQSWFRMATARKSYLSRLQYFRDHNNEIVKIQSLLRANKARDDYKTLVGSENPPLTVIRKFVYLLDQSDLDFQEELEVARLREEVVTKIRANQQLEKDLNLMDIKIGLLVKNRITLEDVISHSKK

SEQ ID NO: 41982 - protein, 167 aa, Homo sapiens
  Payload ID: 8538
  Gene Symbol: IQGAP2
  Gene Name: IQ motif containing GTPase activating protein 2
  ENSP ID: ENSP00000425351
MGCFKGVVAVGYINEAIDEGNPLRTLETLLLPTANISDVDPAHAQHYQDVLYHAKSQKLGDSESVSKVLWLDEIQQAVDDANVDKDRAKQWVTLVVDVNQCLEGKKSSDILSVLKSSTSNANDIIPECADKYYDALVKAKELKSERVTVHGSNSTCTKNMTTITTLI

SEQ ID NO: 41983 - protein, 79 aa, Homo sapiens
  Payload ID: 8538
  Gene Symbol: IQGAP2
  Gene Name: IQ motif containing GTPase activating protein 2
  ENSP ID: ENSP00000425941
VAPDGFDIIDMTAGGQINSDQRRNLGSVAKVLQHAASNKLFEGENEHLSSMNNYLSETYQEFSSCWNTRMQLPLRKMTY

SEQ ID NO: 41984 - protein, 1071 aa, Homo sapiens
  Payload ID: 8538
  Gene Symbol: IQGAP2
  Gene Name: IQ motif containing GTPase activating protein 2
  Uniprot ID: Q13576
  ENSP ID: ENSP00000426027
MGCFKGVVAVGYINEAIDEGNPLRTLETLLLPTANISDVDPAHAQHYQDVLYHAKSQKLGDSESVSKVLWLDEIQQAVDDANVDKDRAKQWVTLVVDVNQCLEGKKSSDILSVLKSSTSNANDIIPECADKYYDALVKAKELKSERVSSDGSWLKLNLHKKYDYYYNTDSKESSWVTPESCLYKESWLTGKEIEAFWKGYKQRKEYMHRRQTFIDNTDSIVKIQSWFRMATARKSYLSRLQYFRDHNNEIVKIQSLLRANKARDDYKTLVGSENPPLTVIRKFVYLLDQSDLDFQEELEVARLREEVVTKIRANQQLEKDLNLMDIKIGLLVKNRITLEDVISHSKKLNKKKGGEMEILNNTDNQGIKSLSKERRKTLETYQQLFYLLQTNPLYLAKLIFQMPQNKSTKFMDTVIFTLYNYASNQREEYLLLKLFKTALEEEIKSKVDQVQDIVTGNPTVIKMVVSFNRGARGQNTLRQLLAPVVKEIIDDKSLIINTNPVEVYKAWVNQLETQTGEASKLPYDVTTEQALTYPEVKNKLEASIENLRRVTDKVLNSIISSLDLLPYGLRYIAKVLKNSIHEKFPDATEDELLKIVGNLLYYRYMNPAIVAPDGFDIIDMTAGGQINSDQRRNLGSVAKVLQHAASNKLFEGENEHLSSMNNYLSETYQEFRKYFKEACNVPEPEEKFNMDKYTDLVTVSKPVIYISIEEIISTHSLLLEHQDAIAPEKNDLLSELLGSLGEVPTVESFLGEGAVDPNDPNKANTLSQLSKTEISLVLTSKYDIEDGEAIDSRSLMIKTKKLIIDVIRNQPGNTLTEILETPATAQQEVDHATDMVSRAMIDSRTPEEMKHSQSMIEDAQLPLEQKKRKIQRNLRTLEQTGHVSSENKYQDILNEIAKDIRNQRIYRKLRKAELAKLQQTLNALNKKAAFYEEQINYYDTYIKTCLDNLKRKNTRRSIKLDGKGEPKGAKRAKPVKYTAAKLHEKGVLLDIDDLQTNQFKNVTFDIIATEDVGIFDVRSKFLGVEMEKVQLNIQDLLQMQYEGVAVMKMFDKVKVNVNLLIYLLNKKFYGK

SEQ ID NO: 41985 - protein, 1525 aa, Homo sapiens
  Payload ID: 8538
  Gene Symbol: IQGAP2
  Gene Name: IQ motif containing GTPase activating protein 2
  ENSP ID: ENSP00000442313
MEVCLVEELPPTTELEEGLRNGVYLAKLAKFFAPKMVSEKKIYDVEQTRYKKSGLHFRHTDNTVQWLRAMESIGLPKIFYPETTDVYDRKNIPRMIYCIHALSLYLFKLGIAPQIQDLLGKVDFTEEEISNMRKELEKYGIQMPSFSKIGGILANELSVDEAALHAAVIAINEAVEKGIAEQTVVTLRNPNAVLTLVDDNLAPEYQKELWDAKKKKEENARLKNSCISEEERDAYEELLTQAEIQGNINKVNRQAAVDHINAVIPEGDPENTLLALKKPEAQLPAVYPFAAAMYQNELFNLQKQNTMNYLAHEELLIAVEMLSAVALLNQALESNDLVSVQNQLRSPAIGLNNLDKAYVERYANTLLSVKLEVLSQGQDNLSWNEIQNCIDMVNAQIQEENDRVVAVGYINEAIDEGNPLRTLETLLLPTANISDVDPAHAQHYQDVLYHAKSQKLGDSESVSKVLWLDEIQQAVDDANVDKDRAKQWVTLVVDVNQCLEGKKSSDILSVLKSSTSNANDIIPECADKYYDALVKAKELKSERVSSDGSWLKLNLHKKYDYYYNTDSKESSWVTPESCLYKESWLTGKEIEDIIEEVTVGYIRENIWSASEELLLRFQATSSGPILREEFEARKSFLHEQEENVVKIQAFWKGYKQRKEYMHRRQTFIDNTDSIVKIQSWFRMATARKSYLSRLQYFRDHNNEIVKIQSLLRANKARDDYKTLVGSENPPLTVIRKFVYLLDQSDLDFQEELEVARLREEVVTKIRANQQLEKDLNLMDIKIGLLVKNRITLEDVISHSKKLNKKKGGEMEILNNTDNQGIKSLSKERRKTLETYQQLFYLLQTNPLYLAKLIFQMPQNKSTKFMDTVIFTLYNYASNQREEYLLLKLFKTALEEEIKSKVDQVQDIVTGNPTVIKMVVSFNRGARGQNTLRQLLAPVVKEIIDDKSLIINTNPVEVYKAWVNQLETQTGEASKLPYDVTTEQALTYPEVKNKLEASIENLRRVTDKVLNSIISSLDLLPYGLRYIAKVLKNSIHEKFPDATEDELLKIVGNLLYYRYMNPAIVAPDGFDIIDMTAGGQINSDQRRNLGSVAKVLQHAASNKLFEGENEHLSSMNNYLSETYQEFRKYFKEACNVPEPEEKFNMDKYTDLVTVSKPVIYISIEEIISTHSLLLEHQDAIAPEKNDLLSELLGSLGEVPTVESFLGEGAVDPNDPNKANTLSQLSKTEISLVLTSKYDIEDGEAIDSRSLMIKTKKLIIDVIRNQPGNTLTEILETPATAQQEVDHATDMVSRAMIDSRTPEEMKHSQSMIEDAQLPLEQKKRKIQRNLRTLEQTGHVSSENKYQDILNEIAKDIRNQRIYRKLRKAELAKLQQTLNALNKKAAFYEEQINYYDTYIKTCLDNLKRKNTRRSIKLDGKGEPKGAKRAKPVKYTAAKLHEKGVLLDIDDLQTNQFKNVTFDIIATEDVGIFDVRSKFLGVEMEKVQLNIQDLLQMQYEGVAVMKMFDKVKVNVNLLIYLLNKKFYGK

SEQ ID NO: 41986 - protein, 1631 aa, Homo sapiens
  Payload ID: 8539
  Gene Symbol: IQGAP3
  Gene Name: IQ motif containing GTPase activating protein 3
  Uniprot ID: Q86VI3
  ENSP ID: ENSP00000354451
MERRAAGPGWAAYERLTAEEMDEQRRQNVAYQYLCRLEEAKRWMEACLKEELPSPVELEESLRNGVLLAKLGHCFAPSVVPLKKIYDVEQLRYQATGLHFRHTDNINFWLSAIAHIGLPSTFFPETTDIYDKKNMPRVVYCIHALSLFLFRLGLAPQIHDLYGKVKFTAEELSNMASELAKYGLQLPAFSKIGGILANELSVDEAAVHAAVLAINEAVERGVVEDTLAALQNPSALLENLREPLAAVYQEMLAQAKMEKAANARNHDDRESQDIYDHYLTQAEIQGNINHVNVHGALEVVDDALERQSPEALLKALQDPALALRGVRRDFADWYLEQLNSDREQKAQELGLVELLEKEEVQAGVAAANTKGDQEQAMLHAVQRINKAIRRRVAADTVKELMCPEAQLPPVYPVASSMYQLELAVLQQQQGELGQEELFVAVEMLSAVVLINRALEARDASGFWSSLVNPATGLAEVEGENAQRYFDALLKLRQERGMGEDFLSWNDLQATVSQVNAQTQEETDRVLAVSLINEALDKGSPEKTLSALLLPAAGLDDVSLPVAPRYHLLLVAAKRQKAQVTGDPGAVLWLEEIRQGVVRANQDTNTAQRMALGVAAINQAIKEGKAAQTERVLRNPAVALRGVVPDCANGYQRALESAMAKKQRPADTAFWVQHDMKDGTAYYFHLQTFQGIWEQPPGCPLNTSHLTREEIQSAVTKVTAAYDRQQLWKANVGFVIQLQARLRGFLVRQKFAEHSHFLRTWLPAVIKIQAHWRGYRQRKIYLEWLQYFKANLDAIIKIQAWARMWAARRQYLRRLHYFQKNVNSIVKIQAFFRARKAQDDYRILVHAPHPPLSVVRRFAHLLNQSQQDFLAEAELLKLQEEVVRKIRSNQQLEQDLNIMDIKIGLLVKNRITLQEVVSHCKKLTKRNKEQLSDMMVLDKQKGLKSLSKEKRQKLEAYQHLFYLLQTQPIYLAKLIFQMPQNKTTKFMEAVIFSLYNYASSRREAYLLLQLFKTALQEEIKSKVEQPQDVVTGNPTVVRLVVRFYRNGRGQSALQEILGKVIQDVLEDKVLSVHTDPVHLYKNWINQTEAQTGQRSHLPYDVTPEQALSHPEVQRRLDIALRNLLAMTDKFLLAITSSVDQIPYGMRYVAKVLKATLAEKFPDATDSEVYKVVGNLLYYRFLNPAVVAPDAFDIVAMAAGGALAAPQRHALGAVAQLLQHAAAGKAFSGQSQHLRVLNDYLEETHLKFRKFIHRACQVPEPEERFAVDEYSDMVAVAKPMVYITVGELVNTHRLLLEHQDCIAPDHQDPLHELLEDLGELPTIPDLIGESIAADGHTDLSKLEVSLTLTNKFEGLEADADDSNTRSLLLSTKQLLADIIQFHPGDTLKEILSLSASREQEAAHKQLMSRRQACTAQTPEPLRRHRSLTAHSLLPLAEKQRRVLRNLRRLEALGLVSARNGYQGLVDELAKDIRNQHRHRHRRKAELVKLQATLQGLSTKTTFYEEQGDYYSQYIRACLDHLAPDSKSSGKGKKQPSLHYTAAQLLEKGVLVEIEDLPASHFRNVIFDITPGDEAGKFEVNAKFLGVDMERFQLHYQDLLQLQYEGVAVMKLFNKAKVNVNLLIFLLNKKFLRK

SEQ ID NO: 41987 - protein, 1588 aa, Homo sapiens
  Payload ID: 8539
  Gene Symbol: IQGAP3
  Gene Name: IQ motif containing GTPase activating protein 3
  ENSP ID: ENSP00000436603
MEACLKEELPSPVELEESLRNGVLLAKLGHCFAPSVVPLKKIYDVEQLRYQATGLHFRHTDNINFWLSAIAHIGLPSTFFPETTDIYDKKNMPRVVYCIHALSLFLFRLGLAPQIHDLYGKVKFTAEELSNMASELAKYGLQLPAFSKIGGILANELSVDEAAVHAAVLAINEAVERGVVEDTLAALQNPSALLENLREPLAAVYQEMLAQAKMEKAANARNHDDRESQDIYDHYLTQAEIQGNINHVNVHGALEVVDDALERQSPEALLKALQDPALALRGVRRDFADWYLEQLNSDREQKAQELGLVELLEKEEVQAGVAAANTKGDQEQAMLHAVQRINKAIRRRVAADTVKELMCPEAQLPPVYPVASSMYQLELAVLQQQQGELGQEELFVAVEMLSAVVLINRALEARDASGFWSSLVNPATGLAEVEGENAQRYFDALLKLRQERGMGEDFLSWNDLQATVSQVNAQTQEETDRVLAVSLINEALDKGSPEKTLSALLLPAAGLDDVSLPVAPRYHLLLVAAKRQKAQVTGDPGAVLWLEEIRQGVVRANQDTNTAQRMALGVAAINQAIKEGKAAQTERVLRNPAVALRGVVPDCANGYQRALESAMAKKQRPADTAFWVQHDMKDGTAYYFHLQTFQGIWEQPPGCPLNTSHLTREEIQSAVTKVTAAYDRQQLWKANVGFVIQLQARLRGFLVRQKFAEHSHFLRTWLPAVIKIQAHWRGYRQRKIYLEWLQYFKANLDAIIKIQAWARMWAARRQYLRRLHYFQKNVNSIVKIQAFFRARKAQDDYRILVHAPHPPLSVVRRFAHLLNQSQQDFLAEAELLKLQEEVVRKIRSNQQLEQDLNIMDIKIGLLVKNRITLQEVVSHCKKLTKRNKEQLSDMMVLDKQKGLKSLSKEKRQKLEAYQHLFYLLQTQPIYLAKLIFQMPQNKTTKFMEAVIFSLYNYASSRREAYLLLQLFKTALQEEIKSKVEQPQDVVTGNPTVVRLVVRFYRNGRGQSALQEILGKVIQDVLEDKVLSVHTDPVHLYKNWINQTEAQTGQRSHLPYDVTPEQALSHPEVQRRLDIALRNLLAMTDKFLLAITSSVDQIPYGMRYVAKVLKATLAEKFPDATDSEVYKVVGNLLYYRFLNPAVVAPDAFDIVAMAAGGALAAPQRHALGAVAQLLQHAAAGKAFSGQSQHLRVLNDYLEETHLKFRKFIHRACQVPEPEERFAVDEYSDMVAVAKPMVYITVGELVNTHRLLLEHQDCIAPDHQDPLHELLEDLGELPTIPDLIGESIAADGHTDLSKLEVSLTLTNKFEGLEADADDSNTRSLLLSTKQLLADIIQFHPGDTLKEILSLSASREQEAAHKQLMSRRQACTAQTPEPLRRHRSLTAHSLLPLAEKQRRVLRNLRRLEALGLVSARNGYQGLVDELAKDIRNQHRHRHRRKAELVKLQATLQGLSTKTTFYEEQGDYYSQYIRACLDHLAPDSKSSGKGKKQPSLHYTAAQLLEKGVLVEIEDLPASHFRNVIFDITPGDEAGKFEVNAKFLGVDMERFQLHYQDLLQLQYEGVAVMKLFNKAKVNVNLLIFLLNKKFLRK

SEQ ID NO: 41988 - protein, 1027 aa, Homo sapiens
  Payload ID: 8540
  Gene Symbol: IQCH
  Gene Name: IQ motif containing H
  Uniprot ID: Q86VS3
  ENSP ID: ENSP00000336861
MAQNTENHDPVGSILIQIHEDLYQLKEKLTKFSPEEKGETLDIQSLETAIKRTEVGLRIHIEKYLNVVNQNVLTTSVNDESLYTPQASKWLLPTVIDQKSFIFPQESEGTFWQPQRQHSSSLPVFPRAKIKVSKLIKGSNISSLTVLPSSHCTDPYFTPIPVLQADAHKGILSMIERGLIPPTARITFQNPPITPRAAPLHSFDEARKIPTVATFTIPREPPPSPAEVKFFPKKQRSKGKSRRSRGHHDRKAMKVKTPLRALKSLWDYDFLIYDGVIDNTAPDFLAFKEHFSLAWGGIFSLLEHVEKFLRNYAIPEVKIKGNNLVALLPEFELTNKLTRYDLLSVLEDPAHVQMLINLPGQRYKGQDGNSEAAMKIQATWKCYKARKFFLFYRQQKWASGVIAIAWLLYCHKTRLKKILKESRQRHLENFRIRAKHLAANWNRIRTSRRTIIHIPSLGYSQPVREHIADFNTQQNMQLGRLCDILDANVNVIYICSHHMNDELVLYYKKILSLHAAVKSGNLEDRSDLQDRFKIITPEAVNIFPKHHMCLATHLMYSPKAIKRIKNLIRGTEAYIVSGLLHRDDLAVADMLDIPILGSEPELAHLYSTKSGGKRVFDSANVAVPPGIYDIYSQQQMIEQLSQLITDHLQIQRWLFKMDSEFRGNGTAFCDIPSYLKCYKWVLKESSRYGLEDWRKKWAQEPALVKISEELAGILAQHAQPVNEKRFPTWRKFLQTFLSQGGVIEAFPPADNVTNLTVDMLIEPNGKISVLSTGDQLHAESPFISSGTTVPQTSVDPQVLTYLCLQIGKACRMRDVVGYFSIDLVTFIDPSTLEQQVWATGLNLAYSDQLALTQLTLYLTNGHLDCSLSTLEVPRFVPKERKKTKCMSALSMPMLATSRYAVMTTQLRHSNLSLVFHYVFLQICRAHGIGYDVEERQGTVFILYEHLKRHKLGMLTIGEDLQGVLMTFARHLFIIHQEISAPNMQGETNFKTTIADIETILRVTKENKMRFEEEQQSKDDKNLSKPKK

SEQ ID NO: 41989 - protein, 621 aa, Homo sapiens
  Payload ID: 8540
  Gene Symbol: IQCH
  Gene Name: IQ motif containing H
  Uniprot ID: Q86VS3
  ENSP ID: ENSP00000351617
MTKAMKVKTPLRALKSLWDYDFLIYDGVIDNTAPDFLAFKEHFSLAWGGIFSLLEHVEKFLRNYAIPEVKIKGNNLVALLPEFELTNKLTRYDLLSVLEDPAHVQMLINLPGQRYKGQDGNSEAAMKIQATWKCYKARKFFLFYRQQKWASGVIAIAWLLYCHKTRLKKILKESRQRHLENFRIRAKHLAANWNRIRTSRRTIIHIPSLGYSQPVREHIADFNTQQNMQLGRLCDILDANVNVIYICSHHMNDELVLYYKKILSLHAAVKSGNLEDRSDLQDRFKIITPEAVNIFPMIEQLSQLITDHLQIQRWLFKMDSEFRGNGTAFCDIPSYLKCYKWVLKESSRYGLEDWRKKWAQEPALVKISEELAGILAQHAQPVNEKRFPTWRKFLQTFLSQGGVIEAFPPADNVTNLTVDMLIEPNGKISVLSTGDQLHAESPFISSGTTVPQTSVDPQVLTYLCLQIGKACRMRDVVGYFSIDLVTFIDPSTLEQQVWATGLNLAYSDQLALTQLTLYLTNGHLDCSLSTLEVPRFVPKERKKTKCMSALSMPMLATSRYAVMTTQLRHSNLSLVFHYVFLQICRAHGIGYDVENNRRGSPGGPHDLCSPSLHHPSRNIST

SEQ ID NO: 41990 - protein, 60 aa, Homo sapiens
  Payload ID: 8540
  Gene Symbol: IQCH
  Gene Name: IQ motif containing H
  ENSP ID: ENSP00000421223
MAQNTENHDPVGSILIQIHEDLYQLKEKLTKFSPEEKGETLDIQSLETAIKRTEVGLRGF

SEQ ID NO: 41991 - protein, 168 aa, Homo sapiens
  Payload ID: 8540
  Gene Symbol: IQCH
  Gene Name: IQ motif containing H
  Uniprot ID: Q86VS3
  ENSP ID: ENSP00000427323
MAQNTENHDPVGSILIQIHEDLYQLKEKLTKFSPEEKGETLDIQSLETAIKRTEVGLRIHIEKYLNVVNQNVLTTSVNDESLYTPQASKWLLPTVIDQKSFIFPQESEGTFWQPQRQHSSSLPVFPRAKRKIGLNVKILQDPENIHHRAAVNANYGISLPYINQRKAC

SEQ ID NO: 41992 - protein, 170 aa, Homo sapiens
  Payload ID: 8540
  Gene Symbol: IQCH
  Gene Name: IQ motif containing H
  ENSP ID: ENSP00000441306
MAQNTENHDPVGSILIQIHEDLYQLKEKLTKFSPEEKGETLDIQSLETAIKRTEVGLRIHIEKYLNVVNQNVLTTSVNDESLYTPQASKWLLPTVIDQKSFIFPQESEGTFWQPQRQHSSSLPVFPRAKRKIGLNVKILQDPENIHHRAAVNANYGISLPYINQRKACGF

SEQ ID NO: 41993 - protein, 684 aa, Homo sapiens
  Payload ID: 8540
  Gene Symbol: IQCH
  Gene Name: IQ motif containing H
  Uniprot ID: Q86VS3
  ENSP ID: ENSP00000444118
MKVKTPLRALKSLWDYDFLIYDGVIDNTAPDFLAFKEHFSLAWGGIFSLLEHVEKFLRNYAIPEVKIKGNNLVALLPEFELTNKLTRYDLLSVLEDPAHVQMLINLPGQRYKGQDGNSEAAMKIQATWKCYKARKFFLFYRQQKWASGVIAIAWLLYCHKTRLKKILKESRQRHLENFRIRAKHLAANWNRIRTSRRTIIHIPSLGYSQPVREHIADFNTQQNMQLGRLCDILDANVNVIYICSHHMNDELVLYYKKILSLHAAVKSGNLEDRSDLQDRFKIITPEAVNIFPMIEQLSQLITDHLQIQRWLFKMDSEFRGNGTAFCDIPSYLKCYKWVLKESSRYGLEDWRKKWAQEPALVKISEELAGILAQHAQPVNEKRFPTWRKFLQTFLSQGGVIEAFPPADNVTNLTVDMLIEPNGKISVLSTGDQLHAESPFISSGTTVPQTSVDPQVLTYLCLQIGKACRMRDVVGYFSIDLVTFIDPSTLEQQVWATGLNLAYSDQLALTQLTLYLTNGHLDCSLSTLEVPRFVPKERKKTKCMSALSMPMLATSRYAVMTTQLRHSNLSLVFHYVFLQICRAHGIGYDVEERQGTVFILYEHLKRHKLGMLTIGEDLQGVLMTFARHLFIIHQEISAPNMQGETNFKTTIADIETILRVTKENKMRFEEEQQSKDDKNLSKPKK

SEQ ID NO: 41994 - protein, 19 aa, Homo sapiens
  Payload ID: 8540
  Gene Symbol: IQCH
  Gene Name: IQ motif containing H
  ENSP ID: ENSP00000453749
MAQNTENHDPVGSILIQGF

SEQ ID NO: 41995 - protein, 46 aa, Homo sapiens
  Payload ID: 8540
  Gene Symbol: IQCH
  Gene Name: IQ motif containing H
  ENSP ID: ENSP00000454387
KLTKFSPEEKGETLDIQSLETAIKRTEVGLRPLSLYLGNHLHLQQK

SEQ ID NO: 41996 - protein, 90 aa, Homo sapiens
  Payload ID: 8540
  Gene Symbol: IQCH
  Gene Name: IQ motif containing H
  ENSP ID: ENSP00000456293
TVFILYEHLKRHKLGMLTIGEDLQGVLMTFARHLFIIHQEISAPNMQGETNFKTTIADIETILRVTKENKMRFEEEQQSKDDKNLSKPKK

SEQ ID NO: 41997 - protein, 194 aa, Homo sapiens
  Payload ID: 8540
  Gene Symbol: IQCH
  Gene Name: IQ motif containing H
  ENSP ID: ENSP00000457425
  MOD_RES (1)..(1): Any amino acid
XFLFYRQQKWASGVIAIAWLLYCHKTRLKKILKESRQRHLENFRIRAKHLAANWNRIRTSRRTIIHIPSLGYSQPVREHIADFNTQQNMQLGRLCDILDANVNVIYICSHHMNDELVLYYKKILSLHAAVKSGNLEDRSDLQDRFKIITPEAVNIFPMIEQLSQLITDHLQIQRWLFKMDSEFRGNGTAFCDIP

SEQ ID NO: 41998 - protein, 305 aa, Homo sapiens
  Payload ID: 8540
  Gene Symbol: IQCH
  Gene Name: IQ motif containing H
  Uniprot ID: Q86VS3
  ENSP ID: ENSP00000486970
MIERGLIPPTARITFQNPPITPRAAPLHSFDEARKIPTVATFTIPREPPPSPAEVKFFPKKQRSKGKSRRSRGHHDRKAMKVKTPLRALKSLWDYDFLIYDGVIDNTAPDFLAFKEHFSLAWGGIFSLLEHVEKFLRNYAIPEVKIKGNNLVALLPEFELTNKLTRYDLLSVLEDPAHVQMLINLPGQRYKGQDGNSEAAMKIQATWKCYKARKFFLFYRQQKWASGVIAIAWLLYCHKTRLKKILKESRQRHLENFRIRAKHLAANWNRIRTSRRTIIHIPSLGITLLPANLSATSITHHIMAP

SEQ ID NO: 41999 - protein, 112 aa, Homo sapiens
  Payload ID: 8541
  Gene Symbol: IQCJ
  Gene Name: IQ motif containing J
  Uniprot ID: Q1A5X6
  ENSP ID: ENSP00000380932
MRLEELKRLQNPLEQVNDGKYSFENHQLAMDAENNIEKYPLNLQPLESKVKIIQRAWREYLQRQEPLGKRSPSPPSVSSEKLSSSVSMNTFSDSSTPVSVMFLFLCPDLTFN

SEQ ID NO: 42000 - protein, 159 aa, Homo sapiens
  Payload ID: 8541
  Gene Symbol: IQCJ
  Gene Name: IQ motif containing J
  Uniprot ID: Q1A5X6
  ENSP ID: ENSP00000402153
MRLEELKRLQNPLEQVNDGKYSFENHQLAMDAENNIEKYPLNLQPLESKVKIIQRAWREYLQRQEPLGKRSPSPPSVSSEKLSSSVSMNTFSDSSTPFARAPVGKIHPYISWRLQSPGDKLPGGRKVILLYLDQLARPTGFIHTLKEPQIERLGFLTLQ

SEQ ID NO: 42001 - protein, 132 aa, Homo sapiens
  Payload ID: 8541
  Gene Symbol: IQCJ
  Gene Name: IQ motif containing J
  Uniprot ID: Q1A5X6
  ENSP ID: ENSP00000418141
MRLEELKRLQNPLEQVNDGKYSFENIQRAWREYLQRQEPLGKRSPSPPSVSSEKLSSSVSMNTFSDSSTPFARAPVGKIHPYISWRLQSPGDKLPGGRKVILLYLDQLARPTGFIHTLKEPQIERLGFLTLQ

SEQ ID NO: 42002 - protein, 189 aa, Homo sapiens
  Payload ID: 8542
  Gene Symbol: IQCK
  Gene Name: IQ motif containing K
  Uniprot ID: Q8N0W5
  ENSP ID: ENSP00000309261
MAAPRQIPSHIVRLKPSCSTDSSFTRTPVPTVSLASRELPVSSWQVTEPSSKNLWEQICKEYEAEQPPFPEGYKVKQEPVITVAPVEEMLFHGFSAEHYFPVSHFTMISRTPCPQDKSETINPKTCSPKEYLETFIFPVLLPGMASLLHQAKKEKCFEPTAANPTLAPADRRGSSPLHSILLESLCGSL

SEQ ID NO: 42003 - protein, 287 aa, Homo sapiens
  Payload ID: 8542
  Gene Symbol: IQCK
  Gene Name: IQ motif containing K
  Uniprot ID: Q8N0W5
  ENSP ID: ENSP00000324901
MAAPRQIPSHIVRLKPSCSTDSSFTRTPVPTVSLASRELPVSSWQVTEPSSKNLWEQICKEYEAEQPPFPEGYKVKQEPVITVAPVEEMLFHGFSAEHYFPVSHFTMISRTPCPQDKSETINPKTCSPKEYLETFIFPVLLPGMASLLHQAKKEKCFERKRTKFIACDFLTEWLYNQNPKRAGEPFTEFFSIPFVEERLKQHPRPPIPLSLLLTEEEAALYIQSFWRACVVRCDPEIQELRQWQKKLREAKHIHQQVKIFWAKQEQKVKCKMEDDAVPAAKMKIPSS

SEQ ID NO: 42004 - protein, 58 aa, Homo sapiens
  Payload ID: 8542
  Gene Symbol: IQCK
  Gene Name: IQ motif containing K
  ENSP ID: ENSP00000455504
AEETSRGQAHSPASQNFLGQARTKSEMQNGGRCSTCSQDENSIILTIAKTMQQSAGGR

SEQ ID NO: 42005 - protein, 94 aa, Homo sapiens
  Payload ID: 8542
  Gene Symbol: IQCK
  Gene Name: IQ motif containing K
  ENSP ID: ENSP00000456448
MAAPRQIPSHIVRLKPSCSTDSSFTRTPVPTVSLASRELPVSSWQVTEPSSKNLWEQICKGCASRGNAFSWLQCRALFSGFPFHHDLTYTLSSR

SEQ ID NO: 42006 - protein, 167 aa, Homo sapiens
  Payload ID: 8542
  Gene Symbol: IQCK
  Gene Name: IQ motif containing K
  ENSP ID: ENSP00000457506
  MOD_RES (1)..(1): Any amino acid
XPSHIVRLKPSCSTDSSFTRTPVPTVSLASRELPVSSWQVTEPSSKNLWEQICKEYEAEQPPFPEGYKVKQEPVITVAPVEEMLFHGFSAEHYFPVSHFTMISRTPCPQDKSETINPKTCSPKEYLETFIFPVLLPGMASLLHQAKKEKCFEIDCSPWHLSTPCQLS

SEQ ID NO: 42007 - protein, 94 aa, Homo sapiens; identical to SEQ ID NO: 42005
  Payload ID: 8542
  Gene Symbol: IQCK
  Gene Name: IQ motif containing K
  ENSP ID: ENSP00000457519

SEQ ID NO: 42008 - protein, 123 aa, Homo sapiens
  Payload ID: 8542
  Gene Symbol: IQCK
  Gene Name: IQ motif containing K
  ENSP ID: ENSP00000458010
  MOD_RES (1)..(1): Any amino acid
XPRQIPSHIVRLKPSCSTDSSFTRTPVPTVSLASRELPVSSWQVTEPSSKNLWEQICKEYEAEQPPFPEGYKVKQEPVITVAPVEEMLFHGFSAEHYFPVSHFTMISRTPCPQDKSETINPKT

SEQ ID NO: 42009 - protein, 282 aa, Homo sapiens
  Payload ID: 8542
  Gene Symbol: IQCK
  Gene Name: IQ motif containing K
  ENSP ID: ENSP00000458669
MAAPRQIPSHIVRLKPSCSTDSSFTRTPVPTVSLASRELPVSSWQVTEPSSKNLWEQICKEYEAEQPPFPEGYKVKQEPVITVAPVEEMLFHGFSAEHYFPVSHFTMISRTPCPQDKSETINPKTCSPKEYLETFIFPVLLPGMASLLHQAKKEKCFERKRTKFIACDFLTEWLYNQNPKRAGEPFTEFFSIPFVEERLKQHPRPPIPLSLLLTEEEAALYIQSFWRACVVRCDPEIQELRQWQKKLREAKHIHQQVKIFWAKQEQKGKLLDSLSLVHSRKA

SEQ ID NO: 42010 - protein, 679 aa, Homo sapiens
  Payload ID: 8543
  Gene Symbol: IQCA1
  Gene Name: IQ motif containing with AAA domain 1
  Uniprot ID: Q86XH1
  ENSP ID: ENSP00000254653
MSNAMYNKMWHQTQEALGALLDKEPQKMIEPQRNQVFIFQTLATFYVKYVQIFRNLENVYDQFVHPQKRILIRKVLDGVMGRILELKNEMVELELTEFHYFDDILQDLKLAPQQLDIPIPKYFLKEKLEVIKGREKILAQILADSGIDTSDMKYPVKSIPFDEAVKLIQIAERARQGRLRALFMKQIYLQEYRAKQSKMLGKKVTDTWAAALRIQKVWRRFHQRKETEKLREEEMIFLGMNPPPLFNEVSATVIQAEKVDRLRNEVQIKHEEDYREALVTIKNDLKLIEGVDIKENLQDQIRHWFIECRNLTGTFPDYPDVEEGGSAIIFSDKTIQQVIEDIIANQEEEEKNKKKKKKKEKQPKKAKKQKKGTKEKNKEEDEKWKMSPSLFLPAMKEGCNAYKEIWMKKDESWNFSQDYDPELIKEEKRKELQSEIRIQVDELMRQELKNLKLAVDRERERPVKAGKKKDKKKGKKGKKKEKKAKKDKDLTADRTIESLYKELVEEGLLIQALKVNLSDYIGEYSYLGTTLRQVSIEPMPSLLDVRQLITLYGIWPLGSAAVHEKAPLVKSLLLAGPSGVGKKMLVHAICTETGANLFNLSSSNIAGKYPGKNGLQMMLHAVFKVARQLQPSVVWIEDTEKTFYKKVPNAEKMFTPSAGEVAALQKNLKRSTSRMNLNA

SEQ ID NO: 42011 - protein, 781 aa, Homo sapiens
  Payload ID: 8543
  Gene Symbol: IQCA1
  Gene Name: IQ motif containing with AAA domain 1
  Uniprot ID: Q86XH1
  ENSP ID: ENSP00000311951
MSNAMYNKMWHQTQEALGALLDKEPQKMIEPQRNQVFIFQTLATFYVKYVQIFRNLENVYDQFVHPQKRILIRKVLDGVMGRILELKNEMVELELTEFHYFDDILQDLKLAPQQLDIPIPKYFLKEKLEVIKGREKILAQILADSGIDTSDMKYPVKSIPFDEAVKLIQIAERARQGRLRALFMKQIYLQEYRAKQSKMLGKKVTDTWAAALRIQKVWRRFHQRKETEKLREEEMIFLGMNPPPLFNEVSATVIQAEKVDRLRNEVQIKHEEDYREALVTIKNDLKLIEGVDIKENLQDQIRHWFIECRNLTGTFPDYPDVEEGGSAIIFSDKTIQQEEDEKWKMSPSLFLPAMKEGCNAYKEIWMKKDESWNFSQDYDPELIKEEKRKELQSEIRIQVDELMRQELKNLKLAVDRERERPVKAGKKKDKKGKKGKKKEKKAKKDKDLTADRTIESLYKELVEEGLLIQALKVNLSDYIGEYSYLGTTLRQVSIEPMPSLLDVRQLITLYGIWPLGSAAVHEKAPLVKSLLLAGPSGVGKKMLVHAICTETGANLFNLSSSNIAGKYPGKNGLQMMLHAVFKVARQLQPSVVWIEDTEKTFYKKVPNAEKMNEPKRLKKHLPQILKLLKPDDRILIVGTTRRPFDAELQSFCKVYQKIILVPRPDYASRYVLWKQIIERNGGVLTSALNVSCLAKVTDGFTQGHIVEVVKGVLTDQRIRRQIHKPLTAVEFITAITSMNPVYKEEEESFKNWYAKTPLGKKRALAITGGSTEKAKDKGKRK

SEQ ID NO: 42012 - protein, 822 aa, Homo sapiens
  Payload ID: 8543
  Gene Symbol: IQCA1
  Gene Name: IQ motif containing with AAA domain 1
  Uniprot ID: Q86XH1
  ENSP ID: ENSP00000387347
MSNAMYNKMWHQTQEALGALLDKEPQKMIEPQRNQVFIFQTLATFYVKYVQIFRNLENVYDQFVHPQKRILIRKVLDGVMGRILELKNEMVELELTEFHYFDDILQDLKLAPQQLDIPIPKYFLKEKLEVIKGREKILAQILADSGIDTSDMKYPVKSIPFDEAVKLIQIAERARQGRLRALFMKQIYLQEYRAKQSKMLGKKVTDTWAAALRIQKVWRRFHQRKETEKLREEEMIFLGMNPPPLFNEVSATVIQAEKVDRLRNEVQIKHEEDYREALVTIKNDLKLIEGVDIKENLQDQIRHWFIECRNLTGTFPDYPDVEEGGSAIIFSDKTIQQVIEDIIANQEEEEKNKKKKKKKEKQPKKAKKQKKGTKEKNKEEDEKWKMSPSLFLPAMKEGCNAYKEIWMKKDESWNFSQDYDPELIKEEKRKELQSEIRIQVDELMRQELKNLKLAVDRERERPVKAGKKKDKKGKKGKKKEKKAKKDKDLTADRTIESLYKELVEEGLLIQALKVNLSDYIGEYSYLGTTLRQVSIEPMPSLLDVRQLITLYGIWPLGSAAVHEKAPLVKSLLLAGPSGVGKKMLVHAICTETGANLFNLSSSNIAGKYPGKNGLQMMLHAVFKVARQLQPSVVWIEDTEKTFYKKVPNAEKMNEPKRLKKHLPQILKLLKPDDRILIVGTTRRPFDAELQSFCKVYQKIILVPRPDYASRYVLWKQIIERNGGVLTSALNVSCLAKVTDGFTQGHIVEVVKGVLTDQRIRRQIHKPLTAVEFITAITSMNPVYKEEEESFKNWYAKTPLGKKRALAITGGSTEKAKDKGKRK

SEQ ID NO: 42013 - protein, 536 aa, Homo sapiens
  Payload ID: 8543
  Gene Symbol: IQCA1
  Gene Name: IQ motif containing with AAA domain 1
  ENSP ID: ENSP00000390964
  MOD_RES (1)..(1): Any amino acid
XQSRGKRVWWKEMTPSLSAEENRMYNKMWHQTQEALGALLDKEPQKMIEPQRNQVFIFQTLATFYVKYVQIFRNLENVYDQFVHPQKRILIRKVLDGVMGRILELKNEMVELELTEFHYFDDILQDLKLAPQQLDIPIPKYFLKEKLEVIKGREKILAQILADSGIDTSDMKYPVKSIPFDEAVKLIQIAERARQGRLRALFMKQIYLQEYRAKQSKMLGKKVTDTWAAALRIQKVWRRFHQRKETEKLREEEMIFLGMNPPPLFNEVSATVIQAEKVDRLRNEVQIKHEEDYREALVTIKNDLKLIEGVDIKENLQDQIRHWFIECRNLTGTFPDYPDVEEGGSAIIFSDKTIQQVIEDIIANQEEEEKNKKKKKKKEKQPKKAKKQKKGTKEKNKEEDEKWKMSPSLFLPAMKEGCNAYKEIWMKKDESWNFSQDYDPELIKEEKRKELQSEIRIQVDELMRQELKNLKLAVDRERERPVKAGKKKDKKKGKKGKKKEKKAKKDKDLTADRTIESLYKELVEEGLLIQALKVNL

SEQ ID NO: 42014 - protein, 830 aa, Homo sapiens
  Payload ID: 8543
  Gene Symbol: IQCA1
  Gene Name: IQ motif containing with AAA domain 1
  ENSP ID: ENSP00000407213
MTPSLSAEENRMYNKMWHQTQEALGALLDKEPQKMIEPQRNQVFIFQTLATFYVKYVQIFRNLENVYDQFVHPQKRILIRKVLDGVMGRILELKNEMVELELTEFHYFDDILQDLKLAPQQLDIPIPKYFLKEKLEVIKGREKILAQILADSGIDTSDMKYPVKSIPFDEAVKLIQIAERARQGRLRALFMKQIYLQEYRAKQSKMLGKKVTDTWAAALRIQKVWRRFHQRKETEKLREEEMIFLGMNPPPLFNEVSATVIQAEKVDRLRNEVQIKHEEDYREALVTIKNDLKLIEGVDIKENLQDQIRHWFIECRNLTGTFPDYPDVEEGGSAIIFSDKTIQQVIEDIIANQEEEEKNKKKKKKKEKQPKKAKKQKKGTKEKNKEEDEKWKMSPSLFLPAMKEGCNAYKEIWMKKDESWNFSQDYDPELIKEEKRKELQSEIRIQVDELMRQELKNLKLAVDRERERPVKAGKKKDKKKGKKGKKKEKKAKKDKDLTADRTIESLYKELVEEGLLIQALKVNLSDYIGEYSYLGTTLRQVSIEPMPSLLDVRQLITLYGIWPLGSAAVHEKAPLVKSLLLAGPSGVGKKMLVHAICTETGANLFNLSSSNIAGKYPGKNGLQMMLHAVFKVARQLQPSVVWIEDTEKTFYKKVPNAEKMNEPKRLKKHLPQILKLLKPDDRILIVGTTRRPFDAELQSFCKVYQKIILVPRPDYASRYVLWKQIIERNGGVLTSALNVSCLAKVTDGFTQGHIVEVVKGVLTDQRIRRQIHKPLTAVEFITAITSMNPVYKEEEESFKNWYAKTPLGKKRALAITGGSTEKAKDKGKRK

SEQ ID NO: 42015 - protein, 121 aa, Homo sapiens
  Payload ID: 8544
  Gene Symbol: IQCA1L
  Gene Name: IQ motif containing with AAA domain 1 like
  ENSP ID: ENSP00000479307
  MOD_RES (1)..(1): Any amino acid
XLYAVLRLGSPDIHIMAPLIRSILLVGPSGMGKKMLVKAVCTETGANLFDLSPENLLGKYPGRNGAQMMVHIVFKVRSPQLLAFAVLRPVATKEGGFEVTSPISLLGSPTPTALCDLDWKC

SEQ ID NO: 42016 - protein, 818 aa, Homo sapiens
  Payload ID: 8544
  Gene Symbol: IQCA1L
  Gene Name: IQ motif containing with AAA domain 1 like
  ENSP ID: ENSP00000482119
MSEGAYQRLWESSHATLQELLDQEQLLLEPAPDRERQSFQYRLASLYLHYLGLLRRFDTVYDQMVQPQKRRLLRRLLDGVAGRVLELKDELVRADLCENHCLDRVLQDFKLTPADLEVPIPKYFLLEQSTTVRERGLILAEILSRLEPVSSQKSFTGMHRTEAIILVQKAERARQGRLRATFMREIRRDEEQDGRIREDGWHKFSQGQAAVTIQKVWKGYLQRKRTQQDRRMEMEFIGMLPSPNQVEHLSIISQPCLVEDVQRLRQMEKEEEFRAAMVKAHDSLVETEGPDMKEKMKEQIRQWFIECHDLTGRFPDYPDASSGGSYSIFADKTPEQVRMELEMQMQENRKKEQEKSKEKGKDEKEKKKGKEEKAKKGEVDAVLQVLPSKCIPMICAGHEEYLNTWKNRCESIHPSQNYDSETLREEKRKEVELEIRIQVDELMRQELRKLRLAVDKEEERPLRAPKKTPGKKTGKKKEKDLTSDRSVESLYEELVISGLLRKSESVALKDYIGDFLYLGSTLSLVKKLPMPSLFDIRQNVALYAVLRLGSPDIHIMAPLIRSILLVGPSGMGKKMLVKAVCTETGANLFDLSPENLLGKYPGRNGAQMMVHIVFKVARLLQPSVIWIGNAEKNFYKKTPKEDKEMDPKRIKKDLTKALRLLTPGDRVMLIGTTSRPQLAEMRGLCRVYERILFMPRPDYASRYVLWKRMIEARGIQPTQHLDISALAKVSDGYTPGHILQAIQSVLSERRFLQLSKRPLVASEFLGQLVKLDPVYREEEESLKDWYFKTPLGKKSMKHRMDQLEAEEAKLDKEKKKRK

SEQ ID NO: 42017 - protein, 118 aa, Homo sapiens
  Payload ID: 8544
  Gene Symbol: IQCA1L
  Gene Name: IQ motif containing with AAA domain 1 like
  ENSP ID: ENSP00000484243
  MOD_RES (1)..(1): Any amino acid
XQENRKKEQEKSKEKGKDEKEKKKGKEEKAKKGEVDAVLQVLPSKCIPMICAGHEEYLNTWKNRCESIHPSQNYDSETLREEKRKEVELEIRIQVTKTSAGDLRFEFHLGASPHVEGC

SEQ ID NO: 42018 - protein, 487 aa, Homo sapiens
  Payload ID: 8545
  Gene Symbol: IQCJ-SCHIP1
  Gene Name: IQCJ-SCHIP1 readthrough
  ENSP ID: ENSP00000337239
MERSGQRVTTWDCDQGKHSDSDYREDGMDLGSDAGSSSSSSRASSQSNSTKVTPCSECKSSSSPGGSLDLVSALEDYEEPFPVYQKKVIDEWAPEEDGEEEEEEDERDQRGYRDDRSPAREPGDVSARTRSGGGGGRSATTAMPPPVPNGNLHQHDPQDLRHNGNVVVAGRPSCSRGPRRAIQKPQPAGGRRSGRGPAAGGLCLQPPDGGTCVPEEPPVPPMDWEALEKHLAGLQFREQEVRNQGQARTNSTSAQKNERESIRQKLALGSFFDDGPGIYTSCSKSGKPSLSSRLQSGMNLQICFVNDSGSDKDSDADDSKTETSLDTPLSPMSKQSSSYSDRDTTEEESESLDDMDFLTRQKKLQAEAKMALAMAKPMAKMQVEVEKQNRKKSPVADLLPHMPHISECLMKRSLKPTDLRDMTIGQLQVIVNDLHSQIESLNEELVQLLLIRDELHTEQDAMLVDIEDLTRHAESQQKHMAEKMPAK

SEQ ID NO: 42019 - protein, 474 aa, Homo sapiens
  Payload ID: 8545
  Gene Symbol: IQCJ-SCHIP1
  Gene Name: IQCJ-SCHIP1 readthrough
  ENSP ID: ENSP00000400942
MERSGQRVTTWDCDQGKHSDSDYREDGMDLGSDAGSSSSSSRASSQSNSTKVTPCSECKSSSSPGGSLDLVSALEDYEEPFPVYQKKVIDEWAPEEDGEEEEEEDERDQRGYRDDRSPAREPGDVSARTRSGGGGGRSATTAMPPPVPNGNLHQHDPQDLRHNGNVVVAGRPSCSRGPRRAIQKPQPAGGRRSGRGPAAGGLCLQPPDGGTCVPEEPPVPPMDWEALEKHLAGLQFREQEAQKNERESIRQKLALGSFFDDGPGIYTSCSKSGKPSLSSRLQSGMNLQICFVNDSGSDKDSDADDSKTETSLDTPLSPMSKQSSSYSDRDTTEEESESLDDMDFLTRQKKLQAEAKMALAMAKPMAKMQVEVEKQNRKKSPVADLLPHMPHISECLMKRSLKPTDLRDMTIGQLQVIVNDLHSQIESLNEELVQLLLIRDELHTEQDAMLVDIEDLTRHAESQQKHMAEKMPAK

SEQ ID NO: 42020 - protein, 143 aa, Homo sapiens
  Payload ID: 8545
  Gene Symbol: IQCJ-SCHIP1
  Gene Name: IQCJ-SCHIP1 readthrough
  ENSP ID: ENSP00000417080
MDLGSDAGSSSSSSRASSQSNSTKVTPCSECKSSSSPGGSLDLVSALEDYEEPFPVYQKKVIDEWAPEEDGEEEEEEDERDQRGYRDDRSPAREPGDVSARTRSGGGGGRSATTAMPPPVPNGNLHQHDPQDLRHNGNVVVAG

SEQ ID NO: 42021 - protein, 451 aa, Homo sapiens
  Payload ID: 8545
  Gene Symbol: IQCJ-SCHIP1
  Gene Name: IQCJ-SCHIP1 readthrough
  ENSP ID: ENSP00000417305
MDLGSDAGSSSSSSRASSQSNSTKVTPCSECKSSSSPGGSLDLVSALEDYEEPFPVYQKKVIDEWAPEEDGEEEEEEDERDQRGYRDDRSPAREPGDVSARTRSGGGGGRSATTAMPPPVPNGNLHQHDPQDLRHNGNVVVAGRPSCSRGPRRAIQKPQPAGGRRSGRGPAAGGLCLQPPDGGTCVPEEPPVPPMDWEALEKHLAGLQFREQEAQKNERESIRQKLALGSFFDDGPGIYTSCSKSGKPSLSSRLQSGMNLQICFVNDSGSDKDSDADDSKTETSLDTPLSPMSKQSSSYSDRDTTEEESESLDDMDFLTRQKKLQAEAKMALAMAKPMAKMQVEVEKQNRKKSPVADLLPHMPHISECLMKRSLKPTDLRDMTIGQLQVIVNDLHSQIESLNEELVQLLLIRDELHTEQDAMLVDIEDLTRSVWLHSCQRRKAQGGLKSKN

SEQ ID NO: 42022 - protein, 167 aa, Homo sapiens
  Payload ID: 8545
  Gene Symbol: IQCJ-SCHIP1
  Gene Name: IQCJ-SCHIP1 readthrough
  ENSP ID: ENSP00000418452
MDLGSDAGSSSSSSRASSQSNSTKVTPCSECKSSSSPGGSLDLVSALEDYEEPFPVYQKKVIDEWAPEEDGEEEEEEDERDQRGYRDDRSPAREPGDVSARTRSGGGGGRSATTAMPPPVPNGNLHQHDPQDLRHNGNVVVAGRPSCSRGPRRAIQKPQPAGGRRSG

SEQ ID NO: 42023 - protein, 100 aa, Homo sapiens
  Payload ID: 8545
  Gene Symbol: IQCJ-SCHIP1
  Gene Name: IQCJ-SCHIP1 readthrough
  ENSP ID: ENSP00000418570
  MOD_RES (1)..(1): Any amino acid
XGTRARRGPTPPPHRKMRESLSDRSWHLEASLMMAQEFIPAVAKVGSQAFPPGLNEELVQLLLIRDELHTEQDAMLVDIEDLTRHAESQQKHMAEKMPAK

SEQ ID NO: 42024 - protein, 536 aa, Homo sapiens
  Payload ID: 8545
  Gene Symbol: IQCJ-SCHIP1
  Gene Name: IQCJ-SCHIP1 readthrough
  ENSP ID: ENSP00000418692
MRLEELKRLQNPLEQVNDGKYSFENIQRAWREYLQRQEPLGKRSPSPPSVSSEKLSSSVSMNTFSDSSTPDYREDGMDLGSDAGSSSSSSRASSQSNSTKVTPCSECKSSSSPGGSLDLVSALEDYEEPFPVYQKKVIDEWAPEEDGEEEEEEDERDQRGYRDDRSPAREPGDVSARTRSGGGGGRSATTAMPPPVPNGNLHQHDPQDLRHNGNVVVAGRPSCSRGPRRAIQKPQPAGGRRSGRGPAAGGLCLQPPDGGTCVPEEPPVPPMDWEALEKHLAGLQFREQEVRNQGQARTNSTSAQKNERESIRQKLALGSFFDDGPGIYTSCSKSGKPSLSSRLQSGMNLQICFVNDSGSDKDSDADDSKTETSLDTPLSPMSKQSSSYSDRDTTEEESESLDDMDFLTRQKKLQAEAKMALAMAKPMAKMQVEVEKQNRKKSPVADLLPHMPHISECLMKRSLKPTDLRDMTIGQLQVIVNDLHSQIESLNEELVQLLLIRDELHTEQDAMLVDIEDLTRHAESQQKHMAEKMPAK

SEQ ID NO: 42025 - protein, 158 aa, Homo sapiens
  Payload ID: 8545
  Gene Symbol: IQCJ-SCHIP1
  Gene Name: IQCJ-SCHIP1 readthrough
  ENSP ID: ENSP00000419125
MQMEELKRLQNPLEQVNDGKYSFENIQRAWREYLQRQEPLGKRSPSPPSVSSEKLSSSVSMNTFSDSSTPDYREDGMDLGSDAGSSSSSSRASSQSNSTKVTPCSECKSSSSPGGSLDLVSALEDYEEPFPVYQKKVIDEWAPEEDGEEEEEEDERDQ

SEQ ID NO: 42026 - protein, 153 aa, Homo sapiens
  Payload ID: 8545
  Gene Symbol: IQCJ-SCHIP1
  Gene Name: IQCJ-SCHIP1 readthrough
  ENSP ID: ENSP00000419349
MQMEELKRLQNPLEQVNDGKYSFENHQLAMDAENNIEKYPLNLQPLESKVKIIQRAWREYLQRQEPLGKRSPSPPSVSSEKLSSSVSMNTFSDSSTPDYREDGMDLGSDAGSSSSSSRASSQSNSTKVTPCSECKSSSSPGGSLDLVSALEDY

SEQ ID NO: 42027 - protein, 101 aa, Homo sapiens
  Payload ID: 8545
  Gene Symbol: IQCJ-SCHIP1
  Gene Name: IQCJ-SCHIP1 readthrough
  ENSP ID: ENSP00000419668
MRLEELKRLQNPLEQVNDGKYSFENHQLAMDAENNIEKYPLNLQPLESKHSASMARVPAAAGAPGEEEPVPTLCLLREAEQLCQHEHLLRQQHTRLPRGWD

SEQ ID NO: 42028 - protein, 563 aa, Homo sapiens
  Payload ID: 8545
  Gene Symbol: IQCJ-SCHIP1
  Gene Name: IQCJ-SCHIP1 readthrough
  ENSP ID: ENSP00000420182
MRLEELKRLQNPLEQVNDGKYSFENHQLAMDAENNIEKYPLNLQPLESKVKIIQRAWREYLQRQEPLGKRSPSPPSVSSEKLSSSVSMNTFSDSSTPDYREDGMDLGSDAGSSSSSSRASSQSNSTKVTPCSECKSSSSPGGSLDLVSALEDYEEPFPVYQKKVIDEWAPEEDGEEEEEEDERDQRGYRDDRSPAREPGDVSARTRSGGGGGRSATTAMPPPVPNGNLHQHDPQDLRHNGNVVVAGRPSCSRGPRRAIQKPQPAGGRRSGRGPAAGGLCLQPPDGGTCVPEEPPVPPMDWEALEKHLAGLQFREQEVRNQGQARTNSTSAQKNERESIRQKLALGSFFDDGPGIYTSCSKSGKPSLSSRLQSGMNLQICFVNDSGSDKDSDADDSKTETSLDTPLSPMSKQSSSYSDRDTTEEESESLDDMDFLTRQKKLQAEAKMALAMAKPMAKMQVEVEKQNRKKSPVADLLPHMPHISECLMKRSLKPTDLRDMTIGQLQVIVNDLHSQIESLNEELVQLLLIRDELHTEQDAMLVDIEDLTRHAESQQKHMAEKMPAK

SEQ ID NO: 42029 - protein, 91 aa, Homo sapiens
  Payload ID: 8545
  Gene Symbol: IQCJ-SCHIP1
  Gene Name: IQCJ-SCHIP1 readthrough
  ENSP ID: ENSP00000420478
MDAENNIEKYPLNLQPLESKVKIIQRAWREYLQRQEPLGKRSPSPPSVSSEKLSSSVSMNTFSDSSTPDYREDGMDLGSDAGSSSSSSRAS

SEQ ID NO: 42030 - protein, 255 aa, Homo sapiens
  Payload ID: 8545
  Gene Symbol: IQCJ-SCHIP1
  Gene Name: IQCJ-SCHIP1 readthrough
  ENSP ID: ENSP00000436076
MERSGQRVTTWDCDQGKHSDSAQKNERESIRQKLALGSFFDDGPGIYTSCSKSGKPSLSSRLQSGMNLQICFVNDSGSDKDSDADDSKTETSLDTPLSPMSKQSSSYSDRDTTEEESESLDDMDFLTRQKKLQAEAKMALAMAKPMAKMQVEVEKQNRKKSPVADLLPHMPHISECLMKRSLKPTDLRDMTIGQLQVIVNDLHSQIESLNEELVQLLLIRDELHTEQDAMLVDIEDLTRHAESQQKHMAEKMPAK

SEQ ID NO: 42031 - protein, 438 aa, Homo sapiens
  Payload ID: 8546
  Gene Symbol:
  Gene Name: Iron/zinc purple acid phosphatase-like protein  [Source: UniProtKB/Swiss-Prot
  Acc:Q6ZNF0]
  Uniprot ID: Q6ZNF0
  ENSP ID: ENSP00000327557
MHPLPGYWSCYCLLLLFSLGVQGSLGAPSAAPEQVHLSYPGEPGSMTVTWTTWVPTRSEVQFGLQPSGPLPLRAQGTFVPFVDGGILRRKLYIHRVTLRKLLPGVQYVYRCGSAQGWSRRFRFRALKNGAHWSPRLAVFGDLGADNPKAVPRLRRDTQQGMYDAVLHVGDFAYNLDQDNARVGDRFMRLIEPVAASLPYMTCPGNHEERYNFSNYKARFSMPGDNEGLWYSWDLGPAHIISFSTEVYFFLHYGRHLVQRQFRWLESDLQKANKNRAARPWIITMGHRPMYCSNADLDDCTRHESKVRKGLQGKLYGLEDLFYKYGVDLQLWAHEHSYERLWPIYNYQVFNGSREMPYTNPRGPVHIITGSAGCEERLTPFAVFPRPWSAVRVKEYGYTRLHILNGTHIHIQQVSDDQDGKIVDDVWVVRPLFGRRMYL

SEQ ID NO: 42032 - protein, 367 aa, Homo sapiens
  Payload ID: 8546
  Gene Symbol:
  Gene Name: Iron/zinc purple acid phosphatase-like protein  [Source: UniProtKB/Swiss-Prot
  Acc:Q6ZNF0]
  ENSP ID: ENSP00000469048
MHPLPGYWSCYCLLLLFSLGVQGSLGAPSAAPEQVHLSYPGEPGSMTVTWTTWVPTRSEVQFGLQPSGPLPLRAQGTFVPFVDGGILRRKLYIHRVTLRKLLPGVQYVYRCGSAQGWSRRFRFRALKNGAHWSPRLAVFGDLGADNPKAVPRLRRDTQQGMYDAVLHVATSLTTRLASACRGIMRACGTGNVGVLGDWPSPLKDGRCRGALVPDPCPLTPPAGIWVPPTSSPSPPRSISFSIMAATWYRGSFAGWRATSRKPIRTGQPGRGSSLWGTGPCTAPTQIWTTAHDMKARSAKASKASCTGWRIFSTNMEWICSCGLMSTRMNDCGQFTTTRYLTAAERCPTPTREGLSTSSQDLLAVRSG

SEQ ID NO: 42033 - protein, 227 aa, Homo sapiens
  Payload ID: 8546
  Gene Symbol:
  Gene Name: Iron/zinc purple acid phosphatase-like protein  [Source: UniProtKB/Swiss-Prot
  Acc:Q6ZNF0]
  ENSP ID: ENSP00000470089
  MOD_RES (1)..(1): Any amino acid
XGADNPKAVPRLRRDTQQGMYDAVLHVGDFAYNLDQDNARVGDRFMRLIEPVAASLPYMTCPGNHEERYNFSNYKARFSMPGDNEGLWYSWDLGPAHIISFSTEVYFFLHYGRHLVQRQFRWLESDLQKANKNRAARPWIITMGHRPMYCSNADLDDCTRHESKVRKGLQGKLYGLEDLFYKYGVDLQLWAHEHSYERLWPIYNYQDGKIVDDVWVVRPLFGRRMYL

SEQ ID NO: 42034 - protein, 334 aa, Homo sapiens
  Payload ID: 8546
  Gene Symbol:
  Gene Name: Iron/zinc purple acid phosphatase-like protein  [Source: UniProtKB/Swiss-Prot
  Acc:Q6ZNF0]
  ENSP ID: ENSP00000470989
MHPLPGYWSCYCLLLLFSLGVQGSLGAPSAAPEQVHLSYPGEPGSMTVTWTTWVPTRSEVQFGLQPSGPLPLRAQGTFVPFVDGGILRRKLYIHRVTLRKLLPGVQYVYRCGSAQGWSRRFRFRALKNGAHWSPRLAVFGDLGADNPKAVPRLRRDTQQGMYDAVLHVATSLTTRLASACRGIMRACGTAGIWVPPTSSPSPPRSISFSIMAATWYRGSFAGWRATSRKPIRTGQPGRGSSLWGTGPCTAPTQIWTTAHDMKARSAKASKASCTGWRIFSTNMEWICSCGLMSTRMNDCGQFTTTRYLTAAERCPTPTREGLSTSSQDLLMGRS

SEQ ID NO: 42035 - protein, 963 aa, Homo sapiens
  Payload ID: 8547
  Gene Symbol: IREB2
  Gene Name: iron-responsive element binding protein 2
  ENSP ID: ENSP00000258886
MDAPKAGYAFEYLIETLNDSSHKKFFDVSKLGTKYDVLPYSIRVLLEAAVRNCDGFLMKKEDVMNILDWKTKQSNVEVPFFPARVLLQDFTGIPAMVDFAAMREAVKTLGGDPEKVHPACPTDLTVDHSLQIDFSKCAIQNAPNPGGGDLQKAGKLSPLKVQPKKLPCRGQTTCRGSCDSGELGRNSGTFSSQIENTPILCPFHLQPVPEPETVLKNQEVEFGRNRERLQFFKWSSRVFKNVAVIPPGTGMAHQINLEYLSRVVFEEKDLLFPDSVVGTDSHITMVNGLGILGWGVGGIETEAVMLGLPVSLTLPEVVGCELTGSSNPFVTSIDVVLGITKHLRQVGVAGKFVEFFGSGVSQLSIVDRTTIANMCPEYGAILSFFPVDNVTLKHLEHTGFSKAKLESMETYLKAVKLFRNDQNSSGEPEYSQVIQINLNSIVPSVSGPKRPQDRVAVTDMKSDFQACLNEKVGFKGFQIAAEKQKDIVSIHYEGSEYKLSHGSVVIAAVISCTNNCNPSVMLAAGLLAKKAVEAGLRVKPYIRTSLSPGSGMVTHYLSSSGVLPYLSKLGFEIVGYGCSICVGNTAPLSDAVLNAVKQGDLVTCGILSGNKNFEGRLCDCVRANYLASPPLVVAYAIAGTVNIDFQTEPLGTDPTGKNIYLHDIWPSREEVHRVEEEHVILSMFKALKDKIEMGNKRWNSLEAPDSVLFPWDLKSTYIRCPSFFDKLTKEPIALQAIENAHVLLYLGDSVTTDHISPAGSIARNSAAAKYLTNRGLTPREFNSYGARRGNDAVMTRGTFANIKLFNKFIGKPAPKTIHFPSGQTLDVFEAAELYQKEGIPLIILAGKKYGSGNSRDWAAKGPYLLGVKAVLAESYEKIHKDHLIGIGIAPLQFLPGENADSLGLSGRETFSLTFPEELSPGITLNIQTSTGKVFSVIASFEDDVEITLYKHGGLLNFVARKFS

SEQ ID NO: 42036 - protein, 343 aa, Homo sapiens
  Payload ID: 8547
  Gene Symbol: IREB2
  Gene Name: iron-responsive element binding protein 2
  Uniprot ID: P48200
  ENSP ID: ENSP00000452938
MDAPKAGYAFEYLIETLNDSSHKKFFDVSKLGTKYDVLPYSIRVLLEAAVRNCDGFLMKKEDVMNILDWKTKQSNVEVPFFPARVLLQDFTGIPAMVDFAAMREAVKTLGGDPEKVHPACPTDLTVDHSLQIDFSKCAIQNAPNPGGGDLQKAGKLSPLKVQPKKLPCRGQTTCRGSCDSGELGRNSGTFSSQIENTPILCPFHLQPVPEPETVLKNQEVEFGRNRERLQFFKWSSRVFKNVAVIPPGTGMAHQINLEYLSRVVFEEKDLLFPDSVVGTDSHITMVNGLGILGWGVGGIETEAVMLGLPVSLTLPEVVGCELTGSSNPFVTSIDVVLGITKVS

SEQ ID NO: 42037 - protein, 51 aa, Homo sapiens
  Payload ID: 8547
  Gene Symbol: IREB2
  Gene Name: iron-responsive element binding protein 2
  ENSP ID: ENSP00000453058
MDAPKAGYAFEYLIETLNDSSHKKFFDVSKLGTKCSALLNTGLVGSCCTKL

SEQ ID NO: 42038 - protein, 38 aa, Homo sapiens
  Payload ID: 8547
  Gene Symbol: IREB2
  Gene Name: iron-responsive element binding protein 2
  ENSP ID: ENSP00000453172
MKKEDVMNILDWKTKQSNVEVPFFPARVLLQDFTGIPA

SEQ ID NO: 42039 - protein, 46 aa, Homo sapiens
  Payload ID: 8547
  Gene Symbol: IREB2
  Gene Name: iron-responsive element binding protein 2
  ENSP ID: ENSP00000453532
MDAPKAGYAFEYLIETLNDSSHKKFFDVSKLGTKYVEYQQWWILLL

SEQ ID NO: 42040 - protein, 89 aa, Homo sapiens
  Payload ID: 8547
  Gene Symbol: IREB2
  Gene Name: iron-responsive element binding protein 2
  ENSP ID: ENSP00000453863
  MOD_RES (1)..(1): Any amino acid
XKYGSGNSRDWAAKGPYLLGVKAVLAESYEKIHKDHLIGIGIAPLQFLPGENADSLGLSGRETFSLTFPEELSPGITLNIQVSLNFSNI

SEQ ID NO: 42041 - protein, 220 aa, Homo sapiens
  Payload ID: 8547
  Gene Symbol: IREB2
  Gene Name: iron-responsive element binding protein 2
  ENSP ID: ENSP00000454063
MDAPKAGYAFEYLIETLNDSSHKKFFDVSKLGTKYDVLPYSIRVLLEAAVRNCDGFLMKKEDVMNILDWKTKQSNVEVPFFPARVLLQDFTGIPAMVDFAAMREAVKTLGGDPEKVHPACPTDLTVDHSLQIDFSKCAIQNAPNPGGGDLQKAGKLSPLKVQPKKLPCRGQTTCRGSCDSGELGRNSGTFSSQIENTPILCPFHLQPVPDGVQEFLRMWQ

SEQ ID NO: 42042 - protein, 31 aa, Homo sapiens
  Payload ID: 8548
  Gene Symbol: ISCA1
  Gene Name: iron-sulfur cluster assembly 1
  ENSP ID: ENSP00000339003
MDYVEDKLSSEFVFNNPNIKGTCGCGESFNI

SEQ ID NO: 42043 - protein, 86 aa, Homo sapiens
  Payload ID: 8548
  Gene Symbol: ISCA1
  Gene Name: iron-sulfur cluster assembly 1
  ENSP ID: ENSP00000365157
MSASLVRATVRAVSKRKLQPTRAALTLTPSAVNKIKQLLKDKPEHVGVKVGVRTRGCNGLSYTLEYTKTKGDSDEEVIQDGWSAVV

SEQ ID NO: 42044 - protein, 129 aa, Homo sapiens
  Payload ID: 8548
  Gene Symbol: ISCA1
  Gene Name: iron-sulfur cluster assembly 1
  Uniprot ID: Q9BUE6
  ENSP ID: ENSP00000365159
MSASLVRATVRAVSKRKLQPTRAALTLTPSAVNKIKQLLKDKPEHVGVKVGVRTRGCNGLSYTLEYTKTKGDSDEEVIQDGVRVFIEKKAQLTLLGTEMDYVEDKLSSEFVFNNPNIKGTCGCGESFNI

SEQ ID NO: 42045 - protein, 108 aa, Homo sapiens
  Payload ID: 8549
  Gene Symbol: ISCA2
  Gene Name: iron-sulfur cluster assembly 2
  ENSP ID: ENSP00000298818
MAAAWGSSLTAATQRAVTPWPRGRLLTASLGPQARREASSSSPEAGEGQIRLTDSCVQRLLEITEGSEFLRLQVEGGGCSGFQYKFSLDTVINPDDRQGGRGWGKSGG

SEQ ID NO: 42046 - protein, 60 aa, Homo sapiens
  Payload ID: 8549
  Gene Symbol: ISCA2
  Gene Name: iron-sulfur cluster assembly 2
  Uniprot ID: Q86U28
  ENSP ID: ENSP00000450523
MAAAWGSSLTAATQRAVTPWPRGRLLTASLGPQARREASSSSPEAGEGQIRLTDSCVQGI

SEQ ID NO: 42047 - protein, 154 aa, Homo sapiens
  Payload ID: 8549
  Gene Symbol: ISCA2
  Gene Name: iron-sulfur cluster assembly 2
  Uniprot ID: Q86U28
  ENSP ID: ENSP00000452007
MAAAWGSSLTAATQRAVTPWPRGRLLTASLGPQARREASSSSPEAGEGQIRLTDSCVQRLLEITEGSEFLRLQVEGGGCSGFQYKFSLDTVINPDDRVFEQGGARVVVDSDSLAFVKGAQVDFSQELIRSSFQVLNNPQAQQGCSCGSSFSIKL

SEQ ID NO: 42048 - protein, 167 aa, Homo sapiens
  Payload ID: 8550
  Gene Symbol: ISCU
  Gene Name: iron-sulfur cluster assembly enzyme
  Uniprot ID: Q9H1K1
  ENSP ID: ENSP00000310623
MAAAGAFRLRRAASALLLRSPRLPARELSAPARLYHKKVVDHYENPRNVGSLDKTSKNVGTGLVGAPACGDVMKLQIQVDEKGKIVDARFKTFGCGSAIASSSLATEWVKGKTVEEALTIKNTDIAKELCLPPVKLHCSMLAEDAIKAALADYKLKQEPKKGEAEKK

SEQ ID NO: 42049 - protein, 142 aa, Homo sapiens
  Payload ID: 8550
  Gene Symbol: ISCU
  Gene Name: iron-sulfur cluster assembly enzyme
  Uniprot ID: Q9H1K1
  ENSP ID: ENSP00000376554
MVLIDMSVDLSTQVVDHYENPRNVGSLDKTSKNVGTGLVGAPACGDVMKLQIQVDEKGKIVDARFKTFGCGSAIASSSLATEWVKGKTVEEALTIKNTDIAKELCLPPVKLHCSMLAEDAIKAALADYKLKQEPKKGEAEKK

SEQ ID NO: 42050 - protein, 156 aa, Homo sapiens
  Payload ID: 8550
  Gene Symbol: ISCU
  Gene Name: iron-sulfur cluster assembly enzyme
  ENSP ID: ENSP00000411108
MAAAGAFRLRRAASALLLRSPRLPARELSAPARLYHKKVVDHYENPRNVGSLDKTSKNVGTGLVGAPACGDVMKLQIQVDEKGKIVDARFKTFGCGSAIASSSLATEWVKGKTVEEALTIKNTDIAKELCLPPVKLHCSRKEGMRNISLNASMEVY

SEQ ID NO: 42051 - protein, 46 aa, Homo sapiens
  Payload ID: 8550
  Gene Symbol: ISCU
  Gene Name: iron-sulfur cluster assembly enzyme
  ENSP ID: ENSP00000437854
MAAAGAFRLRRAASALLLRSPRLPARELSAPARLYHKKVSQICEVL

SEQ ID NO: 42052 - protein, 154 aa, Homo sapiens
  Payload ID: 8550
  Gene Symbol: ISCU
  Gene Name: iron-sulfur cluster assembly enzyme
  ENSP ID: ENSP00000443272
MAAAGAFRLRRAASALLLRSPRLPARELSAPARLYHKKVVDHYENPRNVGSLDKTSKNVGTGLVGAPACGDVMKLQIQVDEKGKIVDARFKTFGCGSAIASSSLATEWVKGKTVEEALTIKNTDIAKELCLPPVKLHCSSKSLLSIPVSWDIWQ

SEQ ID NO: 42053 - protein, 154 aa, Homo sapiens
  Payload ID: 8550
  Gene Symbol: ISCU
  Gene Name: iron-sulfur cluster assembly enzyme
  ENSP ID: ENSP00000445598
MAAAGAFRLRRAASALLLRSPRLPARELSAPARLYHKKVVDHYENPRNVGSLDKTSKNVGTGLVGAPACGDVMKLQIQVDEKGKIVDARFKTFGCGSAIASSSLATEWVKGKTVEEALTIKNTDIAKELCLPPVKLHCSKSVLFPAEEKTQLSP

SEQ ID NO: 42054 - protein, 154 aa, Homo sapiens; identical to SEQ ID NO: 42053
  Payload ID: 8550
  Gene Symbol: ISCU
  Gene Name: iron-sulfur cluster assembly enzyme
  ENSP ID: ENSP00000446606

SEQ ID NO: 42055 - protein, 480 aa, Homo sapiens
  Payload ID: 8551
  Gene Symbol: IRX1
  Gene Name: iroquois homeobox 1
  Uniprot ID: P78414
  ENSP ID: ENSP00000305244
MSFPQLGYPQYLSAAGPGAYGGERPGVLAAAAAAAAAASSGRPGAAELGGGAGAAAVTSVLGMYAAAGPYAGAPNYSAFLPYAADLSLFSQMGSQYELKDNPGVHPATFAAHTAPAYYPYGQFQYGDPGRPKNATRESTSTLKAWLNEHRKNPYPTKGEKIMLAIITKMTLTQVSTWFANARRRLKKENKVTWGARSKDQEDGALFGSDTEGDPEKAEDDEEIDLESIDIDKIDEHDGDQSNEDDEDKAEAPHAPAAPSALARDQGSPLAAADVLKPQDSPLGLAKEAPEPGSTRLLSPGAAAGGLQGAPHGKPKIWSLAETATSPDGAPKASPPPPAGHPGAHGPSAGAPLQHPAFLPSHGLYTCHIGKFSNWTNSAFLAQGSLLNMRSFLGVGAPHAAPHGPHLPAPPPPQPPVAIAPGALNGDKASVRSSPTLPERDLVPRPDSPAQQLKSPFQPVRDNSLAPQEGTPRILAALPSA

SEQ ID NO: 42056 - protein, 471 aa, Homo sapiens
  Payload ID: 8552
  Gene Symbol: IRX2
  Gene Name: iroquois homeobox 2
  Uniprot ID: Q9BZI1
  ENSP ID: ENSP00000307006
MSYPQGYLYQAPGSLALYSCPAYGASALAAPRSEELARSASGSAFSPYPGSAAFTAQAATGFGSPLQYSADAAAAAAGFPSYMGAPYDAHTTGMTGAISYHPYGSAAYPYQLNDPAYRKNATRDATATLKAWLNEHRKNPYPTKGEKIMLAIITKMTLTQVSTWFANARRRLKKENKMTWAPRNKSEDEDEDEGDATRSKDESPDKAQEGTETSAEDEGISLHVDSLTDHSCSAESDGEKLPCRAGDPLCESGSECKDKYDDLEDDEDDDEEGERGLAPPKPVTSSPLTGLEAPLLSPPPEAAPRGGRKTPQGSRTSPGAPPPASKPKLWSLAEIATSDLKQPSLGPGCGPPGLPAAAAPASTGAPPGGSPYPASPLLGRPLYYTSPFYGNYTNYGNLNAALQGQGLLRYNSAAAAPGEALHTAPKAASDAGKAGAHPLESHYRSPGGGYEPKKDASEGCTVVGGGVQPYL

SEQ ID NO: 42057 - protein, 471 aa, Homo sapiens; identical to SEQ ID NO: 42056
  Payload ID: 8552
  Gene Symbol: IRX2
  Gene Name: iroquois homeobox 2
  Uniprot ID: Q9BZI1
  ENSP ID: ENSP00000372056

SEQ ID NO: 42058 - protein, 501 aa, Homo sapiens
  Payload ID: 8553
  Gene Symbol: IRX3
  Gene Name: iroquois homeobox 3
  Uniprot ID: P78415
  ENSP ID: ENSP00000331608
MSFPQLGYQYIRPLYPSERPGAAGGSGGSAGARGGLGAGASELNASGSLSNVLSSVYGAPYAAAAAAAAAQGYGAFLPYAAELPIFPQLGAQYELKDSPGVQHPAAAAAFPHPHPAFYPYGQYQFGDPSRPKNATRESTSTLKAWLNEHRKNPYPTKGEKIMLAIITKMTLTQVSTWFANARRRLKKENKMTWAPRSRTDEEGNAYGSEREEEDEEEDEEDGKRELELEEEELGGEEEDTGGEGLADDDEDEEIDLENLDGAATEPELSLAGAARRDGDLGLGPISDSKNSDSEDSSEGLEDRPLPVLSLAPAPPPVAVASPSLPSPPVSLDPCAPAPAPASALQKPKIWSLAETATSPDNPRRSPPGAGGSPPGAAVAPSALQLSPAAAAAAAHRLVSAPLGKFPAWTNRPFPGPPPGPRLHPLSLLGSAPPHLLGLPGAAGHPAAAAAFARPAEPEGGTDRCSALEVEKKLLKTAFQPVPRRPQNHLDAALVLSALSSS

SEQ ID NO: 42059 - protein, 84 aa, Homo sapiens
  Payload ID: 8553
  Gene Symbol: IRX3
  Gene Name: iroquois homeobox 3
  ENSP ID: ENSP00000463991
AAAAAQGYGAFLPYAAELPIFPQLIAVVPWKWRKSYSRQLSSPCPGGPRTIWTPPWSYRLSPHPSSLKKTKKQKKLFLIVVIIV

SEQ ID NO: 42060 - protein, 519 aa, Homo sapiens
  Payload ID: 8554
  Gene Symbol: IRX4
  Gene Name: iroquois homeobox 4
  Uniprot ID: P78413
  ENSP ID: ENSP00000231357
MSYPQFGYPYSSAPQFLMATNSLSTCCESGGRTLADSGPAASAQAPVYCPVYESRLLATARHELNSAAALGVYGGPYGGSQGYGNYVTYGSEASAFYSLNSFDSKDGSGSAHGGLAPAAAAYYPYEPALGQYPYDRYGTMDSGTRRKNATRETTSTLKAWLQEHRKNPYPTKGEKIMLAIITKMTLTQVSTWFANARRRLKKENKMTWPPRNKCADEKRPYAEGEEEEGGEEEAREEPLKSSKNAEPVGKEEKELELSDLDDFDPLEAEPPACELKPPFHSLDGGLERVPAAPDGPVKEASGALRMSLAAGGGAALDEDLERARSCLRSAAAGPEPLPGAEGGPQVCEAKLGFVPAGASAGLEAKPRIWSLAHTATAAAAAATSLSQTEFPSCMLKRQGPAAPAAVSSAPATSPSVALPHSGALDRHQDSPVTSLRNWVDGVFHDPILRHSTLNQAWATAKGALLDPGPLGRSLGAGANVLTAPLARAFPPAVPQDAPAAGAARELLALPKAGGKPFCA

SEQ ID NO: 42061 - protein, 216 aa, Homo sapiens
  Payload ID: 8554
  Gene Symbol: IRX4
  Gene Name: iroquois homeobox 4
  ENSP ID: ENSP00000421772
MSYPQFGYPYSSAPQFLMATNSLSTCCESGGRTLADSGPAASAQAPVYCPVYESRLLATARHELNSAAALGVYGGPYGGSQGYGNYVTYGSEASAFYSLNSFDSKDGSGSAHGGLAPAAAAYYPYEPALGQYPYDRIKRLGGHPHKGIGLDLSGLGRSPGSLYGTMDSGTRRKNATRETTSTLKAWLQEHRKNPYPTKGEKIMLAIITKMTLTQVS

SEQ ID NO: 42062 - protein, 196 aa, Homo sapiens
  Payload ID: 8554
  Gene Symbol: IRX4
  Gene Name: iroquois homeobox 4
  ENSP ID: ENSP00000422462
MSYPQFGYPYSSAPQFLMATNSLSTCCESGGRTLADSGPAASAQAPVYCPVYESRLLATARHELNSAAALGVYGGPYGGSQGYGNYVTYGSEASAFYSLNSFDSKDGSGSAHGGLAPAAAAYYPYEPALGQYPYDRGPSLSPLQSLSPGMEPWTAARGARTPRARPPARSRPGCRSTARTPTPPRARRSCWPSSPR

SEQ ID NO: 42063 - protein, 519 aa, Homo sapiens; identical to SEQ ID NO: 42060
  Payload ID: 8554
  Gene Symbol: IRX4
  Gene Name: iroquois homeobox 4
  Uniprot ID: P78413
  ENSP ID: ENSP00000423161

SEQ ID NO: 42064 - protein, 519 aa, Homo sapiens; identical to SEQ ID NO: 42060
  Payload ID: 8554
  Gene Symbol: IRX4
  Gene Name: iroquois homeobox 4
  Uniprot ID: P78413
  ENSP ID: ENSP00000424235

SEQ ID NO: 42065 - protein, 545 aa, Homo sapiens
  Payload ID: 8554
  Gene Symbol: IRX4
  Gene Name: iroquois homeobox 4
  Uniprot ID: P78413
  ENSP ID: ENSP00000481396
MSYPQFGYPYSSAPQFLMATNSLSTCCESGGRTLADSGPAASAQAPVYCPVYESRLLATARHELNSAAALGVYGGPYGGSQGYGNYVTYGSEASAFYSLNSFDSKDGSGSAHGGLAPAAAAYYPYEPALGQYPYDRIKRLGGHPHKGIGLDLSGLGRSPGSLYGTMDSGTRRKNATRETTSTLKAWLQEHRKNPYPTKGEKIMLAIITKMTLTQVSTWFANARRRLKKENKMTWPPRNKCADEKRPYAEGEEEEGGEEEAREEPLKSSKNAEPVGKEEKELELSDLDDFDPLEAEPPACELKPPFHSLDGGLERVPAAPDGPVKEASGALRMSLAAGGGAALDEDLERARSCLRSAAAGPEPLPGAEGGPQVCEAKLGFVPAGASAGLEAKPRIWSLAHTATAAAAAATSLSQTEFPSCMLKRQGPAAPAAVSSAPATSPSVALPHSGALDRHQDSPVTSLRNWVDGVFHDPILRHSTLNQAWATAKGALLDPGPLGRSLGAGANVLTAPLARAFPPAVPQDAPAAGAARELLALPKAGGKPFCA

SEQ ID NO: 42066 - protein, 545 aa, Homo sapiens; identical to SEQ ID NO: 42065
  Payload ID: 8554
  Gene Symbol: IRX4
  Gene Name: iroquois homeobox 4
  Uniprot ID: P78413
  ENSP ID: ENSP00000482393

SEQ ID NO: 42067 - protein, 482 aa, Homo sapiens
  Payload ID: 8555
  Gene Symbol: IRX5
  Gene Name: iroquois homeobox 5
  Uniprot ID: P78411
  ENSP ID: ENSP00000316250
MSYPQGYLYQPSASLALYSCPAYSTSVISGPRTDELGRSSSGSAFSPYAGSTAFTAPSPGYNSHLQYGADPAAAAAAAFSSYVGSPYDHTPGMAGSLGYHPYAAPLGSYPYGDPAYRKNATRDATATLKAWLNEHRKNPYPTKGEKIMLAIITKMTLTQVSTWFANARRRLKKENKMTWTPRNRSEDEEEEENIDLEKNDEDEPQKPEDKGDPEGPEAGAEQKAASGCERLQGPPTPAGKETEGSLSDSDFKEPPSEGRLDALQGPPRTGGPSPAGPAAARLAEDPAPHYPAGAPAPGPHPAAGEVPPGPGGPSVIHSPPPPPPPAVLAKPKLWSLAEIATSSDKVKDGGGGNEGSPCPPCPGPIAGQALGGSRASPAPAPSRSPSAQCPFPGGTVLSRPLYYTAPFYPGYTNYGSFGHLHGHPGPGPGPTTGPGSHFNGLNQTVLNRADALAKDPKMLRSQSQLDLCKDSPYELKKGMSDI

SEQ ID NO: 42068 - protein, 483 aa, Homo sapiens
  Payload ID: 8555
  Gene Symbol: IRX5
  Gene Name: iroquois homeobox 5
  Uniprot ID: P78411
  ENSP ID: ENSP00000378132
MSYPQGYLYQPSASLALYSCPAYSTSVISGPRTDELGRSSSGSAFSPYAGSTAFTAPSPGYNSHLQYGADPAAAAAAAFSSYVGSPYDHTPGMAGSLGYHPYAAPLGSYPYGDPAYRKNATRDATATLKAWLNEHRKNPYPTKGEKIMLAIITKMTLTQVSTWFANARRRLKKENKMTWTPRNRSEDEEEEENIDLEKNDEDEPQKPEDKGDPEGPEAGGAEQKAASGCERLQGPPTPAGKETEGSLSDSDFKEPPSEGRLDALQGPPRTGGPSPAGPAAARLAEDPAPHYPAGAPAPGPHPAAGEVPPGPGGPSVIHSPPPPPPPAVLAKPKLWSLAEIATSSDKVKDGGGGNEGSPCPPCPGPIAGQALGGSRASPAPAPSRSPSAQCPFPGGTVLSRPLYYTAPFYPGYTNYGSFGHLHGHPGPGPGPTTGPGSHFNGLNQTVLNRADALAKDPKMLRSQSQLDLCKDSPYELKKGMSDI

SEQ ID NO: 42069 - protein, 263 aa, Homo sapiens
  Payload ID: 8555
  Gene Symbol: IRX5
  Gene Name: iroquois homeobox 5
  ENSP ID: ENSP00000453660
MSYPQGYLYQPSASLALYSCPAYSTSVISGPRTDELGRSSSGSAFSPYAGSTAFTAPSPGYNSHLQYGADPAAAAAAAFSSYVLLKKEKKSLDFPCFPPLRPTCVRSPAERGVASVAQASICMEGRAAVARSAHGGSPCPPCPGPIAGQALGGSRASPAPAPSRSPSAQCPFPGGTVLSRPLYYTAPFYPGYTNYGSFGHLHGHPGPGPGPTTGPGSHFNGLNQTVLNRADALAKDPKMLRSQSQLDLCKDSPYELKKGMSDI

SEQ ID NO: 42070 - protein, 417 aa, Homo sapiens
  Payload ID: 8555
  Gene Symbol: IRX5
  Gene Name: iroquois homeobox 5
  Uniprot ID: P78411
  ENSP ID: ENSP00000453725
MAVETTVHTHLSASPPQGSPYDHTPGMAGSLGYHPYAAPLGSYPYGDPAYRKNATRDATATLKAWLNEHRKNPYPTKGEKIMLAIITKMTLTQVSTWFANARRRLKKENKMTWTPRNRSEDEEEEENIDLEKNDEDEPQKPEDKGDPEGPEAGGAEQKAASGCERLQGPPTPAGKETEGSLSDSDFKEPPSEGRLDALQGPPRTGGPSPAGPAAARLAEDPAPHYPAGAPAPGPHPAAGEVPPGPGGPSVIHSPPPPPPPAVLAKPKLWSLAEIATSSDKVKDGGGGNEGSPCPPCPGPIAGQALGGSRASPAPAPSRSPSAQCPFPGGTVLSRPLYYTAPFYPGYTNYGSFGHLHGHPGPGPGPTTGPGSHFNGLNQTVLNRADALAKDPKMLRSQSQLDLCKDSPYELKKGMSDI

SEQ ID NO: 42071 - protein, 146 aa, Homo sapiens [sequence omitted]

SEQ ID NO: 42072 - protein, 446 aa, Homo sapiens
  Payload ID: 8556
  Gene Symbol: IRX6
  Gene Name: iroquois homeobox 6
  Uniprot ID: P78412
  ENSP ID: ENSP00000290552
MSFPHFGHPYRGASQFLASASSSTTCCESTQRSVSDVASGSTPAPALCCAPYDSRLLGSARPELGAALGIYGAPYAAAAAAQSYPGYLPYSPEPPSLYGALNPQYEFKEAAGSFTSSLAQPGAYYPYERTLGQYQYERYGAVELSGAGRRKNATRETTSTLKAWLNEHRKNPYPTKGEKIMLAIITKMTLTQVSTWFANARRRLKKENKMTWAPKNKGGEERKAEGGEEDSLGCLTADTKEVTASQEARGLRLSDLEDLEEEEEEEEEAEDEEVVATAGDRLTEFRKGAQSLPGPCAAAREGRLERRECGLAAPRFSFNDPSGSEEADFLSAETGSPRLTMHYPCLEKPRIWSLAHTATASAVEGAPPARPRPRSPECRMIPGQPPASARRLSVPRDSACDESSCIPKAFGNPKFALQGLPLNCAPCPRRSEPVVQCQYPSGAEAG

SEQ ID NO: 42073 - protein, 165 aa, Homo sapiens
  Payload ID: 8557
  Gene Symbol: ISG15
  Gene Name: ISG15 ubiquitin-like modifier
  Uniprot ID: P05161
  ENSP ID: ENSP00000368699
MGWDLTVKMLAGNEFQVSLSSSMSVSELKAQITQKIGVHAFQQRLAVHPSGVALQDRVPLASQGLGPGSTVLLVVDKCDEPLSILVRNNKGRSSTYEVRLTQTVAHLKQQVSGLEGVQDDLFWLTFEGKPLEDQLPLGEYGLKPLSTVFMNLRLRGGGTEPGGRS

SEQ ID NO: 42074 - protein, 143 aa, Homo sapiens
  Payload ID: 8557
  Gene Symbol: ISG15
  Gene Name: ISG15 ubiquitin-like modifier
  ENSP ID: ENSP00000485313
MLAGNEFQVSLSSSMSVSELKAQITQKIGVHAFQQRLAVHPSGVALQDRVPLASQGLGPGSTVLLVVDKCDEPLSILVRNNKGRSSTYEVRLTQTVAHLKQQVSGLEGVQDDLFWLTFEGKPLEDQLPLGEYGLKPLSTVFMN

SEQ ID NO: 42075 - protein, 157 aa, Homo sapiens
  Payload ID: 8557
  Gene Symbol: ISG15
  Gene Name: ISG15 ubiquitin-like modifier
  ENSP ID: ENSP00000485643
MLAGNEFQVSLSSSMSVSELKAQITQKIGVHAFQQRLAVHPSGVALQDRVPLASQGLGPGSTVLLVVDKCDEPLSILVRNNKGRSSTYEVRLTQTVAHLKQQVSGLEGVQDDLFWLTFEGKPLEDQLPLGEYGLKPLSTVFMNLRLRGGGTEPGGRS

SEQ ID NO: 42076 - protein, 349 aa, Homo sapiens
  Payload ID: 8558
  Gene Symbol: ISL1
  Gene Name: ISL LIM homeobox 1
  Uniprot ID: P61371
  ENSP ID: ENSP00000230658
MGDMGDPPKKKRLISLCVGCGNQIHDQYILRVSPDLEWHAACLKCAECNQYLDESCTCFVRDGKTYCKRDYIRLYGIKCAKCSIGFSKNDFVMRARSKVYHIECFRCVACSRQLIPGDEFALREDGLFCRADHDVVERASLGAGDPLSPLHPARPLQMAAEPISARQPALRPHVHKQPEKTTRVRTVLNEKQLHTLRTCYAANPRPDALMKEQLVEMTGLSPRVIRVWFQNKRCKDKKRSIMMKQLQQQQPNDKTNIQGMTGTPMVAASPERHDGGLQANPVEVQSYQPPWKVLSDFALQSDIDQPAFQQLVNFSEGGPGSNSTGSEVASMSSQLPDTPNSMVASPIEA

SEQ ID NO: 42077 - protein, 326 aa, Homo sapiens
  Payload ID: 8558
  Gene Symbol: ISL1
  Gene Name: ISL LIM homeobox 1
  ENSP ID: ENSP00000422676
MGDMGDPPKKKRLISLCVGCGNQIHDQYILRVSPDLEWHAACLKCAECNQYLDESCTCFVRDGKTYCKRDYIRLYGIKCAKCSIGFSKNDFVMRARSKVYHIECFRCVACSRQLIPGDEFALREDGLFCRADHDVVERASLGAGDPLSPLHPARPLQMAAEPISARQPALRPHVHKQPEKTTRVRTVLNEKQLHTLRTCYAANPRPDALMKEQLVEMTGLSPRVIRVWFQNKRCKDKKRSIMMKQLQQQQPNDKTANPVEVQSYQPPWKVLSDFALQSDIDQPAFQQLVNFSEGGPGSNSTGSEVASMSSQLPDTPNSMVASPIEA

SEQ ID NO: 42078 - protein, 359 aa, Homo sapiens
  Payload ID: 8559
  Gene Symbol: ISL2
  Gene Name: ISL LIM homeobox 2
  Uniprot ID: Q96A47
  ENSP ID: ENSP00000290759
MVDIIFHYPFLGAMGDHSKKKPGTAMCVGCGSQIHDQFILRVSPDLEWHAACLKCAECSQYLDETCTCFVRDGKTYCKRDYVRLFGIKCAKCQVGFSSSDLVMRARDSVYHIECFRCSVCSRQLLPGDEFSLREHELLCRADHGLLLERAAAGSPRSPGPLPGARGLHLPDAGSGRQPALRPHVHKQTEKTTRVRTVLNEKQLHTLRTCYAANPRPDALMKEQLVEMTGLSPRVIRVWFQNKRCKDKKKSILMKQLQQQQHSDKTSLQGLTGTPLVAGSPIRHENAVQGSAVEVQTYQPPWKALSEFALQSDLDQPAFQQLVSFSESGSLGNSSGSDVTSLSSQLPDTPNSMVPSPVET

SEQ ID NO: 42079 - protein, 195 aa, Homo sapiens
  Payload ID: 8559
  Gene Symbol: ISL2
  Gene Name: ISL LIM homeobox 2
  ENSP ID: ENSP00000453837
MVDIIFHYPFLGAMGDHSKKKPGTAMCVGCGSQIHDQFILRVSPDLEWHAACLKCAECSQYLDETCTCFVRDGKTYCKRDYVRRWVGPAARVAPARAQADGEDDPRADCAEREAAAHSADLLRRQPAARRSHEGAAGGDDRPEPAGHPRLVPEQALQGQEEIHSHEAAAAAAAQRQDEPSGTDWDAPGGGQSHPP

SEQ ID NO: 42080 - protein, 89 aa, Homo sapiens
  Payload ID: 8560
  Gene Symbol: IAPP
  Gene Name: islet amyloid polypeptide
  Uniprot ID: P10997
  ENSP ID: ENSP00000240652
MGILKLQVFLIVLSVALNHLKATPIESHQVEKRKCNTATCATQRLANFLVHSSNNFGAILSSTNVGSNTYGKRNAVEVLKREPLNYLPL

SEQ ID NO: 42081 - protein, 89 aa, Homo sapiens; identical to SEQ ID NO: 42080
  Payload ID: 8560
  Gene Symbol: IAPP
  Gene Name: islet amyloid polypeptide
  Uniprot ID: P10997
  ENSP ID: ENSP00000437357

SEQ ID NO: 42082 - protein, 85 aa, Homo sapiens
  Payload ID: 8560
  Gene Symbol: IAPP
  Gene Name: islet amyloid polypeptide
  ENSP ID: ENSP00000437559
  MOD_RES (1)..(1): Any amino acid
XLKATPIERCLDQIPIFTVFQENHQVEKRKCNTATCATQRLANFLVHSSNNFGAILSSTNVGSNTYGKRNAVEVLKREPLNYLPL

SEQ ID NO: 42083 - protein, 79 aa, Homo sapiens
  Payload ID: 8560
  Gene Symbol: IAPP
  Gene Name: islet amyloid polypeptide
  ENSP ID: ENSP00000445711
MGILKLQVFLIVLSVALNHLKATPIERQEWIIPVLSRNILLELRGAKPEHEAGKKSKVIRWKSGNATLPHVQRSAWQIF

SEQ ID NO: 42084 - protein, 79 aa, Homo sapiens
  Payload ID: 8560
  Gene Symbol: IAPP
  Gene Name: islet amyloid polypeptide
  ENSP ID: ENSP00000445980
MGILKLQVFLIVLSVALNHLKATPIESHQVEKRKCNTATCATQRLANFLVHSSNNFGAILSSTNVGSNTYGKRNAVEVL

SEQ ID NO: 42085 - protein, 482 aa, Homo sapiens
  Payload ID: 8561
  Gene Symbol: ICA1
  Gene Name: islet cell autoantigen 1, 69kDa
  Uniprot ID: Q05084
  ENSP ID: ENSP00000265577
MSGHKCYPWDLQDRYAQDKSVVNKMQQKYWETKQAFIKATGKKEDEHVVASDADLDAKLELFHSIQRTCLDLSKAIVLYQKRICFLSQEENELGKFLRSQGFQDKTRAGKMMQATGKALCFSSQQRLALRNPLCRFHQEVETFRHRAISDTWLTVNRMEQCRTEYRGALLWMKDVSQELDPDLYKQMEKFRKVQTQVRLAKKNFDKLKMDVCQKVDLLGASRCNLLSHMLATYQTTLLHFWEKTSHTMAAIHESFKGYQPYEFTTLKSLQDPMKKLVEKEEKKKINQQESTDAAVQEPSQLISLEEENQRKESSSFKTEDGKSILSALDKGSTHTACSGPIDELLDMKSEEGACLGPVAGTPEPEGADKDDLLLLSEIFNASSLEEGEFSKEWAAVFGDGQVKEPVPTMALGEPDPKAQTGSGFLPSQLLDQNMKDLQASLQEPAKAASDLTAWFSLFADLDPLSNPDAVGKTDKEHELLNA

SEQ ID NO: 42086 - protein, 256 aa, Homo sapiens
  Payload ID: 8561
  Gene Symbol: ICA1
  Gene Name: islet cell autoantigen 1, 69kDa
  ENSP ID: ENSP00000316074
MDRYAQDKSVVNKMQQKYWETKQAFIKATGKKEDEHVVASDADLDAKLELFHSIQRTCLDLSKAIVLYQKRICFLSQEENELGKFLRSQGFQDKTRAGKMMQATGKALCFSSQQRLALRNPLCRFHQEVETFRHRAISDTWLTVNRMEQCRTEYRGALLWMKDVSQELDPDLYKQMEKFRKVQTQVRLAKKNFDKLKMDVCQKVDLLGASRCNLLSHMLATYQTTLLHFWEKTSHTMAAIHESFKGYQPYEFTTLK

SEQ ID NO: 42087 - protein, 257 aa, Homo sapiens
  Payload ID: 8561
  Gene Symbol: ICA1
  Gene Name: islet cell autoantigen 1, 69kDa
  ENSP ID: ENSP00000341603
MSGHKCSYPWDLQDRYAQDKSVVNKMQQKYWETKQAFIKATGKKEDEHVVASDADLDAKLELFHSIQRTCLDLSKAIVLYQKRICFLSQEENELGKFLRSQGFQDKTRAGKMMQATGKALCFSSQQRLALRNPLCRFHQEVETFRHRAISDTWLTVNRMEQCRTEYRGALLWMKDVSQELDPDLYKQMEKFRKVQTQVRLAKKNFDKLKMDVCQKVDLLGASRCNLLSHMLATYQLAWDQWQGPRNLKVLTKMTCCC

SEQ ID NO: 42088 - protein, 483 aa, Homo sapiens
  Payload ID: 8561
  Gene Symbol: ICA1
  Gene Name: islet cell autoantigen 1, 69kDa
  Uniprot ID: Q05084
  ENSP ID: ENSP00000379908
MSGHKCSYPWDLQDRYAQDKSVVNKMQQKYWETKQAFIKATGKKEDEHVVASDADLDAKLELFHSIQRTCLDLSKAIVLYQKRICFLSQEENELGKFLRSQGFQDKTRAGKMMQATGKALCFSSQQRLALRNPLCRFHQEVETFRHRAISDTWLTVNRMEQCRTEYRGALLWMKDVSQELDPDLYKQMEKFRKVQTQVRLAKKNFDKLKMDVCQKVDLLGASRCNLLSHMLATYQTTLLHFWEKTSHTMAAIHESFKGYQPYEFTTLKSLQDPMKKLVEKEEKKKINQQESTDAAVQEPSQLISLEEENQRKESSSFKTEDGKSILSALDKGSTHTACSGPIDELLDMKSEEGACLGPVAGTPEPEGADKDDLLLLSEIFNASSLEEGEFSKEWAAVFGDGQVKEPVPTMALGEPDPKAQTGSGFLPSQLLDQNMKDLQASLQEPAKAASDLTAWFSLFADLDPLSNPDAVGKTDKEHELLNA

SEQ ID NO: 42089 - protein, 471 aa, Homo sapiens
  Payload ID: 8561
  Gene Symbol: ICA1
  Gene Name: islet cell autoantigen 1, 69kDa
  ENSP ID: ENSP00000385305
MDRYAQDKSVVNKMQQKYWETKQAFIKATGKKEDEHVVASDADLDAKLELFHSIQRTCLDLSKAIVLYQKRICFLSQEENELGKFLRSQGFQDKTRAGKMMQATGKALCFSSQQRLALRNPLCRFHQEVETFRHRAISDTWLTVNRMEQCRTEYRGALLWMKDVSQELDPDLYKQMEKFRKVQTQVRLAKKNFDKLKMDVCQKVDLLGASRCNLLSHMLATYQTTLLHFWEKTSHTMAAIHESFKGYQPYEFTTLKSLQDPMKKLVEKEEKKKINQQESTDAAVQEPSQLISLEEENQRKESSSFKTEDGKSILSALDKGSTHTACSGPIDELLDMKSEEGACLGPVAGTPEPEGADKDDLLLLSEIFNASSLEEGEFSKEWAAVFGDGQVKEPVPTMALGEPDPKAQTGSGFLPSQLLDQNMKDLQASLQEPAKAASDLTAWFSLFADLDPLSNPDAVGKTDKEHELLNA

SEQ ID NO: 42090 - protein, 483 aa, Homo sapiens; identical to SEQ ID NO: 42088
  Payload ID: 8561
  Gene Symbol: ICA1
  Gene Name: islet cell autoantigen 1, 69kDa
  Uniprot ID: Q05084
  ENSP ID: ENSP00000385570

SEQ ID NO: 42091 - protein, 483 aa, Homo sapiens; identical to SEQ ID NO: 42088
  Payload ID: 8561
  Gene Symbol: ICA1
  Gene Name: islet cell autoantigen 1, 69kDa
  Uniprot ID: Q05084
  ENSP ID: ENSP00000385651

SEQ ID NO: 42092 - protein, 350 aa, Homo sapiens
  Payload ID: 8561
  Gene Symbol: ICA1
  Gene Name: islet cell autoantigen 1, 69kDa
  ENSP ID: ENSP00000386021
MSGHKCSYPWDLQDRYAQDKSVVNKMQQKYWETKQAFIKATGKKEDEHVVASDADLDAKLELFHSIQRTCLDLSKAIVLYQKRICFLSQEENELGKFLRSQGFQDKTRAGKMMQATGKALCFSSQQRLALRNPLCRFHQEVETFRHRAISDTWLTVNRMEQCRTEYRGALLWMKDVSQELDPDLYKQMEKFRKVQTQVRLAKKNFDKLKMDVCQKVDLLGASRCNLLSHMLATYQTTLLHFWEKTSHTMAAIHESFKGYQPYEFTTLKVWKLEGPLENLEKSKVLFISQAKSIAESIIIPGLRMLKRELCPQQSLFLSFFLSFFFFFFFFTASGFNTMRIYCNPKARIEP

SEQ ID NO: 42093 - protein, 85 aa, Homo sapiens
  Payload ID: 8561
  Gene Symbol: ICA1
  Gene Name: islet cell autoantigen 1, 69kDa
  ENSP ID: ENSP00000393314
MSGHKCSYPWDLQDRYAQDKSVVNKMQQKYWETKQAFIKATGKKEDEHVVASDADLDAKLELFHSIQRTCLDLSKAIVLYQKRIC

SEQ ID NO: 42094 - protein, 134 aa, Homo sapiens
  Payload ID: 8561
  Gene Symbol: ICA1
  Gene Name: islet cell autoantigen 1, 69kDa
  ENSP ID: ENSP00000397496
MSGHKCYPWDLQDRYAQDKSVVNKMQQKYWETKQAFIKATGKKEDEHVVASDADLDAKLELFHSIQRTCLDLSKAIVLYQKRICFLSQEENELGKFLRSQGFQDKTRAGKMMQATGKALCFSSQQRLALRNPLC

SEQ ID NO: 42095 - protein, 162 aa, Homo sapiens
  Payload ID: 8561
  Gene Symbol: ICA1
  Gene Name: islet cell autoantigen 1, 69kDa
  ENSP ID: ENSP00000398435
MSGHKCSYPWDLQDRYAQDKSVVNKMQQKYWETKQAFIKATGKKEDEHVVASDADLDAKLELFHSIQRTCLDLSKAIVLYQKRICFLSQEENELGKFLRSQGFQDKTRAGKMMQATGKALCFSSQQRLALRNPLCRFHQEVETFRHRAISDTWLTVNRMEQC

SEQ ID NO: 42096 - protein, 512 aa, Homo sapiens
  Payload ID: 8561
  Gene Symbol: ICA1
  Gene Name: islet cell autoantigen 1, 69kDa
  Uniprot ID: Q05084
  ENSP ID: ENSP00000403982
MSGHKCSYPWDLQDRYAQDKSVVNKMQQKYWETKQAFIKATGKKEDEHVVASDADLDAKLELFHSIQRTCLDLSKAIVLYQKRICFLSQEENELGKFLRSQGFQDKTRAGKMMQATGKALCFSSQQRLALRNPLCRFHQEVETFRHRAISDTWLTVNRMEQCRTEYRGALLWMKDVSQELDPDLYKQMEKFRKVQTQVRLAKKNFDKLKMDVCQKVDLLGASRCNLLSHMLATYQTTLLHFWEKTSHTMAAIHESFKGYQPYEFTTLKSLQDPMKKLVEKEEKKKINQQESTDAAVQEPSQYLQNICLEMKANSDIKMLQKGKEGQQIGILISLEEENQRKESSSFKTEDGKSILSALDKGSTHTACSGPIDELLDMKSEEGACLGPVAGTPEPEGADKDDLLLLSEIFNASSLEEGEFSKEWAAVFGDGQVKEPVPTMALGEPDPKAQTGSGFLPSQLLDQNMKDLQASLQEPAKAASDLTAWFSLFADLDPLSNPDAVGKTDKEHELLNA

SEQ ID NO: 42097 - protein, 70 aa, Homo sapiens
  Payload ID: 8561
  Gene Symbol: ICA1
  Gene Name: islet cell autoantigen 1, 69kDa
  ENSP ID: ENSP00000406722
MSGHKCYPWDLQDRYAQDKSVVNKMQQKYWETKQAFIKATGKKEDEHVVASDADLDAKLELFHSIQRTCL

SEQ ID NO: 42098 - protein, 87 aa, Homo sapiens
  Payload ID: 8561
  Gene Symbol: ICA1
  Gene Name: islet cell autoantigen 1, 69kDa
  ENSP ID: ENSP00000410341
MSGHKCSYPWDLQDRYAQDKSVVNKMQQKYWETKQAFIKATGKKEDEHVVASDADLDAKLELFHSIQRTCLDLSKAIVLYQKRICSF

SEQ ID NO: 42099 - protein, 482 aa, Homo sapiens
  Payload ID: 8562
  Gene Symbol: ICA1L
  Gene Name: islet cell autoantigen 1,69kDa-like
  Uniprot ID: Q8NDH6
  ENSP ID: ENSP00000351047
MDSFGQPRPEDNQSVVRRMQKKYWKTKQVFIKATGKKEDEHLVASDAELDAKLEVFHSVQETCTELLKIIEKYQLRLNVISEEENELGLFLKFQAERDATQAGKMMDATGKALCSSAKQRLALCTPLSRLKQEVATFSQRAVSDTLMTINRMEQARTEYRGALLWMKDVSQELDPDTLKQMEKFRKVQMQVRNSKASFDKLKMDVCQKVDLLGASRCNMLSHSLTTYQRTLLGFWKKTARMMSQIHEACIGFHPYDFVALKQLQDTPSKISEDNKDEQIGGFLTEQLNKLVLSDEEASFESEQANKDHNEKHSQMREFGAPQFSNSENVAKDLPVDSLEGEDFEKEFSFLNNLLSSGSSSTSEFTQECQTAFGSPSASLTSQEPSMGSEPLAHSSRFLPSQLFDLGFHVAGAFNNWVSQEESELCLSHTDNQPVPSQSPKKLTRSPNNGNQDMSAWFNLFADLDPLSNPDAIGHSDDELLNA

SEQ ID NO: 42100 - protein, 482 aa, Homo sapiens; identical to SEQ ID NO: 42099
  Payload ID: 8562
  Gene Symbol: ICA1L
  Gene Name: islet cell autoantigen 1,69kDa-like
  Uniprot ID: Q8NDH6
  ENSP ID: ENSP00000376070

SEQ ID NO: 42101 - protein, 119 aa, Homo sapiens
  Payload ID: 8562
  Gene Symbol: ICA1L
  Gene Name: islet cell autoantigen 1,69kDa-like
  ENSP ID: ENSP00000387382
MDSFGQPRPEDNQSVVRRMQKKYWKTKQVFIKATGKKEDEHLVASDAELDAKLEVFHSVQETCTELLKIIEKYQLRLNVISEEENELGLFLKFQAERDATQAGKMMDATGKALCSSAKQ

SEQ ID NO: 42102 - protein, 98 aa, Homo sapiens
  Payload ID: 8562
  Gene Symbol: ICA1L
  Gene Name: islet cell autoantigen 1,69kDa-like
  ENSP ID: ENSP00000392609
MDSFGQPRPEDNQSVVRRMQKKYWKTKQVFIKATGKKEDEHLVASDAELDAKLEVFHSVQETCTELLKIIEKYQLRLNVISEEENELGLFLKFQAERD

SEQ ID NO: 42103 - protein, 99 aa, Homo sapiens
  Payload ID: 8562
  Gene Symbol: ICA1L
  Gene Name: islet cell autoantigen 1,69kDa-like
  ENSP ID: ENSP00000397827
MDSFGQPRPEDNQSVVRRMQKKYWKTKQVFIKATGKKEDEHLVASDAELDAKLEVFHSVQETCTELLKIIEKYQLRLNVISEEENELGLFLKFQAERDA

SEQ ID NO: 42104 - protein, 60 aa, Homo sapiens
  Payload ID: 8562
  Gene Symbol: ICA1L
  Gene Name: islet cell autoantigen 1,69kDa-like
  ENSP ID: ENSP00000398420
MDSFGQPRPEDNQSVVRRMQKKYWKTKQVFIKATGKKEDEHLVASDAELDAKLERHALNF

SEQ ID NO: 42105 - protein, 439 aa, Homo sapiens
  Payload ID: 8562
  Gene Symbol: ICA1L
  Gene Name: islet cell autoantigen 1,69kDa-like
  ENSP ID: ENSP00000398916
MDSFGQPRPEDNQSVVRRMQKKYWKTKQVFIKATGKKEDEHLVASDAELDAKLEVFHSVQETCTELLKIIEKYQLRLNVISEEENELGLFLKFQAERDATQAGKMMDATGKALCSSAKQRLALCTPLSRLKQEVATFSQRAVSDTLMTINRMEQARTEYRGALLWMKDVSQELDPDTLKQMEKFRKVQMQVRNSKASFDKLKMDVCQKVDLLGASRCNMLSHSLTTYQRTLLGFWKKTARMMSQIHEACIGFHPYDFVALKQLQDTPSKISEDNKDEQIGGFLTEQLNKLVLSDEEASFESEQANKDHNEKHSQMREFGAPQFSNSENVAKDLPVDSLEGEDFEKEFSFLNNLLSSGSSSTSEFTQECQTAFGSPSASLTSQEPSMGSEPLAHSSRFLPSQLFDLGFHVAGAFNNNAAKKKKSCMYFFLQLNYFLKKNC

SEQ ID NO: 42106 - protein, 111 aa, Homo sapiens
  Payload ID: 8562
  Gene Symbol: ICA1L
  Gene Name: islet cell autoantigen 1,69kDa-like
  ENSP ID: ENSP00000400249
MDSFGQPRPEDNQSVVRRMQKKYWKTKQVFIKATGKKEDEHLVASDAELDAKLEVFHSVQETCTELLKIIEKYQLRLNVAKDLPVDSLEGEDFEKEFSFLNNLLSSGSSST

SEQ ID NO: 42107 - protein, 187 aa, Homo sapiens
  Payload ID: 8562
  Gene Symbol: ICA1L
  Gene Name: islet cell autoantigen 1,69kDa-like
  Uniprot ID: Q8NDH6
  ENSP ID: ENSP00000404189
MDSFGQPRPEDNQSVVRRMQKKYWKTKQVFIKATGKKEDEHLVASDAELDAKLEVFHSVQETCTELLKIIEKYQLRLNVISEEENELGLFLKFQAERDATQAGKMMDATGKALCSSAKQRLALCTPLSRLKQEVATFSQRAVSDTLMTINRMEQARTEYRGALLWMKDVSQELDPDTLKQMEKFRKV

SEQ ID NO: 42108 - protein, 119 aa, Homo sapiens; identical to SEQ ID NO: 42101
  Payload ID: 8562
  Gene Symbol: ICA1L
  Gene Name: islet cell autoantigen 1,69kDa-like
  ENSP ID: ENSP00000404618

SEQ ID NO: 42109 - protein, 100 aa, Homo sapiens
  Payload ID: 8562
  Gene Symbol: ICA1L
  Gene Name: islet cell autoantigen 1,69kDa-like
  ENSP ID: ENSP00000404707
MDSFGQPRPEDNQSVVRRMQKKYWKTKQVFIKATGKKEDEHLVASDAELDAKLEVFHSVQETCTELLKIIEKYQLRLNVISEEENELGLFLKFQAERDAT

SEQ ID NO: 42110 - protein, 134 aa, Homo sapiens
  Payload ID: 8562
  Gene Symbol: ICA1L
  Gene Name: islet cell autoantigen 1,69kDa-like
  ENSP ID: ENSP00000405592
MDSFGQPRPEDNQSVVRRMQKKYWKTKQVFIKATGKKEDEHLVASDAELDAKLEVFHSVQETCTELLKIIEKYQLRLNVISEEENELGLFLKFQAERDATQAGKMMDATGKALCSSAKQRLALCTPLSRLKQEV

SEQ ID NO: 42111 - protein, 78 aa, Homo sapiens
  Payload ID: 8562
  Gene Symbol: ICA1L
  Gene Name: islet cell autoantigen 1,69kDa-like
  ENSP ID: ENSP00000409741
MDSFGQPRPEDNQSVVRRMQKKYWKTKQVFIKATGKKEDEHLVASDAELDAKLEVFHSVQETCTELLKIIEKYQLRLN

SEQ ID NO: 42112 - protein, 124 aa, Homo sapiens
  Payload ID: 8562
  Gene Symbol: ICA1L
  Gene Name: islet cell autoantigen 1,69kDa-like
  ENSP ID: ENSP00000410135
MDSFGQPRPEDNQSVVRRMQKKYWKTKQVFIKATGKKEDEHLVASDAELDAKLEVFHSVQETCTELLKIIEKYQLRLNVISEEENELGLFLKFQAERDATQAGKMMDATGKALCSSAKQRLALC

SEQ ID NO: 42113 - protein, 150 aa, Homo sapiens
  Payload ID: 8562
  Gene Symbol: ICA1L
  Gene Name: islet cell autoantigen 1,69kDa-like
  ENSP ID: ENSP00000410747
MDSFGQPRPEDNQSVVRRMQKKYWKTKQVFIKATGKKEDEHLVASDAELDAKLEVFHSVQETCTELLKIIEKYQLRLNVISEEENELGLFLKFQAERDATQAGKMMDATGKALCSSAKQRLALCTPLSRLKQEVATFSQRAVSDTLMTIN

SEQ ID NO: 42114 - protein, 77 aa, Homo sapiens
  Payload ID: 8562
  Gene Symbol: ICA1L
  Gene Name: islet cell autoantigen 1,69kDa-like
  ENSP ID: ENSP00000412158
MDSFGQPRPEDNQSVVRRMQKKYWKTKQVFIKATGKKEDEHLVASDAELDAKLEIGPVYSSVSSEARSSNIQSKGSI

SEQ ID NO: 42115 - protein, 42 aa, Homo sapiens
  Payload ID: 8562
  Gene Symbol: ICA1L
  Gene Name: islet cell autoantigen 1,69kDa-like
  ENSP ID: ENSP00000414916
MDSFGQPRPEDNQSVVRRMQKKYWKTKQVFIKATGKKEDEHL

SEQ ID NO: 42116 - protein, 96 aa, Homo sapiens
  Payload ID: 8562
  Gene Symbol: ICA1L
  Gene Name: islet cell autoantigen 1,69kDa-like
  ENSP ID: ENSP00000416726
MDSFGQPRPEDNQSVVRRMQKKYWKTKQVFIKATGKKEDEHLVASDAELDAKLEVFHSVQETCTELLKIIEKYQLRLNVISEEENELGLFLKFQAE

SEQ ID NO: 42117 - protein, 482 aa, Homo sapiens; identical to SEQ ID NO: 42099
  Payload ID: 8562
  Gene Symbol: ICA1L
  Gene Name: islet cell autoantigen 1,69kDa-like
  Uniprot ID: Q8NDH6
  ENSP ID: ENSP00000478645

SEQ ID NO: 42118 - protein, 75 aa, Homo sapiens
  Payload ID: 8563
  Gene Symbol: IAH1
  Gene Name: isoamyl acetate-hydrolyzing esterase 1 homolog
  ENSP ID: ENSP00000314400
  MOD_RES (1)..(1): Any amino acid
XEAAGCGSALLWPRLLLFGDSITQFSFQQGGWGASLADRLVRLQYQVGQNYPSKINQERKQFGHPSSSYNFLWGQ

SEQ ID NO: 42119 - protein, 248 aa, Homo sapiens
  Payload ID: 8563
  Gene Symbol: IAH1
  Gene Name: isoamyl acetate-hydrolyzing esterase 1 homolog
  Uniprot ID: Q2TAA2
  ENSP ID: ENSP00000417580
MALCEAAGCGSALLWPRLLLFGDSITQFSFQQGGWGASLADRLVRKCDVLNRGFSGYNTRWAKIILPRLIRKGNSLDIPVAVTIFFGANDSALKDENPKQHIPLEEYAANLKSMVQYLKSVDIPENRVILITPTPLCETAWEEQCIIQGCKLNRLNSVVGEYANACLQVAQDCGTDVLDLWTLMQDSQDFSSYLSDGLHLSPKGNEFLFSHLWPLIEKKVSSLPLLLPYWRDVAEAKPELSLLGDGDH

SEQ ID NO: 42120 - protein, 74 aa, Homo sapiens
  Payload ID: 8563
  Gene Symbol: IAH1
  Gene Name: isoamyl acetate-hydrolyzing esterase 1 homolog
  ENSP ID: ENSP00000418492
MVQYLKSVDIPENRVILITPTPLCETAWEEQCIIQGCKLNRLNSVVGEYANACLQVAQDCGTDVLDLWTLMQDS

SEQ ID NO: 42121 - protein, 135 aa, Homo sapiens
  Payload ID: 8563
  Gene Symbol: IAH1
  Gene Name: isoamyl acetate-hydrolyzing esterase 1 homolog
  Uniprot ID: Q2TAA2
  ENSP ID: ENSP00000419110
MVQYLKSVDIPENRVILITPTPLCETAWEEQCIIQGCKLNRLNSVVGEYANACLQVAQDCGTDVLDLWTLMQDSQDFSSYLSDGLHLSPKGNEFLFSHLWPLIEKKVSSLPLLLPYWRDVAEAKPELSLLGDGDH

SEQ ID NO: 42122 - protein, 135 aa, Homo sapiens; identical to SEQ ID NO: 42121
  Payload ID: 8563
  Gene Symbol: IAH1
  Gene Name: isoamyl acetate-hydrolyzing esterase 1 homolog
  Uniprot ID: Q2TAA2
  ENSP ID: ENSP00000419224

SEQ ID NO: 42123 - protein, 40 aa, Homo sapiens
  Payload ID: 8563
  Gene Symbol: IAH1
  Gene Name: isoamyl acetate-hydrolyzing esterase 1 homolog
  ENSP ID: ENSP00000419368
MALCEAAGCGSALLWPRLLLFGDSITQVTIPGGPKLSFQD

SEQ ID NO: 42124 - protein, 228 aa, Homo sapiens
  Payload ID: 8563
  Gene Symbol: IAH1
  Gene Name: isoamyl acetate-hydrolyzing esterase 1 homolog
  ENSP ID: ENSP00000419807
  MOD_RES (1)..(1): Any amino acid
XARPRAAGVPCSGLACCSSGTPSPRKCDVLNRGFSGYNTRWAKIILPRLIRKGNSLDIPVAVTIFFGANDSALKDENPKQHIPLEEYAANLKSMVQYLKSVDIPENRVILITPTPLCETAWEEQCIIQGCKLNRLNSVVGEYANACLQVAQDCGTDVLDLWTLMQDSQDFSSYLSDGLHLSPKGNEFLFSHLWPLIEKKVSSLPLLLPYWRDVAEAKPELSLLGDGDH

SEQ ID NO: 42125 - protein, 160 aa, Homo sapiens
  Payload ID: 8563
  Gene Symbol: IAH1
  Gene Name: isoamyl acetate-hydrolyzing esterase 1 homolog
  ENSP ID: ENSP00000420532
MQFSFQQGGWGASLADRLVRKCDVLNRGFSGYNTRWAKIILPRLIRKGNSLDIPVAVTIFFGANDSALKDENPKQHIPLEEYAANLKSMVQYLKSVDIPENRVILITPTPLCETAWEEQCIIQGCKLNRLNSVVGEYANACLQVAQDCGTDVLDLWTLMQ

SEQ ID NO: 42126 - protein, 47 aa, Homo sapiens
  Payload ID: 8563
  Gene Symbol: IAH1
  Gene Name: isoamyl acetate-hydrolyzing esterase 1 homolog
  ENSP ID: ENSP00000420562
MVQYLKSVDIPENRVILITPTPLCETAWEEQCIIQGCKLNRLNSVVG

SEQ ID NO: 42127 - protein, 298 aa, Homo sapiens
  Payload ID: 8564
  Gene Symbol: ISOC1
  Gene Name: isochorismatase domain containing 1
  Uniprot ID: Q96CN7
  ENSP ID: ENSP00000173527
MAAAEPAVLALPNSGAGGAGAPSGTVPVLFCFSVFARPSSVPHGAGYELLIQKFLSLYGDQIDMHRKFVVQLFAEEWGQYVDLPKGFAVSERCKVRLVPLQIQLTTLGNLTPSSTVFFCCDMQERFRPAIKYFGDIISVGQRLLQGARILGIPVIVTEQYPKGLGSTVQEIDLTGVKLVLPKTKFSMVLPEVEAALAEIPGVRSVVLFGVETHVCIQQTALELVGRGVEVHIVADATSSRSMMDRMFALERLARTGIIVTTSEAVLLQLVADKDHPKFKEIQNLIKASAPESGLLSKV

SEQ ID NO: 42128 - protein, 188 aa, Homo sapiens
  Payload ID: 8564
  Gene Symbol: ISOC1
  Gene Name: isochorismatase domain containing 1
  ENSP ID: ENSP00000421273
MAAAEPAVLALPNSGAGGAGAPSGTVPVLFCFSVFARPSSVPHGAGYELLIQKFLSLYGDQIDMHRKFVVQLFAEEWGQYVDLPKGFAVSERCKLTTLGNLTPSSTVFFCCDMQERFRPAIKYFGDIISVGQRLLQGARILGIPVIVTEQYPKGLGSTVQEIDLTGVKLVLPKTKFSMVLPEVEAALA

SEQ ID NO: 42129 - protein, 221 aa, Homo sapiens
  Payload ID: 8565
  Gene Symbol: ISOC2
  Gene Name: isochorismatase domain containing 2
  Uniprot ID: Q96AB3
  ENSP ID: ENSP00000085068
MAAARPSLGRVLPGSSVLFLCDMQEKFRHNIAYFPQIVSVAARMLKVARLLEVPVMLTEQYPQGLGPTVPELGTEGLRPLAKTCFSMVPALQQELDSRPQLRSVLLCGIEAQACILDPRSYPGLALTSLYPQNTTLDLLDRGLQVHVVVDACSSRSQVDRLVALARMRQSGAFLSTSEGLILQLVGDAVHPQFKEIQKLIKEPAPDSGLLGLFQGQNSLLH

SEQ ID NO: 42130 - protein, 205 aa, Homo sapiens
  Payload ID: 8565
  Gene Symbol: ISOC2
  Gene Name: isochorismatase domain containing 2
  Uniprot ID: Q96AB3
  ENSP ID: ENSP00000401726
MAAARPSLGRVLPGSSVLFLCDMQEKFRHNIAYFPQIVSVAARMLKVARLLEVPVMLTEQYPQGLGPTVPELGTEGLRPLAKTCFSMVPALQQELDSRPQLRSVLLCGIEAQACILNTTLDLLDRGLQVHVVVDACSSRSQVDRLVALARMRQSGAFLSTSEGLILQLVGDAVHPQFKEIQKLIKEPAPDSGLLGLFQGQNSLLH

SEQ ID NO: 42131 - protein, 135 aa, Homo sapiens
  Payload ID: 8565
  Gene Symbol: ISOC2
  Gene Name: isochorismatase domain containing 2
  Uniprot ID: Q96AB3
  ENSP ID: ENSP00000406364
MAAARPSLGRVLPGSSVLFLCDMQEKFRHNIAYFPQIVSVAARMLKNTTLDLLDRGLQVHVVVDACSSRSQVDRLVALARMRQSGAFLSTSEGLILQLVGDAVHPQFKEIQKLIKEPAPDSGLLGLFQGQNSLLH

SEQ ID NO: 42132 - protein, 178 aa, Homo sapiens
  Payload ID: 8565
  Gene Symbol: ISOC2
  Gene Name: isochorismatase domain containing 2
  ENSP ID: ENSP00000465814
MAAARPSLGRVLPGSSVLFLCDMQEKFRHNIAYFPQIVSVAARMLKVARLLEVPVMLTEQYPQGLGPTVPELGTEGLRPLAKTCFSMVPALQQELDSRPQLRSVLLCGIEAQACILNTTLDLLDRGLQVHVVVDACSSRSQVDRLVALARMRQSGAFLSTSEGLILQLVGDAVHPQFK

SEQ ID NO: 42133 - protein, 174 aa, Homo sapiens
  Payload ID: 8565
  Gene Symbol: ISOC2
  Gene Name: isochorismatase domain containing 2
  ENSP ID: ENSP00000467111
MAAARPSLGRVLPGSSVLFLCDMQEKFRHNIAYFPQIVSVAARMLKVARLLEVPVMLTEQYPQGLGPTVPELGTEGLRPLAKTCFSMVPALQQELDSRPQLRSVLLCGIEAQACILNTTLDLLDRGLQVHVVVDACSSRSQVDRLVALARMRQSGAFLSTSEGLILQLVGDAVH

SEQ ID NO: 42134 - protein, 414 aa, Homo sapiens
  Payload ID: 8566
  Gene Symbol: IDH1
  Gene Name: isocitrate dehydrogenase 1 (NADP+), soluble
  Uniprot ID: O75874
  ENSP ID: ENSP00000260985
MSKKISGGSVVEMQGDEMTRIIWELIKEKLIFPYVELDLHSYDLGIENRDATNDQVTKDAAEAIKKHNVGVKCATITPDEKRVEEFKLKQMWKSPNGTIRNILGGTVFREAIICKNIPRLVSGWVKPIIIGRHAYGDQYRATDFVVPGPGKVEITYTPSDGTQKVTYLVHNFEEGGGVAMGMYNQDKSIEDFAHSSFQMALSKGWPLYLSTKNTILKKYDGRFKDIFQEIYDKQYKSQFEAQKIWYEHRLIDDMVAQAMKSEGGFIWACKNYDGDVQSDSVAQGYGSLGMMTSVLVCPDGKTVEAEAAHGTVTRHYRMYQKGQETSTNPIASIFAWTRGLAHRAKLDNNKELAFFANALEEVSIETIEAGFMTKDLAACIKGLPNVQRSDYLNTFEFMDKLGENLKIKLAQAKL

SEQ ID NO: 42135 - protein, 414 aa, Homo sapiens; identical to SEQ ID NO: 42134
  Payload ID: 8566
  Gene Symbol: IDH1
  Gene Name: isocitrate dehydrogenase 1 (NADP+), soluble
  Uniprot ID: O75874
  ENSP ID: ENSP00000390265

SEQ ID NO: 42136 - protein, 157 aa, Homo sapiens
  Payload ID: 8566
  Gene Symbol: IDH1
  Gene Name: isocitrate dehydrogenase 1 (NADP+), soluble
  ENSP ID: ENSP00000391075
MSKKISGGSVVEMQGDEMTRIIWELIKEKLIFPYVELDLHSYDLGIENRDATNDQVTKDAAEAIKKHNVGVKCATITPDEKRVEEFKLKQMWKSPNGTIRNILGGTVFREAIICKNIPRLVSGWVKPIIIGRHAYGDQYRATDFVVPGPGKVEITYT

SEQ ID NO: 42137 - protein, 62 aa, Homo sapiens
  Payload ID: 8566
  Gene Symbol: IDH1
  Gene Name: isocitrate dehydrogenase 1 (NADP+), soluble
  ENSP ID: ENSP00000396787
MSKKISGGSVVEMQGDEMTRIIWELIKEKLIFPYVELDLHSYDLGIENRDATNDQVTKDAAE

SEQ ID NO: 42138 - protein, 73 aa, Homo sapiens
  Payload ID: 8566
  Gene Symbol: IDH1
  Gene Name: isocitrate dehydrogenase 1 (NADP+), soluble
  ENSP ID: ENSP00000409045
MSKKISGGSVVEMQGDEMTRIIWELIKEKLIFPYVELDLHSYDLGIENRDATNDQVTKDAAEAIKKHNVGVKC

SEQ ID NO: 42139 - protein, 414 aa, Homo sapiens; identical to SEQ ID NO: 42134
  Payload ID: 8566
  Gene Symbol: IDH1
  Gene Name: isocitrate dehydrogenase 1 (NADP+), soluble
  Uniprot ID: O75874
  ENSP ID: ENSP00000410513

SEQ ID NO: 42140 - protein, 452 aa, Homo sapiens
  Payload ID: 8567
  Gene Symbol: IDH2
  Gene Name: isocitrate dehydrogenase 2 (NADP+), mitochondrial
  Uniprot ID: P48735
  ENSP ID: ENSP00000331897
MAGYLRVVRSLCRASGSRPAWAPAALTAPTSQEQPRRHYADKRIKVAKPVVEMDGDEMTRIIWQFIKEKLILPHVDIQLKYFDLGLPNRDQTDDQVTIDSALATQKYSVAVKCATITPDEARVEEFKLKKMWKSPNGTIRNILGGTVFREPIICKNIPRLVPGWTKPITIGRHAHGDQYKATDFVADRAGTFKMVFTPKDGSGVKEWEVYNFPAGGVGMGMYNTDESISGFAHSCFQYAIQKKWPLYMSTKNTILKAYDGRFKDIFQEIFDKHYKTDFDKNKIWYEHRLIDDMVAQVLKSSGGFVWACKNYDGDVQSDILAQGFGSLGLMTSVLVCPDGKTIEAEAAHGTVTRHYREHQKGRPTSTNPIASIFAWTRGLEHRGKLDGNQDLIRFAQMLEKVCVETVESGAMTKDLAGCIHGLSNVKLNEHFLNTTDFLDTIKSNLDRALGRQ

SEQ ID NO: 42141 - protein, 400 aa, Homo sapiens
  Payload ID: 8567
  Gene Symbol: IDH2
  Gene Name: isocitrate dehydrogenase 2 (NADP+), mitochondrial
  Uniprot ID: P48735
  ENSP ID: ENSP00000446147
MDGDEMTRIIWQFIKEKLILPHVDIQLKYFDLGLPNRDQTDDQVTIDSALATQKYSVAVKCATITPDEARVEEFKLKKMWKSPNGTIRNILGGTVFREPIICKNIPRLVPGWTKPITIGRHAHGDQYKATDFVADRAGTFKMVFTPKDGSGVKEWEVYNFPAGGVGMGMYNTDESISGFAHSCFQYAIQKKWPLYMSTKNTILKAYDGRFKDIFQEIFDKHYKTDFDKNKIWYEHRLIDDMVAQVLKSSGGFVWACKNYDGDVQSDILAQGFGSLGLMTSVLVCPDGKTIEAEAAHGTVTRHYREHQKGRPTSTNPIASIFAWTRGLEHRGKLDGNQDLIRFAQMLEKVCVETVESGAMTKDLAGCIHGLSNVKLNEHFLNTTDFLDTIKSNLDRALGRQ

SEQ ID NO: 42142 - protein, 312 aa, Homo sapiens
  Payload ID: 8567
  Gene Symbol: IDH2
  Gene Name: isocitrate dehydrogenase 2 (NADP+), mitochondrial
  ENSP ID: ENSP00000453016
MAGYLRVVRSLCRASGSRPAWAPAALTAPTSQEQPRRHYADKRIKVAKPVVEMDGDEMTRIIWQFIKEKYKATDFVADRAGTFKMVFTPKDGSGVKEWEVYNFPAGGVGMGMYNTDESISGFAHSCFQYAIQKKWPLYMSTKNTILKAYDGRFKDIFQEIFDKHYKTDFDKNKIWYEHRLIDDMVAQVLKSSGGFVWACKNYDGDVQSDILAQGFGSLGLMTSVLVCPDGKTIEAEAAHGTVTRHYREHQKGRPTSTNPIASIFAWTRGLEHRGKLDGNQDLISVKLNEHFLNTTDFLDTIKSNLDRALGRQ

SEQ ID NO: 42143 - protein, 38 aa, Homo sapiens
  Payload ID: 8567
  Gene Symbol: IDH2
  Gene Name: isocitrate dehydrogenase 2 (NADP+), mitochondrial
  ENSP ID: ENSP00000453254
MAGYLRVVRSLCRASGSRPAWAPAALTAPTSQEQPRRH

SEQ ID NO: 42144 - protein, 366 aa, Homo sapiens
  Payload ID: 8568
  Gene Symbol: IDH3A
  Gene Name: isocitrate dehydrogenase 3 (NAD+) alpha
  Uniprot ID: P50213
  ENSP ID: ENSP00000299518
MAGPAWISKVSRLLGAFHNPKQVTRGFTGGVQTVTLIPGDGIGPEISAAVMKIFDAAKAPIQWEERNVTAIQGPGGKWMIPSEAKESMDKNKMGLKGPLKTPIAAGHPSMNLLLRKTFDLYANVRPCVSIEGYKTPYTDVNIVTIRENTEGEYSGIEHVIVDGVVQSIKLITEGASKRIAEFAFEYARNNHRSNVTAVHKANIMRMSDGLFLQKCREVAESCKDIKFNEMYLDTVCLNMVQDPSQFDVLVMPNLYGDILSDLCAGLIGGLGVTPSGNIGANGVAIFESVHGTAPDIAGKDMANPTALLLSAVMMLRHMGLFDHAARIEAACFATIKDGKSLTKDLGGNAKCSDFTEEICRRVKDLD

SEQ ID NO: 42145 - protein, 60 aa, Homo sapiens
  Payload ID: 8568
  Gene Symbol: IDH3A
  Gene Name: isocitrate dehydrogenase 3 (NAD+) alpha
  ENSP ID: ENSP00000452620
MAGPAWISKVSRLLGAFHNPKQVTRGFTGGVQTVTLIPGDGIGPEISAAVMKIFDAAKAL

SEQ ID NO: 42146 - protein, 109 aa, Homo sapiens
  Payload ID: 8568
  Gene Symbol: IDH3A
  Gene Name: isocitrate dehydrogenase 3 (NAD+) alpha
  ENSP ID: ENSP00000452754
MKIFDAAKAPIQWEERNVTAIQGPGGKWMIPSEAKESMDKNKMGLKGPLKTPIAAGHPSMNLLLRKTFDLYANVRPCVSIEGYKTPYTDVNIVTIRENTEGEYSGIEHV

SEQ ID NO: 42147 - protein, 36 aa, Homo sapiens
  Payload ID: 8568
  Gene Symbol: IDH3A
  Gene Name: isocitrate dehydrogenase 3 (NAD+) alpha
  ENSP ID: ENSP00000453008
  MOD_RES (1)..(1): Any amino acid
XGPAWISKVSRLLGAFHNPKQVTRGFTGGINFAKLM

SEQ ID NO: 42148 - protein, 37 aa, Homo sapiens
  Payload ID: 8568
  Gene Symbol: IDH3A
  Gene Name: isocitrate dehydrogenase 3 (NAD+) alpha
  ENSP ID: ENSP00000453033
MAGPAWISKVSRLLGAFHNPKQVTRGFTGGINFAKLM

SEQ ID NO: 42149 - protein, 331 aa, Homo sapiens
  Payload ID: 8568
  Gene Symbol: IDH3A
  Gene Name: isocitrate dehydrogenase 3 (NAD+) alpha
  ENSP ID: ENSP00000453084
MAGPAWISKVSRLLGAFHNPKQVTRGFTGGVQTVTLIPGDGIGPEISAAVMKIFDAAKAPIQWEERNVTAIQGPGGKWMIPSEAKESMDKNKMGLKGYKTPYTDVNIVTIRENTEGEYSGIEHVIVDGVVQSIKLITEGASKRIAEFAFEYARNNHRSNVTAVHKANIMRMSDGLFLQKCREVAESCKDIKFNEMYLDTVCLNMVQDPSQFDVLVMPNLYGDILSDLCAGLIGGLGVTPSGNIGANGVAIFESVHGTAPDIAGKDMANPTALLLSAVMMLRHMGLFDHAARIEAACFATIKDGKSLTKDLGGNAKCSDFTEEICRRVKDLD

SEQ ID NO: 42150 - protein, 42 aa, Homo sapiens
  Payload ID: 8568
  Gene Symbol: IDH3A
  Gene Name: isocitrate dehydrogenase 3 (NAD+) alpha
  ENSP ID: ENSP00000453192
MAGPAWISKVSRLLGAFHNPKQVTRGFTGGEMVLAQKFQLQL

SEQ ID NO: 42151 - protein, 134 aa, Homo sapiens
  Payload ID: 8568
  Gene Symbol: IDH3A
  Gene Name: isocitrate dehydrogenase 3 (NAD+) alpha
  ENSP ID: ENSP00000453222
MKIFDAAKAPIQWEERNVTAIQGPGGKWMIPSEAKESMDKNKMGLKGPLKTPIAAGHPSMNLLLRKTFDLYANVRPCVSIEGYKTPYTDVNIVTIRENTEGEYSGIEHVIVDGVVQSIKLITEGASKRIAEFAF

SEQ ID NO: 42152 - protein, 60 aa, Homo sapiens; identical to SEQ ID NO: 42145
  Payload ID: 8568
  Gene Symbol: IDH3A
  Gene Name: isocitrate dehydrogenase 3 (NAD+) alpha
  ENSP ID: ENSP00000453338

SEQ ID NO: 42153 - protein, 37 aa, Homo sapiens; identical to SEQ ID NO: 42148
  Payload ID: 8568
  Gene Symbol: IDH3A
  Gene Name: isocitrate dehydrogenase 3 (NAD+) alpha
  ENSP ID: ENSP00000453438

SEQ ID NO: 42154 - protein, 48 aa, Homo sapiens
  Payload ID: 8568
  Gene Symbol: IDH3A
  Gene Name: isocitrate dehydrogenase 3 (NAD+) alpha
  ENSP ID: ENSP00000453459
  MOD_RES (1)..(1): Any amino acid
XLFDHAARIEAACFATIKDGKSLTKDLGGNAKCSDFTEEICRRVKDLD

SEQ ID NO: 42155 - protein, 46 aa, Homo sapiens
  Payload ID: 8568
  Gene Symbol: IDH3A
  Gene Name: isocitrate dehydrogenase 3 (NAD+) alpha
  ENSP ID: ENSP00000453480
MKIFDAAKAPIQWEERNVTAIQGPGGKWMIPSEAKESMDKNKMGLK

SEQ ID NO: 42156 - protein, 175 aa, Homo sapiens
  Payload ID: 8568
  Gene Symbol: IDH3A
  Gene Name: isocitrate dehydrogenase 3 (NAD+) alpha
  ENSP ID: ENSP00000453747
MAGPAWISKVSRLLGAFHNPKQVTRGFTGGAPIQWEERNVTAIQGPGGKWMIPSEAKESMDKNKMGLKGPLKTPIAAGHPSMNLLLRKTFDLYANVRPCVSIEGYKTPYTDVNIVTIRENTEGEYSGIEHVIVDGVVQSIKLITEGASKRIAEFAFEYARNNHRSNVTAVHKANI

SEQ ID NO: 42157 - protein, 45 aa, Homo sapiens
  Payload ID: 8568
  Gene Symbol: IDH3A
  Gene Name: isocitrate dehydrogenase 3 (NAD+) alpha
  ENSP ID: ENSP00000453795
MVQDPSQFDVLVMPNLYGDILRFMGRLQTLQARTWRIPQPSCSVP

SEQ ID NO: 42158 - protein, 8 aa, Homo sapiens
  Payload ID: 8568
  Gene Symbol: IDH3A
  Gene Name: isocitrate dehydrogenase 3 (NAD+) alpha
  ENSP ID: ENSP00000453903
MKIFDAAK

SEQ ID NO: 42159 - protein, 87 aa, Homo sapiens
  Payload ID: 8568
  Gene Symbol: IDH3A
  Gene Name: isocitrate dehydrogenase 3 (NAD+) alpha
  ENSP ID: ENSP00000453989
MAGPAWISKVHGTAPDIAGKDMANPTALLLSAVMMLRHMGLFDHAARIEAACFATIKDGKSLTKDLGGNAKCSDFTEEICRRVKDLD

SEQ ID NO: 42160 - protein, 60 aa, Homo sapiens; identical to SEQ ID NO: 42145
  Payload ID: 8568
  Gene Symbol: IDH3A
  Gene Name: isocitrate dehydrogenase 3 (NAD+) alpha
  ENSP ID: ENSP00000453992

SEQ ID NO: 42161 - protein, 37 aa, Homo sapiens; identical to SEQ ID NO: 42148
  Payload ID: 8568
  Gene Symbol: IDH3A
  Gene Name: isocitrate dehydrogenase 3 (NAD+) alpha
  ENSP ID: ENSP00000485769

SEQ ID NO: 42162 - protein, 385 aa, Homo sapiens
  Payload ID: 8569
  Gene Symbol: IDH3B
  Gene Name: isocitrate dehydrogenase 3 (NAD+) beta
  Uniprot ID: O43837
  ENSP ID: ENSP00000370223
MAALSGVRWLTRALVSAGNPGAWRGLSTSAAAHAASRSQAEDVRVEGSFPVTMLPGDGVGPELMHAVKEVFKAAAVPVEFQEHHLSEVQNMASEEKLEQVLSSMKENKVAIIGKIHTPMEYKGELASYDMRLRRKLDLFANVVHVKSLPGYMTRHNNLDLVIIREQTEGEYSSLEHESARGVIECLKIVTRAKSQRIAKFAFDYATKKGRGKVTAVHKANIMKLGDGLFLQCCEEVAELYPKIKFETMIIDNCCMQLVQNPYQFDVLVMPNLYGNIIDNLAAGLVGGAGVVPGESYSAEYAVFETGARHPFAQAVGRNIANPTAMLLSASNMLRHLNLEYHSSMIADAVKKVIKVGKVRTRDMGGYSTTTDFIKSVIGHLQTKGS

SEQ ID NO: 42163 - protein, 383 aa, Homo sapiens
  Payload ID: 8569
  Gene Symbol: IDH3B
  Gene Name: isocitrate dehydrogenase 3 (NAD+) beta
  Uniprot ID: O43837
  ENSP ID: ENSP00000370232
MAALSGVRWLTRALVSAGNPGAWRGLSTSAAAHAASRSQAEDVRVEGSFPVTMLPGDGVGPELMHAVKEVFKAAAVPVEFQEHHLSEVQNMASEEKLEQVLSSMKENKVAIIGKIHTPMEYKGELASYDMRLRRKLDLFANVVHVKSLPGYMTRHNNLDLVIIREQTEGEYSSLEHESARGVIECLKIVTRAKSQRIAKFAFDYATKKGRGKVTAVHKANIMKLGDGLFLQCCEEVAELYPKIKFETMIIDNCCMQLVQNPYQFDVLVMPNLYGNIIDNLAAGLVGGAGVVPGESYSAEYAVFETGARHPFAQAVGRNIANPTAMLLSASNMLRHLNLEYHSSMIADAVKKVIKVGKVRTSDMGGYATCHDFTEAVIAALPHP

SEQ ID NO: 42164 - protein, 387 aa, Homo sapiens
  Payload ID: 8569
  Gene Symbol: IDH3B
  Gene Name: isocitrate dehydrogenase 3 (NAD+) beta
  ENSP ID: ENSP00000482773
MAALSGVRWLTRALVSAGNPGAWRGLSTSAAAHAASRSQAEDVRVEGSFPVTMLPGDGVGPELMHAVKEVFKAAAVPVEFQEHHLSEVQNMASEEKLEQVLSSMKENKVAIIGKIHTPMEYKGELASYDMRLRRKLDLFANVVHVKSLPGYMTRHNNLDLVIIREQTEGEYSSLEHESARGVIECLKIVTRAKSQRIAKFAFDYATKKGRGKVTAVHKANIMKLGDGLFLQCCEEVAELYPKIKFETMIIDNCCMQLVQNPYQFDVLVMPNLYGNIIDNLAAGLVGGAGVVPGESYSAEYAVFETGARHPFAQAVGRNIANPTAMLLSASNMLRHLNLEYHSSMIADAVKKVIKVGKVRTRDMGGYSTTTDFIKSVIGHLQTKGSNL

SEQ ID NO: 42165 - protein, 376 aa, Homo sapiens
  Payload ID: 8569
  Gene Symbol: IDH3B
  Gene Name: isocitrate dehydrogenase 3 (NAD+) beta
  ENSP ID: ENSP00000484922
MAALSGVRWLTRALVSAGNPGAWRGLSTSAAAHAASRSQAEDVRVEGSFPVTMLPGDGVGPELMHAVKEVFKAAAVPVEFQEHHLSEVQNMASEEKLEQVLSSMKENKVAIIGKIHTPMEYKGELASYDMRLRRKLDLFANVVHVKSLPGYMTRHNNLDLVIIREQTEGEYSSLEHESARGVIECLKIVTRAKSQRIAKFAFDYATKKGRGKVTAVHKANIMKLGDGLFLQCCEEVAELYPKIKFETMIIDNCCMQLVQNPYQFDVLVMPNLYGNIIDNLAAGLVGGAGVVPGESYSAEYAVFETGARHPFAQAVGRNIANPTAMLLSASNMLRHLNLEYHSSMIADAVKKVIKVGKIPSAVPSFLLHPLPFSWAI

SEQ ID NO: 42166 - protein, 83 aa, Homo sapiens
  Payload ID: 8569
  Gene Symbol: IDH3B
  Gene Name: isocitrate dehydrogenase 3 (NAD+) beta
  ENSP ID: ENSP00000485997
  MOD_RES (1)..(1): Any amino acid
XKIKFETMIIDNCCMQLVQNPYQFDVLVMPNLYGNIIDNLAAGLVGGAGVVPGCPAPICPGSGQEYSQSHGHAAVGFQHAAAS

SEQ ID NO: 42167 - protein, 145 aa, Homo sapiens
  Payload ID: 8569
  Gene Symbol: IDH3B
  Gene Name: isocitrate dehydrogenase 3 (NAD+) beta
  ENSP ID: ENSP00000487187
  MOD_RES (1)..(1): Any amino acid
XKIKFETMIIDNCCMQLVQNPYQFDVLVMPNLYGNIIDNLAAGLVGGAGVVPGESYSAEYAVFETGARHPFAQAVGRNIANPTAMLLSASNMLRHLNLEYHSSMIADAVKKVIKVGKVRTRDMGGYSTTTDFIKSVIGHLQTKGS

SEQ ID NO: 42168 - protein, 393 aa, Homo sapiens
  Payload ID: 8570
  Gene Symbol: IDH3G
  Gene Name: isocitrate dehydrogenase 3 (NAD+) gamma
  Uniprot ID: P51553
  ENSP ID: ENSP00000217901
MALKVATVAGSAAKAVLGPALLCRPWEVLGAHEVPSRNIFSEQTIPPSAKYGGRHTVTMIPGDGIGPELMLHVKSVFRHACVPVDFEEVHVSSNADEEDIRNAIMAIRRNRVALKGNIETNHNLPPSHKSRNNILRTSLDLYANVIHCKSLPGVVTRHKDIDILIVRENTEGEYSSLEHESVAGVVESLKIITKAKSLRIAEYAFKLAQESGRKKVTAVHKANIMKLGDGLFLQCCREVAARYPQITFENMIVDNTTMQLVSRPQQFDVMVMPNLYGNIVNNVCAGLVGGPGLVAGANYGHVYAVFETATRNTGKSIANKNIANPTATLLASCMMLDHLKLHSYATSIRKAVLASMDNENMHTPDIGGQGTTSEAIQDVIRHIRVINGRAVEA

SEQ ID NO: 42169 - protein, 380 aa, Homo sapiens
  Payload ID: 8570
  Gene Symbol: IDH3G
  Gene Name: isocitrate dehydrogenase 3 (NAD+) gamma
  Uniprot ID: P51553
  ENSP ID: ENSP00000359110
MALKVATVAGSAAKAVLGPALLCRPWEVLGAHEVPSRNIFSEQTIPPSAKYGGRHTVTMIPGDGIGPELMLHVKSVFRHACVPVDFEEVHVSSNADEEDIRNAIMAIRRNRVALKGNIETNHNLPPSHKSRNNILRTSLDLYANVIHCKSLPGVVTRHKDIDILIVRENTEGEYSSLEHESVAGVVESLKIITKAKSLRIAEYAFKLAQESGRKKVTAVHKANIMKLGDGLFLQCCREVAARYPQITFENMIVDNTTMQLVSRPQQFDVMVMPNLYGNIVNNVCAGLVGGPGLVAGANYGHVYAVFETATRNTGKSIANKNIANPTATLLASCMMLDHLKLHSYATSIRKAVLASMDNENVRFPSHPTLLPRPVSPCSLL

SEQ ID NO: 42170 - protein, 340 aa, Homo sapiens
  Payload ID: 8570
  Gene Symbol: IDH3G
  Gene Name: isocitrate dehydrogenase 3 (NAD+) gamma
  ENSP ID: ENSP00000359111
MALKVATVAGSAAKAVLGPALLCRPWEVLGAHEVPSRNIFSEQTIPPSAKYGGRHTVTMIPGDGIGPELMLHVKSVFRHACVPVDFEEVHVSSNADEEDIRNAIMAIRRNRVALKGNIETNHNLPPSHKSRNNILRTSLDLYANVIHCKSLPGVVTRHKDIDILIVRENTEGEYSSLEHESVAGVVESLKIITKAKSLRIAEYAFKLAQESGRKKVTAVHKANIMKLGDGLFLQCCREVAARYPQITFENMIVDNTTMQLVSRPQQFDVMVMPNLYGNIVNNVCAGLVGGPGLVAGANYGHVYAVFETATRNTGKSIANKNIANPTATLLASCMMLDHLK

SEQ ID NO: 42171 - protein, 211 aa, Homo sapiens
  Payload ID: 8570
  Gene Symbol: IDH3G
  Gene Name: isocitrate dehydrogenase 3 (NAD+) gamma
  ENSP ID: ENSP00000400115
  MOD_RES (1)..(1): Any amino acid
XKSLRIAEYAFKLAQESGRKKVTAVHKANIMKLGDGLFLQCCREVAARYPQITFENMIVDNTTMQLVSRPQQFDVMVMPNLYGNIVNNVCAGLVGGPGLVAGANYGHVYAVFETATRNTGKSIANKNIANPTATLLASCMMLDHLKLHSYATSIRKAVLASMDNENGLVCAEPACVLQMHTPDIGGQGTTSEAIQDVIRHIRVINGRAVEA

SEQ ID NO: 42172 - protein, 285 aa, Homo sapiens
  Payload ID: 8570
  Gene Symbol: IDH3G
  Gene Name: isocitrate dehydrogenase 3 (NAD+) gamma
  ENSP ID: ENSP00000401862
MALKVLGAHEVPSRNIFSEQTIPPSAKYGGRHTVTMIPGDGIGPELMLHVKSVFRHACVPVDFEEVHVSSNADEEDIRNAIMAIRRNRVALKGNIETNHNLPPSHKSRNNILRTSLDLYANVIHCKSLPGVVTRHKDIDILIVRENTEGEYSSLEHESVAGVVESLKIITKAKSLRIAEYAFKLAQESGRKKVTAVHKANIMKLGDGLFLQCCREVAARYPQITFENMIVDNTTMQLVSRPQQFDVMVMPNLYGNIVNNVCAGLVGGPGLVAGANYGHVYAVFET

SEQ ID NO: 42173 - protein, 199 aa, Homo sapiens
  Payload ID: 8570
  Gene Symbol: IDH3G
  Gene Name: isocitrate dehydrogenase 3 (NAD+) gamma
  ENSP ID: ENSP00000402747
HVSSNADEEDIRNAIMAIRRNRVALKGLVWLERTLVLGDWVDASSGLFALRCWDSSNIETNHNLPPSHKSRNNILRTSLDLYANVIHCKSLPGVVTRHKDIDILIVRENTEGEYSSLEHESVAGVVESLKIITKAKSLRIAEYAFKLAQESGRKKVTAVHKANIMKLGDGLFLQCCREVAARYPQITFENMIVDNTTMQ

SEQ ID NO: 42174 - protein, 322 aa, Homo sapiens
  Payload ID: 8570
  Gene Symbol: IDH3G
  Gene Name: isocitrate dehydrogenase 3 (NAD+) gamma
  ENSP ID: ENSP00000408529
MIPGDGIGPELMLHVKSVFRHACVPVDFEEVHVSSNADEEDIRNAIMAIRRNRVALKGNIETNHNLPPSHKSRNNILRTSLDLYANVIHCKSLPGVVTRHKDIDILIVRENTEGEYSSLEHESVAGVVESLKIITKAKSLRIAEYAFKLAQESGRKKVTAVHKANIMKLGDGLFLQCCREVAARYPQITFENMIVDNTTMQLVSRPQQFDVMVMPNLYGNIVNNVCAGLVGGPGLVAGANYGHVYAVFETATRNTGKSIANKNIANPTATLLASCMMLDHLKLHSYATSIRKAVLASMDNENVRFPSHPTLLPRPVSPCSLL

SEQ ID NO: 42175 - protein, 322 aa, Homo sapiens; identical to SEQ ID NO: 42174
  Payload ID: 8570
  Gene Symbol: IDH3G
  Gene Name: isocitrate dehydrogenase 3 (NAD+) gamma
  ENSP ID: ENSP00000482665

SEQ ID NO: 42176 - protein, 174 aa, Homo sapiens
  Payload ID: 8571
  Gene Symbol: IARS
  Gene Name: isoleucyl-tRNA synthetase
  ENSP ID: ENSP00000364778
MYTFDQATGGTAQFEAHSDAQALVLLDVTPDQSMVDEGMAREVINRIQKLRKKCNLVPTDEITVYYKAKSEGTYLNSVIESHTEFIFTTIKAPLKPYPVSPSDKVLIQEKTQLKGSELEITLTRGSSLPGPACAYVNLNICANGSEQGEMQWIIPEIYHFWKPRWSIAPGKSKR

SEQ ID NO: 42177 - protein, 1262 aa, Homo sapiens
  Payload ID: 8571
  Gene Symbol: IARS
  Gene Name: isoleucyl-tRNA synthetase
  Uniprot ID: P41252
  ENSP ID: ENSP00000364794
MLQQVPENINFPAEEEKILEFWTEFNCFQECLKQSKHKPKFTFYDGPPFATGLPHYGHILAGTIKDIVTRYAHQSGFHVDRRFGWDCHGLPVEYEIDKTLGIRGPEDVAKMGITEYNNQCRAIVMRYSAEWKSTVSRLGRWIDFDNDYKTLYPQFMESVWWVFKQLYDKGLVYRGVKVMPFSTACNTPLSNFESHQNYKDVQDPSVFVTFPLEEDETVSLVAWTTTPWTLPSNLAVCVNPEMQYVKIKDVARGRLLILMEARLSALYKLESDYEILERFPGAYLKGKKYRPLFDYFLKCKENGAFTVLVDNYVKEEEGTGVVHQAPYFGAEDYRVCMDFNIIRKDSLPVCPVDASGCFTTEVTDFAGQYVKDADKSIIRTLKEQGRLLVATTFTHSYPFCWRSDTPLIYKAVPSWFVRVENMVDQLLRNNDLCYWVPELVREKRFGNWLKDARDWTISRNRYWGTPIPLWVSDDFEEVVCIGSVAELEELSGAKISDLHRESVDHLTIPSRCGKGSLHRISEVFDCWFESGSMPYAQVHYPFENKREFEDAFPADFIAEGIDQTRGWFYTLLVLATALFGQPPFKNVIVNGLVLASDGQKMSKRKKNYPDPVSIIQKYGADALRLYLINSPVVRAENLRFKEEGVRDVLKDVLLPWYNAYRFLIQNVLRLQKEEEIEFLYNENTVRESPNITDRWILSFMQSLIGFFETEMAAYRLYTVVPRLVKFVDILTNWYVRMNRRRLKGENGMEDCVMALETLFSVLLSLCRLMAPYTPFLTELMYQNLKVLIDPVSVQDKDTLSIHYLMLPRVREELIDKKTESAVSQMQSVIELGRVIRDRKTIPIKYPLKEIVVIHQDPEALKDIKSLEKYIIEELNVRKVTLSTDKNKYGIRLRAEPDHMVLGKRLKGAFKAVMTSIKQLSSEELEQFQKTGTIVVEGHELHDEDIRLMYTFDQATGGTAQFEAHSDAQALVLLDVTPDQSMVDEGMAREVINRIQKLRKKCNLVPTDEITVYYKAKSEGTYLNSVIESHTEFIFTTIKAPLKPYPVSPSDKVLIQEKTQLKGSELEITLTRGSSLPGPACAYVNLNICANGSEQGGVLLLENPKGDNRLDLLKLKSVVTSIFGVKNTELAVFHDETEIQNQTDLLSLSGKTLCVTAGSAPSLINSSSTLLCQYINLQLLNAKPQECLMGTVGTLLLENPLGQNGLTHQGLLYEAAKVFGLRSRKLKLFLNETQTQEITEDIPVKTLNMKTVYVSVLPTTADF

SEQ ID NO: 42178 - protein, 330 aa, Homo sapiens
  Payload ID: 8571
  Gene Symbol: IARS
  Gene Name: isoleucyl-tRNA synthetase
  ENSP ID: ENSP00000378922
MLQQVPENINFPAEEEKILEFWTEFNCFQECLKQSKHKPKFTFYDGPPFATGLPHYGHILAGTIKDIVTRYAHQSGFHVDRRFGWDCHGLPVEYEIDKTLGIRGPEDVAKMGITEYNNQCRAIVMRYSAEWKSTVSRLGRWIDFDNDYKTLYPQFMESVWWVFKQLYDKGLVYRGVKVMPFSTACNTPLSNFESHQNYKDVQDPSVFVTFPLEEDETVSLVAWTTTPWTLPSNLAVCVNPEMQYVKIKDVARGRLLILMEARLSALYKLESDYEILERFPGAYLKGKKYRPLFDYFLKCKENGAFTVLVDNYVKEEEGTGVVHQAPYFGA

SEQ ID NO: 42179 - protein, 72 aa, Homo sapiens
  Payload ID: 8571
  Gene Symbol: IARS
  Gene Name: isoleucyl-tRNA synthetase
  ENSP ID: ENSP00000387603
MSNKMLQQVPENINFPAEEEKILEFWTEFNCFQECLKQSKHKPKNMKLIRHWESEDQRMWPKWGLQSITISA

SEQ ID NO: 42180 - protein, 1242 aa, Homo sapiens
  Payload ID: 8571
  Gene Symbol: IARS
  Gene Name: isoleucyl-tRNA synthetase
  ENSP ID: ENSP00000406448
MLQQVPENINFPAEEEKILEFWTEFNCFQECLKQSKHKPKFTFYDGPPFATGLPHYGHILAGTIKDIVTRYAHQSGFHVDRRFGWDCHGLPVEYEIDKTLGIRGPEDVAKMGITEYNNQCRAIVMRYSAEWKSTVSRLGRWIDFDNDYKTLYPQFMESVWWVFKQLYDKGLVYRGVKVMPFSTACNTPLSNFESHQNYKDVQDPSVFVTFPLEEDETVSLVAWTTTPWTLPSNLAVCVNPEMQYVKIKDVARGRLLILMEARLSALYKLESDYEILERFPGAYLKGKKYRPLFDYFLKCKENGAFTVLVDNYVKEEEGTGVVHQAPYFGAEDYRVCMDFNIIRKDSLPVCPVDASGCFTTEVTDFAGQYVKDADKSIIRTLKEQGRLLVATTFTHSYPFCWRSDTPLIYKAVPSWFVRVENMVDQLLRNNDLCYWVPELVREKRFGNWLKDARDWTISRNRYWGTPIPLWVSDDFEEVVCIGSVAELEELSGAKISDLHRESVDHLTIPSRCGKGSLHRISEVFDCWFESGSMPYAQVHYPFENKREFEDAFPADFIAEGIDQTRGWFYTLLVLATALFGQPPFKNVIVNGLVLASDGQKMSKRKKNYPDPVSIIQKYGADALRLYLINSPVVRAENLRFKEEGVRDVLKDVLLPWYNAYRFLIQNVLRLQKEEEIEFLYNENTVRESPNITDRWILSFMQSLIGFFETEMAAYRLYTVVPRLVKFVDILTNWYVRMNRRRLKGENGMEDCVMALETLFSVLLSLCRLMAPYTPFLTELMYQNLKVLIDPVSVQDKDTLSIHYLMLPRVREELIDKKTESAVSQMQSVIELGRVIRDRKTIPIKYPLKEIVVIHQDPEALKDIKSLEKYIIEELNVRKVTLSTDKNKYGIRLRAEPDHMVLGKRLKGAFKAVMTSIKQLSSEELEQFQKTGTIVVEGHELHDEDIRLMYTFDQATGGTAQFEAHSDAQALVLLDVTPDQSMVDEGMAREVINRIQKLRKKCNLVPTDEITVYYKAKSEGTYLNSVIESHTEFIFTTIKAPLKPYPVSPSDKVLIQEKTQLKGSELEITLTRGSSLPGPACAYVNLNICANGSEQGGVLLLENPKGDNRLDLLKLKSVVTSIFGVKNTELAVFHDETEIQNQTDLLSLSGKTLCVTAGSAPSLINSSSTLLCQYINLQLLNAKPQECLMGTVGTLLLENPLGQNGLTHQGLLYEAAKVFGLRSRKLKLFLNETQTQEITEDIP

SEQ ID NO: 42181 - protein, 1152 aa, Homo sapiens
  Payload ID: 8571
  Gene Symbol: IARS
  Gene Name: isoleucyl-tRNA synthetase
  ENSP ID: ENSP00000415020
MGITEYNNQCRAIVMRYSAEWKSTVSRLGRWIDFDNDYKTLYPQFMESVWWVFKQLYDKGLVYRGVKVMPFSTACNTPLSNFESHQNYKDVQDPSVFVTFPLEEDETVSLVAWTTTPWTLPSNLAVCVNPEMQYVKIKDVARGRLLILMEARLSALYKLESDYEILERFPGAYLKGKKYRPLFDYFLKCKENGAFTVLVDNYVKEEEGTGVVHQAPYFGAEDYRVCMDFNIIRKDSLPVCPVDASGCFTTEVTDFAGQYVKDADKSIIRTLKEQGRLLVATTFTHSYPFCWRSDTPLIYKAVPSWFVRVENMVDQLLRNNDLCYWVPELVREKRFGNWLKDARDWTISRNRYWGTPIPLWVSDDFEEVVCIGSVAELEELSGAKISDLHRESVDHLTIPSRCGKGSLHRISEVFDCWFESGSMPYAQVHYPFENKREFEDAFPADFIAEGIDQTRGWFYTLLVLATALFGQPPFKNVIVNGLVLASDGQKMSKRKKNYPDPVSIIQKYGADALRLYLINSPVVRAENLRFKEEGVRDVLKDVLLPWYNAYRFLIQNVLRLQKEEEIEFLYNENTVRESPNITDRWILSFMQSLIGFFETEMAAYRLYTVVPRLVKFVDILTNWYVRMNRRRLKGENGMEDCVMALETLFSVLLSLCRLMAPYTPFLTELMYQNLKVLIDPVSVQDKDTLSIHYLMLPRVREELIDKKTESAVSQMQSVIELGRVIRDRKTIPIKYPLKEIVVIHQDPEALKDIKSLEKYIIEELNVRKVTLSTDKNKYGIRLRAEPDHMVLGKRLKGAFKAVMTSIKQLSSEELEQFQKTGTIVVEGHELHDEDIRLMYTFDQATGGTAQFEAHSDAQALVLLDVTPDQSMVDEGMAREVINRIQKLRKKCNLVPTDEITVYYKAKSEGTYLNSVIESHTEFIFTTIKAPLKPYPVSPSDKVLIQEKTQLKGSELEITLTRGSSLPGPACAYVNLNICANGSEQGGVLLLENPKGDNRLDLLKLKSVVTSIFGVKNTELAVFHDETEIQNQTDLLSLSGKTLCVTAGSAPSLINSSSTLLCQYINLQLLNAKPQECLMGTVGTLLLENPLGQNGLTHQGLLYEAAKVFGLRSRKLKLFLNETQTQEITEDIPVKTLNMKTVYVSVLPTTADF

SEQ ID NO: 42182 - protein, 174 aa, Homo sapiens; identical to SEQ ID NO: 42176
  Payload ID: 8571
  Gene Symbol: IARS
  Gene Name: isoleucyl-tRNA synthetase
  ENSP ID: ENSP00000486469

SEQ ID NO: 42183 - protein, 1012 aa, Homo sapiens
  Payload ID: 8572
  Gene Symbol: IARS2
  Gene Name: isoleucyl-tRNA synthetase 2, mitochondrial
  Uniprot ID: Q9NSE4
  ENSP ID: ENSP00000355889
MRWGLRPRGPGAAALATARSLWGTPRLPCSPGWQGATKRLLVRSVSGASNHQPNSNSGRYRDTVLLPQTSFPMKLLGRQQPDTELEIQQKCGFSELYSWQRERKVKTEFCLHDGPPYANGDPHVGHALNKILKDIANRFHMMNGSKIHFVPGWDCHGLPIEIKVLSELGREAQNLSAMEIRKKARSFAKAAIEKQKSAFIRWGIMADWNNCYYTFDGKYEAKQLRTFYQMYDKGLVYRSYKPVFWSPSSRTALAEAELEYNPEHVSRSIYVKFPLLKPSPKLASLIDGSSPVSILVWTTQPWTIPANEAVCYMPESKYAVVKCSKSGDLYVLAADKVASVASTLETTFETISTLSGVDLENGTCSHPLIPDKASPLLPANHVTMAKGTGLVHTAPAHGMEDYGVASQHNLPMDCLVDEDGVFTDVAGPELQNKAVLEEGTDVVIKMLQTAKNLLKEEKLVHSYPYDWRTKKPVVIRASKQWFINITDIKTAAKELLKKVKFIPGSALNGMVEMMDRRPYWCISRQRVWGVPIPVFHHKTKDEYLINSQTTEHIVKLVEQHGSDIWWTLPPEQLLPKEVLSEVGGPDALEYVPGQDILDIWFDSGTSWSYVLPGPDQRADLYLEGKDQLGGWFQSSLLTSVAARKRAPYKTVIVHGFTLGEKGEKMSKSLGNVIHPDVVVNGGQDQSKEPPYGADVLRWWVADSNVFTEVAIGPSVLNAARDDISKLRNTLRFLLGNVADFNPETDSIPVNDMYVIDQYMLHLLQDLANKITELYKQYDFGKVVRLLRTFYTRELSNFYFSIIKDRLYCEKENDPKRRSCQTALVEILDVIVRSFAPILPHLAEEVFQHIPYIKEPKSVFRTGWISTSSIWKKPGLEEAVESACAMRDSFLGSIPGKNAAEYKVITVIEPGLLFEIIEMLQSEETSSTSQLNELMMASESTLLAQEPREMTADVIELKGKFLINLEGGDIREESSYKVIVMPTTKEKCPRCWKYTAESSDTLCPRCAEVVSGK

SEQ ID NO: 42184 - protein, 284 aa, Homo sapiens
  Payload ID: 8573
  Gene Symbol: IDI1
  Gene Name: isopentenyl-diphosphate delta isomerase 1
  Uniprot ID: Q13907
  ENSP ID: ENSP00000370748
MWRGLALARAIGCAARGRGQWAVRAADCAQSGRHPGPAVVCGRRLISVLEQIRHFVMMPEINTNHLDKQQVQLLAEMCILIDENDNKIGAETKKNCHLNENIEKGLLHRAFSVFLFNTENKLLLQQRSDAKITFPGCFTNTCCSHPLSNPAELEESDALGVRRAAQRRLKAELGIPLEEVPPEEINYLTRIHYKAQSDGIWGEHEIDYILLVRKNVTLNPDPNEIKSYCYVSKEELKELLKKAASGEIKITPWFKIIAATFLFKWWDNLNHLNQFVDHEKIYRM

SEQ ID NO: 42185 - protein, 122 aa, Homo sapiens
  Payload ID: 8573
  Gene Symbol: IDI1
  Gene Name: isopentenyl-diphosphate delta isomerase 1
  ENSP ID: ENSP00000401879
MPEINTNHLDKQQVQLLAEMCILIDENDNKIGAETKKNCHLNENIEKGLLHRAFSVFLFNTENKLLLQQRSDAKITFPGCFTNTCCSHPLSNPAELEESDALGVRRAAQRRLKAELGIPLEE

SEQ ID NO: 42186 - protein, 120 aa, Homo sapiens
  Payload ID: 8573
  Gene Symbol: IDI1
  Gene Name: isopentenyl-diphosphate delta isomerase 1
  ENSP ID: ENSP00000404771
MELDLFLGLDDVFPRLLHGLLHRAFSVFLFNTENKLLLQQRSDAKITFPGCFTNTCCSHPLSNPAELEESDALGVRRAAQRRLKAELGIPLEEVTSSPTQPYKLKPKHTIKRFLIKFLNS

SEQ ID NO: 42187 - protein, 227 aa, Homo sapiens
  Payload ID: 8574
  Gene Symbol: IDI2
  Gene Name: isopentenyl-diphosphate delta isomerase 2
  Uniprot ID: Q9BXS1
  ENSP ID: ENSP00000277517
MSDINLDWVDRRQLQRLEEMLIVVDENDKVIGADTKRNCHLNENIEKGLLHRAFSVVLFNTKNRILIQQRSDTKVTFPGYFTDSCSSHPLYNPAELEEKDAIGVRRAAQRRLQAELGIPGEQISPEDIVFMTIYHHKAKSDRIWGEHEICYLLLVRKNVTLNPDPSETKSILYLSQEELWELLEREARGEVKVTPWLRTIAERFLYRWWPHLDDVTPFVELHKIHRV

SEQ ID NO: 42188 - protein, 401 aa, Homo sapiens
  Payload ID: 8575
  Gene Symbol: ISPD
  Gene Name: isoprenoid synthase domain containing
  Uniprot ID: A4D126
  ENSP ID: ENSP00000382249
MEAGPPGSARPAEPGPCLSGQRGADHTASASLQSVAGTEPGRHPQAVAAVLPAGGCGERMGVPTPKQFCPILERPLISYTLQALERVCWIKDIVVAVTGENMEVMKSIIQKYQHKRISLVEAGVTRHRSIFNGLKALAEDQINSKLSKPEVVIIHDAVRPFVEEGVLLKVVTAAKEHGCSDYDLEFGTECLQLALKYCCTKAKLVEGSPDLWKVTYKRDLYAAESIIKERISQEICVVMDTEEDNKHVGHLLEEVLKSELNHVKVTSEALGHAGRHLQQIILDQCYNFVCVNVTTSDFQETQKLLSMLEESSLCILYPVVVVSVHFLDFKLVPPSQKMENLMQIREFAKEVKERNILLYGLLISYPQDDQKLQESLRQGAIIIASLIKERNSGLIGQLLIA

SEQ ID NO: 42189 - protein, 451 aa, Homo sapiens
  Payload ID: 8575
  Gene Symbol: ISPD
  Gene Name: isoprenoid synthase domain containing
  Uniprot ID: A4D126
  ENSP ID: ENSP00000385478
MEAGPPGSARPAEPGPCLSGQRGADHTASASLQSVAGTEPGRHPQAVAAVLPAGGCGERMGVPTPKQFCPILERPLISYTLQALERVCWIKDIVVAVTGENMEVMKSIIQKYQHKRISLVEAGVTRHRSIFNGLKALAEDQINSKLSKPEVVIIHDAVRPFVEEGVLLKVVTAAKEHGAAGAIRPLVSTVVSPSADGCLDYSLERARHRASEMPQAFLFDVIYEAYQQCSDYDLEFGTECLQLALKYCCTKAKLVEGSPDLWKVTYKRDLYAAESIIKERISQEICVVMDTEEDNKHVGHLLEEVLKSELNHVKVTSEALGHAGRHLQQIILDQCYNFVCVNVTTSDFQETQKLLSMLEESSLCILYPVVVVSVHFLDFKLVPPSQKMENLMQIREFAKEVKERNILLYGLLISYPQDDQKLQESLRQGAIIIASLIKERNSGLIGQLLIA

SEQ ID NO: 42190 - protein, 284 aa, Homo sapiens
  Payload ID: 8576
  Gene Symbol: ICMT
  Gene Name: isoprenylcysteine carboxyl methyltransferase
  Uniprot ID: O60725
  ENSP ID: ENSP00000343552
MAGCAARAPPGSEARLSLATFLLGASVLALPLLTRAGLQGRTGLALYVAGLNALLLLLYRPPRYQIAIRACFLGFVFGCGTLLSFSQSSWSHFGWYMCSLSLFHYSEYLVTAVNNPKSLSLDSFLLNHSLEYTVAALSSWLEFTLENIFWPELKQITWLSVTGLLMVVFGECLRKAAMFTAGSNFNHVVQNEKSDTHTLVTSGVYAWFRHPSYVGWFYWSIGTQVMLCNPICGVSYALTVWRFFRDRTEEEEISLIHFFGEEYLEYKKRVPTGLPFIKGVKVDL

SEQ ID NO: 42191 - protein, 116 aa, Homo sapiens
  Payload ID: 8576
  Gene Symbol: ICMT
  Gene Name: isoprenylcysteine carboxyl methyltransferase
  ENSP ID: ENSP00000466222
MAGCAARAPPGSEARLSLATFLLGASVLALPLLTRAGLQGRTGLALYVAGLNALLLLLYRPPRYQIAIRACFLGFVFGCGTLLSFSQSSWSHFGWSHLVHPHSHCRIFPYTMISVP

SEQ ID NO: 42192 - protein, 94 aa, Homo sapiens
  Payload ID: 8576
  Gene Symbol: ICMT
  Gene Name: isoprenylcysteine carboxyl methyltransferase
  ENSP ID: ENSP00000467999
MAGCAARAPPGSEARLSLATFLLGASVLALPLLTRAGLQGRTGLALYVAGLNALLLLLYRPPRYQIAIRACFLGFVFGCGTLLSFSQSSWSHFG

SEQ ID NO: 42193 - protein, 307 aa, Homo sapiens
  Payload ID: 8577
  Gene Symbol: IVD
  Gene Name: isovaleryl-CoA dehydrogenase
  ENSP ID: ENSP00000417256
  MOD_RES (1)..(1): Any amino acid
XKQLGNLGVLGITAPVQYGGSGLGYLEHVLVMEEISRASGAVGLSYGAHSNLCINQLVRNGNEAQKEKYLPKLISGEYIGALAMSEPNAGSDVVSMKLKAEKKGNHYILNGNKFWITNGPDADVLIVYAKTDLAAVPASRGITAFIVEKGMPGFSTSKKLDKLGMRGSNTCELIFEDCKIPAANILGHENKGVYVLMSGLDLERLVLAGGPLGLMQAVLDHTIPYLHVREAFGQKIGHFQPGSMDLGVCSVNICSWGNNEGQTFSAQHPPGREGETRGQTSLEQVSTARELRCKILLPELTPRVLLP

SEQ ID NO: 42194 - protein, 396 aa, Homo sapiens
  Payload ID: 8577
  Gene Symbol: IVD
  Gene Name: isovaleryl-CoA dehydrogenase
  Uniprot ID: P26440
  ENSP ID: ENSP00000417990
MAEMATATRLLGWRVASWRLRPPLAGFVSQRAHSLLPVDDAINGLSEEQRQEFWKQLGNLGVLGITAPVQYGGSGLGYLEHVLVMEEISRASGAVGLSYGAHSNLCINQLVRNGNEAQKEKYLPKLISGEYIGALAMSEPNAGSDVVSMKLKAEKKGNHYILNGNKFWITNGPDADVLIVYAKTDLAAVPASRGITAFIVEKGMPGFSTSKKLDKLGMRGSNTCELIFEDCKIPAANILGHENKGVYVLMSGLDLERLVLAGGPLGLMQAVLDHTIPYLHVREAFGQKIGHFQLMQGKMADMYTRLMACRQYVYNVAKACDEGHCTAKDCAGVILYSAECATQVALDGIQCFGGNGYINDFPMGRFLRDAKLYEIGAGTSEVRRLVIGRAFNADFH

SEQ ID NO: 42195 - protein, 426 aa, Homo sapiens
  Payload ID: 8577
  Gene Symbol: IVD
  Gene Name: isovaleryl-CoA dehydrogenase
  ENSP ID: ENSP00000418397
MAEMATATRLLGWRVASWRLRPPLAGFVSQRAHSLLPVDDAINGLSEEQRQLRQTMAKFLQEHLAPKAQEIDRSNEFKNLREFWKQLGNLGVLGITAPVQYGGSGLGYLEHVLVMEEISRASGAVGLSYGAHSNLCINQLVRNGNEAQKEKYLPKLISGEYIGALAMSEPNAGSDVVSMKLKAEKKGNHYILNGNKFWITNGPDADVLIVYAKTDLAAVPASRGITAFIVEKGMPGFSTSKKLDKLGMRGSNTCELIFEDCKIPAANILGHENKGVYVLMSGLDLERLVLAGGPLGLMQAVLDHTIPYLHVREAFGQKIGHFQLMQGKMADMYTRLMACRQYVYNVAKACDEGHCTAKDCAGVILYSAECATQVALDGIQCFGGNGYINDFPMGRFLRDAKLYEIGAGTSEVRRLVIGRAFNADFH

SEQ ID NO: 42196 - protein, 145 aa, Homo sapiens
  Payload ID: 8577
  Gene Symbol: IVD
  Gene Name: isovaleryl-CoA dehydrogenase
  ENSP ID: ENSP00000452949
  MOD_RES (1)..(1): Any amino acid
XCINQLVRNGNEAQKEKYLPKLISGEYIGALAMSEPNAGSDVVSMKLKAEKKGNHYILNGNKFWITNGPDADVLIVYAKTDLAAVPASRGITAFIVEKGMPGFSTSKKLDKLGMRGSNTCELIFEDCKIPGSCKRSWTTPFPTCT

SEQ ID NO: 42197 - protein, 243 aa, Homo sapiens
  Payload ID: 8577
  Gene Symbol: IVD
  Gene Name: isovaleryl-CoA dehydrogenase
  ENSP ID: ENSP00000453146
ADVLIVYAKTDLAAVPASRGITAFIVEKGMPGFSTSKKLDKLGMRGSNTCELIFEDCKIPAANILGHENKGVYVLMSGLDLERLVLAGGPLGLMQAVLDHTIPYLHVREAFGQKIGHFQLMQGKMADMYTRLMACRQYVYNVAKACDEGHCTAKDCAGVILYSAECATQVALDGIQCFGHAPQPFLYTEPVNYQAPRKFFSGSQHLADLFRPTPTWEGGRDPRSDVPGAGEHCEGTEMQDPPA

SEQ ID NO: 42198 - protein, 212 aa, Homo sapiens
  Payload ID: 8577
  Gene Symbol: IVD
  Gene Name: isovaleryl-CoA dehydrogenase
  ENSP ID: ENSP00000453821
MVFWWRIGQATYRLWHKGPQSVCSSLTPEQAELRQTMAKFLQEHLAPKAQEIDRSNEFKNLREFWKQLGNLGVLGITAPVQYGGSGLGYLEHVLVMEEISRASGAVGLSYGAHSNLCINQLVRNGNEAQKEKYLPKLISGEYIGALAMSEPNAGSDVVSMKLKAEKKGNHYILNGNKFWITNGPDADVLIVYAKTDLAAVPASRGITAFIVE

SEQ ID NO: 42199 - protein, 41 aa, Homo sapiens
  Payload ID: 8577
  Gene Symbol: IVD
  Gene Name: isovaleryl-CoA dehydrogenase
  ENSP ID: ENSP00000453929
  MOD_RES (1)..(1): Any amino acid
XCDEGHCTAKDCAGVILYSAECATQVALDGIQCFVSRGISS

SEQ ID NO: 42200 - protein, 58 aa, Homo sapiens
  Payload ID: 8577
  Gene Symbol: IVD
  Gene Name: isovaleryl-CoA dehydrogenase
  ENSP ID: ENSP00000454145
  MOD_RES (1)..(1): Any amino acid
XHCTAKDCAGVILYSAECATQVALDGIQCFGHAPQPFLYTEPVNYQAPRKFFSGSQHL

SEQ ID NO: 42201 - protein, 214 aa, Homo sapiens
  Payload ID: 8577
  Gene Symbol: IVD
  Gene Name: isovaleryl-CoA dehydrogenase
  ENSP ID: ENSP00000479359
MAEMATATRLLGWRVASWRLRPPLAGFVSQRAHSLLPVDDAINGLSEEQRQLRQTMAKFLQEHLAPKAQEIDRSNEFKNLRVSWEVRAVGGSQGVGLSCTAAWKSSHSFLEFWKQLGNLGVLGITAPVQYGGSGLGYLEHVLVMEEISRASGAVGLSYGAHSNLCINQLVRNGNEAQKEKYLPKLISGEYIGALAMSEPNAGSDVVSMKLKAEK

SEQ ID NO: 42202 - protein, 464 aa, Homo sapiens
  Payload ID: 8578
  Gene Symbol: ISM1
  Gene Name: isthmin 1, angiogenesis inhibitor
  Uniprot ID: B1AKI9
  ENSP ID: ENSP00000262487
MVRLAAELLLLLGLLLLTLHITVLRGSGAADGPDAAAGNASQAQLQNNLNVGSDTTSETSFSLSKEAPREHLDHQAAHQPFPRPRFRQETGHPSLQRDFPRSFLLDLPNFPDLSKADINGQNPNIQVTIEVVDGPDSEADKDQHPENKPSWSVPSPDWRAWWQRSLSLARANSGDQDYKYDSTSDDSNFLNPPRGWDHTAPGHRTFETKDQPEYDSTDGEGDWSLWSVCSVTCGNGNQKRTRSCGYACTATESRTCDRPNCPGIEDTFRTAATEVSLLAGSEEFNATKLFEVDTDSCERWMSCKSEFLKKYMHKVMNDLPSCPCSYPTEVAYSTADIFDRIKRKDFRWKDASGPKEKLEIYKPTARYCIRSMLSLESTTLAAQHCCYGDNMQLITRGKGAGTPNLISTEFSAELHYKVDVLPWIICKGDWSRYNEARPPNNGQKCTESPSDEDYIKQFQEAREY

SEQ ID NO: 42203 - protein, 76 aa, Homo sapiens
  Payload ID: 8579
  Gene Symbol: ISM2
  Gene Name: isthmin 2
  Uniprot ID: Q6H9L7
  ENSP ID: ENSP00000216481
MRALRDRAGLLLCVLLLAALLEAALGLPVKKPRLRGPRPGSLTRLAEPPFQVRASSERSPAGARNLALCGVAGQGR

SEQ ID NO: 42204 - protein, 571 aa, Homo sapiens
  Payload ID: 8579
  Gene Symbol: ISM2
  Gene Name: isthmin 2
  Uniprot ID: Q6H9L7
  ENSP ID: ENSP00000341490
MRALRDRAGLLLCVLLLAALLEAALGLPVKKPRLRGPRPGSLTRLAEVSASPDPRPLKEEEEAPLLPRTHLQAEPHQHGCWTVTEPAAMTPGNATPPRTPEVTPLRLELQKLPGLANTTLSTPNPDTQASASPDPRPLREEEEARLLPRTHLQAELHQHGCWTVTEPAALTPGNATPPRTQEVTPLLLELQKLPELVHATLSTPNPDNQVTIKVVEDPQAEVSIDLLAEPSNPPPQDTLSWLPALWSFLWGDYKGEEKDRAPGEKGEEKEEDEDYPSEDIEGEDQEDKEEDEEEQALWFNGTTDNWDQGWLAPGDWVFKDSVSYDYEPQKEWSPWSPCSGNCSTGKQQRTRPCGYGCTATETRTCDLPSCPGTEDKDTLGLPSEEWKLLARNATDMHDQDVDSCEKWLNCKSDFLIKYLSQMLRDLPSCPCAYPLEAMDSPVSLQDEHQGRSFRWRDASGPRERLDIYQPTARFCLRSMLSGESSTLAAQHCCYDEDSRLLTRGKGAGMPNLISTDFSPKLHFKFDTTPWILCKGDWSRLHAVLPPNNGRACTDNPLEEEYLAQLQEAKEY

SEQ ID NO: 42205 - protein, 73 aa, Homo sapiens
  Payload ID: 8579
  Gene Symbol: ISM2
  Gene Name: isthmin 2
  ENSP ID: ENSP00000417679
  MOD_RES (1)..(1): Any amino acid
XRLAEVSGGGTGLRSALSVPPPQPAGSSRAGSGTGTHTGSDPPMERGAGAGRKLPDTGRCPGAPDFGASTPRA

SEQ ID NO: 42206 - protein, 104 aa, Homo sapiens
  Payload ID: 8579
  Gene Symbol: ISM2
  Gene Name: isthmin 2
  ENSP ID: ENSP00000419434
  MOD_RES (1)..(1): Any amino acid
XCVLLLAALLEAALGLPVKKPRLRGPRPGSLTRLAEVSGGGTGLRSALSVPPPQPAGSSRAGSGTGTHTGSDPPMERGAGAGRKLPDTGRCPGAPDFGASTPRA

SEQ ID NO: 42207 - protein, 292 aa, Homo sapiens
  Payload ID: 8579
  Gene Symbol: ISM2
  Gene Name: isthmin 2
  Uniprot ID: Q6H9L7
  ENSP ID: ENSP00000420452
MRALRDRAGLLLCVLLLAALLEAALGLPVKKPRLRGPRPGSLTRLAEVSASPDPRPLKEEEEAPLLPRTHLQAEPHQHGCWTVTEPAAMTPGNATPPRTPEVTPLRLELQKLPGLANTTLSTPNPDTQASASPDPRPLREEEEARLLPRTHLQAELHQHGCWTVTEPAALTPGNATPPRTQEVTPLLLELQKLPELVHATLSTPNPDNQTMSLRRSGVPGLPAVGTAALASSRGLGPVAMAALPPRPVPVTCPPVLALRTRTPWASPVRSGSSWPAMLRTCMIKMWTAVRSG

SEQ ID NO: 42208 - protein, 185 aa, Homo sapiens
  Payload ID: 8579
  Gene Symbol: ISM2
  Gene Name: isthmin 2
  ENSP ID: ENSP00000450791
MRALRDRAGLLLCVLLLAALLEAALGLPVKKPRLRGPRPGSLTRLAEVSASPDPRPLKEEEEAPLLPRTHLQAEPHQHGCWTVTEPAAMTPGNATPPRTPEVTPLRLELQKLPGLANTTLSTPNPDTQVTIKVVEDPQAEVSIDLLAEPSNPPPQDTLSWLPALWSFLWGDYKGEEKDRAPGEKG

SEQ ID NO: 42209 - protein, 307 aa, Homo sapiens
  Payload ID: 8580
  Gene Symbol: ISY1
  Gene Name: ISY1 splicing factor homolog
  Uniprot ID: Q9ULR0
  ENSP ID: ENSP00000273541
MARNAEKAMTALARFRQAQLEEGKVKERRPFLASECTELPKAEKWRRQIIGEISKKVAQIQNAGLGEFRIRDLNDEINKLLREKGHWEVRIKELGGPDYGKVGPKMLDHEGKEVPGNRGYKYFGAAKDLPGVRELFEKERQVRWLMPVIPALWEAEAGGSQALPPPRKTRAELMKAIDFEYYGYLDEDDGVIVPLEQEYEKKLRAELVEKWKAEREARLARGEKEEEEEEEEEINIYAVTEEESDEEGSQEKGGDDSQQKFIAHVPVPSQQEIEEALVRRKKMELLQKYASETLQAQSEEARRLLGY

SEQ ID NO: 42210 - protein, 252 aa, Homo sapiens
  Payload ID: 8580
  Gene Symbol: ISY1
  Gene Name: ISY1 splicing factor homolog
  ENSP ID: ENSP00000376970
MARNAEKAMTALARFRQAQLEEGKVKERRPFLASECTELPKAEKWRRQIIGEISKKVAQIQNAGLGEFRIRDLNDEINKLLREKGHWEVRIKELGGPDYGKVGPKMLDHEGKEVPGNRGYKYFGAAKDLPGVRELFEKEPLPPPRKTRAELMKAIDFEYYGYLDEDDGVIVPLEQEYEKKRSQSRVSGKVESRERGSAGKRRKGRGGGRGGRDQHLCSHRGGVGRGRQPGERRGRQPAEVHCSRPCSLAARD

SEQ ID NO: 42211 - protein, 285 aa, Homo sapiens
  Payload ID: 8580
  Gene Symbol: ISY1
  Gene Name: ISY1 splicing factor homolog
  Uniprot ID: Q9ULR0
  ENSP ID: ENSP00000376973
MARNAEKAMTALARFRQAQLEEGKVKERRPFLASECTELPKAEKWRRQIIGEISKKVAQIQNAGLGEFRIRDLNDEINKLLREKGHWEVRIKELGGPDYGKVGPKMLDHEGKEVPGNRGYKYFGAAKDLPGVRELFEKEPLPPPRKTRAELMKAIDFEYYGYLDEDDGVIVPLEQEYEKKLRAELVEKWKAEREARLARGEKEEEEEEEEEINIYAVTEEESDEEGSQEKGGDDSQQKFIAHVPVPSQQEIEEALVRRKKMELLQKYASETLQAQSEEARRLLGY

SEQ ID NO: 42212 - protein, 124 aa, Homo sapiens
  Payload ID: 8580
  Gene Symbol: ISY1
  Gene Name: ISY1 splicing factor homolog
  ENSP ID: ENSP00000422403
MARNAEKAMTALARFRQAQLEEGKVKERRPFLASECTELPKAEKWRRQIIGEISKKVAQIQNAGLGEFRIRDLNDEINKLLREKGHWEVRIKELGGPDYGYMSCQSEPLPDLFSSCVVEILFFL

SEQ ID NO: 42213 - protein, 148 aa, Homo sapiens
  Payload ID: 8580
  Gene Symbol: ISY1
  Gene Name: ISY1 splicing factor homolog
  ENSP ID: ENSP00000426416
AGLGEFRIRDLNDEINKLLREKGHWEVRIKELGGPDYGKVGPKMLDHEGKEVPGNRGYKYFGAAKDLPGVRELFEKEPLPPPRKTRAELMKAIDFEYYGYLDEDDGVIVPLEQEYEKKLGRGRQPGERRGRQPAEVHCSRPCSLAARD

SEQ ID NO: 42214 - protein, 331 aa, Homo sapiens
  Payload ID: 8581
  Gene Symbol: ISY1-RAB43
  Gene Name: ISY1-RAB43 readthrough
  ENSP ID: ENSP00000411822
MARNAEKAMTALARFRQAQLEEGKVKERRPFLASECTELPKAEKWRRQIIGEISKKVAQIQNAGLGEFRIRDLNDEINKLLREKGHWEVRIKELGGPDYGKVGPKMLDHEGKEVPGNRGYKYFGAAKDLPGVRELFEKEPLPPPRKTRAELMKAIDFEYYGYLDEDDGVIVPLEQEYEKKLRAELVEKWKAEREARLARGEKEEEEEEEEEINIYAVTEEESDEEGSQEKGGDDSQQKFIAHVPVPSQQEIEEALVRRKKMELLQKYASETLQAQSEEARRLLGCRSGTRPARSGSAPSPRATTAVPMGPSLPTTSPRGAPSCRCLTGLRM

SEQ ID NO: 42215 - protein, 903 aa, Homo sapiens
  Payload ID: 8582
  Gene Symbol: ITCH
  Gene Name: itchy E3 ubiquitin protein ligase
  Uniprot ID: Q96J02
  ENSP ID: ENSP00000262650
MSDSGSQLGSMGSLTMKSQLQITVISAKLKENKKNWFGPSPYVEVTVDGQSKKTEKCNNTNSPKWKQPLTVIVTPVSKLHFRVWSHQTLKSDVLLGTAALDIYETLKSNNMKLEEVVVTLQLGGDKEPTETIGDLSICLDGLQLESEVVTNGETTCSENGVSLCLPRLECNSAISAHCNLCLPGLSDSPISASRVAGFTGASQNDDGSRSKDETRVSTNGSDDPEDAGAGENRRVSGNNSPSLSNGGFKPSRPPRPSRPPPPTPRRPASVNGSPSATSESDGSSTGSLPPTNTNTNTSEGATSGLIIPLTISGGSGPRPLNPVTQAPLPPGWEQRVDQHGRVYYVDHVEKRTTWDRPEPLPPGWERRVDNMGRIYYVDHFTRTTTWQRPTLESVRNYEQWQLQRSQLQGAMQQFNQRFIYGNQDLFATSQSKEFDPLGPLPPGWEKRTDSNGRVYFVNHNTRITQWEDPRSQGQLNEKPLPEGWEMRFTVDGIPYFVDHNRRTTTYIDPRTGKSALDNGPQIAYVRDFKAKVQYFRFWCQQLAMPQHIKITVTRKTLFEDSFQQIMSFSPQDLRRRLWVIFPGEEGLDYGGVAREWFFLLSHEVLNPMYCLFEYAGKDNYCLQINPASYINPDHLKYFRFIGRFIAMALFHGKFIDTGFSLPFYKRILNKPVGLKDLESIDPEFYNSLIWVKENNIEECDLEMYFSVDKEILGEIKSHDLKPNGGNILVTEENKEEYIRMVAEWRLSRGVEEQTQAFFEGFNEILPQQYLQYFDAKELEVLLCGMQEIDLNDWQRHAIYRHYARTSKQIMWFWQFVKEIDNEKRMRLLQFVTGTCRLPVGGFADLMGSNGPQKFCIEKVGKENWLPRSHTCFNRLDLPPYKSYEQLKEKLLFAIEETEGFGQE

SEQ ID NO: 42216 - protein, 862 aa, Homo sapiens
  Payload ID: 8582
  Gene Symbol: ITCH
  Gene Name: itchy E3 ubiquitin protein ligase
  Uniprot ID: Q96J02
  ENSP ID: ENSP00000363998
MSDSGSQLGSMGSLTMKSQLQITVISAKLKENKKNWFGPSPYVEVTVDGQSKKTEKCNNTNSPKWKQPLTVIVTPVSKLHFRVWSHQTLKSDVLLGTAALDIYETLKSNNMKLEEVVVTLQLGGDKEPTETIGDLSICLDGLQLESEVVTNGETTCSESASQNDDGSRSKDETRVSTNGSDDPEDAGAGENRRVSGNNSPSLSNGGFKPSRPPRPSRPPPPTPRRPASVNGSPSATSESDGSSTGSLPPTNTNTNTSEGATSGLIIPLTISGGSGPRPLNPVTQAPLPPGWEQRVDQHGRVYYVDHVEKRTTWDRPEPLPPGWERRVDNMGRIYYVDHFTRTTTWQRPTLESVRNYEQWQLQRSQLQGAMQQFNQRFIYGNQDLFATSQSKEFDPLGPLPPGWEKRTDSNGRVYFVNHNTRITQWEDPRSQGQLNEKPLPEGWEMRFTVDGIPYFVDHNRRTTTYIDPRTGKSALDNGPQIAYVRDFKAKVQYFRFWCQQLAMPQHIKITVTRKTLFEDSFQQIMSFSPQDLRRRLWVIFPGEEGLDYGGVAREWFFLLSHEVLNPMYCLFEYAGKDNYCLQINPASYINPDHLKYFRFIGRFIAMALFHGKFIDTGFSLPFYKRILNKPVGLKDLESIDPEFYNSLIWVKENNIEECDLEMYFSVDKEILGEIKSHDLKPNGGNILVTEENKEEYIRMVAEWRLSRGVEEQTQAFFEGFNEILPQQYLQYFDAKELEVLLCGMQEIDLNDWQRHAIYRHYARTSKQIMWFWQFVKEIDNEKRMRLLQFVTGTCRLPVGGFADLMGSNGPQKFCIEKVGKENWLPRSHTCFNRLDLPPYKSYEQLKEKLLFAIEETEGFGQE

SEQ ID NO: 42217 - protein, 752 aa, Homo sapiens
  Payload ID: 8582
  Gene Symbol: ITCH
  Gene Name: itchy E3 ubiquitin protein ligase
  Uniprot ID: Q96J02
  ENSP ID: ENSP00000445608
MKLEEVVVTLQLGGDKEPTETIGDLSICLDGLQLESEVVTNGETTCSESASQNDDGSRSKDETRVSTNGSDDPEDAGAGENRRVSGNNSPSLSNGGFKPSRPPRPSRPPPPTPRRPASVNGSPSATSESDGSSTGSLPPTNTNTNTSEGATSGLIIPLTISGGSGPRPLNPVTQAPLPPGWEQRVDQHGRVYYVDHVEKRTTWDRPEPLPPGWERRVDNMGRIYYVDHFTRTTTWQRPTLESVRNYEQWQLQRSQLQGAMQQFNQRFIYGNQDLFATSQSKEFDPLGPLPPGWEKRTDSNGRVYFVNHNTRITQWEDPRSQGQLNEKPLPEGWEMRFTVDGIPYFVDHNRRTTTYIDPRTGKSALDNGPQIAYVRDFKAKVQYFRFWCQQLAMPQHIKITVTRKTLFEDSFQQIMSFSPQDLRRRLWVIFPGEEGLDYGGVAREWFFLLSHEVLNPMYCLFEYAGKDNYCLQINPASYINPDHLKYFRFIGRFIAMALFHGKFIDTGFSLPFYKRILNKPVGLKDLESIDPEFYNSLIWVKENNIEECDLEMYFSVDKEILGEIKSHDLKPNGGNILVTEENKEEYIRMVAEWRLSRGVEEQTQAFFEGFNEILPQQYLQYFDAKELEVLLCGMQEIDLNDWQRHAIYRHYARTSKQIMWFWQFVKEIDNEKRMRLLQFVTGTCRLPVGGFADLMGSNGPQKFCIEKVGKENWLPRSHTCFNRLDLPPYKSYEQLKEKLLFAIEETEGFGQE

SEQ ID NO: 42218 - protein, 903 aa, Homo sapiens; identical to SEQ ID NO: 42215
  Payload ID: 8582
  Gene Symbol: ITCH
  Gene Name: itchy E3 ubiquitin protein ligase
  Uniprot ID: Q96J02
  ENSP ID: ENSP00000480499

SEQ ID NO: 42219 - protein, 862 aa, Homo sapiens; identical to SEQ ID NO: 42216
  Payload ID: 8582
  Gene Symbol: ITCH
  Gene Name: itchy E3 ubiquitin protein ligase
  Uniprot ID: Q96J02
  ENSP ID: ENSP00000484783

SEQ ID NO: 42220 - protein, 819 aa, Homo sapiens
  Payload ID: 8583
  Gene Symbol: IWS1
  Gene Name: IWS1 homolog (S. cerevisiae)
  Uniprot ID: Q96ST2
  ENSP ID: ENSP00000295321
MDSEYYSGDQSDDGGATPVQDERDSGSDGEDDVNEQHSGSDTGSVERHSENETSDREDGLPKGHHVTDSENDEPLNLNASDSESEELHRQKDSDSESEERAEPPASDSENEDVNQHGSDSESEETRKLPGSDSENEELLNGHASDSENEDVGKHPASDSEIEELQKSPASDSETEDALKPQISDSESEEPPRHQASDSENEEPPKPRMSDSESEELPKPQVSDSESEEPPRHQASDSENEELPKPRISDSESEDPPRHQASDSENEELPKPRISDSESEDPPRNQASDSENEELPKPRVSDSESEGPQKGPASDSETEDASRHKQKPESDDDSDRENKGEDTEMQNDSFHSDSHMDRKKFHSSDSEEEEHKKQKMDSDEDEKEGEEEKVAKRKAAVLSDSEDEEKASAKKSRVVSDADDSDSDAVSDKSGKREKTIASDSEEEAGKELSDKKNEEKDLFGSDSESGNEEENLIADIFGESGDEEEEEFTGFNQEDLEEEKGETQVKEAEDSDSDDNIKRGKHMDFLSDFEMMLQRKKSMSGKRRRNRDGGTFISDADDVVSAMIVKMNEAAEEDRQLNNQKKPALKKLTLLPAVVMHLKKQDLKETFIDSGVMSAIKEWLSPLPDRSLPALKIREELLKILQELPSVSQETLKHSGIGRAVMYLYKHPKESRSNKDMAGKLINEWSRPIFGLTSNYKGMTREEREQRDLEQMPQRRRMNSTGGQTPRRDLEKVLTGEEKALRPGDPGFCARARVPMPSNKDYVVRPKWNVEMESSRFQATSKKGISRLDKQMRKFTDIRKKSRSAHAVKISIEGNKMPL

SEQ ID NO: 42221 - protein, 292 aa, Homo sapiens
  Payload ID: 8583
  Gene Symbol: IWS1
  Gene Name: IWS1 homolog (S. cerevisiae)
  ENSP ID: ENSP00000387206
MITLLPRGSDQDPPEEDDGGATPVQDERDSGSDGEDDVNEQHSGSDTGSVERHSENETSDREDGLPKGHHVTDSENDEPLNLNASDSESEELHRQKDSDSESEERAEPPASDSENEDVNQHGSDSESEETRKLPGSDSENEELLNGHASDSENEDVGKHPASDSEIEELQKSPASDSETEDALKPQISDSESEEPPRHQASDSENEEPPKPRMSDSESEELPKPQVSDSESEEPPRHQASDSENEELPKPRISDSESEDPPRHQASDSENEELPKPRISDSESEDPPRNQAS

SEQ ID NO: 42222 - protein, 33 aa, Homo sapiens
  Payload ID: 8583
  Gene Symbol: IWS1
  Gene Name: IWS1 homolog (S. cerevisiae)
  ENSP ID: ENSP00000396710
PMPSNKDYVVRPKWNVEMESSRVLLLLLSVVTP

SEQ ID NO: 42223 - protein, 221 aa, Homo sapiens
  Payload ID: 8584
  Gene Symbol: IZUMO2
  Gene Name: IZUMO family member 2
  Uniprot ID: Q6UXV1
  ENSP ID: ENSP00000293405
MPLALTLLLLSGLGAPGGWGCLQCDPLVLEALGHLRSALIPSRFQLEQLQARAGAVLMGMEGPFFRDYALNVFVGKVETNQLDLVASFVKNQTQHLMGNSLKDEPLLEELVTLRANVIKEFKKVLISYELKACNPKLCRLLKEEVLDCLHCQRITPKCIHKKYCFVDRQPRVALQYQMDSKYPRNQALLGILISVSLAVFVFVVIVVSACTYRQNRKLLLQ

SEQ ID NO: 42224 - protein, 89 aa, Homo sapiens
  Payload ID: 8584
  Gene Symbol: IZUMO2
  Gene Name: IZUMO family member 2
  ENSP ID: ENSP00000469026
  MOD_RES (1)..(1): Any amino acid
XCDPLVLEALGHLRSALIPSRFQLEQLQARAGAVLMGMEGPFFRDYALNVFVGKVETNQLDLVASFVKNQTQHLMGNSLKAAGHGGSCL

SEQ ID NO: 42225 - protein, 93 aa, Homo sapiens
  Payload ID: 8584
  Gene Symbol: IZUMO2
  Gene Name: IZUMO family member 2
  ENSP ID: ENSP00000470525
  MOD_RES (1)..(1): Any amino acid
XTLLLLSGLGAPGGWGCLQCDPLVLEALGHLRSALIPSRFQLEQLQARAGAVLMGMEGPFFRDYALNVFVGKVDKSTGPCGVLCQEPNAALNG

SEQ ID NO: 42226 - protein, 234 aa, Homo sapiens
  Payload ID: 8584
  Gene Symbol: IZUMO2
  Gene Name: IZUMO family member 2
  ENSP ID: ENSP00000472657
  MOD_RES (1)..(1): Any amino acid
XGAPGGWGCLQCDPLVLEALGHLRSALIPSRFQLEQLQARAGAVLMGMEGPFFRDYALNVFVGKVETNQLDLVASFVKNQTQHLMGNSLKDEPLLEELVTLRANVIKEFKKVLISYELKACNPKLCRLLKEEVLDCLHCQRITPKCIHKKYCFVDRQPRVALQYQMDSKYPRNQALLGILISVSLAVFVFVVIVVSWSLALWPKLECNGAILRPWLTATAASQVQAILLPQPPE

SEQ ID NO: 42227 - protein, 127 aa, Homo sapiens
  Payload ID: 8585
  Gene Symbol: IZUMO3
  Gene Name: IZUMO family member 3
  ENSP ID: ENSP00000391107
SACVSSRLLYLLVFYTQNSGVFIYQGKLLDVCQNLESKLKELLKNFSEIVVVEGPILDCWTCLRMTNRCFKGEYCGDEDPRKAENREIALFLILLATAVILGSAVLLFHFCIFHRRKMKAIRRSLKE

SEQ ID NO: 42228 - protein, 239 aa, Homo sapiens
  Payload ID: 8585
  Gene Symbol: IZUMO3
  Gene Name: IZUMO family member 3
  Uniprot ID: Q5VZ72
  ENSP ID: ENSP00000438895
MGDLWLFLLLPLSAFHGVKGCLECDPKFIEDVGSLLGNLIPSEVPGRTQLLERQIKEMIHLSFKVSHSDKRLRVLAVQQVVKLRTWLKNEFYKLGNETWKGVFIYQGKLLDVCQNLESKLKELLKNFSEIACSEDCIVVEGPILDCWTCLRMTNRCFKGEYCGDEDPRKAENREIALFLILLATAVILGSAVLLFHFCIFHRRKMKAIRRSLKEYVEKKLEELMGKIDEKEEKDFRLRK

SEQ ID NO: 42229 - protein, 233 aa, Homo sapiens
  Payload ID: 8585
  Gene Symbol: IZUMO3
  Gene Name: IZUMO family member 3
  ENSP ID: ENSP00000474246
MGDLWLFLLLPLSAFHGVKGCLECDPKFIEDVGSLLGNLIPSEVPGRTQLLERQIKEMIHLSFKVSHSDKRLRVLAVQQVVKLRTWLKNEFYKLGNETWKGVFIYQGKLLDVCQNLESKLKELLKNFSEIVVVEGPILDCWTCLRMTNRCFKGEYCGDEDPRKAENREIALFLILLATAVILGSAVLLFHFCIFHRRKMKAIRRSLKEYVEKKLEELMGKIDEKEEKDFRLRK

SEQ ID NO: 42230 - protein, 208 aa, Homo sapiens
  Payload ID: 8586
  Gene Symbol: IZUMO4
  Gene Name: IZUMO family member 4
  ENSP ID: ENSP00000378709
MALLLCLVCLTAALAHGCLHCHSNFSKKFSFYRHHVNFKSWWVGDIPVSGALLTDWSDDTMKELHLAIPAKITREKLDQVATAVYQMMDQLYQGKMYFPGYFPNELRNIFREQVHLIQNAIIESRIDCQHRCGIFQYETISCNNCTDSHVACFGYNCESSAQWKSAVQGLLNYINNWHNLVSPALRCLEPPHLANLTLEDAAECLKQH

SEQ ID NO: 42231 - protein, 232 aa, Homo sapiens
  Payload ID: 8586
  Gene Symbol: IZUMO4
  Gene Name: IZUMO family member 4
  Uniprot ID: Q1ZYL8
  ENSP ID: ENSP00000378712
MALLLCLVCLTAALAHGCLHCHSNFSKKFSFYRHHVNFKSWWVGDIPVSGALLTDWSDDTMKELHLAIPAKITREKLDQVATAVYQMMDQLYQGKMYFPGYFPNELRNIFREQVHLIQNAIIESRIDCQHRCGIFQYETISCNNCTDSHVACFGYNCESSAQWKSAVQGLLNYINNWHKQDTSMRPRSSAFSWPGTHRATPAFLVSPALRCLEPPHLANLTLEDAAECLKQH

SEQ ID NO: 42232 - protein, 214 aa, Homo sapiens
  Payload ID: 8586
  Gene Symbol: IZUMO4
  Gene Name: IZUMO family member 4
  Uniprot ID: Q1ZYL8
  ENSP ID: ENSP00000378718
MALLLCLVCLTAALAHGCLHCHSNFSKKFSFYRHHVNFKSWWVGDIPVSGALLTDWSDDTMKELHLAIPAKITREKLDQVATAVYQMMDQLYQGKMYFPGYFPNELRNIFREQVHLIQNAIIESRIDCQHRCGIFQYETISCNNCTDSHVACFGYNCESSAQWKSAVQGLLNYINNWHKQDTSMSLVSPALRCLEPPHLANLTLEDAAECLKQH

SEQ ID NO: 42233 - protein, 138 aa, Homo sapiens
  Payload ID: 8586
  Gene Symbol: IZUMO4
  Gene Name: IZUMO family member 4
  ENSP ID: ENSP00000481223
  MOD_RES (1)..(1): Any amino acid
XSALPQQLLQEVLLLPPPCELQVLVGGRHPRVRGAAHRLERRHDEGAAPGHPRQDHPGEAGPSGDSSVPDDGSAVPGEDVLPRVFPQRAAKHLPGAGAPHPERHHRKPHRLSAPLWHLPVRDHLLQQLHRLARRLLWL

SEQ ID NO: 42234 - protein, 152 aa, Homo sapiens
  Payload ID: 8586
  Gene Symbol: IZUMO4
  Gene Name: IZUMO family member 4
  ENSP ID: ENSP00000483922
VSGALLTDWSDDTMKELHLAIPAKITREKLDQVATAVYQMMDQLYQGKMYFPGYFPNELRNIFREQVHLIQNAIIESIFQYETISCNNCTDSHVACFGYNCESSAQWKSAVQGLLNYINNWHNLVSPALRCLEPPHLANLTLEDAAECLKQH

SEQ ID NO: 42235 - protein, 184 aa, Homo sapiens
  Payload ID: 8586
  Gene Symbol: IZUMO4
  Gene Name: IZUMO family member 4
  ENSP ID: ENSP00000484309
MALLLCLVCLTAALAHGCLHCHSNFSKKFSFYRHHVNFKSWWVGDIPVSGALLTDWSDDTMKELHLAIPAKITREKLDQVATAVYQMMDQLYQGKMYFPGKGRETEAGPPHPGTPRPPPEPDLLLPRRLRVFPQRAAKHLPGAGAPHPERHHRKPHRLSAPLWSSAQWKSAVQGLLNYINNWHK

SEQ ID NO: 42236 - protein, 152 aa, Homo sapiens
  Payload ID: 8586
  Gene Symbol: IZUMO4
  Gene Name: IZUMO family member 4
  ENSP ID: ENSP00000484639
  MOD_RES (1)..(1): Any amino acid
XPQQLLQEVLLLPPPCELQVLVGGRHPRVRGAAHRLERRHDEGAAPGHPRQDHPGEAGPSGDSSVPDDGSAVPGEDVLPRVFPQRAAKHLPGAGAPHPERHHRKPHRLSAPLWSSAQWKSAVQGLLNYINNWHKPRSSAFSWPGTHRATPAL

SEQ ID NO: 42237 - protein, 350 aa, Homo sapiens
  Payload ID: 8587
  Gene Symbol: IZUMO1
  Gene Name: izumo sperm-egg fusion 1
  Uniprot ID: Q8IYV9
  ENSP ID: ENSP00000327786
MGPHFTLLCAALAGCLLPAEGCVICDPSVVLALKSLEKDYLPGHLDAKHHKAMMERVENAVKDFQELSLNEDAYMGVVDEATLQKGSWSLLKDLKRITDSDVKGDLFVKELFWMLHLQKETFATYVARFQKEAYCPNKCGVMLQTLIWCKNCKKEVHACRKSYDCGERNVEVPQMEDMILDCELNWHQASEGLTDYSFYRVWGNNTETLVSKGKEATLTKPMVGPEDAGSYRCELGSVNSSPATIINFHVTVLPKMIKEEKPSPNIVTPGEATTESSISLQPLQPEKMLASRLLGLLICGSLALITGLTFAIFRRRKVIDFIKSSLFGLGSGAAEQTQVPKEKATDSRQQ

SEQ ID NO: 42238 - protein, 194 aa, Homo sapiens
  Payload ID: 8587
  Gene Symbol: IZUMO1
  Gene Name: izumo sperm-egg fusion 1
  Uniprot ID: Q8IYV9
  ENSP ID: ENSP00000470144
MGPHFTLLCAALAGCLLPAEGCVICDPSVVLALKSLEKDYLPGHLDAKHHKAMMERVENAVKDFQELSLNEDAYMGVVDEATLQKGSWSLLKDLKRITDSDVKGDLFVKELFWMLHLQKETFATYVARFQKEAYCPNKCGVMLQTLIWCKNCKKEVHACRKSYDCGGERTGPSRRNWCRAECGSSSNGRHDPGL

SEQ ID NO: 42239 - protein, 15 aa, Homo sapiens
  Payload ID: 8587
  Gene Symbol: IZUMO1
  Gene Name: izumo sperm-egg fusion 1
  ENSP ID: ENSP00000471134
MLHLQKETFATYVAR

SEQ ID NO: 42240 - protein, 68 aa, Homo sapiens
  Payload ID: 8587
  Gene Symbol: IZUMO1
  Gene Name: izumo sperm-egg fusion 1
  Uniprot ID: Q8IYV9
  ENSP ID: ENSP00000471815
MGPHFTLLCAALAGCLLPAEGCVICDPSVVLALKSLEKDYLPGHLDAKHHKAMMERMRPHCKRGPGVC

SEQ ID NO: 42241 - protein, 194 aa, Homo sapiens
  Payload ID: 8588
  Gene Symbol: IZUMO1R
  Gene Name: IZUMO1 receptor, JUNO
  ENSP ID: ENSP00000332963
  MOD_RES (1)..(1): Any amino acid
XLLELWTVMPTWAGDELLNICMNAKHHKRVPSPEDKLYEECIPWKDNACCTLTTSWEAHLDVSPLYNFSLFHCGLLMPGCRKHFIQAICFYECSPNLGPWIQPVGSLGWEVAPSGQGERVVNVPLCQEDCEEWWEDCRMSYTCKSNWRGGWDWSQGKNRCPKGAQCLPFSHYFPTPADLCEKTWSNSFKASPER

SEQ ID NO: 42242 - protein, 243 aa, Homo sapiens
  Payload ID: 8588
  Gene Symbol: IZUMO1R
  Gene Name: IZUMO1 receptor, JUNO
  Uniprot ID: A6ND01
  ENSP ID: ENSP00000416935
MACWWPLLLELWTVMPTWAGDELLNICMNAKHHKRVPSPEDKLYEECIPWKDNACCTLTTSWEAHLDVSPLYNFSLFHCGLLMPGCRKHFIQAICFYECSPNLGPWIQPVAPSGQGERVVNVPLCQEDCEEWWEDCRMSYTCKSNWRGGWDWSQGKNRCPKGAQCLPFSHYFPTPADLCEKTWSNSFKASPERRNSGRCLQKWFEPAQGNPNVAVARLFASSAPSWELSYTIMVCSLFLPFLS

SEQ ID NO: 42243 - protein, 842 aa, Homo sapiens
  Payload ID: 8589
  Gene Symbol: JADE1
  Gene Name: jade family PHD finger 1
  Uniprot ID: Q6IE81
  ENSP ID: ENSP00000226319
MKRGRLPSSSEDSDDNGSLSTTWSQNSRSQHRRSSCSRHEDRKPSEVFRTDLITAMKLHDSYQLNPDEYYVLADPWRQEWEKGVQVPVSPGTIPQPVARVVSEEKSLMFIRPKKYIVSSGSEPPELGYVDIRTLADSVCRYDLNDMDAAWLELTNEEFKEMGMPELDEYTMERVLEEFEQRCYDNMNHAIETEEGLGIEYDEDVVCDVCQSPDGEDGNEMVFCDKCNICVHQACYGILKVPEGSWLCRTCALGVQPKCLLCPKKGGAMKPTRSGTKWVHVSCALWIPEVSIGSPEKMEPITKVSHIPSSRWALVCSLCNEKFGASIQCSVKNCRTAFHVTCAFDRGLEMKTILAENDEVKFKSYCPKHSSHRKPEESLGKGAAQENGAPECSPRNPLEPFASLEQNREEAHRVSVRKQKLQQLEDEFYTFVNLLDVARALRLPEEVVDFLYQYWKLKRKVNFNKPLITPKKDEEDNLAKREQDVLFRRLQLFTHLRQDLERVRNLTYMVTRREKIKRSVCKVQEQIFNLYTKLLEQERVSGVPSSCSSSSLENMLLFNSPSVGPDAPKIEDLKWHSAFFRKQMGTSLVHSLKKPHKRDPLQNSPGSEGKTLLKQPDLCGRREGMVVPESFLGLEKTFAEARLISAQQKNGVVMPDHGKRRDNRFHCDLIKGDLKDKSFKQSHKPLRSTDVSQRHLDNTRAATSPGVGQSAPGTRKEIVPKCNGSLIKVNYNQTAVKVPTTPASPVKNWGGFRIPKKGERQQQGEAHDGACHQHSDYPYLGLGRVPAKERAKSKLKSDNENDGYVPDVEMSDSESEASEKKCIHTSSTISRRTDIIRRSILAS

SEQ ID NO: 42244 - protein, 830 aa, Homo sapiens
  Payload ID: 8589
  Gene Symbol: JADE1
  Gene Name: jade family PHD finger 1
  Uniprot ID: Q6IE81
  ENSP ID: ENSP00000388015
MKRGRLPSSSEDSDDNGSLSTTWSQNSRSQHRRSSCSRHEDRKPSEVFRTDLITAMKLHDSYQLNPDEYYVLADPWRQEWEKGVQVPVSPGTIPQPVARPKKYIVSSGSEPPELGYVDIRTLADSVCRYDLNDMDAAWLELTNEEFKEMGMPELDEYTMERVLEEFEQRCYDNMNHAIETEEGLGIEYDEDVVCDVCQSPDGEDGNEMVFCDKCNICVHQACYGILKVPEGSWLCRTCALGVQPKCLLCPKKGGAMKPTRSGTKWVHVSCALWIPEVSIGSPEKMEPITKVSHIPSSRWALVCSLCNEKFGASIQCSVKNCRTAFHVTCAFDRGLEMKTILAENDEVKFKSYCPKHSSHRKPEESLGKGAAQENGAPECSPRNPLEPFASLEQNREEAHRVSVRKQKLQQLEDEFYTFVNLLDVARALRLPEEVVDFLYQYWKLKRKVNFNKPLITPKKDEEDNLAKREQDVLFRRLQLFTHLRQDLERVRNLTYMVTRREKIKRSVCKVQEQIFNLYTKLLEQERVSGVPSSCSSSSLENMLLFNSPSVGPDAPKIEDLKWHSAFFRKQMGTSLVHSLKKPHKRDPLQNSPGSEGKTLLKQPDLCGRREGMVVPESFLGLEKTFAEARLISAQQKNGVVMPDHGKRRDNRFHCDLIKGDLKDKSFKQSHKPLRSTDVSQRHLDNTRAATSPGVGQSAPGTRKEIVPKCNGSLIKVNYNQTAVKVPTTPASPVKNWGGFRIPKKGERQQQGEAHDGACHQHSDYPYLGLGRVPAKERAKSKLKSDNENDGYVPDVEMSDSESEASEKKCIHTSSTISRRTDIIRRSILAS

SEQ ID NO: 42245 - protein, 509 aa, Homo sapiens
  Payload ID: 8589
  Gene Symbol: JADE1
  Gene Name: jade family PHD finger 1
  Uniprot ID: Q6IE81
  ENSP ID: ENSP00000404211
MKRGRLPSSSEDSDDNGSLSTTWSQNSRSQHRRSSCSRHEDRKPSEVFRTDLITAMKLHDSYQLNPDEYYVLADPWRQEWEKGVQVPVSPGTIPQPVARVVSEEKSLMFIRPKKYIVSSGSEPPELGYVDIRTLADSVCRYDLNDMDAAWLELTNEEFKEMGMPELDEYTMERVLEEFEQRCYDNMNHAIETEEGLGIEYDEDVVCDVCQSPDGEDGNEMVFCDKCNICVHQACYGILKVPEGSWLCRTCALGVQPKCLLCPKKGGAMKPTRSGTKWVHVSCALWIPEVSIGSPEKMEPITKVSHIPSSRWALVCSLCNEKFGASIQCSVKNCRTAFHVTCAFDRGLEMKTILAENDEVKFKSYCPKHSSHRKPEESLGKGAAQENGAPECSPRNPLEPFASLEQNREEAHRVSVRKQKLQQLEDEFYTFVNLLDVARALRLPEEVVDFLYQYWKLKRKVNFNKPLITPKKDEEDNLAKREQDVLFRRLQLFTHLRQDLERVMIDTDTL

SEQ ID NO: 42246 - protein, 143 aa, Homo sapiens
  Payload ID: 8589
  Gene Symbol: JADE1
  Gene Name: jade family PHD finger 1
  ENSP ID: ENSP00000421265
MKRGRLPSSSEDSDDNGSLSTTWSQNSRSQHRRSSCSRHEDRKPSEVFRTDLITAMKLHDSYQLNPDEYYVLADPWRQEWEKGVQVPVSPGTIPQPVARVVSEEKSLMFIRPKKYIVSSGSEPPELGYVDIRTLADSVCRYDL

SEQ ID NO: 42247 - protein, 49 aa, Homo sapiens
  Payload ID: 8589
  Gene Symbol: JADE1
  Gene Name: jade family PHD finger 1
  ENSP ID: ENSP00000421778
MKRGRLPSSSEDSDDNGSLSTTWSQNSRSQHRRSSCSRHEDRKPSEGCV

SEQ ID NO: 42248 - protein, 129 aa, Homo sapiens
  Payload ID: 8589
  Gene Symbol: JADE1
  Gene Name: jade family PHD finger 1
  ENSP ID: ENSP00000422445
MKRGRLPSSSEDSDDNGSLSTTWSQNSRSQHRRSSCSRHEDRKPSEVFRTDLITAMKLHDSYQLNPDEYYVLADPWRQEWEKGVQVPVSPGTIPQPVARVVSEEKSLMFIRPKKYIVSSGSEPPELGYV

SEQ ID NO: 42249 - protein, 509 aa, Homo sapiens; identical to SEQ ID NO: 42245
  Payload ID: 8589
  Gene Symbol: JADE1
  Gene Name: jade family PHD finger 1
  Uniprot ID: Q6IE81
  ENSP ID: ENSP00000423737

SEQ ID NO: 42250 - protein, 131 aa, Homo sapiens
  Payload ID: 8589
  Gene Symbol: JADE1
  Gene Name: jade family PHD finger 1
  ENSP ID: ENSP00000424280
MKRGRLPSSSEDSDDNGSLSTTWSQNSRSQHRRSSCSRHEDRKPSEVFRTDLITAMKLHDSYQLNPDEYYVLADPWRQEWEKGVQVPVSPGTIPQPVARVVSEEKSLMFIRPKKYIVSSGSEPPELGYVDI

SEQ ID NO: 42251 - protein, 119 aa, Homo sapiens
  Payload ID: 8589
  Gene Symbol: JADE1
  Gene Name: jade family PHD finger 1
  ENSP ID: ENSP00000425535
MKRGRLPSSSEDSDDNGSLSTTWSQNSRSQHRRSSCSRHEDRKPSEVFRTDLITAMKLHDSYQLNPDEYYVLADPWRQEWEKGVQVPVSPGTIPQPVARVVSEEKSLMFIRPKKYIVSS

SEQ ID NO: 42252 - protein, 842 aa, Homo sapiens; identical to SEQ ID NO: 42243
  Payload ID: 8589
  Gene Symbol: JADE1
  Gene Name: jade family PHD finger 1
  Uniprot ID: Q6IE81
  ENSP ID: ENSP00000425730

SEQ ID NO: 42253 - protein, 136 aa, Homo sapiens
  Payload ID: 8589
  Gene Symbol: JADE1
  Gene Name: jade family PHD finger 1
  ENSP ID: ENSP00000426590
MKRGRLPSSSEDSDDNGSLSTTWSQNSRSQHRRSSCSRHEDRKPSEVFRTDLITAMKLHDSYQLNPDEYYVLADPWRQEWEKGVQVPVSPGTIPQPVARVVSEEKSLMFIRPKKYIVSSGSEPPELGYVDIRTLAD

SEQ ID NO: 42254 - protein, 17 aa, Homo sapiens
  Payload ID: 8589
  Gene Symbol: JADE1
  Gene Name: jade family PHD finger 1
  ENSP ID: ENSP00000426920
MKRGRLPSSSEDSDDNG

SEQ ID NO: 42255 - protein, 842 aa, Homo sapiens; identical to SEQ ID NO: 42243
  Payload ID: 8589
  Gene Symbol: JADE1
  Gene Name: jade family PHD finger 1
  Uniprot ID: Q6IE81
  ENSP ID: ENSP00000482212

SEQ ID NO: 42256 - protein, 842 aa, Homo sapiens; identical to SEQ ID NO: 42243
  Payload ID: 8589
  Gene Symbol: JADE1
  Gene Name: jade family PHD finger 1
  Uniprot ID: Q6IE81
  ENSP ID: ENSP00000483219

SEQ ID NO: 42257 - protein, 834 aa, Homo sapiens
  Payload ID: 8590
  Gene Symbol: JADE2
  Gene Name: jade family PHD finger 2
  ENSP ID: ENSP00000282605
MEEKRRKYSISSDNSDTTDSHATSTSASRCSKLPSSTKSGWPRQNEKKPSEVFRTDLITAMKIPDSYQLSPDDYYILADPWRQEWEKGVQVPAGAEAIPEPVVRILPPLEGPPAQASPSSTMLGEGSQPDWPGGSRYDLDEIDAYWLELINSELKEMERPELDELTLERVLEELETLCHQNMARAIETQEGLGIEYDEDVVCDVCRSPEGEDGNEMVFCDKCNVCVHQACYGILKVPTGSWLCRTCALGVQPKCLLCPKRGGALKPTRSGTKWVHVSCALWIPEVSIGCPEKMEPITKISHIPASRWALSCSLCKECTGTCIQCSMPSCVTAFHVTCAFDHGLEMRTILADNDEVKFKSFCQEHSDGGPRNEPTSEPTEPSQAGEDLEKVTLRKQRLQQLEEDFYELVEPAEVAERLDLAEALVDFIYQYWKLKRKANANQPLLTPKTDEVDNLAQQEQDVLYRRLKLFTHLRQDLERVRNLCYMVTRRERTKHAICKLQEQIFHLQMKLIEQDLCRERSGRRAKGKKSDSKRKGCEGSKGSTEKKEKVKAGPDSVLGQLAGLSTSFPIDGTFFNSWLAQSVQITAENMAMSEWPLNNGHREDPAPGLLSEELLQDEETLLSFMRDPSLRPGDPARKARGRTRLPAKKKPPPPPPQDGPGSRTTPDKAPKKTWGQDAGSGKGGQGPPTRKPPRRTSSHLPSSPAAGDCPILATPESPPPLAPETPDEAASVAADSDVQVPGPAASPKPLGRLRPPRESKVTRRLPGARPDAGMGPPSAVAERPKVSLHFDTETDGYFSDGEMSDSDVEAEDGGVQRGPREAGAEEVVRMGVLAS

SEQ ID NO: 42258 - protein, 791 aa, Homo sapiens
  Payload ID: 8590
  Gene Symbol: JADE2
  Gene Name: jade family PHD finger 2
  ENSP ID: ENSP00000354425
MEEKRRKYSISSDNSDTTDSHATSTSASRCSKLPSSTKSGWPRQNEKKPSEVFRTDLITAMKIPDSYQLSPDDYYILADPWRQEWEKGVQVPAGAEAIPEPVVRILPPLEGPPAQASPSSTMLGEGSQPDWPGGSRYDLDEIDAYWLELINSELKEMERPELDELTLERVLEELETLCHQNMARAIETQEGLGIEYDEDVVCDVCRSPEGEDGNEMVFCDKCNVCVHQACYGILKVPTGSWLCRTCALGVQPKCLLCPKRGGALKPTRSGTKWVHVSCALWIPEVSIGCPEKMEPITKISHIPASRWALSCSLCKECTGTCIQCSMPSCVTAFHVTCAFDHGLEMRTILADNDEVKFKSFCQEHSDGGPRNEPTSEPTEPSQAGEDLEKVTLRKQRLQQLEEDFYELVEPAEVAERLDLAEALVDFIYQYWKLKRKANANQPLLTPKTDEVDNLAQQEQDVLYRRLKLFTHLRQDLERVRNLCYMVTRRERTKHAICKLQEQIFHLQMKLIEQDLCRAGLSTSFPIDGTFFNSWLAQSVQITAENMAMSEWPLNNGHREDPAPGLLSEELLQDEETLLSFMRDPSLRPGDPARKARGRTRLPAKKKPPPPPPQDGPGSRTTPDKAPKKTWGQDAGSGKGGQGPPTRKPPRRTSSHLPSSPAAGDCPILATPESPPPLAPETPDEAASVAADSDVQVPGPAASPKPLGRLRPPRESKVTRRLPGARPDAGMGPPSAVAERPKVSLHFDTETDGYFSDGEMSDSDVEAEDGGVQRGPREAGAEEVVRMGVLAS

SEQ ID NO: 42259 - protein, 790 aa, Homo sapiens
  Payload ID: 8590
  Gene Symbol: JADE2
  Gene Name: jade family PHD finger 2
  Uniprot ID: Q9NQC1
  ENSP ID: ENSP00000378451
MEEKRRKYSISSDNSDTTDSHATSTSASRCSKLPSSTKSGWPRQNEKKPSEVFRTDLITAMKIPDSYQLSPDDYYILADPWRQEWEKGVQVPAGAEAIPEPVVRILPPLEGPPAQASPSSTMLGEGSQPDWPGGSRYDLDEIDAYWLELINSELKEMERPELDELTLERVLEELETLCHQNMARAIETQEGLGIEYDEDVVCDVCRSPEGEDGNEMVFCDKCNVCVHQACYGILKVPTGSWLCRTCALGVQPKCLLCPKRGGALKPTRSGTKWVHVSCALWIPEVSIGCPEKMEPITKISHIPASRWALSCSLCKECTGTCIQCSMPSCVTAFHVTCAFDHGLEMRTILADNDEVKFKSFCQEHSDGGPRNEPTSEPTEPSQAGEDLEKVTLRKQRLQQLEEDFYELVEPAEVAERLDLAEALVDFIYQYWKLKRKANANQPLLTPKTDEVDNLAQQEQDVLYRRLKLFTHLRQDLERVRNLCYMVTRRERTKHAICKLQEQIFHLQMKLIEQDLCRGLSTSFPIDGTFFNSWLAQSVQITAENMAMSEWPLNNGHREDPAPGLLSEELLQDEETLLSFMRDPSLRPGDPARKARGRTRLPAKKKPPPPPPQDGPGSRTTPDKAPKKTWGQDAGSGKGGQGPPTRKPPRRTSSHLPSSPAAGDCPILATPESPPPLAPETPDEAASVAADSDVQVPGPAASPKPLGRLRPPRESKVTRRLPGARPDAGMGPPSAVAERPKVSLHFDTETDGYFSDGEMSDSDVEAEDGGVQRGPREAGAEEVVRMGVLAS

SEQ ID NO: 42260 - protein, 509 aa, Homo sapiens
  Payload ID: 8590
  Gene Symbol: JADE2
  Gene Name: jade family PHD finger 2
  ENSP ID: ENSP00000384671
MEEKRRKYSISSDNSDTTDSHATSTSASRCSKLPSSTKSGWPRQNEKKPSEVFRTDLITAMKIPDSYQLSPDDYYILADPWRQEWEKGVQVPAGAEAIPEPVVRILPPLEGPPAQASPSSTMLGEGSQPDWPGGSRYDLDEIDAYWLELINSELKEMERPELDELTLERVLEELETLCHQNMARAIETQEGLGIEYDEDVVCDVCRSPEGEDGNEMVFCDKCNVCVHQACYGILKVPTGSWLCRTCALGVQPKCLLCPKRGGALKPTRSGTKWVHVSCALWIPEVSIGCPEKMEPITKISHIPASRWALSCSLCKECTGTCIQCSMPSCVTAFHVTCAFDHGLEMRTILADNDEVKFKSFCQEHSDGGPRNEPTSEPTEPSQAGEDLEKVTLRKQRLQQLEEDFYELVEPAEVAERLDLAEALVDFIYQYWKLKRKANANQPLLTPKTDEVDNLAQQEQDVLYRRLKLFTHLRQDLERSGLGGEQRARRVTRRGRAARAPRAALRRKRK

SEQ ID NO: 42261 - protein, 47 aa, Homo sapiens
  Payload ID: 8590
  Gene Symbol: JADE2
  Gene Name: jade family PHD finger 2
  ENSP ID: ENSP00000396026
  MOD_RES (1)..(1): Any amino acid
XRERSGRRAKGKKSDSKRKGCEGSKGSTEKKEKVKAGPDSVLGQLGE

SEQ ID NO: 42262 - protein, 255 aa, Homo sapiens
  Payload ID: 8590
  Gene Symbol: JADE2
  Gene Name: jade family PHD finger 2
  ENSP ID: ENSP00000406189
MEEKRRKYSISSDNSDTTDSHATSTSASRCSKLPSSTKSGWPRQNEKKPSEVFRTDLITAMKIPDSYQLSPDDYYILADPWRQEWEKGVQVPAGAEAIPEPVVRILPPLEGPPAQASPSSTMLGEGSQPDWPGGSRYDLDEIDAYWLELINSELKEMERPELDELTLERVLEELETLCHQNMARAIETQEGLGIEYDEDVVCDVCRSPEGEDGNEMVFCDKCNVCVHQACYGILKVPTGSWLCRTCALGVQPKCL

SEQ ID NO: 42263 - protein, 149 aa, Homo sapiens
  Payload ID: 8590
  Gene Symbol: JADE2
  Gene Name: jade family PHD finger 2
  ENSP ID: ENSP00000422991
MEEKRRKYSISSDNSDTTDSHATSTSASRCSKLPSSTKSGWPRQNEKKPSEVFRTDLITAMKIPDSYQLSPDDYYILADPWRQEWEKGVQVPAGAEAIPEPVVRILPPLEGPPAQASPSSTMLGEGSQPDWPGGSRYDLDEIDAYWLEL

SEQ ID NO: 42264 - protein, 246 aa, Homo sapiens
  Payload ID: 8590
  Gene Symbol: JADE2
  Gene Name: jade family PHD finger 2
  ENSP ID: ENSP00000483173
MAMSEWPLNNGHREDPAPGLLSEELLQDEETLLSFMRDPSLRPGDPARKARGRTRLPAKKKPPPPPPQDGPGSRTTPDKAPKKTWGQDAGSGKGGQGPPTRKPPRRTSSHLPSSPAAGDCPILATPESPPPLAPETPDEAASVAADSDVQVPGPAASPKPLGRLRPPRESKVTRRLPGARPDAGMGPPSAVAERPKVSLHFDTETDGYFSDGEMSDSDVEAEDGGVQRGPREAGAEEVVRMGVLAS

SEQ ID NO: 42265 - protein, 186 aa, Homo sapiens
  Payload ID: 8591
  Gene Symbol: JADE3
  Gene Name: jade family PHD finger 3
  ENSP ID: ENSP00000391009
MKRHRPVSSSDSSDESPSTSFTSGSMYRIKSKIPNEHKKPAEVFRKDLISAMKLPDSHHINPDSYYLFADTWKEEWEKGVQVPASPDTVPQPSLRIIAEKVKDVLFIRPRKYIHCSSPDTTEPGYINIMELAASVCRYDLDDMDIFWLQELNEDLAEMGCGPVDENLMEKTVEVLERHCHENMNHA

SEQ ID NO: 42266 - protein, 114 aa, Homo sapiens
  Payload ID: 8591
  Gene Symbol: JADE3
  Gene Name: jade family PHD finger 3
  ENSP ID: ENSP00000400584
MKRHRPVSSSDSSDESPSTSFTSGSMYRIKSKIPNEHKKPAEVFRKDLISAMKLPDSHHINPDSYYLFADTWKEEWEKGVQVPASPDTVPQPSLRIIAEKVKDVLFIRPRKYIH

SEQ ID NO: 42267 - protein, 823 aa, Homo sapiens
  Payload ID: 8591
  Gene Symbol: JADE3
  Gene Name: jade family PHD finger 3
  Uniprot ID: Q92613
  ENSP ID: ENSP00000479377
MKRHRPVSSSDSSDESPSTSFTSGSMYRIKSKIPNEHKKPAEVFRKDLISAMKLPDSHHINPDSYYLFADTWKEEWEKGVQVPASPDTVPQPSLRIIAEKVKDVLFIRPRKYIHCSSPDTTEPGYINIMELAASVCRYDLDDMDIFWLQELNEDLAEMGCGPVDENLMEKTVEVLERHCHENMNHAIETEEGLGIEYDEDVICDVCRSPDSEEGNDMVFCDKCNVCVHQACYGILKVPEGSWLCRSCVLGIYPQCVLCPKKGGALKTTKTGTKWAHVSCALWIPEVSIACPERMEPITKISHIPPSRWALVCNLCKLKTGACIQCSIKSCITAFHVTCAFEHGLEMKTILDEGDEVKFKSYCLKHSQNRQKLGEAEYPHHRAKEQSQAKSEKTSLRAQKLRELEEEFYSLVRVEDVAAELGMPTLAVDFIYNYWKLKRKSNFNKPLFPPKEDEENGLVQPKEESIHTRMRMFMHLRQDLERVRNLCYMISRREKLKLSHNKIQEQIFGLQVQLLNQEIDAGLPLTNALENSLFYPPPRITLKLKMPKSTPEDHRNSSTETDQQPHSPDSSSSVHSIRNMQVPQESLEMRTKSYPRYPLESKNNRLLASLSHSRSEAKESSPAWRTPSSECYHGQSLGKPLVLQAALHGQSSIGNGKSQPNSKFAKSNGLEGSWSGNVTQKDSSSEMFCDQEPVFSPHLVSQGSFRKSTVEHFSRSFKETTNRWVKNTEDLQCYVKPTKNMSPKEQFWGRQVLRRSAGRAPYQENDGYCPDLELSDSEAESDGNKEKVRVRKDSSDRENPPHDSRRDCHGKSKTHPLSHSSMQR

SEQ ID NO: 42268 - protein, 823 aa, Homo sapiens; identical to SEQ ID NO: 42267
  Payload ID: 8591
  Gene Symbol: JADE3
  Gene Name: jade family PHD finger 3
  Uniprot ID: Q92613
  ENSP ID: ENSP00000481850

SEQ ID NO: 42269 - protein, 1218 aa, Homo sapiens
  Payload ID: 8592
  Gene Symbol: JAG1
  Gene Name: jagged 1
  Uniprot ID: P78504
  ENSP ID: ENSP00000254958
MRSPRTRGRSGRPLSLLLALLCALRAKVCGASGQFELEILSMQNVNGELQNGNCCGGARNPGDRKCTRDECDTYFKVCLKEYQSRVTAGGPCSFGSGSTPVIGGNTFNLKASRGNDRNRIVLPFSFAWPRSYTLLVEAWDSSNDTVQPDSIIEKASHSGMINPSRQWQTLKQNTGVAHFEYQIRVTCDDYYYGFGCNKFCRPRDDFFGHYACDQNGNKTCMEGWMGPECNRAICRQGCSPKHGSCKLPGDCRCQYGWQGLYCDKCIPHPGCVHGICNEPWQCLCETNWGGQLCDKDLNYCGTHQPCLNGGTCSNTGPDKYQCSCPEGYSGPNCEIAEHACLSDPCHNRGSCKETSLGFECECSPGWTGPTCSTNIDDCSPNNCSHGGTCQDLVNGFKCVCPPQWTGKTCQLDANECEAKPCVNAKSCKNLIASYYCDCLPGWMGQNCDININDCLGQCQNDASCRDLVNGYRCICPPGYAGDHCERDIDECASNPCLNGGHCQNEINRFQCLCPTGFSGNLCQLDIDYCEPNPCQNGAQCYNRASDYFCKCPEDYEGKNCSHLKDHCRTTPCEVIDSCTVAMASNDTPEGVRYISSNVCGPHGKCKSQSGGKFTCDCNKGFTGTYCHENINDCESNPCRNGGTCIDGVNSYKCICSDGWEGAYCETNINDCSQNPCHNGGTCRDLVNDFYCDCKNGWKGKTCHSRDSQCDEATCNNGGTCYDEGDAFKCMCPGGWEGTTCNIARNSSCLPNPCHNGGTCVVNGESFTCVCKEGWEGPICAQNTNDCSPHPCYNSGTCVDGDNWYRCECAPGFAGPDCRININECQSSPCAFGATCVDEINGYRCVCPPGHSGAKCQEVSGRPCITMGSVIPDGAKWDDDCNTCQCLNGRIACSKVWCGPRPCLLHKGHSECPSGQSCIPILDDQCFVHPCTGVGECRSSSLQPVKTKCTSDSYYQDNCANITFTFNKEMMSPGLTTEHICSELRNLNILKNVSAEYSIYIACEPSPSANNEIHVAISAEDIRDDGNPIKEITDKIIDLVSKRDGNSSLIAAVAEVRVQRRPLKNRTDFLVPLLSSVLTVAWICCLVTAFYWCLRKRRKPGSHTHSASEDNTTNNVREQLNQIKNPIEKHGANTVPIKDYENKNSKMSKIRTHNSEVEEDDMDKHQQKARFAKQPAYTLVDREEKPPNGTPTKHPNWTNKQDNRDLESAQSLNRMEYIV

SEQ ID NO: 42270 - protein, 172 aa, Homo sapiens
  Payload ID: 8592
  Gene Symbol: JAG1
  Gene Name: jagged 1
  ENSP ID: ENSP00000481034
  MOD_RES (1)..(1): Any amino acid
XPEDYEGKNCSHLKDHCRTTPCEVIDSCTVAMASNDTPEGVRYISSNVCGPHGKCKSQSGGKFTCDCNKGFTGTYCHENINDCESNPCRNGGTCIDGVNSYKCICSDGWEGAYCETSESATLWGALGCMGHVGGIPLQRGKTFFVLEISGSKTAVISALGQYHLCLICIYES

SEQ ID NO: 42271 - protein, 74 aa, Homo sapiens
  Payload ID: 8592
  Gene Symbol: JAG1
  Gene Name: jagged 1
  ENSP ID: ENSP00000484139
  MOD_RES (1)..(1): Any amino acid
XCQLDANECEAKPCVNAKSCKNLIASYYCDCLPGWMGQNCDININDCLGQCQNDASCRAITVRETSMNVPATPV

SEQ ID NO: 42272 - protein, 1238 aa, Homo sapiens
  Payload ID: 8593
  Gene Symbol: JAG2
  Gene Name: jagged 2
  Uniprot ID: Q9Y219
  ENSP ID: ENSP00000328169
MRAQGRGRLPRRLLLLLALWVQAARPMGYFELQLSALRNVNGELLSGACCDGDGRTTRAGGCGHDECDTYVRVCLKEYQAKVTPTGPCSYGHGATPVLGGNSFYLPPAGAAGDRARARARAGGDQDPGLVVIPFQFAWPRSFTLIVEAWDWDNDTTPNEELLIERVSHAGMINPEDRWKSLHFSGHVAHLELQIRVRCDENYYSATCNKFCRPRNDFFGHYTCDQYGNKACMDGWMGKECKEAVCKQGCNLLHGGCTVPGECRCSYGWQGRFCDECVPYPGCVHGSCVEPWQCNCETNWGGLLCDKDLNYCGSHHPCTNGGTCINAEPDQYRCTCPDGYSGRNCEKAEHACTSNPCANGGSCHEVPSGFECHCPSGWSGPTCALDIDECASNPCAAGGTCVDQVDGFECICPEQWVGATCQLDANECEGKPCLNAFSCKNLIGGYYCDCIPGWKGINCHINVNDCRGQCQHGGTCKDLVNGYQCVCPRGFGGRHCELERDECASSPCHSGGLCEDLADGFHCHCPQGFSGPLCEVDVDLCEPSPCRNGARCYNLEGDYYCACPDDFGGKNCSVPREPCPGGACRVIDGCGSDAGPGMPGTAASGVCGPHGRCVSQPGGNFSCICDSGFTGTYCHENIDDCLGQPCRNGGTCIDEVDAFRCFCPSGWEGELCDTNPNDCLPDPCHSRGRCYDLVNDFYCACDDGWKGKTCHSREFQCDAYTCSNGGTCYDSGDTFRCACPPGWKGSTCAVAKNSSCLPNPCVNGGTCVGSGASFSCICRDGWEGRTCTHNTNDCNPLPCYNGGICVDGVNWFRCECAPGFAGPDCRINIDECQSSPCAYGATCVDEINGYRCSCPPGRAGPRCQEVIGFGRSCWSRGTPFPHGSSWVEDCNSCRCLDGRRDCSKVWCGWKPCLLAGQPEALSAQCPLGQRCLEKAPGQCLRPPCEAWGECGAEEPPSTPCLPRSGHLDNNCARLTLHFNRDHVPQGTTVGAICSGIRSLPATRAVARDRLLVLLCDRASSGASAVEVAVSFSPARDLPDSSLIQGAAHAIVAAITQRGNSSLLLAVTEVKVETVVTGGSSTGLLVPVLCGAFSVLWLACVVLCVWWTRKRRKERERSRLPREESANNQWAPLNPIRNPIERPGGHKDVLYQCKNFTPPPRRADEALPGPAGHAAVREDEEDEDLGRGEEDSLEAEKFLSHKFTKDPGRSPGRPAHWASGPKVDNRAVRSINEARYAGKE

SEQ ID NO: 42273 - protein, 1200 aa, Homo sapiens
  Payload ID: 8593
  Gene Symbol: JAG2
  Gene Name: jagged 2
  Uniprot ID: Q9Y219
  ENSP ID: ENSP00000328566
MRAQGRGRLPRRLLLLLALWVQAARPMGYFELQLSALRNVNGELLSGACCDGDGRTTRAGGCGHDECDTYVRVCLKEYQAKVTPTGPCSYGHGATPVLGGNSFYLPPAGAAGDRARARARAGGDQDPGLVVIPFQFAWPRSFTLIVEAWDWDNDTTPNEELLIERVSHAGMINPEDRWKSLHFSGHVAHLELQIRVRCDENYYSATCNKFCRPRNDFFGHYTCDQYGNKACMDGWMGKECKEAVCKQGCNLLHGGCTVPGECRCSYGWQGRFCDECVPYPGCVHGSCVEPWQCNCETNWGGLLCDKDLNYCGSHHPCTNGGTCINAEPDQYRCTCPDGYSGRNCEKAEHACTSNPCANGGSCHEVPSGFECHCPSGWSGPTCALDIDECASNPCAAGGTCVDQVDGFECICPEQWVGATCQLDVNDCRGQCQHGGTCKDLVNGYQCVCPRGFGGRHCELERDECASSPCHSGGLCEDLADGFHCHCPQGFSGPLCEVDVDLCEPSPCRNGARCYNLEGDYYCACPDDFGGKNCSVPREPCPGGACRVIDGCGSDAGPGMPGTAASGVCGPHGRCVSQPGGNFSCICDSGFTGTYCHENIDDCLGQPCRNGGTCIDEVDAFRCFCPSGWEGELCDTNPNDCLPDPCHSRGRCYDLVNDFYCACDDGWKGKTCHSREFQCDAYTCSNGGTCYDSGDTFRCACPPGWKGSTCAVAKNSSCLPNPCVNGGTCVGSGASFSCICRDGWEGRTCTHNTNDCNPLPCYNGGICVDGVNWFRCECAPGFAGPDCRINIDECQSSPCAYGATCVDEINGYRCSCPPGRAGPRCQEVIGFGRSCWSRGTPFPHGSSWVEDCNSCRCLDGRRDCSKVWCGWKPCLLAGQPEALSAQCPLGQRCLEKAPGQCLRPPCEAWGECGAEEPPSTPCLPRSGHLDNNCARLTLHFNRDHVPQGTTVGAICSGIRSLPATRAVARDRLLVLLCDRASSGASAVEVAVSFSPARDLPDSSLIQGAAHAIVAAITQRGNSSLLLAVTEVKVETVVTGGSSTGLLVPVLCGAFSVLWLACVVLCVWWTRKRRKERERSRLPREESANNQWAPLNPIRNPIERPGGHKDVLYQCKNFTPPPRRADEALPGPAGHAAVREDEEDEDLGRGEEDSLEAEKFLSHKFTKDPGRSPGRPAHWASGPKVDNRAVRSINEARYAGKE

SEQ ID NO: 42274 - protein, 183 aa, Homo sapiens
  Payload ID: 8594
  Gene Symbol: JAGN1
  Gene Name: jagunal homolog 1
  Uniprot ID: Q8N5M9
  ENSP ID: ENSP00000306106
MASRAGPRAAGTDGSDFQHRERVAMHYQMSVTLKYEIKKLIYVHLVIWLLLVAKMSVGHLRLLSHDQVAMPYQWEYPYLLSILPSLLGLLSFPRNNISYLVLSMISMGLFSIAPLIYGSMEMFPAAQQLYRHGKAYRFLFGFSAVSIMYLVLVLAVQVHAWQLYYSKKLLDSWFTSTQEKKHK

SEQ ID NO: 42275 - protein, 181 aa, Homo sapiens
  Payload ID: 8594
  Gene Symbol: JAGN1
  Gene Name: jagunal homolog 1
  ENSP ID: ENSP00000481606
MASRAGPRAAGTDGSDFQHRERVAMHYQMSVTLKYEIKKLIYVHLVIWLLLVAKMSVGHLRLLSHDQVAMPYQWEYPYLLSILPSLLGLLSFPRNNISYLVLSMISMGLFHRSTHLWQHGDVPCCTAATAMARPTVSSLVFLPFPMYLVLVLAVQVHAWQLYYSKKLLDSWFTSTQEKKHK

SEQ ID NO: 42276 - protein, 1154 aa, Homo sapiens
  Payload ID: 8595
  Gene Symbol: JAK1
  Gene Name: Janus kinase 1
  Uniprot ID: P23458
  ENSP ID: ENSP00000343204
MQYLNIKEDCNAMAFCAKMRSSKKTEVNLEAPEPGVEVIFYLSDREPLRLGSGEYTAEELCIRAAQACRISPLCHNLFALYDENTKLWYAPNRTITVDDKMSLRLHYRMRFYFTNWHGTNDNEQSVWRHSPKKQKNGYEKKKIPDATPLLDASSLEYLFAQGQYDLVKCLAPIRDPKTEQDGHDIENECLGMAVLAISHYAMMKKMQLPELPKDISYKRYIPETLNKSIRQRNLLTRMRINNVFKDFLKEFNNKTICDSSVSTHDLKVKYLATLETLTKHYGAEIFETSMLLISSENEMNWFHSNDGGNVLYYEVMVTGNLGIQWRHKPNVVSVEKEKNKLKRKKLENKHKKDEEKNKIREEWNNFSYFPEITHIVIKESVVSINKQDNKKMELKLSSHEEALSFVSLVDGYFRLTADAHHYLCTDVAPPLIVHNIQNGCHGPICTEYAINKLRQEGSEEGMYVLRWSCTDFDNILMTVTCFEKSEQVQGAQKQFKNFQIEVQKGRYSLHGSDRSFPSLGDLMSHLKKQILRTDNISFMLKRCCQPKPREISNLLVATKKAQEWQPVYPMSQLSFDRILKKDLVQGEHLGRGTRTHIYSGTLMDYKDDEGTSEEKKIKVILKVLDPSHRDISLAFFEAASMMRQVSHKHIVYLYGVCVRDVENIMVEEFVEGGPLDLFMHRKSDVLTTPWKFKVAKQLASALSYLEDKDLVHGNVCTKNLLLAREGIDSECGPFIKLSDPGIPITVLSRQECIERIPWIAPECVEDSKNLSVAADKWSFGTTLWEICYNGEIPLKDKTLIEKERFYESRCRPVTPSCKELADLMTRCMNYDPNQRPFFRAIMRDINKLEEQNPDIVSEKKPATEVDPTHFEKRFLKRIRDLGEGHFGKVELCRYDPEGDNTGEQVAVKSLKPESGGNHIADLKKEIEILRNLYHENIVKYKGICTEDGGNGIKLIMEFLPSGSLKEYLPKNKNKINLKQQLKYAVQICKGMDYLGSRQYVHRDLAARNVLVESEHQVKIGDFGLTKAIETDKEYYTVKDDRDSPVFWYAPECLMQSKFYIASDVWSFGVTLHELLTYCDSDSSPMALFLKMIGPTHGQMTVTRLVNTLKEGKRLPCPPNCPDEVYQLMRKCWEFQPSNRTSFQNLIEGFEALLK

SEQ ID NO: 42277 - protein, 1132 aa, Homo sapiens
  Payload ID: 8596
  Gene Symbol: JAK2
  Gene Name: Janus kinase 2
  Uniprot ID: O60674
  ENSP ID: ENSP00000371067
MGMACLTMTEMEGTSTSSIYQNGDISGNANSMKQIDPVLQVYLYHSLGKSEADYLTFPSGEYVAEEICIAASKACGITPVYHNMFALMSETERIWYPPNHVFHIDESTRHNVLYRIRFYFPRWYCSGSNRAYRHGISRGAEAPLLDDFVMSYLFAQWRHDFVHGWIKVPVTHETQEECLGMAVLDMMRIAKENDQTPLAIYNSISYKTFLPKCIRAKIQDYHILTRKRIRYRFRRFIQQFSQCKATARNLKLKYLINLETLQSAFYTEKFEVKEPGSGPSGEEIFATIIITGNGGIQWSRGKHKESETLTEQDLQLYCDFPNIIDVSIKQANQEGSNESRVVTIHKQDGKNLEIELSSLREALSFVSLIDGYYRLTADAHHYLCKEVAPPAVLENIQSNCHGPISMDFAISKLKKAGNQTGLYVLRCSPKDFNKYFLTFAVERENVIEYKHCLITKNENEEYNLSGTKKNFSSLKDLLNCYQMETVRSDNIIFQFTKCCPPKPKDKSNLLVFRTNGVSDVPTSPTLQRPTHMNQMVFHKIRNEDLIFNESLGQGTFTKIFKGVRREVGDYGQLHETEVLLKVLDKAHRNYSESFFEAASMMSKLSHKHLVLNYGVCVCGDENILVQEFVKFGSLDTYLKKNKNCINILWKLEVAKQLAWAMHFLEENTLIHGNVCAKNILLIREEDRKTGNPPFIKLSDPGISITVLPKDILQERIPWVPPECIENPKNLNLATDKWSFGTTLWEICSGGDKPLSALDSQRKLQFYEDRHQLPAPKWAELANLINNCMDYEPDFRPSFRAIIRDLNSLFTPDYELLTENDMLPNMRIGALGFSGAFEDRDPTQFEERHLKFLQQLGKGNFGSVEMCRYDPLQDNTGEVVAVKKLQHSTEEHLRDFEREIEILKSLQHDNIVKYKGVCYSAGRRNLKLIMEYLPYGSLRDYLQKHKERIDHIKLLQYTSQICKGMEYLGTKRYIHRDLATRNILVENENRVKIGDFGLTKVLPQDKEYYKVKEPGESPIFWYAPESLTESKFSVASDVWSFGVVLYELFTYIEKSKSPPAEFMRMIGNDKQGQMIVFHLIELLKNNGRLPRPDGCPDEIYMIMTECWNNNVNQRPSFRDLALRVDQIRDNMAG

SEQ ID NO: 42278 - protein, 1124 aa, Homo sapiens
  Payload ID: 8597
  Gene Symbol: JAK3
  Gene Name: Janus kinase 3
  Uniprot ID: P52333
  ENSP ID: ENSP00000391676
MAPPSEETPLIPQRSCSLLSTEAGALHVLLPARGPGPPQRLSFSFGDHLAEDLCVQAAKASGILPVYHSLFALATEDLSCWFPPSHIFSVEDASTQVLLYRIRFYFPNWFGLEKCHRFGLRKDLASAILDLPVLEHLFAQHRSDLVSGRLPVGLSLKEQGECLSLAVLDLARMAREQAQRPGELLKTVSYKACLPPSLRDLIQGLSFVTRRRIRRTVRRALRRVAACQADRHSLMAKYIMDLERLDPAGAAETFHVGLPGALGGHDGLGLLRVAGDGGIAWTQGEQEVLQPFCDFPEIVDISIKQAPRVGPAGEHRLVTVTRTDNQILEAEFPGLPEALSFVALVDGYFRLTTDSQHFFCKEVAPPRLLEEVAEQCHGPITLDFAINKLKTGGSRPGSYVLRRSPQDFDSFLLTVCVQNPLGPDYKGCLIRRSPTGTFLLVGLSRPHSSLRELLATCWDGGLHVDGVAVTLTSCCIPRPKEKSNLIVVQRGHSPPTSSLVQPQSQYQLSQMTFHKIPADSLEWHENLGHGSFTKIYRGCRHEVVDGEARKTEVLLKVMDAKHKNCMESFLEAASLMSQVSYRHLVLLHGVCMAGDSTMVQEFVHLGAIDMYLRKRGHLVPASWKLQVVKQLAYALNYLEDKGLPHGNVSARKVLLAREGADGSPPFIKLSDPGVSPAVLSLEMLTDRIPWVAPECLREAQTLSLEADKWGFGATVWEVFSGVTMPISALDPAKKLQFYEDRQQLPAPKWTELALLIQQCMAYEPVQRPSFRAVIRDLNSLISSDYELLSDPTPGALAPRDGLWNGAQLYACQDPTIFEERHLKYISQLGKGNFGSVELCRYDPLGDNTGALVAVKQLQHSGPDQQRDFQREIQILKALHSDFIVKYRGVSYGPGRQSLRLVMEYLPSGCLRDFLQRHRARLDASRLLLYSSQICKGMEYLGSRRCVHRDLAARNILVESEAHVKIADFGLAKLLPLDKDYYVVREPGQSPIFWYAPESLSDNIFSRQSDVWSFGVVLYELFTYCDKSCSPSAEFLRMMGCERDVPALCRLLELLEEGQRLPAPPACPAEVHELMKLCWAPSPQDRPSFSALGPQLDMLWSGSRGCETHAFTAHPEGKHHSLSFS

SEQ ID NO: 42279 - protein, 1124 aa, Homo sapiens; identical to SEQ ID NO: 42278
  Payload ID: 8597
  Gene Symbol: JAK3
  Gene Name: Janus kinase 3
  Uniprot ID: P52333
  ENSP ID: ENSP00000432511

SEQ ID NO: 42280 - protein, 1094 aa, Homo sapiens
  Payload ID: 8597
  Gene Symbol: JAK3
  Gene Name: Janus kinase 3
  Uniprot ID: P52333
  ENSP ID: ENSP00000436421
MAPPSEETPLIPQRSCSLLSTEAGALHVLLPARGPGPPQRLSFSFGDHLAEDLCVQAAKASGILPVYHSLFALATEDLSCWFPPSHIFSVEDASTQVLLYRIRFYFPNWFGLEKCHRFGLRKDLASAILDLPVLEHLFAQHRSDLVSGRLPVGLSLKEQGECLSLAVLDLARMAREQAQRPGELLKTVSYKACLPPSLRDLIQGLSFVTRRRIRRTVRRALRRVAACQADRHSLMAKYIMDLERLDPAGAAETFHVGLPGALGGHDGLGLLRVAGDGGIAWTQGEQEVLQPFCDFPEIVDISIKQAPRVGPAGEHRLVTVTRTDNQILEAEFPGLPEALSFVALVDGYFRLTTDSQHFFCKEVAPPRLLEEVAEQCHGPITLDFAINKLKTGGSRPGSYVLRRSPQDFDSFLLTVCVQNPLGPDYKGCLIRRSPTGTFLLVGLSRPHSSLRELLATCWDGGLHVDGVAVTLTSCCIPRPKEKSNLIVVQRGHSPPTSSLVQPQSQYQLSQMTFHKIPADSLEWHENLGHGSFTKIYRGCRHEVVDGEARKTEVLLKVMDAKHKNCMESFLEAASLMSQVSYRHLVLLHGVCMAGDSTMVQEFVHLGAIDMYLRKRGHLVPASWKLQVVKQLAYALNYLEDKGLPHGNVSARKVLLAREGADGSPPFIKLSDPGVSPAVLSLEMLTDRIPWVAPECLREAQTLSLEADKWGFGATVWEVFSGVTMPISALDPAKKLQFYEDRQQLPAPKWTELALLIQQCMAYEPVQRPSFRAVIRDLNSLISSDYELLSDPTPGALAPRDGLWNGAQLYACQDPTIFEERHLKYISQLGKGNFGSVELCRYDPLGDNTGALVAVKQLQHSGPDQQRDFQREIQILKALHSDFIVKYRGVSYGPGRQSLRLVMEYLPSGCLRDFLQRHRARLDASRLLLYSSQICKGMEYLGSRRCVHRDLAARNILVESEAHVKIADFGLAKLLPLDKDYYVVREPGQSPIFWYAPESLSDNIFSRQSDVWSFGVVLYELFTYCDKSCSPSAEFLRMMGCERDVPALCRLLELLEEGQRLPAPPACPAEVSAAGLASVSQSVDWAGVSGKPAGA

SEQ ID NO: 42281 - protein, 626 aa, Homo sapiens
  Payload ID: 8598
  Gene Symbol: JAKMIP1
  Gene Name: janus kinase and microtubule interacting protein 1
  Uniprot ID: Q96N16
  ENSP ID: ENSP00000282924
MSKKGRSKGEKPEMETDAVQMANEELRAKLTSIQIEFQQEKSKVGKLRERLQEAKLEREQEQRRHTAYISELKAKLHEEKTKELQALREGLIRQHEQEAARTAKIKEGELQRLQATLNVLRDGAADKVKTALLTEAREEARRAFDGERLRLQQEILELKAARKQAEEALSNCMQADKTKAADLRAAYQAHQDEVHRIKRECERDIRRLMDEIKGKDRVILALEKELGVQAGQTQKLLLQKEALDEQLVQVKEAERHHSSPKRELPPGIGDMVELMGVQDQHMDERDVRRFQLKIAELNSVIRKLEDRNTLLADERNELLKRSRETEVQLKPLVEKNKRMNKKNEDLLQSIQRMEEKIKNLTRENVEMKEKLSAQASLKRHTSLNDLSLTRDEQEIEFLRLQVLEQQHVIDDLSLERERLLRSKRHRGKSLKPPKKHVVETFFGFDEESVDSETLSETSYNTDRTDRTPATPEEDLDDATAREEADLRFCQLTREYQALQRAYALLQEQVGGTLDAEREARTREQLQADLLRCQAKIEDLEKLLVEKGQDSKWVEEKQLLIRTNQDLLEKIYRLEMEENQLKNEMQDAKDQNELLEFRVLELEVRDSICCKLSNGADILFEPKLKFM

SEQ ID NO: 42282 - protein, 831 aa, Homo sapiens
  Payload ID: 8598
  Gene Symbol: JAKMIP1
  Gene Name: janus kinase and microtubule interacting protein 1
  Uniprot ID: Q96N16
  ENSP ID: ENSP00000386711
MSKKGRSKGEKPEMETDAVQMANEELRAKLTSIQIEFQQEKSKVGKLRERLQEAKLEREQEQRRHTAYISELKAKLHEEKTKELQALREGLIRQHEQEAARTAKIKEGELQRLQATLNVLRDGAADKVKTALLTEAREEARRAFDGERLRLQQEILELKAARKQAEEALSNCMQADKTKAADLRAAYQAHQDEVHRIKRECERDIRRLMDEIKGKDRVILALEKELGVQAGQTQKLLLQKEALDEQLVQVKEAERHHSSPKRELPPGIGDMVELMGVQDQHMDERDVRRFQLKIAELNSVIRKLEDRNTLLADERNELLKRSRETEVQLKPLVEKNKRMNKKNEDLLQSIQRMEEKIKNLTRENVEMKEKLSAQASLKRHTSLNDLSLTRDEQEIEFLRLQVLEQQHVIDDLSLERERLLRSKRHRGKSLKPPKKHVVETFFGFDEESVDSETLSETSYNTDRTDRTPATPEEDLDDATAREEADLRFCQLTREYQALQRAYALLQEQVGGTLDAEREARTREQLQADLLRCQAKIEDLEKLLVEKGQDSKWVEEKQLLIRTNQDLLEKIYRLEMEENQLKNEMQDAKDQNELLEFRVLELEERERRSPAFNLQITTFPENHSSALQLFCHQEGVKDVNVSELMKKLDILGDNGNLRNEEQVAIIQAGTVLALCEKWLKQIEGTEAALTQKMLDLEKEKDLFSRQKGYLEEELDYRKQALDQAYLKIQDLEATLYTALQQEPGRRAGEALSEGQREDLQAAVEKVRRQILRQSREFDSQILRERMELLQQAQQRIRELEDKLEFQKRHLKELEEKFLFLFLFFSLAFILWP

SEQ ID NO: 42283 - protein, 461 aa, Homo sapiens
  Payload ID: 8598
  Gene Symbol: JAKMIP1
  Gene Name: janus kinase and microtubule interacting protein 1
  Uniprot ID: Q96N16
  ENSP ID: ENSP00000386745
MSKKGRSKGEKPEMETDAVQMANEELRAKLTSIQIEFQQEKSKMDEIKGKDRVILALEKELGVQAGQTQKLLLQKEALDEQLVQVKEAERHHSSPKRELPPGIGDMVELMGVQDQHMDERDVRRFQLKIAELNSVIRKLEDRNTLLADERNELLKRSRETEVQLKPLVEKNKRMNKKNEDLLQSIQRMEEKIKNLTRENVEMKEKLSAQASLKRHTSLNDLSLTRDEQEIEFLRLQVLEQQHVIDDLSLERERLLRSKRHRGKSLKPPKKHVVETFFGFDEESVDSETLSETSYNTDRTDRTPATPEEDLDDATAREEADLRFCQLTREYQALQRAYALLQEQVGGTLDAEREARTREQLQADLLRCQAKIEDLEKLLVEKGQDSKWVEEKQLLIRTNQDLLEKIYRLEMEENQLKNEMQDAKDQNELLEFRVLELEVRDSICCKLSNGADILFEPKLKFM

SEQ ID NO: 42284 - protein, 626 aa, Homo sapiens; identical to SEQ ID NO: 42281
  Payload ID: 8598
  Gene Symbol: JAKMIP1
  Gene Name: janus kinase and microtubule interacting protein 1
  Uniprot ID: Q96N16
  ENSP ID: ENSP00000386925

SEQ ID NO: 42285 - protein, 646 aa, Homo sapiens
  Payload ID: 8598
  Gene Symbol: JAKMIP1
  Gene Name: janus kinase and microtubule interacting protein 1
  Uniprot ID: Q96N16
  ENSP ID: ENSP00000387042
MSKKGRSKGEKPEMETDAVQMANEELRAKLTSIQIEFQQEKSKMDEIKGKDRVILALEKELGVQAGQTQKLLLQKEALDEQLVQVKEAERHHSSPKRELPPGIGDMVELMGVQDQHMDERDVRRFQLKIAELNSVIRKLEDRNTLLADERNELLKRSRETEVQLKPLVEKNKRMNKKNEDLLQSIQRMEEKIKNLTRENVEMKEKLSAQASLKRHTSLNDLSLTRDEQEIEFLRLQVLEQQHVIDDLSLKHVVETFFGFDEESVDSETLSETSYNTDRTDRTPATPEEDLDDATAREEADLRFCQLTREYQALQRAYALLQEQVGGTLDAEREARTREQLQADLLRCQAKIEDLEKLLVEKGQDSKWVEEKQLLIRTNQDLLEKIYRLEMEENQLKNEMQDAKDQNELLEFRVLELEERERRSPAFNLQITTFPENHSSALQLFCHQEGVKDVNVSELMKKLDILGDNGNLRNEEQVAIIQAGTVLALCEKWLKQIEGTEAALTQKMLDLEKEKDLFSRQKGYLEEELDYRKQALDQAYLKIQDLEATLYTALQQEPGRRAGEALSEGQREDLQAAVEKVRRQILRQSREFDSQILRERMELLQQAQQRIRELEDKLEFQKRHLKELEEKFLFLFLFFSLAFILWP

SEQ ID NO: 42286 - protein, 569 aa, Homo sapiens
  Payload ID: 8598
  Gene Symbol: JAKMIP1
  Gene Name: janus kinase and microtubule interacting protein 1
  ENSP ID: ENSP00000422004
MSKKGRSKGEKPEMETDAVQMANEELRAKLTSIQIEFQQEKSKVGKLRERLQEAKLEREQEQRRHTAYISELKAKLHEEKTKELQALREGLIRQHEQEAARTAKIKEGELQRLQATLNVLRDGAADKVKTALLTEAREEARRAFDGERLRLQQEILELKAARKQAEEALSNCMQADKTKAADLRAAYQAHQDEVHRIKRECERDIRRLMDEIKGKDRVILALEKELGVQAGQTQKLLLQKEALDEQLVQVKEAERHHSSPKRELPPGIGDMVELMGVQDQHMDERDVRRFQLKIAELNSVIRKLEDRNTLLADERNELLKRSRETEVQLKPLVEKNKRMNKKNEDLLQSIQRMEEKIKNLTRENVEMKEKLSAQASLKRHTSLNDLSLTRDEQEIEFLRLQVLEQQHVIDDLSLERERLLRSKRHRGKSLKPPKKHVVETFFGFDEESVDSETLSETSYNTDRTDRTPATPEEDLDDATAREEADLRFCQLTREYQALQRAYALLQEQVGGTLDAEREARTREQLQADLLRCQAKIEDLEKLLVEKGQDSKWVEEKQLLIRTNQDLLEK

SEQ ID NO: 42287 - protein, 810 aa, Homo sapiens
  Payload ID: 8599
  Gene Symbol: JAKMIP2
  Gene Name: janus kinase and microtubule interacting protein 2
  Uniprot ID: Q96AA8
  ENSP ID: ENSP00000265272
MSKKGRNKGEKPEALIVALQAANEDLRTKLTDIQIELHQEKSKVSKLEREKTQEAKRIRELEQRKHTVLVTELKAKLHEEKMKELQAVRENLIKQHEQEMSRTVKVRDGEIQRLKSALCALRDGSSDKVRTALTIEAREEARKLFDTERLKLLQEIADLKTAKKQVDEALSNMIQADKIKAGDLRSEHQSHQEAISKIKWESERDIRRLMDEIKAKDRIIFSLEKELETQTGYVQKLQLQKEALDEQLFLVKEAECNMSSPKREIPGRAGDGSEHCSSPDLRRNQKRIAELNATIRKLEDRNTLLGDERNELLKRVRETEKQCKPLLERNKCLAKRNDELMVSLQRMEEKLKAVTKENSEMREKITSHPPLKKLKSLNDLDQANEEQETEFLKLQVIEQQNIIDELTRDREKLIRRRKHRRSSKPIKRPVLDPFIGYDEDSMDSETSSMASFRTDRTPATPDDDLDESLAAEESELRFRQLTKEYQALQRAYALLQEQTGGIIDAEREAKAQEQLQAEVLRYKAKIEDLEATLAQKGQDSHWVEDKQLFIKRNQELLEKIEKQEAENHRLQQELQDARDQNELLEFRNLELEERERRSPPFNLQIHPFSDGVSALQIYCMKEGVKDVNIPDLIKQLDILGDNGNLRNEEQVAIIQASTVLSLAEKWIQQIEGAEAALHQKMMELESDMEQFCKIKGYLEEELDYRKQALDQAYMRIQELEATLYNALQQETVIKFGELLSEKQQEELRTAVEKLRRQMLRKSREYDCQILQERMELLQQAHQRIRDLEDKTDIQKRQIKDLEEKSNRKHG

SEQ ID NO: 42288 - protein, 778 aa, Homo sapiens
  Payload ID: 8599
  Gene Symbol: JAKMIP2
  Gene Name: janus kinase and microtubule interacting protein 2
  Uniprot ID: Q96AA8
  ENSP ID: ENSP00000328989
MVSKLEREKTQEAKRIRELEQRKHTVLVTELKAKLHEEKMKELQAVRENLIKQHEQEMSRTVKVRDGEIQRLKSALCALRDGSSDKVRTALTIEAREEARKLFDTERLKLLQEIADLKTAKKQVDEALSNMIQADKIKAGDLRSEHQSHQEAISKIKWESERDIRRLMDEIKAKDRIIFSLEKELETQTGYVQKLQLQKEALDEQLFLVKEAECNMSSPKREIPGRAGDGSEHCSSPDLRRNQKRIAELNATIRKLEDRNTLLGDERNELLKRVRETEKQCKPLLERNKCLAKRNDELMVSLQRMEEKLKAVTKENSEMREKITSHPPLKKLKSLNDLDQANEEQETEFLKLQVIEQQNIIDELTRDREKLIRRRKHRRSSKPIKRPVLDPFIGYDEDSMDSETSSMASFRTDRTPATPDDDLDESLAAEESELRFRQLTKEYQALQRAYALLQEQTGGIIDAEREAKAQEQLQAEVLRYKAKIEDLEATLAQKGQDSHWVEDKQLFIKRNQELLEKIEKQEAENHRLQQELQDARDQNELLEFRNLELEERERRSPPFNLQIHPFSDGVSALQIYCMKEGVKDVNIPDLIKQLDILGDNGNLRNEEQVAIIQASTVLSLAEKWIQQIEGAEAALHQKMMELESDMEQFCKIKGYLEEELDYRKQALDQAYMRIQELEATLYNALQQETVIKFGELLSEKQQEELRTAVEKLRRQMLRKSREYDCQILQERMELLQQAHQRIRDLEDKTDIQKRQIKDLEEKFLFLFLFFSLAFILWP

SEQ ID NO: 42289 - protein, 799 aa, Homo sapiens
  Payload ID: 8599
  Gene Symbol: JAKMIP2
  Gene Name: janus kinase and microtubule interacting protein 2
  Uniprot ID: Q96AA8
  ENSP ID: ENSP00000421398
MSKKGRNKGEKPEALIVALQAANEDLRTKLTDIQIELHQEKSKVSKLEREKTQEAKRIRELEQRKHTVLVTELKAKLHEEKMKELQAVRENLIKQHEQEMSRTVKVRDGEIQRLKSALCALRDGSSDKVRTALTIEAREEARKLFDTERLKLLQEIADLKTAKKQVDEALSNMIQADKIKAGDLRSEHQSHQEAISKIKWESERDIRRLMDEIKAKDRIIFSLEKELETQTGYVQKLQLQKEALDEQLFLVKEAECNMSSPKREIPGRAGDGSEHCSSPDLRRNQKRIAELNATIRKLEDRNTLLGDERNELLKRVRETEKQCKPLLERNKCLAKRNDELMVSLQRMEEKLKAVTKENSEMREKITSHPPLKKLKSLNDLDQANEEQETEFLKLQVIEQQNIIDELTRDREKLIRRRKHRRSSKPIKRPVLDPFIGYDEDSMDSETSSMASFRTDRTPATPDDDLDESLAAEESELRFRQLTKEYQALQRAYALLQEQTGGIIDAEREAKAQEQLQAEVLRYKAKIEDLEATLAQKGQIEKQEAENHRLQQELQDARDQNELLEFRNLELEERERRSPPFNLQIHPFSDGVSALQIYCMKEGVKDVNIPDLIKQLDILGDNGNLRNEEQVAIIQASTVLSLAEKWIQQIEGAEAALHQKMMELESDMEQFCKIKGYLEEELDYRKQALDQAYMRIQELEATLYNALQQETVIKFGELLSEKQQEELRTAVEKLRRQMLRKSREYDCQILQERMELLQQAHQRIRDLEDKTDIQKRQIKDLEEKFLFLFLFFSLAFILWP

SEQ ID NO: 42290 - protein, 820 aa, Homo sapiens
  Payload ID: 8599
  Gene Symbol: JAKMIP2
  Gene Name: janus kinase and microtubule interacting protein 2
  Uniprot ID: Q96AA8
  ENSP ID: ENSP00000479248
MSKKGRNKGEKPEALIVALQAANEDLRTKLTDIQIELHQEKSKVSKLEREKTQEAKRIRELEQRKHTVLVTELKAKLHEEKMKELQAVRENLIKQHEQEMSRTVKVRDGEIQRLKSALCALRDGSSDKVRTALTIEAREEARKLFDTERLKLLQEIADLKTAKKQVDEALSNMIQADKIKAGDLRSEHQSHQEAISKIKWESERDIRRLMDEIKAKDRIIFSLEKELETQTGYVQKLQLQKEALDEQLFLVKEAECNMSSPKREIPGRAGDGSEHCSSPDLRRNQKRIAELNATIRKLEDRNTLLGDERNELLKRVRETEKQCKPLLERNKCLAKRNDELMVSLQRMEEKLKAVTKENSEMREKITSHPPLKKLKSLNDLDQANEEQETEFLKLQVIEQQNIIDELTRDREKLIRRRKHRRSSKPIKRPVLDPFIGYDEDSMDSETSSMASFRTDRTPATPDDDLDESLAAEESELRFRQLTKEYQALQRAYALLQEQTGGIIDAEREAKAQEQLQAEVLRYKAKIEDLEATLAQKGQDSHWVEDKQLFIKRNQELLEKIEKQEAENHRLQQELQDARDQNELLEFRNLELEERERRSPPFNLQIHPFSDGVSALQIYCMKEGVKDVNIPDLIKQLDILGDNGNLRNEEQVAIIQASTVLSLAEKWIQQIEGAEAALHQKMMELESDMEQFCKIKGYLEEELDYRKQALDQAYMRIQELEATLYNALQQETVIKFGELLSEKQQEELRTAVEKLRRQMLRKSREYDCQILQERMELLQQAHQRIRDLEDKTDIQKRQIKDLEEKFLFLFLFFSLAFILWP

SEQ ID NO: 42291 - protein, 844 aa, Homo sapiens
  Payload ID: 8600
  Gene Symbol: JAKMIP3
  Gene Name: Janus kinase and microtubule interacting protein 3
  Uniprot ID: Q5VZ66
  ENSP ID: ENSP00000298622
MSKRGMSSRAKGDKAEALAALQAANEDLRAKLTDIQIELQQEKSKVSKVEREKNQELRQVREHEQHKTAVLLTELKTKLHEEKMKELQAVRETLLRQHEAELLRVIKIKDNENQRLQALLSALRDGGPEKVKTVLLSEAKEEAKKGFEVEKVKMQQEISELKGAKRQVEEALTLVIQADKIKAAEIRSVYHLHQEEITRIKKECEREIRRLMEEIKFKDRAVFVLERELGVQAGHAQRLQLQKEALDEQLSQVREADRHPGSPRRELPHAAGAGDASDHSGSPEQQLDEKDARRFQLKIAELSAIIRKLEDRNALLSEERNELLKRVREAESQYKPLLDKNKRLSRKNEDLSHALRRMENKLKFVTQENIEMRQRAGIIRRPSSLNDLDQSQDEREVDFLKLQIVEQQNLIDELSKTLETAGYVKSVLERDKLLRFRKQRKKMAKLPKPVVVETFFGYDEEASLESDGSSVSYQTDRTDQTPCTPDDDLEEGMAKEETELRFRQLTMEYQALQRAYALLQEQVGGTLDAEREVKTREQLQAEVQRAQARIEDLEKALAEQGQDMKWIEEKQALYRRNQELVEKIKQMETEEARLRHEVQDARDQNELLEFRILELEERERKSPAISFHHTPFVDGKSPLQVYCEAEGVTDIVVAELMKKLDILGDNANLTNEEQVVVIQARTVLTLAEKWLQQIEETEAALQRKMVDLESEKELFSKQKGYLDEELDYRKQALDQANKHILELEAMLYDALQQEAGAKVAELLSEEEREKLKVAVEQWKRQVMSELRERDAQILRERMELLQLAQQRIKELEERIEAQKRQIKELEEKFLFLFLFFSLAFILWS

SEQ ID NO: 42292 - protein, 243 aa, Homo sapiens
  Payload ID: 8601
  Gene Symbol: JAZF1
  Gene Name: JAZF zinc finger 1
  Uniprot ID: Q86VZ6
  ENSP ID: ENSP00000283928
MTGIAAASFFSNTCRFGGCGLHFPTLADLIEHIEDNHIDTDPRVLEKQELQQPTYVALSYINRFMTDAARREQESLKKKIQPKLSLTLSSSVSRGNVSTPPRHSSGSLTPPVTPPITPSSSFRSSTPTGSEYDEEEVDYEESDSDESWTTESAISSEAILSSMCMNGGEEKPFACPVPGCKKRYKNVNGIKYHAKNGHRTQIRVRKPFKCRCGKSYKTAQGLRHHTINFHPPVSAEIIRKMQQ

SEQ ID NO: 42293 - protein, 173 aa, Homo sapiens
  Payload ID: 8601
  Gene Symbol: JAZF1
  Gene Name: JAZF zinc finger 1
  ENSP ID: ENSP00000387976
MWVANDTDPRVLEKQELQQPTYVALSYINRFMTDAARREQESLKKKIQPKLSLTLSSSVSRGNVSTPPRHSSGSLTPPVTPPITPSSSFRSSTPTGSEYDEEEVDYEESDSDESWTTESAISSEAILSSMCMNGGEEKPFACPVPGCKKRYKNVNGIKYHAKNGHRTQIRVRK

SEQ ID NO: 42294 - protein, 230 aa, Homo sapiens
  Payload ID: 8601
  Gene Symbol: JAZF1
  Gene Name: JAZF zinc finger 1
  ENSP ID: ENSP00000388302
  MOD_RES (1)..(1): Any amino acid
XYFVLGSLIYSDAKSKKNRNCVFITDTDPRVLEKQELQQPTYVALSYINRFMTDAARREQESLKKKIQPKLSLTLSSSVSRGNVSTPPRHSSGSLTPPVTPPITPSSSFRSSTPTGSEYDEEEVDYEESDSDESWTTESAISSEAILSSMCMNGGEEKPFACPVPGCKKRYKNVNGIKYHAKNGHRTQIRVRKPFKCRCGKSYKTAQGLRHHTINFHPPVSAEIIRKMQQ

SEQ ID NO: 42295 - protein, 66 aa, Homo sapiens
  Payload ID: 8601
  Gene Symbol: JAZF1
  Gene Name: JAZF zinc finger 1
  ENSP ID: ENSP00000399083
MTGIAAASFFSNTCRFGGCGLHFPTLADLIEHIEDNHIDTDPRVLEKQELQQPTYVALSYINRQRR

SEQ ID NO: 42296 - protein, 181 aa, Homo sapiens
  Payload ID: 8601
  Gene Symbol: JAZF1
  Gene Name: JAZF zinc finger 1
  ENSP ID: ENSP00000415096
MDILSLLMFGIPLKNTDPRVLEKQELQQPTYVALSYINRFMTDAARREQESLKKKIQPKLSLTLSSSVSRGNVSTPPRHSSGSLTPPVTPPITPSSSFRSSTPTGSEYDEEEVDYEESDSDESWTTESAISSEAILSSMCMNGGEEKPFACPVPGCKKRYKNVNGIKYHAKNGHRTQIRVR

SEQ ID NO: 42297 - protein, 80 aa, Homo sapiens
  Payload ID: 8601
  Gene Symbol: JAZF1
  Gene Name: JAZF zinc finger 1
  ENSP ID: ENSP00000415984
MTGIAAASFFSNTCRFGGCGLHFPTLADLIEHIEDNHIDTDPRVLEKQELQQPTYVALSYINRDIGHQMESRLNRSTVAS

SEQ ID NO: 42298 - protein, 893 aa, Homo sapiens
  Payload ID: 8602
  Gene Symbol: JMJD7-PLA2G4B
  Gene Name: JMJD7-PLA2G4B readthrough
  ENSP ID: ENSP00000342785
MAEAALEAVRSELREFPAAARELCVPLAVPYLDKPPTPLHFYRDWVCPNRPCIIRNALQHWPALQKWSLPYFRATVGSTEVSVAVTPDGYADAVRGDRFMMPAERRLPLSFVLDVLEGRAQHPGVLYVQKQCSNLPSELPQLLPDLESHVPWASEALGKMPDAVNFWLGEAAAVTSLHKDHYENLYCVVSGEKHFLFHPPSDRPFIPYELYTPATYQLTEEGTFKVVDEEAMEKAEVSRTCLLTVRVLQAHRLPSKDLVTPSDCYVTLWLPTACSHRLQTRTVKNSSSPVWNQSFHFRIHRQLKNVMELKVFDQDLVTGDDPVLSVLFDAGTLRAGEFRRESFSLSPQGEGRLEVEFRLQSLADRGEWLVSNGVLVARELSCLHVQLEETGDQKSSEHRVQLVVPGSCEGPQEASVGTGTFRFHCPACWEQELSIRLQDAPEEQLKAPLSALPSGQVVRLVFPTSQEPLMRVELKKEAGLRELAVRLGFGPCAEEQAFLSRRKQVVAAALRQALQLDGDLQEDEIPVVAIMATGGGIRAMTSLYGQLAGLKELGLLDCVSYITGASGSTWALANLYEDPEWSQKDLAGPTELLKTQVTKNKLGVLAPSQLQRYRQELAERARLGYPSCFTNLWALINEALLHDEPHDHKLSDQREALSHGQNPLPIYCALNTKGQSLTTFEFGEWCEFSPYEVGFPKYGAFIPSELFGSEFFMGQLMKRLPESRICFLEGIWSNLYAANLQDSLYWASEPSQFWDRWVRNQANLDKEQVPLLKIEEPPSTAGRIAEFFTDLLTWRPLAQATHNFLRGLHFHKDYFQHPHFSTWKATTLDGLPNQLTPSEPHLCLLDVGYLINTSCLPLLQPTRDVDLILSLDYNLHGAFQGSGGHPRRRQLGR

SEQ ID NO: 42299 - protein, 1012 aa, Homo sapiens
  Payload ID: 8602
  Gene Symbol: JMJD7-PLA2G4B
  Gene Name: JMJD7-PLA2G4B readthrough
  ENSP ID: ENSP00000371886
MAEAALEAVRSELREFPAAARELCVPLAVPYLDKPPTPLHFYRDWVCPNRPCIIRNALQHWPALQKWSLPYFRATVGSTEVSVAVTPDGYADAVRGDRFMMPAERRLPLSFVLDVLEGRAQHPGVLYVQKQCSNLPSELPQLLPDLESHVPWASEALGKMPDAVNFWLGEAAAVTSLHKDHYENLYCVVSGEKHFLFHPPSDRPFIPYELYTPATYQLTEEGTFKVVDEEAMEKAEVSRTCLLTVRVLQAHRLPSKDLVTPSDCYVTLWLPTACSHRLQTRTVKNSSSPVWNQSFHFRIHRQLKNVMELKVFDQDLVTGDDPVLSVLFDAGTLRAGEFRRESFSLSPQGEGRLEVEFRLQSLADRGEWLVSNGVLVARELSCLHVQLEETGDQKSSEHRVQLVVPGSCEGPQEASVGTGTFRFHCPACWEQELSIRLQDAPEEQLKAPLSALPSGQVVRLVFPTSQEPLMRVELKKEAGLRELAVRLGFGPCAEEQAFLSRRKQVVAAALRQALQLDGDLQEDEIPVVAIMATGGGIRAMTSLYGQLAGLKELGLLDCVSYITGASGSTWALANLYEDPEWSQKDLAGPTELLKTQVTKNKLGVLAPSQLQRYRQELAERARLGYPSCFTNLWALINEALLHDEPHDHKLSDQREALSHGQNPLPIYCALNTKGQSLTTFEFGEWCEFSPYEVGFPKYGAFIPSELFGSEFFMGQLMKRLPESRICFLEGIWSNLYAANLQDSLYWASEPSQFWDRWVRNQANLDKEQVPLLKIEEPPSTAGRIAEFFTDLLTWRPLAQATHNFLRGLHFHKDYFQHPHFSTWKATTLDGLPNQLTPSEPHLCLLDVGYLINTSCLPLLQPTRDVDLILSLDYNLHGAFQQLQLLGRFCQEQGIPFPPISPSPEEQLQPRECHTFSDPTCPGAPAVLHFPLVSDSFREYSAPGVRRTPEEAAAGEVNLSSSDSPYHYTKVTYSQEDVDKLLHLTHYNVCNNQEQLLEALRQAVQRRRQRRPH

SEQ ID NO: 42300 - protein, 781 aa, Homo sapiens
  Payload ID: 8602
  Gene Symbol: JMJD7-PLA2G4B
  Gene Name: JMJD7-PLA2G4B readthrough
  Uniprot ID: P0C869
  ENSP ID: ENSP00000416610
MAVAEVSRTCLLTVRVLQAHRLPSKDLVTPSDCYVTLWLPTACSHRLQTRTVKNSSSPVWNQSFHFRIHRQLKNVMELKVFDQDLVTGDDPVLSVLFDAGTLRAGEFRRESFSLSPQGEGRLEVEFRLQSLADRGEWLVSNGVLVARELSCLHVQLEETGDQKSSEHRVQLVVPGSCEGPQEASVGTGTFRFHCPACWEQELSIRLQDAPEEQLKAPLSALPSGQVVRLVFPTSQEPLMRVELKKEAGLRELAVRLGFGPCAEEQAFLSRRKQVVAAALRQALQLDGDLQEDEIPVVAIMATGGGIRAMTSLYGQLAGLKELGLLDCVSYITGASGSTWALANLYEDPEWSQKDLAGPTELLKTQVTKNKLGVLAPSQLQRYRQELAERARLGYPSCFTNLWALINEALLHDEPHDHKLSDQREALSHGQNPLPIYCALNTKGQSLTTFEFGEWCEFSPYEVGFPKYGAFIPSELFGSEFFMGQLMKRLPESRICFLEGIWSNLYAANLQDSLYWASEPSQFWDRWVRNQANLDKEQVPLLKIEEPPSTAGRIAEFFTDLLTWRPLAQATHNFLRGLHFHKDYFQHPHFSTWKATTLDGLPNQLTPSEPHLCLLDVGYLINTSCLPLLQPTRDVDLILSLDYNLHGAFQQLQLLGRFCQEQGIPFPPISPSPEEQLQPRECHTFSDPTCPGAPAVLHFPLVSDSFREYSAPGVRRTPEEAAAGEVNLSSSDSPYHYTKVTYSQEDVDKLLHLTHYNVCNNQEQLLEALRQAVQRRRQRRPH

SEQ ID NO: 42301 - protein, 81 aa, Homo sapiens
  Payload ID: 8602
  Gene Symbol: JMJD7-PLA2G4B
  Gene Name: JMJD7-PLA2G4B readthrough
  ENSP ID: ENSP00000424127
  MOD_RES (1)..(1): Any amino acid
XWIPLDPLAPDLARYPSYSQAQALRCTVRAGEMLYLPALWFHHVQQSQGCIAVNFWYDMEYDLKYSYFQLLDSLTKASGLD

SEQ ID NO: 42302 - protein, 311 aa, Homo sapiens
  Payload ID: 8603
  Gene Symbol: JKAMP
  Gene Name: JNK1/MAPK8-associated membrane protein
  Uniprot ID: Q9P055
  ENSP ID: ENSP00000261247
MAVDIQPACLGLYCGKTLLFKNGSTEIYGECGVCPRGQRTNAQKYCQPCTESPELYDWLYLGFMAMLPLVLHWFFIEWYSGKKSSSALFQHITALFECSMAAIITLLVSDPVGVLYIRSCRVLMLSDWYTMLYNPSPDYVTTVHCTHEAVYPLYTIVFIYYAFCLVLMMLLRPLLVKKIACGLGKSDRFKSIYAALYFFPILTVLQAVGGGLLYYAFPYIILVLSLVTLAVYMSASEIENCYDLLVRKKRLIVLFSHWLLHAYGIISISRVDKLEQDLPLLALVPTPALFYLFTAKFTEPSRILSEGANGH

SEQ ID NO: 42303 - protein, 319 aa, Homo sapiens
  Payload ID: 8603
  Gene Symbol: JKAMP
  Gene Name: JNK1/MAPK8-associated membrane protein
  Uniprot ID: Q9P055
  ENSP ID: ENSP00000348351
MKGEIQQSLGAWVLLTCLGLYCGKTLLFKNGSTEIYGECGVCPRGQRTNAQKYCQPCTESPELYDWLYLGFMAMLPLVLHWFFIEWYSGKKSSSALFQHITALFECSMAAIITLLVSDPVGVLYIRSCRVLMLSDWYTMLYNPSPDYVTTVHCTHEAVYPLYTIVFIYYAFCLVLMMLLRPLLVKKIACGLGKSDRFKSIYAALYFFPILTVLQAVGGGLLYYAFPYIILVLSLVTLAVYMSASEIENCYDLLVRKKRLIVLFSHWLLHAYGIISISRVDKLEQDLPLLALVPTPALFYLFTAKFTEPSRILSEGANGH

SEQ ID NO: 42304 - protein, 305 aa, Homo sapiens
  Payload ID: 8603
  Gene Symbol: JKAMP
  Gene Name: JNK1/MAPK8-associated membrane protein
  Uniprot ID: Q9P055
  ENSP ID: ENSP00000389699
MACLGLYCGKTLLFKNGSTEIYGECGVCPRGQRTNAQKYCQPCTESPELYDWLYLGFMAMLPLVLHWFFIEWYSGKKSSSALFQHITALFECSMAAIITLLVSDPVGVLYIRSCRVLMLSDWYTMLYNPSPDYVTTVHCTHEAVYPLYTIVFIYYAFCLVLMMLLRPLLVKKIACGLGKSDRFKSIYAALYFFPILTVLQAVGGGLLYYAFPYIILVLSLVTLAVYMSASEIENCYDLLVRKKRLIVLFSHWLLHAYGIISISRVDKLEQDLPLLALVPTPALFYLFTAKFTEPSRILSEGANGH

SEQ ID NO: 42305 - protein, 325 aa, Homo sapiens
  Payload ID: 8603
  Gene Symbol: JKAMP
  Gene Name: JNK1/MAPK8-associated membrane protein
  ENSP ID: ENSP00000450749
MKGEIQQSLGAWVLLTVDIQPACLGLYCGKTLLFKNGSTEIYGECGVCPRGQRTNAQKYCQPCTESPELYDWLYLGFMAMLPLVLHWFFIEWYSGKKSSSALFQHITALFECSMAAIITLLVSDPVGVLYIRSCRVLMLSDWYTMLYNPSPDYVTTVHCTHEAVYPLYTIVFIYYAFCLVLMMLLRPLLVKKIACGLGKSDRFKSIYAALYFFPILTVLQAVGGGLLYYAFPYIILVLSLVTLAVYMSASEIENCYDLLVRKKRLIVLFSHWLLHAYGIISISRVDKLEQDLPLLALVPTPALFYLFTAKFTEPSRILSEGANGH

SEQ ID NO: 42306 - protein, 247 aa, Homo sapiens
  Payload ID: 8603
  Gene Symbol: JKAMP
  Gene Name: JNK1/MAPK8-associated membrane protein
  ENSP ID: ENSP00000450813
MKGEIQQSLGAWVLLTCLGLYCGKTLLFKNGSTEIYGECGVCPRGQRTNAQKYCQPCTESPELYDWLYLGFMAMLPLVLHWFFIEWYSGKKSSSALFQHITALFECSMAAIITLLVSDPVGVLYIRSCRVLMLSDWYTMLYNPSPDYVTTVHCTHEAVYPLYTIVFIYYAFCLVLMMLLRPLLVKKIACGLGKSDRFKSIYAALYFFPILTVLQAVGGGLLYYAFPYIILVLSLVTLAVYMSASEIE

SEQ ID NO: 42307 - protein, 153 aa, Homo sapiens
  Payload ID: 8603
  Gene Symbol: JKAMP
  Gene Name: JNK1/MAPK8-associated membrane protein
  ENSP ID: ENSP00000451076
MAVDIQPACLGLYCGKTLLFKNGSTEIYGECGVCPRGQRTNAQKYCQPCTESPELYDWLYLGFMAMLPLVLHWFFIEWYSGKKSSSALFQHITALFECSMAAIITLLVSDPVGVLYIRSCRVLMLSDWYTMLYNPSPDYVTTVHCTHEAVYPL

SEQ ID NO: 42308 - protein, 140 aa, Homo sapiens
  Payload ID: 8603
  Gene Symbol: JKAMP
  Gene Name: JNK1/MAPK8-associated membrane protein
  ENSP ID: ENSP00000451723
MAVDIQPACLGLYCGKTLLFKNGSTEIYGECGVCPRGQRTNAQKYCQPCTESPELYDWLYLGFMAMLPLVLHWFFIEWYSGKKSSSALFQHITALFECSMAAIITLLIYHCIYLLRILLGINDAAPTSSGEEDCMWVREI

SEQ ID NO: 42309 - protein, 213 aa, Homo sapiens
  Payload ID: 8603
  Gene Symbol: JKAMP
  Gene Name: JNK1/MAPK8-associated membrane protein
  ENSP ID: ENSP00000479775
MAVDIQPACLGLYCGKTLLFKNGSTEIYGECGVCPRGQRTNAQKYCQPCTESPELYDWLYLGFMAMLPLVLHWFFIEWYSGKKSSSALFQHITALFECSMAAIITLLVSDPVGVLYIRSCRVLMLSDWYTMLYNPSPDYVTTVHCTHEAVYPLYTIVFIYYAFCLVLMMLLRPLLVKKIACGLGKSDRFKSIYAALYFFPILTVLQAVGGGLL

SEQ ID NO: 42310 - protein, 159 aa, Homo sapiens
  Payload ID: 8604
  Gene Symbol: JCHAIN
  Gene Name: joining chain of multimeric IgA and IgM
  Uniprot ID: P01591
  ENSP ID: ENSP00000254801
MKNHLLFWGVLAVFIKAVHVKAQEDERIVLVDNKCKCARITSRIIRSSEDPNEDIVERNIRIIVPLNNRENISDPTSPLRTRFVYHLSDLCKKCDPTEVELDNQIVTATQSNICDEDSATETCYTYDRNKCYTAVVPLVYGGETKMVETALTPDACYPD

SEQ ID NO: 42311 - protein, 70 aa, Homo sapiens
  Payload ID: 8604
  Gene Symbol: JCHAIN
  Gene Name: joining chain of multimeric IgA and IgM
  ENSP ID: ENSP00000417560
MKNHLLFWGVLAVFIKAVHVKAQEDERIVLVDNKCKCARITSRIIRSSEDPNEDIVERNIRIIVPLNNRE

SEQ ID NO: 42312 - protein, 157 aa, Homo sapiens
  Payload ID: 8604
  Gene Symbol: JCHAIN
  Gene Name: joining chain of multimeric IgA and IgM
  ENSP ID: ENSP00000426045
MKNHLLFWGVLAVFIKAVHVKGSRDSSASASRVAGITAQEDERIVLVDNKCKCARITSRIIRSSEDPNEDIVERNIRIIVPLNNRENISDPTSPLRTRFVYHLSDLCKKCDPTEVELDNQIVTATQSNICDEDSATETCYTYDRNKCYTAVVPLVYG

SEQ ID NO: 42313 - protein, 159 aa, Homo sapiens; identical to SEQ ID NO: 42310
  Payload ID: 8604
  Gene Symbol: JCHAIN
  Gene Name: joining chain of multimeric IgA and IgM
  Uniprot ID: P01591
  ENSP ID: ENSP00000426687

SEQ ID NO: 42314 - protein, 157 aa, Homo sapiens
  Payload ID: 8604
  Gene Symbol: JCHAIN
  Gene Name: joining chain of multimeric IgA and IgM
  ENSP ID: ENSP00000427112
MKNHLLFWGVLAVFIKAVHVKENGIHSEFRAQEDERIVLVDNKCKCARITSRIIRSSEDPNEDIVERNIRIIVPLNNRENISDPTSPLRTRFVYHLSDLCKKCDPTEVELDNQIVTATQSNICDEDSATETCYTYDRNKCYTAVVPLVYGGETKMVE

SEQ ID NO: 42315 - protein, 159 aa, Homo sapiens; identical to SEQ ID NO: 42310
  Payload ID: 8604
  Gene Symbol: JCHAIN
  Gene Name: joining chain of multimeric IgA and IgM
  Uniprot ID: P01591
  ENSP ID: ENSP00000440066

SEQ ID NO: 42316 - protein, 202 aa, Homo sapiens
  Payload ID: 8605
  Gene Symbol: JOSD1
  Gene Name: Josephin domain containing 1
  Uniprot ID: Q15040
  ENSP ID: ENSP00000216039
MSCVPWKGDKAKSESLELPQAAPPQIYHEKQRRELCALHALNNVFQDSNAFTRDTLQEIFQRLSPNTMVTPHKKSMLGNGNYDVNVIMAALQTKGYEAVWWDKRRDVGVIALTNVMGFIMNLPSSLCWGPLKLPLKRQHWICVREVGGAYYNLDSKLKMPEWIGGESELRKFLKHHLRGKNCELLLVVPEEVEAHQSWRTDV

SEQ ID NO: 42317 - protein, 62 aa, Homo sapiens
  Payload ID: 8605
  Gene Symbol: JOSD1
  Gene Name: Josephin domain containing 1
  ENSP ID: ENSP00000393131
MSCVPWKGDKAKSESLELPQAAPPQIYHEKQRRELCALHALNNVFQDSNAFTRDTLQEIFQR

SEQ ID NO: 42318 - protein, 61 aa, Homo sapiens
  Payload ID: 8605
  Gene Symbol: JOSD1
  Gene Name: Josephin domain containing 1
  ENSP ID: ENSP00000405182
MSCVPWKGDKAKSESLELPQAAPPQIYHEKQRRELCALHALNNVFQDSNAFTRDTLQEIFQ

SEQ ID NO: 42319 - protein, 123 aa, Homo sapiens
  Payload ID: 8605
  Gene Symbol: JOSD1
  Gene Name: Josephin domain containing 1
  ENSP ID: ENSP00000410010
MSCVPWKGDKAKSESLELPQAAPPQIYHEKQRRELCALHALNNVFQDSNAFTRDTLQEIFQRLSPNTMVTPHKKSMLGNGNYDVNVIMAALQTKGYEAVWWDKRRDVGVIALTNVMGFIMNLP

SEQ ID NO: 42320 - protein, 104 aa, Homo sapiens
  Payload ID: 8605
  Gene Symbol: JOSD1
  Gene Name: Josephin domain containing 1
  ENSP ID: ENSP00000415189
MSCVPWKGDKAKSESLELPQAAPPQIYHEKQRRELCALHALNNVFQDSNAFTRDTLQEIFQRLSPNTMVTPHKKSMLGNGNYDVNVIMAALQTKGYEAVWWDKR

SEQ ID NO: 42321 - protein, 154 aa, Homo sapiens
  Payload ID: 8605
  Gene Symbol: JOSD1
  Gene Name: Josephin domain containing 1
  ENSP ID: ENSP00000444798
  MOD_RES (1)..(1): Any amino acid
XKGDKAKSESLELPQAAPPQIYHEKQRRELCALHALNNVFQDSNAFTRDTLQEIFQRDVGVIALTNVMGFIMNLPSSLCWGPLKLPLKRQHWICVREVGGAYYNLDSKLKMPEWIGGESELRKFLKHHLRGKNCELLLVVPEEVEAHQSWRTDV

SEQ ID NO: 42322 - protein, 146 aa, Homo sapiens
  Payload ID: 8606
  Gene Symbol: JOSD2
  Gene Name: Josephin domain containing 2
  Uniprot ID: Q8TAC2
  ENSP ID: ENSP00000468860
MSQAPGAQPSPPTVYHERQRLELCAVHALNNVLQQQLFSQEAADEICKRPLSQLALPQVLGLILNLPSPVSLGLLSLPLRRRHWVALRQVDGVYYNLDSKLRAPEALGDEDGVRAFLAAALAQGLCEVLLVVTKEVEEKGSWLRTD

SEQ ID NO: 42323 - protein, 188 aa, Homo sapiens
  Payload ID: 8606
  Gene Symbol: JOSD2
  Gene Name: Josephin domain containing 2
  Uniprot ID: Q8TAC2
  ENSP ID: ENSP00000468956
MSQAPGAQPSPPTVYHERQRLELCAVHALNNVLQQQLFSQEAADEICKRLAPDSRLNPHRSLLGTGNYDVNVIMAALQGLGLAAVWWDRRRPLSQLALPQVLGLILNLPSPVSLGLLSLPLRRRHWVALRQVDGVYYNLDSKLRAPEALGDEDGVRAFLAAALAQGLCEVLLVVTKEVEEKGSWLRTD

SEQ ID NO: 42324 - protein, 161 aa, Homo sapiens
  Payload ID: 8606
  Gene Symbol: JOSD2
  Gene Name: Josephin domain containing 2
  ENSP ID: ENSP00000470628
MSQAPGAQPSPPTVYHERQRLELCAVHALNNVLQQQLFSQEAADEICKRLAPDSRLNPHRSLLGTGNYDVNVIMAALQGLGLAAVWWDRRRPLSQLALPQVLGLILNLPSPVSLGLLSLPLRRRHWVALRQVDGVYYNLDSKLRAPEALGDEDGVRAFLAA

SEQ ID NO: 42325 - protein, 188 aa, Homo sapiens; identical to SEQ ID NO: 42323
  Payload ID: 8606
  Gene Symbol: JOSD2
  Gene Name: Josephin domain containing 2
  Uniprot ID: Q8TAC2
  ENSP ID: ENSP00000472116

SEQ ID NO: 42326 - protein, 556 aa, Homo sapiens
  Payload ID: 8607
  Gene Symbol: JRK
  Gene Name: Jrk helix-turn-helix protein
  ENSP ID: ENSP00000461610
MASKPAAGKSRGEKRKRVVLTLKEKIDICTRLEKGESRKALMQEYNVGMSTLYDIRAHKAQLLRFFASSDSNKALEQRRTLHTPKLEHLDRVLYEWFLGKRSEGVPVSGPMLIEKAKDFYEQMQLTEPCVFSGGWLWRFKARHGIKKLDASSEKQSADHQAAEQFCAFFRSLAAEHGLSAEQVYNADETGLFWRCLPNPTPEGGAVPGPKQGKDRLTVLMCANATGSHRLKPLAIGKCSGPRAFKGIQHLPVAYKAQGNAWVDKEIFSDWFHHIFVPSVREHFRTIGLPEDSKAVLLLDSSRAHPQEAELVSSNVFTIFLPASVASLVQPMEQGIRRDFMRNFINPPVPLQGPHARYNMNDAIFSVACAWNAVPSHVFRRAWRKLWPSVAFAEGSSSEEELEAECFPVKPHNKSFAHILELVKEGSSCPGQLRQRQAASWGVAGREAEGGRPPAATSPAEVVWSSEKTPKADQDGRGDPGEGEEVAWEQAAVAFDAVLRFAERQPCFSAQEVGQLRALRAVFRSQQQETVGLEDVVVTSPEELAIPKCCLEASTET

SEQ ID NO: 42327 - protein, 568 aa, Homo sapiens
  Payload ID: 8607
  Gene Symbol: JRK
  Gene Name: Jrk helix-turn-helix protein
  ENSP ID: ENSP00000482410
MASKPAAGKSRGEKRKRVVLTLKEKIDICTRLEKGESRKALMQEYNVGMSTLYDIRAHKAQLLRFFASSDSNKALEQRRTLHTPKLEHLDRVLYEWFLGKRSEGVPVSGPMLIEKAKDFYEQMQLTEPCVFSGGWLWRFKARHGIKKLDASSEKQSADHQAAEQFCAFFRSLAAEHGLSAEQVYNADETGLFWRCLPNPTPEGGAVPGPKQGKDRLTVLMCANATGSHRLKPLAIGKCSGPRAFKGIQHLPVAYKAQGNAWVDKEIFSDWFHHIFVPSVREHFRTIGLPEDSKAVLLLDSSRAHPQEAELVSSNVFTIFLPASVASLVQPMEQGIRRDFMRNFINPPVPLQGPHARYNMNDAIFSVACAWNAVPSHVFRRAWRKLWPSVAFAEGSSSEEELEAECFPVKPHNKSFAHILELVKEGSSCPGQLRQRQAASWGVAGREAEGGRPPAATSPAEVVWSSEKTPKADQDGRGDPGEGEEVAWEQAAVAFDAVLRFAERQPCFSAQEVGQLRALRAVFRSQQQVRRRRGALGAVVKVEALQEGPGGCGATAQSPLPCSSTAGDN

SEQ ID NO: 42328 - protein, 25 aa, Homo sapiens
  Payload ID: 8607
  Gene Symbol: JRK
  Gene Name: Jrk helix-turn-helix protein
  ENSP ID: ENSP00000482585
MASKPAAGKSRGEKRKRVVLTLKEK

SEQ ID NO: 42329 - protein, 556 aa, Homo sapiens; identical to SEQ ID NO: 42326
  Payload ID: 8607
  Gene Symbol: JRK
  Gene Name: Jrk helix-turn-helix protein
  ENSP ID: ENSP00000483808

SEQ ID NO: 42330 - protein, 568 aa, Homo sapiens; identical to SEQ ID NO: 42327
  Payload ID: 8607
  Gene Symbol: JRK
  Gene Name: Jrk helix-turn-helix protein
  ENSP ID: ENSP00000485390

SEQ ID NO: 42331 - protein, 524 aa, Homo sapiens
  Payload ID: 8608
  Gene Symbol: JRKL
  Gene Name: JRK-like
  Uniprot ID: Q9Y4A0
  ENSP ID: ENSP00000333350
MSGKRKRVVLTIKDKLDIIKKLEDGGSSKQLAVIYGIGETTVRDIRKNKEKIITYASSSDSTSLLAKRKSMKPSMYEELDRAMLEWFNQQRAKGNPISGPICAKRAEFFFYALGMDGDFNPSAGWLTRFKQRHSIREINIRNERLNGDETAVEDFCNNFRDFIERENLQPEQIYNADETGLFWKCLPSRISVIKGKCTVPGHKSIEERVTIMCCANATGLHKLKLCVVGKAKKPRSFKSTDTLNLPVSYFSQKGAWMDLSIFRQWFDKIFVPQVREYLRSKGLQEKAVLLLDNSPTHPNENVLRSDDGQIFAKYLPPNVASLIQPSDQGVIATMKRNYRAGLLQNNLEEGNDLKSFWKKLTLLDALYEIAMAWNLVKPVTISRAWKKILPMVEEKESLDFDVEDISVATVAAILQHTKGLENVTTENLEKWLEVDSTEPGYEVLTDSEIIRRAQGQADESSENEEEEIELIPEKHINHAAALQWTENLLDYLEQQGDMILPDRLVIRKLRATIRNKQKMTKSSQ

SEQ ID NO: 42332 - protein, 956 aa, Homo sapiens
  Payload ID: 8609
  Gene Symbol: JMJD1C
  Gene Name: jumonji domain containing 1C
  ENSP ID: ENSP00000335929
  MOD_RES (1)..(1): Any amino acid
XDSMPAMQLASKDRVSERSSAGAHKTDCLKLAEAGETGRIILPNVNSDSVHTKSEKNFQAVSQGSVPSSVMSAVNTMCNTKTDVITSAADTTSVSSWGGSEVISSLSNTILASTSSECVSSKSVSQPVAQKQECKVSTTAPVTLASSKTGSVVQPSSGFSGTTDFIHLKKHKAALAAAQYKSSNASETEPNAIKNQTLSASLPLDSTVICSTINKANSVGNGQASQTSQPNYHTKLKKAWLTRHSEEDKNTNKMENSGNSVSEIIKPCSVNLIASTSSDIQNSVDSKIIVDKYVKDDKVNRRKAKRTYESGSESGDSDESESKSEQRTKRQPKPTYKKKQNDLQKRKGEIEEDLKPNGVLSRSAKERSKLKLQSNSNTKIAWKRAVRGVREMCDACEATLFNIHWVCQKCGFVVCLDCYKAKERKSSRDKELYAWMKCVKGQPHDHKHLMPTQIIPGSVLTDLLDAMHTLREKYGIKSHCHCTNKQNLQVGNFPTMNGVSQVLQNVLNHSNKISLCMPESQQQNTPPKSEKNGGSSPESDVGTDNKLTPPESQSPLHWLADLAEQKAREEKKENKELTLENQIKEEREQDNSESPNGRTSPLVSQNNEQGSTLRDLLTTTAGKLRVGSTDAGIAFAPVYSMGAPSSKSGRTMPNILDDIIASVVENKIPPSKTSKINVKPELKEEPEESIISAVDENNKLYSDIPHSWICEKHILWLKDYKNSSNWKLFKECWKQGQPAVVSGVHKKMNISLWKAESISLDFGDHQADLLNCKDSIISNANVKEFWDGFEEVSKRQKNKSGETVVLKLKDWPSGEDFKTMMPARYEDLLKSLPLPEYCNPEGKFNLASHLPGFFVRPDLGPRLCSAYGVVAAKDHDIGTTNLHIEVSDVVNILVYVGIAKGNGILSKAGILKKFEEEDLDDILRKRLKDSSEIPGALWHIYAGKDVDKIREFLQKV

SEQ ID NO: 42333 - protein, 2540 aa, Homo sapiens
  Payload ID: 8609
  Gene Symbol: JMJD1C
  Gene Name: jumonji domain containing 1C
  Uniprot ID: Q15652
  ENSP ID: ENSP00000382204
MAVETRAELVGKRFLCVAVGDEARSERWESGRGWRSWRAGVIRAVSHRDSRNPDLAVYVEFDDLEWDKREWVKVYEDFSTFLVEYHLIWAKRNDPSQTQGSKSKQIQWPALTFKPLVERNIPSSVTAVEFLVDKQLDFLTEDSAFQPYQDDIDSLNPVLRDNPQLHEEVKVWVKEQKVQEIFMQGPYSLNGYRVRVYRQDSATQWFTGIITHHDLFTRTMIVMNDQVLEPQNVDPSMVQMTFLDDVVHSLLKGENIGITSRRRSRANQNVNAVHSHYTRAQANSPRPAMNSQAAVPKQNTHQQQQQRSIRPNKRKGSDSSIPDEEKMKEEKYDYISRGENPKGKNKHLMNKRRKPEEDEKKLNMKRLRTDNVSDFSESSDSENSNKRIIDNSSEQKPENELKNKNTSKINGEEGKPHNNEKAGEETLKNSQPPWDQIQEDKKHEEAEKRKSVDTQLQEDMIIHSSEQSTVSDHNSNDLLPQECNMDKTHTMELLPKEKFVSRPPTPKCVIDITNDTNLEKVAQENSSTFGLQTLQKMDPNVSDSKHSIANAKFLETAKKDSDQSWVSDVVKVDLTQSSVTNASSGNDHLNMEKEKYVSYISPLSAVSVMEDKLHKRSPPPETIKSKLNTSVDTHKIKSSPSPEVVKPKITHSPDSVKSKATYVNSQATGERRLANKIEHELSRCSFHPIPTRSSTLETTKSPLIIDKNEHFTVYRDPALIGSETGANHISPFLSQHPFPLHSSSHRTCLNPGTHHPALTPAPHLLAGSSSQTPLPTINTHPLTSGPHHAVHHPHLLPTVLPGVPTASLLGGHPRLESAHASSLSHLALAHQQQQQLLQHQSPHLLGQAHPSASYNQLGLYPIIWQYPNGTHAYSGLGLPSSKWVHPENAVNAEASLRRNSPSPWLHQPTPVTSADGIGLLSHIPVRPSSAEPHRPLKITAHSSPPLTKTLVDHHKEELERKAFMEPLRSVASTSAKNDLDLNRSQTGKDCHLHRHFVDPVLNQLQRPPQETGERLNKYKEEHRRILQESIDVAPFTTKIKGLEGERENYSRVASSSSSPKSHIIKQDMDVERSVSDLYKMKHSVPQSLPQSNYFTTLSNSVVNEPPRSYPSKEVSNIYGDKQSNALAAAAANPQTLTSFITSLSKPPPLIKHQPESEGLVGKIPEHLPHQIASHSVTTFRNDCRSPTHLTVSSTNTLRSMPALHRAPVFHPPIHHSLERKEGSYSSLSPPTLTPVMPVNAGGKVQESQKPPTLIPEPKDSQANFKSSSEQSLTEMWRPNNNLSKEKTEWHVEKSSGKLQAAMASVIVRPSSSTKTDSMPAMQLASKDRVSERSSAGAHKTDCLKLAEAGETGRIILPNVNSDSVHTKSEKNFQAVSQGSVPSSVMSAVNTMCNTKTDVITSAADTTSVSSWGGSEVISSLSNTILASTSSECVSSKSVSQPVAQKQECKVSTTAPVTLASSKTGSVVQPSSGFSGTTDFIHLKKHKAALAAAQYKSSNASETEPNAIKNQTLSASLPLDSTVICSTINKANSVGNGQASQTSQPNYHTKLKKAWLTRHSEEDKNTNKMENSGNSVSEIIKPCSVNLIASTSSDIQNSVDSKIIVDKYVKDDKVNRRKAKRTYESGSESGDSDESESKSEQRTKRQPKPTYKKKQNDLQKRKGEIEEDLKPNGVLSRSAKERSKLKLQSNSNTGIPRSVLKDWRKVKKLKQTGESFLQDDSCCEIGPNLQKCRECRLIRSKKGEEPAHSPVFCRFYYFRRLSFSKNGVVRIDGFSSPDQYDDEAMSLWTHENFEDDELDIETSKYILDIIGDKFCQLVTSEKTALSWVKKDAKIAWKRAVRGVREMCDACEATLFNIHWVCQKCGFVVCLDCYKAKERKSSRDKELYAWMKCVKGQPHDHKHLMPTQIIPGSVLTDLLDAMHTLREKYGIKSHCHCTNKQNLQVGNFPTMNGVSQVLQNVLNHSNKISLCMPESQQQNTPPKSEKNGGSSPESDVGTDNKLTPPESQSPLHWLADLAEQKAREEKKENKELTLENQIKEEREQDNSESPNGRTSPLVSQNNEQGSTLRDLLTTTAGKLRVGSTDAGIAFAPVYSMGAPSSKSGRTMPNILDDIIASVVENKIPPSKTSKINVKPELKEEPEESIISAVDENNKLYSDIPHSWICEKHILWLKDYKNSSNWKLFKECWKQGQPAVVSGVHKKMNISLWKAESISLDFGDHQADLLNCKDSIISNANVKEFWDGFEEVSKRQKNKSGETVVLKLKDWPSGEDFKTMMPARYEDLLKSLPLPEYCNPEGKFNLASHLPGFFVRPDLGPRLCSAYGVVAAKDHDIGTTNLHIEVSDVVNILVYVGIAKGNGILSKAGILKKFEEEDLDDILRKRLKDSSEIPGALWHIYAGKDVDKIREFLQKISKEQGLEVLPEHDPIRDQSWYVNKKLRQRLLEEYGVRTCTLIQFLGDAIVLPAGALHQVQNFHSCIQVTEDFVSPEHLVESFHLTQELRLLKEEINYDDKLQVKNILYHAVKEMVRALKIHEDEVEDMEEN

SEQ ID NO: 42334 - protein, 2358 aa, Homo sapiens
  Payload ID: 8609
  Gene Symbol: JMJD1C
  Gene Name: jumonji domain containing 1C
  Uniprot ID: Q15652
  ENSP ID: ENSP00000444682
MQGPYSLNGYRVRVYRQDSATQWFTGIITHHDLFTRTMIVMNDQVLEPQNVDPSMVQMTFLDDVVHSLLKGENIGITSRRRSRANQNVNAVHSHYTRAQANSPRPAMNSQAAVPKQNTHQQQQQRSIRPNKRKGSDSSIPDEEKMKEEKYDYISRGENPKGKNKHLMNKRRKPEEDEKKLNMKRLRTDNVSDFSESSDSENSNKRIIDNSSEQKPENELKNKNTSKINGEEGKPHNNEKAGEETLKNSQPPWDQIQEDKKHEEAEKRKSVDTQLQEDMIIHSSEQSTVSDHNSNDLLPQECNMDKTHTMELLPKEKFVSRPPTPKCVIDITNDTNLEKVAQENSSTFGLQTLQKMDPNVSDSKHSIANAKFLETAKKDSDQSWVSDVVKVDLTQSSVTNASSGNDHLNMEKEKYVSYISPLSAVSVMEDKLHKRSPPPETIKSKLNTSVDTHKIKSSPSPEVVKPKITHSPDSVKSKATYVNSQATGERRLANKIEHELSRCSFHPIPTRSSTLETTKSPLIIDKNEHFTVYRDPALIGSETGANHISPFLSQHPFPLHSSSHRTCLNPGTHHPALTPAPHLLAGSSSQTPLPTINTHPLTSGPHHAVHHPHLLPTVLPGVPTASLLGGHPRLESAHASSLSHLALAHQQQQQLLQHQSPHLLGQAHPSASYNQLGLYPIIWQYPNGTHAYSGLGLPSSKWVHPENAVNAEASLRRNSPSPWLHQPTPVTSADGIGLLSHIPVRPSSAEPHRPLKITAHSSPPLTKTLVDHHKEELERKAFMEPLRSVASTSAKNDLDLNRSQTGKDCHLHRHFVDPVLNQLQRPPQETGERLNKYKEEHRRILQESIDVAPFTTKIKGLEGERENYSRVASSSSSPKSHIIKQDMDVERSVSDLYKMKHSVPQSLPQSNYFTTLSNSVVNEPPRSYPSKEVSNIYGDKQSNALAAAAANPQTLTSFITSLSKPPPLIKHQPESEGLVGKIPEHLPHQIASHSVTTFRNDCRSPTHLTVSSTNTLRSMPALHRAPVFHPPIHHSLERKEGSYSSLSPPTLTPVMPVNAGGKVQESQKPPTLIPEPKDSQANFKSSSEQSLTEMWRPNNNLSKEKTEWHVEKSSGKLQAAMASVIVRPSSSTKTDSMPAMQLASKDRVSERSSAGAHKTDCLKLAEAGETGRIILPNVNSDSVHTKSEKNFQAVSQGSVPSSVMSAVNTMCNTKTDVITSAADTTSVSSWGGSEVISSLSNTILASTSSECVSSKSVSQPVAQKQECKVSTTAPVTLASSKTGSVVQPSSGFSGTTDFIHLKKHKAALAAAQYKSSNASETEPNAIKNQTLSASLPLDSTVICSTINKANSVGNGQASQTSQPNYHTKLKKAWLTRHSEEDKNTNKMENSGNSVSEIIKPCSVNLIASTSSDIQNSVDSKIIVDKYVKDDKVNRRKAKRTYESGSESGDSDESESKSEQRTKRQPKPTYKKKQNDLQKRKGEIEEDLKPNGVLSRSAKERSKLKLQSNSNTGIPRSVLKDWRKVKKLKQTGESFLQDDSCCEIGPNLQKCRECRLIRSKKGEEPAHSPVFCRFYYFRRLSFSKNGVVRIDGFSSPDQYDDEAMSLWTHENFEDDELDIETSKYILDIIGDKFCQLVTSEKTALSWVKKDAKIAWKRAVRGVREMCDACEATLFNIHWVCQKCGFVVCLDCYKAKERKSSRDKELYAWMKCVKGQPHDHKHLMPTQIIPGSVLTDLLDAMHTLREKYGIKSHCHCTNKQNLQVGNFPTMNGVSQVLQNVLNHSNKISLCMPESQQQNTPPKSEKNGGSSPESDVGTDNKLTPPESQSPLHWLADLAEQKAREEKKENKELTLENQIKEEREQDNSESPNGRTSPLVSQNNEQGSTLRDLLTTTAGKLRVGSTDAGIAFAPVYSMGAPSSKSGRTMPNILDDIIASVVENKIPPSKTSKINVKPELKEEPEESIISAVDENNKLYSDIPHSWICEKHILWLKDYKNSSNWKLFKECWKQGQPAVVSGVHKKMNISLWKAESISLDFGDHQADLLNCKDSIISNANVKEFWDGFEEVSKRQKNKSGETVVLKLKDWPSGEDFKTMMPARYEDLLKSLPLPEYCNPEGKFNLASHLPGFFVRPDLGPRLCSAYGVVAAKDHDIGTTNLHIEVSDVVNILVYVGIAKGNGILSKAGILKKFEEEDLDDILRKRLKDSSEIPGALWHIYAGKDVDKIREFLQKISKEQGLEVLPEHDPIRDQSWYVNKKLRQRLLEEYGVRTCTLIQFLGDAIVLPAGALHQVQNFHSCIQVTEDFVSPEHLVESFHLTQELRLLKEEINYDDKLQVKNILYHAVKEMVRALKIHEDEVEDMEEN

SEQ ID NO: 42335 - protein, 463 aa, Homo sapiens
  Payload ID: 8610
  Gene Symbol: JMJD4
  Gene Name: jumonji domain containing 4
  Uniprot ID: Q9H9V9
  ENSP ID: ENSP00000355720
MRAGPEPQALAGQKRGALRLLVPRLVLTVSAPAEVRRRVLRPVLSWMDRETRALADSHFRGLGVDVPGVGQAPGRVAFVSEPGAFSYADFVRGFLLPNLPCVFSSAFTQGWGSRRRWVTPAGRPDFDHLLRTYGDVVVPVANCGVQEYNSNPKEHMTLRDYITYWKEYIQAGYSSPRGCLYLKDWHLCRDFPVEDVFTLPVYFSSDWLNEFWDALDVDDYRFVYAGPAGSWSPFHADIFRSFSWSVNVCGRKKWLLFPPGQEEALRDRHGNLPYDVTSPALCDTHLHPRNQLAGPPLEITQEAGEMVFVPSGWHHQVHNLDDTISINHNWVNGFNLANMWRFLQQELCAVQEEVSEWRDSMPDWHHHCQVIMRSCSGINFEEFYHFLKVIAEKRLLVLREAAAEDGAGLGFEQAAFDVGRITEVLASLVAHPDFQRVDTSAFSPQPKELLQQLREAVDAAAAP

SEQ ID NO: 42336 - protein, 447 aa, Homo sapiens
  Payload ID: 8610
  Gene Symbol: JMJD4
  Gene Name: jumonji domain containing 4
  Uniprot ID: Q9H9V9
  ENSP ID: ENSP00000387830
MRAGPEPQALAGQKRGALRLLVPRLVLTVSAPAEVRRRVLRPVLSWMDRETRALADSHFRGLGVDVPGVGQAPGRVAFVSEPGAFSYADFVRGFLLPNLPCVFSSAFTQGWGSRRRWVTPAGRPDFDHLLRTYGDVVVPVANCGVQEYNSNPKEHMTLRDYITYWKEYIQAGYSSPRGCLYLKDWHLCRDFPVEDVFTLPVYFSSDWLNEFWDALDVDDYRFVYAGPAGSWSPFHADIFRSFSWSVNVCGRKKWLLFPPGQEEALRDRHGNLPYDVTSPALCDTHLHPRNQLAGPPLEITQEAGEMVFVPSGWHHQVHNLDDTISINHNWVNGFNLANMWRFLQQELCAVQEEVIMRSCSGINFEEFYHFLKVIAEKRLLVLREAAAEDGAGLGFEQAAFDVGRITEVLASLVAHPDFQRVDTSAFSPQPKELLQQLREAVDAAAAP

SEQ ID NO: 42337 - protein, 417 aa, Homo sapiens
  Payload ID: 8610
  Gene Symbol: JMJD4
  Gene Name: jumonji domain containing 4
  ENSP ID: ENSP00000477669
MDRETRALADSHFRGLGVDVPGVGQAPGRVAFVSEPGAFSYADFVRGFLLPNLPCVFSSAFTQGWGSRRRWVTPAGRPDFDHLLRTYGDVVVPVANCGVQEYNSNPKEHMTLRDYITYWKEYIQAGYSSPRGCLYLKDWHLCRDFPVEDVFTLPVYFSSDWLNEFWDALDVDDYRFVYAGPAGSWSPFHADIFRSFSWSVNVCGRKKWLLFPPGQEEALRDRHGNLPYDVTSPALCDTHLHPRNQLAGPPLEITQEAGEMVFVPSGWHHQVHNLDDTISINHNWVNGFNLANMWRFLQQELCAVQEEVSEWRDSMPDWHHHCQVIMRSCSGINFEEFYHFLKVIAEKRLLVLREAAAEDGAGLGFEQAAFDVGRITEVLASLVAHPDFQRVDTSAFSPQPKELLQQLREAVDAAAAP

SEQ ID NO: 42338 - protein, 463 aa, Homo sapiens; identical to SEQ ID NO: 42335
  Payload ID: 8610
  Gene Symbol: JMJD4
  Gene Name: jumonji domain containing 4
  Uniprot ID: Q9H9V9
  ENSP ID: ENSP00000484088

SEQ ID NO: 42339 - protein, 335 aa, Homo sapiens
  Payload ID: 8611
  Gene Symbol: JMJD6
  Gene Name: jumonji domain containing 6
  ENSP ID: ENSP00000302916
MNHKSKKRIREAKRSARPELKDSLDWTRHNYYESFSLSPAAVADNVERADALQLSVEEFVERYERPYKPVVLLNAQEGWSAQEKWTLERLKRKYRNQKFKCGEDNDGYSVKMKMKYYIEYMESTRDDSPLYIFDSSYGEHPKRRKLLEDYKVPKFFTDDLFQYAGEKRRPPYRWFVMGPPRSGTGIHIDPLGTSAWNALVQGHKRWCLFPTSTPRELIKVTRDEGGNQQDEAITWFNVIYPRTQLPTWPPEFKPLEILQKPGETVFVPGGWWHVVLNLDTTIAITQNFASSTNFPVVWHKTVRGRPKLSRKWYRYSTGSGSASHPQPPRATVSQP

SEQ ID NO: 42340 - protein, 403 aa, Homo sapiens
  Payload ID: 8611
  Gene Symbol: JMJD6
  Gene Name: jumonji domain containing 6
  Uniprot ID: Q6NYC1
  ENSP ID: ENSP00000380750
MNHKSKKRIREAKRSARPELKDSLDWTRHNYYESFSLSPAAVADNVERADALQLSVEEFVERYERPYKPVVLLNAQEGWSAQEKWTLERLKRKYRNQKFKCGEDNDGYSVKMKMKYYIEYMESTRDDSPLYIFDSSYGEHPKRRKLLEDYKVPKFFTDDLFQYAGEKRRPPYRWFVMGPPRSGTGIHIDPLGTSAWNALVQGHKRWCLFPTSTPRELIKVTRDEGGNQQDEAITWFNVIYPRTQLPTWPPEFKPLEILQKPGETVFVPGGWWHVVLNLDTTIAITQNFASSTNFPVVWHKTVRGRPKLSRKWYRILKQEHPELAVLADSVDLQESTGIASDSSSDSSSSSSSSSSDSDSECESGSEGDGTVHRRKKRRTCSMVGNGDTTSQDDCVSKERSSSR

SEQ ID NO: 42341 - protein, 414 aa, Homo sapiens
  Payload ID: 8611
  Gene Symbol: JMJD6
  Gene Name: jumonji domain containing 6
  Uniprot ID: Q6NYC1
  ENSP ID: ENSP00000394085
MNHKSKKRIREAKRSARPELKDSLDWTRHNYYESFSLSPAAVADNVERADALQLSVEEFVERYERPYKPVVLLNAQEGWSAQEKWTLERLKRKYRNQKFKCGEDNDGYSVKMKMKYYIEYMESTRDDSPLYIFDSSYGEHPKRRKLLEDYKVPKFFTDDLFQYAGEKRRPPYRWFVMGPPRSGTGIHIDPLGTSAWNALVQGHKRWCLFPTSTPRELIKVTRDEGGNQQDEAITWFNVIYPRTQLPTWPPEFKPLEILQKPGETVFVPGGWWHVVLNLDTTIAITQNFASSTNFPVVWHKTVRGRPKLSRKWYRILKQEHPELAVLADSVDLQESTGIASDSSSDSSSSSSSSSSDSDSECESGSEGDGTVHRRKKRRTCSMVGNGDTTSQDDCVSKERSSSRIRDTCGGRAHP

SEQ ID NO: 42342 - protein, 361 aa, Homo sapiens
  Payload ID: 8611
  Gene Symbol: JMJD6
  Gene Name: jumonji domain containing 6
  ENSP ID: ENSP00000442362
MNHKSKKRIREAKRSARPELKDSLDWTRHNYYESFSLSPAAVADNVERADALQLSVEEFVERYERPYKPVVLLNAQEGWSAQEKWTLERLKRKYRNQKFKCGEDNDGYSVKMKMKYYIEYMESTRDDSPLYIFDSSYGEHPKRRKLLEDYKVPKFFTDDLFQYAGEKRRPPYRWFVMGPPRSGTGIHIDPLGTSAWNALVQGHKRWCLFPTSTPRELIKVTRDEGGNQQDEAITWFNVIYPRTQLPTWPPEFKPLEILQKPGETVFVPGGWWHVVLNLDTTIAITQNFASSTNFPVVWHKTVRGRPKLSRKWYRTDTARAAAVQATHSHPVPLCPNPDLEGPALGDFEARAPRVGSPRRLG

SEQ ID NO: 42343 - protein, 395 aa, Homo sapiens
  Payload ID: 8611
  Gene Symbol: JMJD6
  Gene Name: jumonji domain containing 6
  ENSP ID: ENSP00000465330
MNHKSKKRIREAKRSARPELKDSLDWTRHNYYESFSLSPAAVADNVERADALQLSVEEFVERYERPYKPVVLLNAQEGWSAQEKWTLERLKRKYRNQKFKCGEDNDGYSVKMKMKYYIEYMESTRDDSPLYIFDSSYGEHPKRRKLLEDYKVPKFFTDDLFQYAGEKRRPPYRWFVMGPPRSGTGIHIDPLGTSAWNALVQGHKRWCLFPTSTPRELIKVTRDEGGNQQDEAITWFNVIYPRTQLPTWPPEFKPLEILQKPGETVFVPGGWWHVVLNLDTTIAITQNFASSTNFPVVWHKTVRGRPKLSRKWYSASLDPRAMGQCTAGRRGGRAAWWETGTPPPRTTVSAKSAAPPGDPARLLSVWKDTLAARAGPGEGGLSSPADKGRPDRAQE

SEQ ID NO: 42344 - protein, 361 aa, Homo sapiens; identical to SEQ ID NO: 42342
  Payload ID: 8611
  Gene Symbol: JMJD6
  Gene Name: jumonji domain containing 6
  ENSP ID: ENSP00000483941

SEQ ID NO: 42345 - protein, 316 aa, Homo sapiens
  Payload ID: 8612
  Gene Symbol: JMJD7
  Gene Name: jumonji domain containing 7
  Uniprot ID: P0C870
  ENSP ID: ENSP00000380467
MAEAALEAVRSELREFPAAARELCVPLAVPYLDKPPTPLHFYRDWVCPNRPCIIRNALQHWPALQKWSLPYFRATVGSTEVSVAVTPDGYADAVRGDRFMMPAERRLPLSFVLDVLEGRAQHPGVLYVQKQCSNLPSELPQLLPDLESHVPWASEALGKMPDAVNFWLGEAAAVTSLHKDHYENLYCVVSGEKHFLFHPPSDRPFIPYELYTPATYQLTEEGTFKVVDEEAMEKVPWIPLDPLAPDLARYPSYSQAQALRCTVRAGEMLYLPALWFHHVQQSQGCIAVNFWYDMEYDLKYSYFQLLDSLTKASGLD

SEQ ID NO: 42346 - protein, 217 aa, Homo sapiens
  Payload ID: 8612
  Gene Symbol: JMJD7
  Gene Name: jumonji domain containing 7
  ENSP ID: ENSP00000384174
MMPAERRLPLSFVLDVLEGRAQHPGVLYVQKQCSNLPSELPQLLPDLESHVPWASEALGKMPDAVNFWLGEAAAVTSLHKDHYENLYCVVSGEKHFLFHPPSDRPFIPYELYTPATYQLTEEGTFKVVDEEAMEKVPWIPLDPLAPDLARYPSYSQAQALRCTVRAGEMLYLPALWFHHVQQSQGCIAVNFWYDMEYDLKYSYFQLLDSLTKASGLD

SEQ ID NO: 42347 - protein, 135 aa, Homo sapiens
  Payload ID: 8612
  Gene Symbol: JMJD7
  Gene Name: jumonji domain containing 7
  ENSP ID: ENSP00000399600
MMPAERRLPLSFVLDVLEGRAQHPGVLYVQKQCSNLPSELPQLLPDLESHVPWASEALGKMPDAVNFWLGEAAAVTSLHKDHYENLYCVVSGEKHFLFHPPSDRPFIPYELYTPATYQLTEEGTFKVVDEEAMEK

SEQ ID NO: 42348 - protein, 285 aa, Homo sapiens
  Payload ID: 8613
  Gene Symbol: JMJD8
  Gene Name: jumonji domain containing 8
  Uniprot ID: Q96S16
  ENSP ID: ENSP00000399475
MAGGWAQGSRRAARLPEGGRLMAPASRLLALWALAAVALPGSGAEGDGGWRPGGPGAVAEEERCTVERRADLTYAEFVQQYAFVRPVILQGLTDNSRFRALCSRDRLLASFGDRVVRLSTANTYSYHKVDLPFQEYVEQLLHPQDPTSLGNDTLYFFGDNNFTEWASLFRHYSPPPFGLLGTAPAYSFGIAGAGSGVPFHWHGPGYSEVIYGRKRWFLYPPEKTPEFHPNKTTLAWLRDTYPALPPSARPLECTIRAGEVLYFPDRWWHATLNLDTSVFISTFLG

SEQ ID NO: 42349 - protein, 234 aa, Homo sapiens
  Payload ID: 8613
  Gene Symbol: JMJD8
  Gene Name: jumonji domain containing 8
  ENSP ID: ENSP00000454358
MAPASRLLALWALAAVALPGSGAEGDGGWYAFVRPVILQGLTDNSRFRALCSRDRLLASFGDRVVRLSTANTYSYHKVDLPFQEYVEQLLHPQDPTSLGNDTLYFFGDNNFTEWASLFRHYSPPPFGLLGTAPAYSFGIAGAGSGVPFHWHGPGYSEVIYGRKRWFLYPPEKTPEFHPNKTTLAWLRDTYPALPPSARPLECTIRAGEVLYFPDRWWHATLNLDTSVFISTFLG

SEQ ID NO: 42350 - protein, 81 aa, Homo sapiens
  Payload ID: 8613
  Gene Symbol: JMJD8
  Gene Name: jumonji domain containing 8
  ENSP ID: ENSP00000454700
  MOD_RES (1)..(1): Any amino acid
XWTCPSRSMWSSCCTPRTPPPWAMTPCTSSGTTTSPSGPLSFGTTPHPHLACWEPLQLTALESQELARGCPSTGMDPGTQK

SEQ ID NO: 42351 - protein, 219 aa, Homo sapiens
  Payload ID: 8613
  Gene Symbol: JMJD8
  Gene Name: jumonji domain containing 8
  ENSP ID: ENSP00000458106
MAPASRLLALWALAAVALPGSGAEGDGGWRPGGPGAVAEEERCTVERRADLTYAEFVQQYAFVRPVILQGLTDNSRFRALCSRDRLLASFGDRVVRLSTANTYSYHKVDLPFQEYVEQLLHPQDPTSLGNDTLYFFGDNNFTEWASLFRHYSPPPFGLLGTAPAYSFGIAGAGSGVPFHWHGPGYSEVIYGRKVLYFPDRWWHATLNLDTSVFISTFLG

SEQ ID NO: 42352 - protein, 264 aa, Homo sapiens
  Payload ID: 8613
  Gene Symbol: JMJD8
  Gene Name: jumonji domain containing 8
  Uniprot ID: Q96S16
  ENSP ID: ENSP00000477481
MAPASRLLALWALAAVALPGSGAEGDGGWRPGGPGAVAEEERCTVERRADLTYAEFVQQYAFVRPVILQGLTDNSRFRALCSRDRLLASFGDRVVRLSTANTYSYHKVDLPFQEYVEQLLHPQDPTSLGNDTLYFFGDNNFTEWASLFRHYSPPPFGLLGTAPAYSFGIAGAGSGVPFHWHGPGYSEVIYGRKRWFLYPPEKTPEFHPNKTTLAWLRDTYPALPPSARPLECTIRAGEVLYFPDRWWHATLNLDTSVFISTFLG

SEQ ID NO: 42353 - protein, 1246 aa, Homo sapiens [sequence omitted]

SEQ ID NO: 42354 - protein, 1074 aa, Homo sapiens
  Payload ID: 8614
  Gene Symbol: JARID2
  Gene Name: jumonji, AT rich interactive domain 2
  Uniprot ID: Q92833
  ENSP ID: ENSP00000380478
MVYFGSSQDEEEVEEEDDETEDVKTATNNASSSCQSTPRKGKTHKHVHNGHVFNGSSRSTREKEPVQKHKSKEATPAKEKHSDHRADSRREQASANHPAAAPSTGSSAKGLAATHHHPPLHRSAQDLRKQVSKVNGVTRMSSLGAGVTSAKKMREVRPSPSKTVKYTATVTKGAVTYTKAKRELVKDTKPNHHKPSSAVNHTISGKTESSNAKTRKQVLSLGGASKSTGPAVNGLKVSGRLNPKSCTKEVGGRQLREGLQLREGLRNSKRRLEEAHQAEKPQSPPKKMKGAAGPAEGPGKKAPAERGLLNGHVKKEVPERSLERNRPKRATAGKSTPGRQAHGKADSASCENRSTSQPESVHKPQDSGKAEKGGGKAGWAAMDEIPVLRPSAKEFHDPLIYIESVRAQVEKFGMCRVIPPPDWRPECKLNDEMRFVTQIQHIHKLGRRWGPNVQRLACIKKHLKSQGITMDELPLIGGCELDLACFFRLINEMGGMQQVTDLKKWNKLADMLRIPRTAQDRLAKLQEAYCQYLLSYDSLSPEEHRRLEKEVLMEKEILEKRKGPLEGHTENDHHKFHPLPRFEPKNGLIHGVAPRNGFRSKLKEVGQAQLKTGRRRLFAQEKEVVKEEEEDKGVLNDFHKCIYKGRSVSLTTFYRTARNIMSMCFSKEPAPAEIEQEYWRLVEEKDCHVAVHCGKVDTNTHGSGFPVGKSEPFSRHGWNLTVLPNNTGSILRHLGAVPGVTIPWLNIGMVFSTSCWSRDQNHLPYIDYLHTGADCIWYCIPAEEENKLEDVVHTLLQANGTPGLQMLESNVMISPEVLCKEGIKVHRTVQQSGQFVVCFPGSFVSKVCCGYSVSETVHFATTQWTSMGFETAKEMKRRHIAKPFSMEKLLYQIAQAEAKKENGPTLSTISALLDELRDTELRQRRQLFEAGLHSSARYGSHDGSSTVADGKKKPRKWLQLETSERRCQICQHLCYLSMVVQENENVVFCLECALRHVEKQKSCRGLKLMYRYDEEQIISLVNQICGKVSGKNGSIENCLSKPTPKRGPRKRATVDVPPSRLSASSSSKSASSSS

SEQ ID NO: 42355 - protein, 146 aa, Homo sapiens
  Payload ID: 8615
  Gene Symbol: JTB
  Gene Name: jumping translocation breakpoint
  Uniprot ID: O76095
  ENSP ID: ENSP00000271843
MLAGAGRPGLPQGRHLCWLLCAFTLKLCQAEAPVQEEKLSASTSNLPCWLVEEFVVAEECSPCSNFRAKTTPECGPTGYVEKITCSSSKRNEFKSCRSALMEQRLFWKFEGAVVCVALIFACLVIIRQRQLDRKALEKVRKQIESI

SEQ ID NO: 42356 - protein, 117 aa, Homo sapiens
  Payload ID: 8615
  Gene Symbol: JTB
  Gene Name: jumping translocation breakpoint
  Uniprot ID: O76095
  ENSP ID: ENSP00000349069
MAWGWHLSFLSASTSNLPCWLVEEFVVAEECSPCSNFRAKTTPECGPTGYVEKITCSSSKRNEFKSCRSALMEQRLFWKFEGAVVCVALIFACLVIIRQRQLDRKALEKVRKQIESI

SEQ ID NO: 42357 - protein, 117 aa, Homo sapiens; identical to SEQ ID NO: 42356
  Payload ID: 8615
  Gene Symbol: JTB
  Gene Name: jumping translocation breakpoint
  Uniprot ID: O76095
  ENSP ID: ENSP00000357578

SEQ ID NO: 42358 - protein, 117 aa, Homo sapiens; identical to SEQ ID NO: 42356
  Payload ID: 8615
  Gene Symbol: JTB
  Gene Name: jumping translocation breakpoint
  Uniprot ID: O76095
  ENSP ID: ENSP00000395250

SEQ ID NO: 42359 - protein, 347 aa, Homo sapiens
  Payload ID: 8616
  Gene Symbol: JUNB
  Gene Name: jun B proto-oncogene
  Uniprot ID: P17275
  ENSP ID: ENSP00000303315
MCTKMEQPFYHDDSYTATGYGRAPGGLSLHDYKLLKPSLAVNLADPYRSLKAPGARGPGPEGGGGGSYFSGQGSDTGASLKLASSELERLIVPNSNGVITTTPTPPGQYFYPRGGGSGGGAGGAGGGVTEEQEGFADGFVKALDDLHKMNHVTPPNVSLGATGGPPAGPGGVYAGPEPPPVYTNLSSYSPASASSGGAGAAVGTGSSYPTTTISYLPHAPPFAGGHPAQLGLGRGASTFKEEPQTVPEARSRDATPPVSPINMEDQERIKVERKRLRNRLAATKCRKRKLERIARLEDKVKTLKAENAGLSSTAGLLREQVAQLKQKVMTHVSNGCQLLLGVKGHAF

SEQ ID NO: 42360 - protein, 347 aa, Homo sapiens
  Payload ID: 8617
  Gene Symbol: JUND
  Gene Name: jun D proto-oncogene
  Uniprot ID: P17535
  ENSP ID: ENSP00000252818
METPFYGDEALSGLGGGASGSGGSFASPGRLFPGAPPTAAAGSMMKKDALTLSLSEQVAAALKPAAAPPPTPLRADGAPSAAPPDGLLASPDLGLLKLASPELERLIIQSNGLVTTTPTSSQFLYPKVAASEEQEFAEGFVKALEDLHKQNQLGAGAAAAAAAAAAGGPSGTATGSAPPGELAPAAAAPEAPVYANLSSYAGGAGGAGGAATVAFAAEPVPFPPPPPPGALGPPRLAALKDEPQTVPDVPSFGESPPLSPIDMDTQERIKAERKRLRNRIAASKCRKRKLERISRLEEKVKTLKSQNTELASTASLLREQVAQLKQKVLSHVNSGCQLLPQHQVPAY

SEQ ID NO: 42361 - protein, 166 aa, Homo sapiens
  Payload ID: 8617
  Gene Symbol: JUND
  Gene Name: jun D proto-oncogene
  ENSP ID: ENSP00000475153
AAAPEAPVYANLSSYAGGAGGAGGAATVAFAAEPVPFPPPPPPGALGPPRLAALKDEPQTVPDVPSFGESPPLSPIDMDTQERIKAERKRLRNRIAASKCRKRKLERISRLEEKVKTLKSQNTELASTASLLREQVAQLKQKVLSHVNSGCQLLPQHQREEQSVRF

SEQ ID NO: 42362 - protein, 174 aa, Homo sapiens
  Payload ID: 8618
  Gene Symbol: JDP2
  Gene Name: Jun dimerization protein 2
  Uniprot ID: Q8WYK2
  ENSP ID: ENSP00000267569
MVAGWPATPPAMMPGQIPDPSVTTGSLPGLGPLTGLPSSALTVEELKYADIRNLGAMIAPLHFLEVKLGKRPQPVKSELDEEEERRKRRREKNKVAAARCRNKKKERTEFLQRESERLELMNAELKTQIEELKQERQQLILMLNRHRPTCIVRTDSVKTPESEGNPLLEQLEKK

SEQ ID NO: 42363 - protein, 163 aa, Homo sapiens
  Payload ID: 8618
  Gene Symbol: JDP2
  Gene Name: Jun dimerization protein 2
  Uniprot ID: Q8WYK2
  ENSP ID: ENSP00000399587
MMPGQIPDPSVTTGSLPGLGPLTGLPSSALTVEELKYADIRNLGAMIAPLHFLEVKLGKRPQPVKSELDEEEERRKRRREKNKVAAARCRNKKKERTEFLQRESERLELMNAELKTQIEELKQERQQLILMLNRHRPTCIVRTDSVKTPESEGNPLLEQLEKK

SEQ ID NO: 42364 - protein, 163 aa, Homo sapiens; identical to SEQ ID NO: 42363
  Payload ID: 8618
  Gene Symbol: JDP2
  Gene Name: Jun dimerization protein 2
  Uniprot ID: Q8WYK2
  ENSP ID: ENSP00000409787

SEQ ID NO: 42365 - protein, 163 aa, Homo sapiens; identical to SEQ ID NO: 42363
  Payload ID: 8618
  Gene Symbol: JDP2
  Gene Name: Jun dimerization protein 2
  Uniprot ID: Q8WYK2
  ENSP ID: ENSP00000415558

SEQ ID NO: 42366 - protein, 133 aa, Homo sapiens
  Payload ID: 8618
  Gene Symbol: JDP2
  Gene Name: Jun dimerization protein 2
  ENSP ID: ENSP00000452769
MMPGQIPDPSVTTGSLPGLGPLTGLPSSALTVEELKYADIRNLGAMIAPLHFLEVKLGKRPQPVKSELDEEEERRKRRREKNKVAAARCRNKKKERTEFLQRESERLELMNAELKTQIEELKQERQQLILMLN

SEQ ID NO: 42367 - protein, 331 aa, Homo sapiens
  Payload ID: 8619
  Gene Symbol: JUN
  Gene Name: jun proto-oncogene
  Uniprot ID: P05412
  ENSP ID: ENSP00000360266
MTAKMETTFYDDALNASFLPSESGPYGYSNPKILKQSMTLNLADPVGSLKPHLRAKNSDLLTSPDVGLLKLASPELERLIIQSSNGHITTTPTPTQFLCPKNVTDEQEGFAEGFVRALAELHSQNTLPSVTSAAQPVNGAGMVAPAVASVAGGSGSGGFSASLHSEPPVYANLSNFNPGALSSGGGAPSYGAAGLAFPAQPQQQQQPPHHLPQQMPVQHPRLQALKEEPQTVPEMPGETPPLSPIDMESQERIKAERKRMRNRIAASKCRKRKLERIARLEEKVKTLKAQNSELASTANMLREQVAQLKQKVMNHVNSGCQLMLTQQLQTF

SEQ ID NO: 42368 - protein, 988 aa, Homo sapiens
  Payload ID: 8620
  Gene Symbol: JMY
  Gene Name: junction mediating and regulatory protein, p53 cofactor
  Uniprot ID: Q8N9B5
  ENSP ID: ENSP00000379441
MSFALEETLESDWVAVRPHVFDEREKHKFVFIVAWNEIEGKFAITCHNRTAQRQRSGSREQAGARGGAEAGGAASDGSRGPGSPAGRGRPEATASATLVRSPGPRRSSAWAEGGSPRSTRSLLGDPRLRSPGSKGAESRLRSPVRAKPIPGQKTSEADDAAGAAAAAARPAPREAQVSSVRIVSASGTVSEEIEVLEMVKEDEAPLALSDAEQPPPATELESPAEECSWAGLFSFQDLRAVHQQLCSVNSQLEPCLPVFPEEPSGMWTVLFGGAPEMTEQEIDTLCYQLQVYLGHGLDTCGWKILSQVLFTETDDPEEYYESLSELRQKGYEEVLQRARKRIQELLDKHKNTESMVELLDLYQMEDEAYSSLAEATTELYQYLLQPFRDMRELAMLRRQQIKISMENDYLGPRRIESLQKEDADWQRKAHMAVLSIQDLTVKYFEITAKAQKAVYDRMRADQKKFGKASWAAAAERMEKLQYAVSKETLQMMRAKEICLEQRKHALKEEMQSLRGGTEAIARLDQLEADYYDLQLQLYEVQFEILKCEELLLTAQLESIKRLISEKRDEVVYYDTYESMEAMLEKEEMAASAYLQREELQKLQQKARQLEARRGRVSAKKSYLRNKKEICIAKHNEKIQQRTRIEDEYRTHHTVQLKREKLHDEEERKSAWVSQERQRTLDRLRTFKQRYPGQVILKSTRLRLAHARRKGAASPVLQEDHCDSLPSVLQVEEKTEEVGEGRVKRGPSQTTEPQSLVQLEDTSLTQLEATSLPLSGVTSELPPTISLPLLNNNLEPCSVTINPLPSPLPPTPPPPPPPPPPPPPPPLPVAKDSGPETLEKDLPRKEGNEKRIPKSASAPSAHLFDSSQLVSARKKLRKTAEGLQRRRVSSPMDEVLASLKRGSFHLKKVEQRTLPPFPDEDDSNNILAQIRKGVKLKKVQKDVLRESFTLLPDTDPLTRSIHEALRRIKEASPESEDEEEALPCTDWEN

SEQ ID NO: 42369 - protein, 745 aa, Homo sapiens
  Payload ID: 8621
  Gene Symbol: JUP
  Gene Name: junction plakoglobin
  Uniprot ID: P14923
  ENSP ID: ENSP00000311113
MEVMNLMEQPIKVTEWQQTYTYDSGIHSGANTCVPSVSSKGIMEEDEACGRQYTLKKTTTYTQGVPPSQGDLEYQMSTTARAKRVREAMCPGVSGEDSSLLLATQVEGQATNLQRLAEPSQLLKSAIVHLINYQDDAELATRALPELTKLLNDEDPVVVTKAAMIVNQLSKKEASRRALMGSPQLVAAVVRTMQNTSDLDTARCTTSILHNLSHHREGLLAIFKSGGIPALVRMLSSPVESVLFYAITTLHNLLLYQEGAKMAVRLADGLQKMVPLLNKNNPKFLAITTDCLQLLAYGNQESKLIILANGGPQALVQIMRNYSYEKLLWTTSRVLKVLSVCPSNKPAIVEAGGMQALGKHLTSNSPRLVQNCLWTLRNLSDVATKQEGLESVLKILVNQLSVDDVNVLTCATGTLSNLTCNNSKNKTLVTQNSGVEALIHAILRAGDKDDITEPAVCALRHLTSRHPEAEMAQNSVRLNYGIPAIVKLLNQPNQWPLVKATIGLIRNLALCPANHAPLQEAAVIPRLVQLLVKAHQDAQRHVAAGTQQPYTDGVRMEEIVEGCTGALHILARDPMNRMEIFRLNTIPLFVQLLYSSVENIQRVAAGVLCELAQDKEAADAIDAEGASAPLMELLHSRNEGTATYAAAVLFRISEDKNPDYRKRVSVELTNSLFKHDPAAWEAAQSMIPINEPYGDDMDATYRPMYSSDVPLDPLEMHMDMDGDYPIDTYSDGLRPPYPTADHMLA

SEQ ID NO: 42370 - protein, 745 aa, Homo sapiens; identical to SEQ ID NO: 42369
  Payload ID: 8621
  Gene Symbol: JUP
  Gene Name: junction plakoglobin
  Uniprot ID: P14923
  ENSP ID: ENSP00000377507

SEQ ID NO: 42371 - protein, 745 aa, Homo sapiens; identical to SEQ ID NO: 42369
  Payload ID: 8621
  Gene Symbol: JUP
  Gene Name: junction plakoglobin
  Uniprot ID: P14923
  ENSP ID: ENSP00000377508

SEQ ID NO: 42372 - protein, 297 aa, Homo sapiens
  Payload ID: 8621
  Gene Symbol: JUP
  Gene Name: junction plakoglobin
  ENSP ID: ENSP00000389886
MEVMNLMEQPIKVTEWQQTYTYDSGIHSGANTCVPSVSSKGIMEEDEACGRQYTLKKTTTYTQGVPPSQGDLEYQMSTTARAKRVREAMCPGVSGEDSSLLLATQVEGQATNLQRLAEPSQLLKSAIVHLINYQDDAELATRALPELTKLLNDEDPVVVTKAAMIVNQLSKKEASRRALMGSPQLVAAVVRTMQNTSDLDTARCTTSILHNLSHHREGLLAIFKSGGIPALVRMLSSPVESVLFYAITTLHNLLLYQEGAKMAVRLADGLQKMVPLLNKNNPKFLAITTDCLQLLAY

SEQ ID NO: 42373 - protein, 295 aa, Homo sapiens
  Payload ID: 8621
  Gene Symbol: JUP
  Gene Name: junction plakoglobin
  ENSP ID: ENSP00000394146
MEVMNLMEQPIKVTEWQQTYTYDSGIHSGANTCVPSVSSKGIMEEDEACGRQYTLKKTTTYTQGVPPSQGDLEYQMSTTARAKRVREAMCPGVSGEDSSLLLATQVEGQATNLQRLAEPSQLLKSAIVHLINYQDDAELATRALPELTKLLNDEDPVVVTKAAMIVNQLSKKEASRRALMGSPQLVAAVVRTMQNTSDLDTARCTTSILHNLSHHREGLLAIFKSGGIPALVRMLSSPVESVLFYAITTLHNLLLYQEGAKMAVRLADGLQKMVPLLNKNNPKFLAITTDCLQLL

SEQ ID NO: 42374 - protein, 235 aa, Homo sapiens
  Payload ID: 8621
  Gene Symbol: JUP
  Gene Name: junction plakoglobin
  ENSP ID: ENSP00000401034
MEVMNLMEQPIKVTEWQQTYTYDSGIHSGANTCVPSVSSKGIMEEDEACGRQYTLKKTTTYTQGVPPSQGDLEYQMSTTARAKRVREAMCPGVSGEDSSLLLATQVEGQATNLQRLAEPSQLLKSAIVHLINYQDDAELATRALPELTKLLNDEDPVVVTKAAMIVNQLSKKEASRRALMGSPQLVAAVVRTMQNTSDLDTARCTTSILHNLSHHREGLLAIFKSGGIPALVRML

SEQ ID NO: 42375 - protein, 86 aa, Homo sapiens
  Payload ID: 8621
  Gene Symbol: JUP
  Gene Name: junction plakoglobin
  ENSP ID: ENSP00000409948
MEVMNLMEQPIKVTEWQQTYTYDSGIHSGANTCVPSVSSKGIMEEDEACGRQYTLKKTTTYTQGVPPSQGDLEYQMSTTARAKRVR

SEQ ID NO: 42376 - protein, 276 aa, Homo sapiens
  Payload ID: 8621
  Gene Symbol: JUP
  Gene Name: junction plakoglobin
  ENSP ID: ENSP00000411449
MEVMNLMEQPIKVTEWQQTYTYDSGIHSGANTCVPSVSSKGIMEEDEACGRQYTLKKTTTYTQGVPPSQGDLEYQMSTTARAKRVREAMCPGVSGEDSSLLLATQVEGQATNLQRLAEPSQLLKSAIVHLINYQDDAELATRALPELTKLLNDEDPVVVTKAAMIVNQLSKKEASRRALMGSPQLVAAVVRTMQNTSDLDTARCTTSILHNLSHHREGLLAIFKSGGIPALVRMLSSPVESVLFYAITTLHNLLLYQEGAKMAVRLADGLQKMVPL

SEQ ID NO: 42377 - protein, 2 aa, Homo sapiens
  Payload ID: 8621
  Gene Symbol: JUP
  Gene Name: junction plakoglobin
  ENSP ID: ENSP00000467065
ME

SEQ ID NO: 42378 - protein, 104 aa, Homo sapiens
  Payload ID: 8621
  Gene Symbol: JUP
  Gene Name: junction plakoglobin
  ENSP ID: ENSP00000468347
MEVMNLMEQPIKVTEWQQTYTYDSGIHSGANTCVPSVSSKGIMEEDEACGRQYTLKKTTTYTQGVPPSQGDLEYQMSTTARAKRVREAMCPGVSGEDSSLLLAT

SEQ ID NO: 42379 - protein, 262 aa, Homo sapiens
  Payload ID: 8622
  Gene Symbol: JAM2
  Gene Name: junctional adhesion molecule 2
  Uniprot ID: P57087
  ENSP ID: ENSP00000318416
MARRSRHRLLLLLLRYLVVALGYHKAYGFSAPKDQQVVTAVEYQGDFKNRAEMIDFNIRIKNVTRSDAGKYRCEVSAPSEQGQNLEEDTVTLEVLVAPAVPSCEVPSSALSGTVVELRCQDKEGNPAPEYTWFKDGIRLLENPRLGSQSTNSSYTMNTKTGTLQFNTVSKLDTGEYSCEARNSVGYRRCPGKRMQVDDLNISGIIAAVVVVALVISVCGLGVCYAQRKGYFSKETSFQKSNSSSKATTMSENDFKHTKSFII

SEQ ID NO: 42380 - protein, 312 aa, Homo sapiens
  Payload ID: 8622
  Gene Symbol: JAM2
  Gene Name: junctional adhesion molecule 2
  Uniprot ID: P57087
  ENSP ID: ENSP00000383376
MARRSRHRLLLLLLRYLVVALGYHKAYGFSAPKDQQVVTAVEYQEAILACKTPKKTVSSRLEWKKLGRSVSFVYYQQTLQGDFKNRAEMIDFNIRIKNVTRSDAGKYRCEVSAPSEQGQNLEEDTVTLEVLVAPAVPSCEVPSSALSGTVVELRCQDKEGNPAPEYTWFKDGIRLLENPRLGSQSTNSSYTMNTKTGTLQFNTVSKLDTGEYSCEARNSVGYRRCPGKRMQVDDLNISGIIAAVVVVALVISVCGLGVCYAQRKGYFSKETSFQKSNSSSKATTMSENVQWLTPVIPALWKAAAGGSRGQEF

SEQ ID NO: 42381 - protein, 298 aa, Homo sapiens
  Payload ID: 8622
  Gene Symbol: JAM2
  Gene Name: junctional adhesion molecule 2
  Uniprot ID: P57087
  ENSP ID: ENSP00000420419
MARRSRHRLLLLLLRYLVVALGYHKAYGFSAPKDQQVVTAVEYQEAILACKTPKKTVSSRLEWKKLGRSVSFVYYQQTLQGDFKNRAEMIDFNIRIKNVTRSDAGKYRCEVSAPSEQGQNLEEDTVTLEVLVAPAVPSCEVPSSALSGTVVELRCQDKEGNPAPEYTWFKDGIRLLENPRLGSQSTNSSYTMNTKTGTLQFNTVSKLDTGEYSCEARNSVGYRRCPGKRMQVDDLNISGIIAAVVVVALVISVCGLGVCYAQRKGYFSKETSFQKSNSSSKATTMSENDFKHTKSFII

SEQ ID NO: 42382 - protein, 261 aa, Homo sapiens
  Payload ID: 8622
  Gene Symbol: JAM2
  Gene Name: junctional adhesion molecule 2
  ENSP ID: ENSP00000436801
  MOD_RES (1)..(1): Any amino acid
XAILACKTPKKTVSSRLEWKKLGRSVSFVYYQQTLQGDFKNRAEMIDFNIRIKNVTRSDAGKYRCEVSAPSEQGQNLEEDTVTLEVLVAPAVPSCEVPSSALSGTVVELRCQDKEGNPAPEYTWFKDGIRLLENPRLGSQSTNSSYTMNTKTGTLQFNTVSKLDTGEYSCEARNSVGYRRCPGKRMQVDDLNISGIIAAVVVVALVISVCGLGVCYAQRKGYFSKETSFQSGRPNFGSMGVERRWMTNYLRLWQLGVEKIY

SEQ ID NO: 42383 - protein, 310 aa, Homo sapiens
  Payload ID: 8623
  Gene Symbol: JAM3
  Gene Name: junctional adhesion molecule 3
  Uniprot ID: Q9BX67
  ENSP ID: ENSP00000299106
MALRRPPRLRLCARLPDFFLLLLFRGCLIGAVNLKSSNRTPVVQEFESVELSCIITDSQTSDPRIEWKKIQDEQTTYVFFDNKIQGDLAGRAEILGKTSLKIWNVTRRDSALYRCEVVARNDRKEIDEIVIELTVQVKPVTPVCRVPKAVPVGKMATLHCQESEGHPRPHYSWYRNDVPLPTDSRANPRFRNSSFHLNSETGTLVFTAVHKDDSGQYYCIASNDAGSARCEEQEMEVYDLNIGGIIGGVLVVLAVLALITLGICCAYRRGYFINNKQDGESYKNPGKPDGVNYIRTDEEGDFRHKSSFVI

SEQ ID NO: 42384 - protein, 259 aa, Homo sapiens
  Payload ID: 8623
  Gene Symbol: JAM3
  Gene Name: junctional adhesion molecule 3
  Uniprot ID: Q9BX67
  ENSP ID: ENSP00000395742
MALRRPPRLRLCARLPDFFLLLLFRGCLIGAVNLKSSNRTPVVQEFESVELSCIITDSQTSDPRIEWKKIQDEQTTYVFFDNKIQVKPVTPVCRVPKAVPVGKMATLHCQESEGHPRPHYSWYRNDVPLPTDSRANPRFRNSSFHLNSETGTLVFTAVHKDDSGQYYCIASNDAGSARCEEQEMEVYDLNIGGIIGGVLVVLAVLALITLGICCAYRRGYFINNKQDGESYKNPGKPDGVNYIRTDEEGDFRHKSSFVI

SEQ ID NO: 42385 - protein, 38 aa, Homo sapiens
  Payload ID: 8623
  Gene Symbol: JAM3
  Gene Name: junctional adhesion molecule 3
  ENSP ID: ENSP00000432455
MALRRPPRLRLCARLPDFFLLLLFRESSLVCFPRLHSK

SEQ ID NO: 42386 - protein, 124 aa, Homo sapiens
  Payload ID: 8623
  Gene Symbol: JAM3
  Gene Name: junctional adhesion molecule 3
  ENSP ID: ENSP00000433206
MALRRPPRLRLCARLPDFFLLLLFRGDLAGRAEILGKTSLKIWNVTRRDSALYRCEVVARNDRKEIDEIVIELTVQVKPVTPVCRVPKAVPVGKMATLHCQESEGHPRPHYSWYRNDVPLPTDS

SEQ ID NO: 42387 - protein, 331 aa, Homo sapiens
  Payload ID: 8624
  Gene Symbol: JSRP1
  Gene Name: junctional sarcoplasmic reticulum protein 1
  Uniprot ID: Q96MG2
  ENSP ID: ENSP00000300961
MSMTTRAWEELDGGLGSCQALEDHSALAETQEDRASATPRLADSGSVPHDSQVAEGPSVDTRPKKMEKEPAARGTPGTGKERLKAGASPRSVPARKKAQTAPPLQPPPPPPALSEELPWGDLSLNKCLVLASLVALLGSAFQLCRDAVPGEAALQARVPEPWVPPSSAPREPSSPLPKFEAQAPPSAPPAPRAEAEVRPKIPGSREAAENDEEEPGEATGEAVREDRVTLADRGPKERPRREGKPRKEKPRKEERPKKERPRKEERPRAAREPREALPQRWESREGGHRPWARDSRDAEPRKKQAWVSPRRPDEEQRPGSRQKLRAGKGRD

SEQ ID NO: 42388 - protein, 261 aa, Homo sapiens
  Payload ID: 8624
  Gene Symbol: JSRP1
  Gene Name: junctional sarcoplasmic reticulum protein 1
  ENSP ID: ENSP00000465604
MVRLAWMVALGLSPSFSLAKQWLLRIRCREDFTIRPLGSETRKTSAASLRAAAAARRSQNGASAAARLYRCCAQATPPAPPGTRPHEGQSRGAAGKKSRARPSQRLIGERERERKRLSGDWLPGLGPAAAPAMSMTTRAWEELDGGLGSCQALEDHSALAETQEDRASATPRLADSGSVPHDSQVAEGPSVDTRPKKMEKEPAARGTPGTGKERLKAGASPRSVPARKKAQTAPPLQPPPPPPALSEELPWGDLSLNKCLV

SEQ ID NO: 42389 - protein, 661 aa, Homo sapiens
  Payload ID: 8625
  Gene Symbol: JPH1
  Gene Name: junctophilin 1
  Uniprot ID: Q9HDC5
  ENSP ID: ENSP00000344488
MTGGRFDFDDGGTYCGGWEEGKAHGHGICTGPKGQGEYSGSWSHGFEVVGGYTWPSGNTYQGYWAQGKRHGLGVETKGKWMYRGEWSHGFKGRYGVRQSLCTPARYEGTWSNGLQDGYGVETYGDGGTYQGQWAGGMRHGYGVRQSVPYGMATVIRSPLRTSLASLRSEQSNGSVLHDAAAAADSPAGTRGGFVLNFHADAELAGKKKGGLFRRGSLLGSMKLRKSESKSSISSKRSSVRSDAAMSRISSSDANSTISFGDVDCDFCPVEDHVDATTTETYMGEWKNDKRNGFGVSERSNGMKYEGEWANNKRHGYGCTVFPDGSKEEGKYKNNILVRGIRKQLIPIRHTKTREKVDRAIEGAQRAAAMARTKVEIANSRTAHARAKADAADQAALAARQECDIARAVARELSPDFYQPGPDYVKQRFQEGVDAKENPEEKVPEKPPTPKESPHFYRKGTTPPRSPEASPKHSHSPASSPKPLKKQNPSSGARLNQDKRSVADEQVTAIVNKPLMSKAPTKEAGAVVPQSKYSGRHHIPNPSNGELHSQYHGYYVKLNAPQHPPVDVEDGDGSSQSSSALVHKPSANKWSPSKSVTKPVAKESKAEPKAKKSELAIPKNPASNDSCPALEKEANSGPNSIMIVLVMLLNIGLAILFVHFLT

SEQ ID NO: 42390 - protein, 79 aa, Homo sapiens
  Payload ID: 8625
  Gene Symbol: JPH1
  Gene Name: junctophilin 1
  ENSP ID: ENSP00000429652
MTGGRYLPGPVGRRHAAWLRRAPERALRHGHGDPLTAAYLAGLAAQRAEQWQRAPRRRSRRRQPGRHPRRFRAQLPRRR

SEQ ID NO: 42391 - protein, 129 aa, Homo sapiens
  Payload ID: 8626
  Gene Symbol: JPH2
  Gene Name: junctophilin 2
  Uniprot ID: Q9BR39
  ENSP ID: ENSP00000344590
MSGGRFDFDDGGAYCGGWEGGKAHGHGLCTGPKGQGEYSGSWNFGFEVAGVYTWPSGNTFEGYWSQGKRHGLGIETKGRWLYKGEWTHGFKGRYGIRQSSSSGAKYEGTWNNGLQDGYGTETYADGGMC

SEQ ID NO: 42392 - protein, 696 aa, Homo sapiens
  Payload ID: 8626
  Gene Symbol: JPH2
  Gene Name: junctophilin 2
  Uniprot ID: Q9BR39
  ENSP ID: ENSP00000362071
MSGGRFDFDDGGAYCGGWEGGKAHGHGLCTGPKGQGEYSGSWNFGFEVAGVYTWPSGNTFEGYWSQGKRHGLGIETKGRWLYKGEWTHGFKGRYGIRQSSSSGAKYEGTWNNGLQDGYGTETYADGGTYQGQFTNGMRHGYGVRQSVPYGMAVVVRSPLRTSLSSLRSEHSNGTVAPDSPASPASDGPALPSPAIPRGGFALSLLANAEAAARAPKGGGLFQRGALLGKLRRAESRTSVGSQRSRVSFLKSDLSSGASDAASTASLGEAAEGADEAAPFEADIDATTTETYMGEWKNDKRSGFGVSERSSGLRYEGEWLDNLRHGYGCTTLPDGHREEGKYRHNVLVKDTKRRMLQLKSNKVRQKVEHSVEGAQRAAAIARQKAEIAASRTSHAKAKAEAAEQAALAANQESNIARTLARELAPDFYQPGPEYQKRRLLQEILENSESLLEPPDRGAGAAGLPQPPRESPQLHERETPRPEGGSPSPAGTPPQPKRPRPGVSKDGLLSPGAWNGEPSGEGSRSVTPSEGAGRRSPARPATERMAIEALQAPPAPSREPEVALYQGYHSYAVRTTPPEPPPFEDQPEPEVSGSESAPSSPATAPLQAPTLRGPEPARETPAKLEPKPIIPKAEPRAKARKTEARGLTKAGAKKKARKEAALAAEAEVEVEEVPNTILICMVILLNIGLAILFVHLLT

SEQ ID NO: 42393 - protein, 748 aa, Homo sapiens
  Payload ID: 8627
  Gene Symbol: JPH3
  Gene Name: junctophilin 3
  Uniprot ID: Q8WXH2
  ENSP ID: ENSP00000284262
MSSGGRFNFDDGGSYCGGWEDGKAHGHGVCTGPKGQGEYTGSWSHGFEVLGVYTWPSGNTYQGTWAQGKRHGIGLESKGKWVYKGEWTHGFKGRYGVRECAGNGAKYEGTWSNGLQDGYGTETYSDGGTYQGQWVGGMRQGYGVRQSVPYGMAAVIRSPLRTSINSLRSEHTNGTALHPDASPAVAGSPAVSRGGFVLVAHSDSEILKSKKKGLFRRSLLSGLKLRKSESKSSLASQRSKQSSFRSEAGMSTVSSTASDIHSTISLGEAEAELAVIEDDIDATTTETYVGEWKNDKRSGFGVSQRSDGLKYEGEWASNRRHGYGCMTFPDGTKEEGKYKQNILVGGKRKNLIPLRASKIREKVDRAVEAAERAATIAKQKAEIAASRTSHSRAKAEAALTAAQKAQEEARIARITAKEFSPSFQHRENGLEYQRPKRQTSCDDIEVLSTGTPLQQESPELYRKGTTPSDLTPDDSPLQSFPTSPAATPPPAPAARNKVAHFSRQVSVDEERGGDIQMLLEGRAGDCARSSWGEEQAGGSRGVRSGALRGGLLVDDFRTRGSGRKQPGNPKPRERRTESPPVFTWTSHHRASNHSPGGSRLLELQEEKLSNYRMEMKPLLRMETHPQKRRYSKGGACRGLGDDHRPEDRGFGVQRLRSKAQNKENFRPASSAEPAVQKLASLRLGGAEPRLLRWDLTFSPPQKSLPVALESDEENGDELKSSTGSAPILVVMVILLNIGVAILFINFFI

SEQ ID NO: 42394 - protein, 628 aa, Homo sapiens
  Payload ID: 8628
  Gene Symbol: JPH4
  Gene Name: junctophilin 4
  Uniprot ID: Q96JJ6
  ENSP ID: ENSP00000348648
MSPGGKFDFDDGGCYVGGWEAGRAHGYGVCTGPGAQGEYSGCWAHGFESLGVFTGPGGHSYQGHWQQGKREGLGVERKSRWTYRGEWLGGLKGRSGVWESVSGLRYAGLWKDGFQDGYGTETYSDGGTYQGQWQAGKRHGYGVRQSVPYHQAALLRSPRRTSLDSGHSDPPTPPPPLPLPGDEGGSPASGSRGGFVLAGPGDADGASSRKRTPAAGGFFRRSLLLSGLRAGGRRSSLGSKRGSLRSEVSSEVGSTGPPGSEASGPPAAAPPALIEGSATEVYAGEWRADRRSGFGVSQRSNGLRYEGEWLGNRRHGYGRTTRPDGSREEGKYKRNRLVHGGRVRSLLPLALRRGKVKEKVDRAVEGARRAVSAARQRQEIAAARAADALLKAVAASSVAEKAVEAARMAKLIAQDLQPMLEAPGRRPRQDSEGSDTEPLDEDSPGVYENGLTPSEGSPELPSSPASSRQPWRPPACRSPLPPGGDQGPFSSPKAWPEEWGGAGAQAEELAGYEAEDEAGMQGPGPRDGSPLLGGCSDSSGSLREEEGEDEEPLPPLRAPAGTEPEPIAMLVLRGSSSRGPDAGCLTEELGEPAATERPAQPGAANPLVVGAVALLDLSLAFLFSQLLT

SEQ ID NO: 42395 - protein, 628 aa, Homo sapiens; identical to SEQ ID NO: 42394
  Payload ID: 8628
  Gene Symbol: JPH4
  Gene Name: junctophilin 4
  Uniprot ID: Q96JJ6
  ENSP ID: ENSP00000380307

SEQ ID NO: 42396 - protein, 293 aa, Homo sapiens
  Payload ID: 8628
  Gene Symbol: JPH4
  Gene Name: junctophilin 4
  ENSP ID: ENSP00000439562
MTRHLRLTAEGEREEKTEEASDITGRTEKQQWGRTDQTPRLPAPKEQGRAADALLKAVAASSVAEKAVEAARMAKLIAQDLQPMLEAPGRRPRQDSEGSDTEPLDEDSPGVYENGLTPSEGSPELPSSPASSRQPWRPPACRSPLPPGGDQGPFSSPKAWPEEWGGAGAQAEELAGYEAEDEAGMQGPGPRDGSPLLGGCSDSSGSLREEEGEDEEPLPPLRAPAGTEPEPIAMLVLRGSSSRGPDAGCLTEELGEPAATERPAQPGAANPLVVGAVALLDLSLAFLFSQLLT

SEQ ID NO: 42397 - protein, 629 aa, Homo sapiens [sequence omitted]

SEQ ID NO: 42398 - protein, 837 aa, Homo sapiens
  Payload ID: 8629
  Gene Symbol: KAT2A
  Gene Name: K(lysine) acetyltransferase 2A
  Uniprot ID: Q92830
  ENSP ID: ENSP00000225916
MAEPSQAPTPAPAAQPRPLQSPAPAPTPTPAPSPASAPIPTPTPAPAPAPAAAPAGSTGTGGPGVGSGGAGSGGDPARPGLSQQQRASQRKAQVRGLPRAKKLEKLGVFSACKANETCKCNGWKNPKPPTAPRMDLQQPAANLSELCRSCEHPLADHVSHLENVSEDEINRLLGMVVDVENLFMSVHKEEDTDTKQVYFYLFKLLRKCILQMTRPVVEGSLGSPPFEKPNIEQGVLNFVQYKFSHLAPRERQTMFELSKMFLLCLNYWKLETPAQFRQRSQAEDVATYKVNYTRWLCYCHVPQSCDSLPRYETTHVFGRSLLRSIFTVTRRQLLEKFRVEKDKLVPEKRTLILTHFPKFLSMLEEEIYGANSPIWESGFTMPPSEGTQLVPRPASVSAAVVPSTPIFSPSMGGGSNSSLSLDSAGAEPMPGEKRTLPENLTLEDAKRLRVMGDIPMELVNEVMLTITDPAAMLGPETSLLSANAARDETARLEERRGIIEFHVIGNSLTPKANRRVLLWLVGLQNVFSHQLPRMPKEYIARLVFDPKHKTLALIKDGRVIGGICFRMFPTQGFTEIVFCAVTSNEQVKGYGTHLMNHLKEYHIKHNILYFLTYADEYAIGYFKKQGFSKDIKVPKSRYLGYIKDYEGATLMECELNPRIPYTELSHIIKKQKEIIKKLIERKQAQIRKVYPGLSCFKEGVRQIPVESVPGIRETGWKPLGKEKGKELKDPDQLYTTLKNLLAQIKSHPSAWPFMEPVKKSEAPDYYEVIRFPIDLKTMTERLRSRYYVTRKLFVADLQRVIANCREYNPPDSEYCRCASALEKFFYFKLKEGGLIDK

SEQ ID NO: 42399 - protein, 70 aa, Homo sapiens
  Payload ID: 8629
  Gene Symbol: KAT2A
  Gene Name: K(lysine) acetyltransferase 2A
  ENSP ID: ENSP00000467324
GYGTHLMNHLKEYHIKHNILYFLTYADEYAIGYFKKQGFSKDIKVPKSRYLGYIKDYEGATLMEYHQEAD

SEQ ID NO: 42400 - protein, 276 aa, Homo sapiens
  Payload ID: 8629
  Gene Symbol: KAT2A
  Gene Name: K(lysine) acetyltransferase 2A
  ENSP ID: ENSP00000468390
QQQRASQRKAQVRGLPRAKKLEKLGVFSACKANETCKCNGWKNPKPPTAPRMDLQQPAANLSELCRSCEHPLADHVSHLENVSEDEINRLLGMVVDVENLFMSVHKEEDTDTKQVYFYLFKLLRKCILQMTRPVVEGSLGSPPFEKPNIEQGVLNFVQYKFSHLAPRERQTMFELSKMFLLCLNYWKLETPAQFRQRSQAEDVATYKVNYTRWLCYCHVPQSCDSLPRYETTHVFGRSLLRSIFTVTRRQLLEKFRVEKDKLVPEKRTLILTHFPK

SEQ ID NO: 42401 - protein, 832 aa, Homo sapiens
  Payload ID: 8630
  Gene Symbol: KAT2B
  Gene Name: K(lysine) acetyltransferase 2B
  Uniprot ID: Q92831
  ENSP ID: ENSP00000263754
MSEAGGAGPGGCGAGAGAGAGPGALPPQPAALPPAPPQGSPCAAAAGGSGACGPATAVAAAGTAEGPGGGGSARIAVKKAQLRSAPRAKKLEKLGVYSACKAEESCKCNGWKNPNPSPTPPRADLQQIIVSLTESCRSCSHALAAHVSHLENVSEEEMNRLLGIVLDVEYLFTCVHKEEDADTKQVYFYLFKLLRKSILQRGKPVVEGSLEKKPPFEKPSIEQGVNNFVQYKFSHLPAKERQTIVELAKMFLNRINYWHLEAPSQRRLRSPNDDISGYKENYTRWLCYCNVPQFCDSLPRYETTQVFGRTLLRSVFTVMRRQLLEQARQEKDKLPLEKRTLILTHFPKFLSMLEEEVYSQNSPIWDQDFLSASSRTSQLGIQTVINPPPVAGTISYNSTSSSLEQPNAGSSSPACKASSGLEANPGEKRKMTDSHVLEEAKKPRVMGDIPMELINEVMSTITDPAAMLGPETNFLSAHSARDEAARLEERRGVIEFHVVGNSLNQKPNKKILMWLVGLQNVFSHQLPRMPKEYITRLVFDPKHKTLALIKDGRVIGGICFRMFPSQGFTEIVFCAVTSNEQVKGYGTHLMNHLKEYHIKHDILNFLTYADEYAIGYFKKQGFSKEIKIPKTKYVGYIKDYEGATLMGCELNPRIPYTEFSVIIKKQKEIIKKLIERKQAQIRKVYPGLSCFKDGVRQIPIESIPGIRETGWKPSGKEKSKEPRDPDQLYSTLKSILQQVKSHQSAWPFMEPVKRTEAPGYYEVIRFPMDLKTMSERLKNRYYVSKKLFMADLQRVFTNCKEYNPPESEYYKCANILEKFFFSKIKEAGLIDK

SEQ ID NO: 42402 - protein, 546 aa, Homo sapiens
  Payload ID: 8631
  Gene Symbol: KAT5
  Gene Name: K(lysine) acetyltransferase 5
  Uniprot ID: Q92993
  ENSP ID: ENSP00000340330
MAEVVSPVPGAGRREPGEVGRARGPPVADPGVALSPQGEIIEGCRLPVLRRNQDNEDEWPLAEILSVKDISGRKLFYVHYIDFNKRLDEWVTHERLDLKKIQFPKKEAKTPTKNGLPGSRPGSPEREVPASAQASGKTLPIPVQITLRFNLPKEREAIPGGEPDQPLSSSSCLQPNHRSTKRKVEVVSPATPVPSETAPASVFPQNGAARRAVAAQPGRKRKSNCLGTDEDSQDSSDGIPSAPRMTGSLVSDRSHDDIVTRMKNIECIELGRHRLKPWYFSPYPQELTTLPVLYLCEFCLKYGRSLKCLQRHLTKCDLRHPPGNEIYRKGTISFFEIDGRKNKSYSQNLCLLAKCFLDHKTLYYDTDPFLFYVMTEYDCKGFHIVGYFSKEKESTEDYNVACILTLPPYQRRGYGKLLIEFSYELSKVEGKTGTPEKPLSDLGLLSYRSYWSQTILEILMGLKSESGERPQITINEISEITSIKKEDVISTLQYLNLINYYKGQYILTLSEDIVDGHERAMLKRLLRIDSKCLHFTPKDWSKRGKW

SEQ ID NO: 42403 - protein, 461 aa, Homo sapiens
  Payload ID: 8631
  Gene Symbol: KAT5
  Gene Name: K(lysine) acetyltransferase 5
  Uniprot ID: Q92993
  ENSP ID: ENSP00000344955
MAEVGEIIEGCRLPVLRRNQDNEDEWPLAEILSVKDISGRKLFYVHYIDFNKRLDEWVTHERLDLKKIQFPKKEAKTPTKNGLPGSRPGSPEREVKRKVEVVSPATPVPSETAPASVFPQNGAARRAVAAQPGRKRKSNCLGTDEDSQDSSDGIPSAPRMTGSLVSDRSHDDIVTRMKNIECIELGRHRLKPWYFSPYPQELTTLPVLYLCEFCLKYGRSLKCLQRHLTKCDLRHPPGNEIYRKGTISFFEIDGRKNKSYSQNLCLLAKCFLDHKTLYYDTDPFLFYVMTEYDCKGFHIVGYFSKEKESTEDYNVACILTLPPYQRRGYGKLLIEFSYELSKVEGKTGTPEKPLSDLGLLSYRSYWSQTILEILMGLKSESGERPQITINEISEITSIKKEDVISTLQYLNLINYYKGQYILTLSEDIVDGHERAMLKRLLRIDSKCLHFTPKDWSKRGKW

SEQ ID NO: 42404 - protein, 513 aa, Homo sapiens
  Payload ID: 8631
  Gene Symbol: KAT5
  Gene Name: K(lysine) acetyltransferase 5
  Uniprot ID: Q92993
  ENSP ID: ENSP00000366245
MAEVGEIIEGCRLPVLRRNQDNEDEWPLAEILSVKDISGRKLFYVHYIDFNKRLDEWVTHERLDLKKIQFPKKEAKTPTKNGLPGSRPGSPEREVPASAQASGKTLPIPVQITLRFNLPKEREAIPGGEPDQPLSSSSCLQPNHRSTKRKVEVVSPATPVPSETAPASVFPQNGAARRAVAAQPGRKRKSNCLGTDEDSQDSSDGIPSAPRMTGSLVSDRSHDDIVTRMKNIECIELGRHRLKPWYFSPYPQELTTLPVLYLCEFCLKYGRSLKCLQRHLTKCDLRHPPGNEIYRKGTISFFEIDGRKNKSYSQNLCLLAKCFLDHKTLYYDTDPFLFYVMTEYDCKGFHIVGYFSKEKESTEDYNVACILTLPPYQRRGYGKLLIEFSYELSKVEGKTGTPEKPLSDLGLLSYRSYWSQTILEILMGLKSESGERPQITINEISEITSIKKEDVISTLQYLNLINYYKGQYILTLSEDIVDGHERAMLKRLLRIDSKCLHFTPKDWSKRGKW

SEQ ID NO: 42405 - protein, 302 aa, Homo sapiens
  Payload ID: 8631
  Gene Symbol: KAT5
  Gene Name: K(lysine) acetyltransferase 5
  ENSP ID: ENSP00000431819
MTGSLVSDRSHDDIVTRMKNIECIELGRHRLKPWYFSPYPQELTTLPVLYLCEFCLKYGRSLKCLQRHLTKCDLRHPPGNEIYRKGTISFFEIDGRKNKSYSQNLCLLAKCFLDHKTLYYDTDPFLFYVMTEYDCKGFHIVGYFSKEKESTEDYNVACILTLPPYQRRGYGKLLIEFSYELSKVEGKTGTPEKPLSDLGLLSYRSYWSQTILEILMGLKSESGERPQITINEISEITSIKKEDVISTLQYLNLINYYKGQYILTLSEDIVDGHERAMLKRLLRIDSKCLHFTPKDWSKRGKW

SEQ ID NO: 42406 - protein, 494 aa, Homo sapiens
  Payload ID: 8631
  Gene Symbol: KAT5
  Gene Name: K(lysine) acetyltransferase 5
  Uniprot ID: Q92993
  ENSP ID: ENSP00000434765
MAEVVSPVPGAGRREPGEVGRARGPPVADPGVALSPQGEIIEGCRLPVLRRNQDNEDEWPLAEILSVKDISGRKLFYVHYIDFNKRLDEWVTHERLDLKKIQFPKKEAKTPTKNGLPGSRPGSPEREVKRKVEVVSPATPVPSETAPASVFPQNGAARRAVAAQPGRKRKSNCLGTDEDSQDSSDGIPSAPRMTGSLVSDRSHDDIVTRMKNIECIELGRHRLKPWYFSPYPQELTTLPVLYLCEFCLKYGRSLKCLQRHLTKCDLRHPPGNEIYRKGTISFFEIDGRKNKSYSQNLCLLAKCFLDHKTLYYDTDPFLFYVMTEYDCKGFHIVGYFSKEKESTEDYNVACILTLPPYQRRGYGKLLIEFSYELSKVEGKTGTPEKPLSDLGLLSYRSYWSQTILEILMGLKSESGERPQITINEISEITSIKKEDVISTLQYLNLINYYKGQYILTLSEDIVDGHERAMLKRLLRIDSKCLHFTPKDWSKRGKW

SEQ ID NO: 42407 - protein, 45 aa, Homo sapiens
  Payload ID: 8631
  Gene Symbol: KAT5
  Gene Name: K(lysine) acetyltransferase 5
  ENSP ID: ENSP00000434993
MTGSLVSDRSHDDIVTRMKNIECIELGRHRLKPWYFSPYPQELTT

SEQ ID NO: 42408 - protein, 95 aa, Homo sapiens
  Payload ID: 8631
  Gene Symbol: KAT5
  Gene Name: K(lysine) acetyltransferase 5
  ENSP ID: ENSP00000435766
  MOD_RES (1)..(1): Any amino acid
XAEVGERGEATDHHQVSLALSTWGEISEITSIKKEDVISTLQYLNLINYYKGQYILTLSEDIVDGHERAMLKRLLRIDSKCLHFTPKDWSKRGKW

SEQ ID NO: 42409 - protein, 16 aa, Homo sapiens
  Payload ID: 8631
  Gene Symbol: KAT5
  Gene Name: K(lysine) acetyltransferase 5
  ENSP ID: ENSP00000435939
MTGSLVSDRSHDDIVT

SEQ ID NO: 42410 - protein, 189 aa, Homo sapiens
  Payload ID: 8631
  Gene Symbol: KAT5
  Gene Name: K(lysine) acetyltransferase 5
  ENSP ID: ENSP00000436000
MGRARRRYFDEGAWLLAAPRALAEILSVKDISGRKLFYVHYIDFNKRLDEWVTHERLDLKKIQFPKKEAKTPTKNGLPGSRPGSPEREVKRKVEVVSPATPVPSETAPASVFPQNGAARRAVAAQPGRKRKSNCLGTDEDSQDSSDGIPSAPRMTGSLVSDRSHDDIVTRMKNIECIELGRHRLKPWYF

SEQ ID NO: 42411 - protein, 269 aa, Homo sapiens
  Payload ID: 8631
  Gene Symbol: KAT5
  Gene Name: K(lysine) acetyltransferase 5
  ENSP ID: ENSP00000436012
MGRARRRYFDEGAWLLAAPRALAEILSVKDISGRKLFYVHYIDFNKRLDEWVTHERLDLKKIQFPKKEAKTPTKNGLPGSRPGSPEREVPASAQASGKTLPIPVQITLRFNLPKEREAIPGGEPDQPLSSSSCLQPNHRSTKRKVEVVSPATPVPSETAPASVFPQNGAARRAVAAQPGRKRKSNCLGTDEDSQDSSDGIPSAPRMTGSLVSDRSHDDIVTRMKNIECIELGRHRLKPWYFSPYPQELTTLPVLYLCEFCLKYGRSLKC

SEQ ID NO: 42412 - protein, 167 aa, Homo sapiens
  Payload ID: 8631
  Gene Symbol: KAT5
  Gene Name: K(lysine) acetyltransferase 5
  ENSP ID: ENSP00000436247
  MOD_RES (1)..(1): Any amino acid
XGEIIEGCRLPVLRRNQDNEDEWPLAEILSVKDISGRKLFYVHYIDFNKRLDEWVTHERLDLKKIQFPKKEAKTPTKNGLPGSRPGSPEREPASAQASGKTLPIPVQITLRFNLPKEREAIPGGEPDQPLSSSSCLQPNHRSTKRKVEVVSPATPVPSETAPASVFP

SEQ ID NO: 42413 - protein, 2004 aa, Homo sapiens
  Payload ID: 8632
  Gene Symbol: KAT6A
  Gene Name: K(lysine) acetyltransferase 6A
  Uniprot ID: Q92794
  ENSP ID: ENSP00000265713
MVKLANPLYTEWILEAIKKVKKQKQRPSEERICNAVSSSHGLDRKTVLEQLELSVKDGTILKVSNKGLNSYKDPDNPGRIALPKPRNHGKLDNKQNVDWNKLIKRAVEGLAESGGSTLKSIERFLKGQKDVSALFGGSAASGFHQQLRLAIKRAIGHGRLLKDGPLYRLNTKATNVDGKESCESLSCLPPVSLLPHEKDKPVAEPIPICSFCLGTKEQNREKKPEELISCADCGNSGHPSCLKFSPELTVRVKALRWQCIECKTCSSCRDQGKNADNMLFCDSCDRGFHMECCDPPLTRMPKGMWICQICRPRKKGRKLLQKKAAQIKRRYTNPIGRPKNRLKKQNTVSKGPFSKVRTGPGRGRKRKITLSSQSASSSSEEGYLERIDGLDFCRDSNVSLKFNKKTKGLIDGLTKFFTPSPDGRKARGEVVDYSEQYRIRKRGNRKSSTSDWPTDNQDGWDGKQENEERLFGSQEIMTEKDMELFRDIQEQALQKVGVTGPPDPQVRCPSVIEFGKYEIHTWYSSPYPQEYSRLPKLYLCEFCLKYMKSRTILQQHMKKCGWFHPPANEIYRKNNISVFEVDGNVSTIYCQNLCLLAKLFLDHKTLYYDVEPFLFYVLTQNDVKGCHLVGYFSKEKHCQQKYNVSCIMILPQYQRKGYGRFLIDFSYLLSKREGQAGSPEKPLSDLGRLSYMAYWKSVILECLYHQNDKQISIKKLSKLTGICPQDITSTLHHLRMLDFRSDQFVIIRREKLIQDHMAKLQLNLRPVDVDPECLRWTPVIVSNSVVSEEEEEEAEEGENEEPQCQERELEISVGKSVSHENKEQDSYSVESEKKPEVMAPVSSTRLSKQVLPHDSLPANSQPSRRGRWGRKNRKTQERFGDKDSKLLLEETSSAPQEQYGECGEKSEATQEQYTESEEQLVASEEQPSQDGKPDLPKRRLSEGVEPWRGQLKKSPEALKCRLTEGSERLPRRYSEGDRAVLRGFSESSEEEEEPESPRSSSPPILTKPTLKRKKPFLHRRRRVRKRKHHNSSVVTETISETTEVLDEPFEDSDSERPMPRLEPTFEIDEEEEEEDENELFPREYFRRLSSQDVLRCQSSSKRKSKDEEEDEESDDADDTPILKPVSLLRKRDVKNSPLEPDTSTPLKKKKGWPKGKSRKPIHWKKRPGRKPGFKLSREIMPVSTQACVIEPIVSIPKAGRKPKIQESEETVEPKEDMPLPEERKEEEEMQAEAEEAEEGEEEDAASSEVPAASPADSSNSPETETKEPEVEEEEEKPRVSEEQRQSEEEQQELEEPEPEEEEDAAAETAQNDDHDADDEDDGHLESTKKKELEEQPTREDVKEEPGVQESFLDANMQKSREKIKDKEETELDSEEEQPSHDTSVVSEQMAGSEDDHEEDSHTKEELIELKEEEEIPHSELDLETVQAVQSLTQEESSEHEGAYQDCEETLAACQTLQSYTQADEDPQMSMVEDCHASEHNSPISSVQSHPSQSVRSVSSPNVPALESGYTQISPEQGSLSAPSMQNMETSPMMDVPSVSDHSQQVVDSGFSDLGSIESTTENYENPSSYDSTMGGSICGNSSSQSSCSYGGLSSSSSLTQSSCVVTQQMASMGSSCSMMQQSSVQPAANCSIKSPQSCVVERPPSNQQQQPPPPPPQQPQPPPPQPQPAPQPPPPQQQPQQQPQPQPQQPPPPPPPQQQPPLSQCSMNNSFTPAPMIMEIPESGSTGNISIYERIPGDFGAGSYSQPSATFSLAKLQQLTNTIMDPHAMPYSHSPAVTSYATSVSLSNTGLAQLAPSHPLAGTPQAQATMTPPPNLASTTMNLTSPLLQCNMSATNIGIPHTQRLQGQMPVKGHISIRSKSAPLPSAAAHQQQLYGRSPSAVAMQAGPRALAVQRGMNMGVNLMPTPAYNVNSMNMNTLNAMNSYRMTQPMMNSSYHSNPAYMNQTAQYPMQMQMGMMGSQAYTQQPMQPNPHGNMMYTGPSHHSYMNAAGVPKQSLNGPYMRR

SEQ ID NO: 42414 - protein, 2004 aa, Homo sapiens; identical to SEQ ID NO: 42413
  Payload ID: 8632
  Gene Symbol: KAT6A
  Gene Name: K(lysine) acetyltransferase 6A
  Uniprot ID: Q92794
  ENSP ID: ENSP00000380136

SEQ ID NO: 42415 - protein, 2004 aa, Homo sapiens; identical to SEQ ID NO: 42413
  Payload ID: 8632
  Gene Symbol: KAT6A
  Gene Name: K(lysine) acetyltransferase 6A
  Uniprot ID: Q92794
  ENSP ID: ENSP00000385888

SEQ ID NO: 42416 - protein, 13 aa, Homo sapiens
  Payload ID: 8632
  Gene Symbol: KAT6A
  Gene Name: K(lysine) acetyltransferase 6A
  ENSP ID: ENSP00000396699
MVKLANPLYTEWI

SEQ ID NO: 42417 - protein, 728 aa, Homo sapiens
  Payload ID: 8632
  Gene Symbol: KAT6A
  Gene Name: K(lysine) acetyltransferase 6A
  ENSP ID: ENSP00000399638
MSACAGTFHGAKVKGGCGQRGTYHRSHSGQTCAVVVMCKQLYWNWISTFTSGIRLEEQRAADGKTLKQQTVPQQKVGVTGPPDPQVRCPSVIEFGKYEIHTWYSSPYPQEYSRLPKLYLCEFCLKYMKSRTILQQHMKKCGWFHPPANEIYRKNNISVFEVDGNVSTIYCQNLCLLAKLFLDHKTLYYDVEPFLFYVLTQNDVKGCHLVGYFSKEKHCQQKYNVSCIMILPQYQRKGYGRFLIDFSYLLSKREGQAGSPEKPLSDLGRLSYMAYWKSVILECLYHQNDKQISIKKLSKLTGICPQDITSTLHHLRMLDFRSDQFVIIRREKLIQDHMAKLQLNLRPVDVDPECLRWTPVIVSNSVVSEEEEEEAEEGENEEPQCQERELEISVGKSVSHENKEQDSYSVESEKKPEVMAPVSSTRLSKQVLPHDSLPANSQPSRRGRWGRKNRKTQERFGDKDSKLLLEETSSAPQEQYGECGEKSEATQEQYTESEEQLVASEEQPSQDGKPDLPKRRLSEGVEPWRGQLKKSPEALKCRLTEGSERLPRRYSEGDRAVLRGFSESSEEEEEPESPRSSSPPILTKPTLKRKKPFLHRRRRVRKRKHHNSSVVTETISETTEVLDEPFEDSDSERPMPRLEPTFEIDEEEEEEDENELFPREYFRRLSSQDVLRCQSSSKRKSKDEEEDEESDDADDTPILKPVSLLRKRDVKNSPLEPDTSTPLKK

SEQ ID NO: 42418 - protein, 815 aa, Homo sapiens
  Payload ID: 8632
  Gene Symbol: KAT6A
  Gene Name: K(lysine) acetyltransferase 6A
  ENSP ID: ENSP00000430606
MVKLANPLYTEWILEAIKKVKKQKQRPSEERICNAVSSSHGLDRKTVLEQLELSVKDGTILKVSNKGLNSYKDPDNPGRIALPKPRNHGKLDNKQNVDWNKLIKRAVEGLAESGGSTLKSIERFLKGQKDVSALFGGSAASGFHQQLRLAIKRAIGHGRLLKDGPLYRLNTKATNVDGKESCESLSCLPPVSLLPHEKDKPVAEPIPICSFCLGTKEQNREKKPEELISCADCGNSGHPSCLKFSPELTVRVKALRWQCIECKTCSSCRDQGKNADNMLFCDSCDRGFHMECCDPPLTRMPKGMWICQICRPRKKGRKLLQKKAAQIKRRYTNPIGRPKNRLKKQNTVSKGPFSKVRTGPGRGRKRKITLSSQSASSSSEEGYLERIDGLDFCRDSNVSLKFNKKTKGLIDGLTKFFTPSPDGRKARGEVVDYSEQYRIRKRGNRKSSTSDWPTDNQDGWDGKQENEERLFGSQEIMTEKDMELFRDIQEQALQKVGVTGPPDPQVRCPSVIEFGKYEIHTWYSSPYPQEYSRLPKLYLCEFCLKYMKSRTILQQHMKKCGWFHPPANEIYRKNNISVFEVDGNVSTIYCQNLCLLAKLFLDHKTLYYDVEPFLFYVLTQNDVKGCHLVGYFSKEKHCQQKYNVSCIMILPQYQRKGYGRFLIDFSYLLSKREGQAGSPEKPLSDLGRLSYMAYWKSVILECLYHQNDKQISIKKLSKLTGICPQDITSTLHHLRMLDFRSDQFVIIRREKLIQDHMAKLQLNLRPVDVDPECLRWTPVIVSNSVVSEEEEEEAEEGENEEPQCQERELEISVRA

SEQ ID NO: 42419 - protein, 2073 aa, Homo sapiens
  Payload ID: 8633
  Gene Symbol: KAT6B
  Gene Name: K(lysine) acetyltransferase 6B
  Uniprot ID: Q8WYB5
  ENSP ID: ENSP00000287239
MVKLANPLYTEWILEAIQKIKKQKQRPSEERICHAVSTSHGLDKKTVSEQLELSVQDGSVLKVTNKGLASYKDPDNPGRFSSVKPGTFPKSAKGSRGSCNDLRNVDWNKLLRRAIEGLEEPNGSSLKNIEKYLRSQSDLTSTTNNPAFQQRLRLGAKRAVNNGRLLKDGPQYRVNYGSLDGKGAPQYPSAFPSSLPPVSLLPHEKDQPRADPIPICSFCLGTKESNREKKPEELLSCADCGSSGHPSCLKFCPELTTNVKALRWQCIECKTCSACRVQGRNADNMLFCDSCDRGFHMECCDPPLSRMPKGMWICQVCRPKKKGRKLLHEKAAQIKRRYAKPIGRPKNKLKQRLLSVTSDEGSMNAFTGRGSPGRGQKTKVCTTPSSGHAASGKDSSSRLAVTDPTRPGATTKITTTSTYISASTLKVNKKTKGLIDGLTKFFTPSPDGRRSRGEIIDFSKHYRPRKKVSQKQSCTSHVLATGTTQKLKPPPSSLPPPTPISGQSPSSQKSSTATSSPSPQSSSSQCSVPSLSSLTTNSQLKALFDGLSHIYTTQGQSRKKGHPSYAPPKRMRRKTELSSTAKSKAHFFGKRDIRSRFISHSSSSSWGMARGSIFKAIAHFKRTTFLKKHRMLGRLKYKVTPQMGTPSPGKGSLTDGRIKPDQDDDTEIKINIKQESADVNVIGNKDVVTEEDLDVFKQAQELSWEKIECESGVEDCGRYPSVIEFGKYEIQTWYSSPYPQEYARLPKLYLCEFCLKYMKSKNILLRHSKKCGWFHPPANEIYRRKDLSVFEVDGNMSKIYCQNLCLLAKLFLDHKTLYYDVEPFLFYVLTKNDEKGCHLVGYFSKEKLCQQKYNVSCIMIMPQHQRQGFGRFLIDFSYLLSRREGQAGSPEKPLSDLGRLSYLAYWKSVILEYLYHHHERHISIKAISRATGMCPHDIATTLQHLHMIDKRDGRFVIIRREKLILSHMEKLKTCSRANELDPDSLRWTPILISNAAVSEEEREAEKEAERLMEQASCWEKEEQEILSTRANSRQSPAKVQSKNKYLHSPESRPVTGERGQLLELSKESSEEEEEEEDEEEEEEEEEEEEDEEEEEEEEEEEEEENIQSSPPRLTKPQSVAIKRKRPFVLKKKRGRKRRRINSSVTTETISETTEVLNEPFDNSDEERPMPQLEPTCEIEVEEDGRKPVLRKAFQHQPGKKRQTEEEEGKDNHCFKNADPCRNNMNDDSSNLKEGSKDNPEPLKCKQVWPKGTKRGLSKWRQNKERKTGFKLNLYTPPETPMEPDEQVTVEEQKETSEGKTSPSPIRIEEEVKETGEALLPQEENRREETCAPVSPNTSPGEKPEDDLIKPEEEEEEEEEEEEEEEEEEGEEEEGGGNVEKDPDGAKSQEKEEPEISTEKEDSARLDDHEEEEEEDEEPSHNEDHDADDEDDSHMESAEVEKEELPRESFKEVLENQETFLDLNVQPGHSNPEVLMDCGVDLTASCNSEPKELAGDPEAVPESDEEPPPGEQAQKQDQKNSKEVDTEFKEGNPATMEIDSETVQAVQSLTQESSEQDDTFQDCAETQEACRSLQNYTRADQSPQIATTLDDCQQSDHSSPVSSVHSHPGQSVRSVNSPSVPALENSYAQISPDQSAISVPSLQNMETSPMMDVPSVSDHSQQVVDSGFSDLGSIESTTENYENPSSYDSTMGGSICGNGSSQNSCSYSNLTSSSLTQSSCAVTQQMSNISGSCSMLQQTSISSPPTCSVKSPQGCVVERPPSSSQQLAQCSMAANFTPPMQLAEIPETSNANIGLYERMGQSDFGAGHYPQPSATFSLAKLQQLTNTLIDHSLPYSHSAAVTSYANSASLSTPLSNTGLVQLSQSPHSVPGGPQAQATMTPPPNLTPPPMNLPPPLLQRNMAASNIGISHSQRLQTQIASKGHISMRTKSASLSPAAATHQSQIYGRSQTVAMQGPARTLTMQRGMNMSVNLMPAPAYNVNSVNMNMNTLNAMNGYSMSQPMMNSGYHSNHGYMNQTPQYPMQMQMGMMGTQPYAQQPMQTPPHGNMMYTAPGHHGYMNTGMSKQSLNGSYMRR

SEQ ID NO: 42420 - protein, 1890 aa, Homo sapiens
  Payload ID: 8633
  Gene Symbol: KAT6B
  Gene Name: K(lysine) acetyltransferase 6B
  Uniprot ID: Q8WYB5
  ENSP ID: ENSP00000361796
MVKLANPLYTEWILEAIQKIKKQKQRPSEERICHAVSTSHGLDKKTVSEQLELSVQDGSVLKVTNKGLASYKDPDNPGRFSSVKPGTFPKSAKGSRGSCNDLRNVDWNKLLRRAIEGLEEPNGSSLKNIEKYLRSQSDLTSTTNNPAFQQRLRLGAKRAVNNGRLLKDGPQYRVNYGSLDGKGAPQYPSAFPSSLPPVSLLPHEKDQPRADPIPICSFCLGTKESNREKKPEELLSCADCGSSGHPSCLKFCPELTTNVKALRWQCIECKTCSACRVQGRNADNMLFCDSCDRGFHMECCDPPLSRMPKGMWICQVCRPKKKGRKLLHEKAAQIKRRYAKPIGRPKNKLKQRLLSVTSDEGSMNAFTGRGSPGRGQKTKVCTTPSSGHAASGKDSSSRLAVTDPTRPGATTKITTTSTYISASTLKVNKKTKGLIDGLTKFFTPSPDGRRSRGEIIDFSKHYRPRKKVSQKQSCTSHVLATDTEIKINIKQESADVNVIGNKDVVTEEDLDVFKQAQELSWEKIECESGVEDCGRYPSVIEFGKYEIQTWYSSPYPQEYARLPKLYLCEFCLKYMKSKNILLRHSKKCGWFHPPANEIYRRKDLSVFEVDGNMSKIYCQNLCLLAKLFLDHKTLYYDVEPFLFYVLTKNDEKGCHLVGYFSKEKLCQQKYNVSCIMIMPQHQRQGFGRFLIDFSYLLSRREGQAGSPEKPLSDLGRLSYLAYWKSVILEYLYHHHERHISIKAISRATGMCPHDIATTLQHLHMIDKRDGRFVIIRREKLILSHMEKLKTCSRANELDPDSLRWTPILISNAAVSEEEREAEKEAERLMEQASCWEKEEQEILSTRANSRQSPAKVQSKNKYLHSPESRPVTGERGQLLELSKESSEEEEEEEDEEEEEEEEEEEEDEEEEEEEEEEEEEENIQSSPPRLTKPQSVAIKRKRPFVLKKKRGRKRRRINSSVTTETISETTEVLNEPFDNSDEERPMPQLEPTCEIEVEEDGRKPVLRKAFQHQPGKKRQTEEEEGKDNHCFKNADPCRNNMNDDSSNLKEGSKDNPEPLKCKQVWPKGTKRGLSKWRQNKERKTGFKLNLYTPPETPMEPDEQVTVEEQKETSEGKTSPSPIRIEEEVKETGEALLPQEENRREETCAPVSPNTSPGEKPEDDLIKPEEEEEEEEEEEEEEEEEEGEEEEGGGNVEKDPDGAKSQEKEEPEISTEKEDSARLDDHEEEEEEDEEPSHNEDHDADDEDDSHMESAEVEKEELPRESFKEVLENQETFLDLNVQPGHSNPEVLMDCGVDLTASCNSEPKELAGDPEAVPESDEEPPPGEQAQKQDQKNSKEVDTEFKEGNPATMEIDSETVQAVQSLTQESSEQDDTFQDCAETQEACRSLQNYTRADQSPQIATTLDDCQQSDHSSPVSSVHSHPGQSVRSVNSPSVPALENSYAQISPDQSAISVPSLQNMETSPMMDVPSVSDHSQQVVDSGFSDLGSIESTTENYENPSSYDSTMGGSICGNGSSQNSCSYSNLTSSSLTQSSCAVTQQMSNISGSCSMLQQTSISSPPTCSVKSPQGCVVERPPSSSQQLAQCSMAANFTPPMQLAEIPETSNANIGLYERMGQSDFGAGHYPQPSATFSLAKLQQLTNTLIDHSLPYSHSAAVTSYANSASLSTPLSNTGLVQLSQSPHSVPGGPQAQATMTPPPNLTPPPMNLPPPLLQRNMAASNIGISHSQRLQTQIASKGHISMRTKSASLSPAAATHQSQIYGRSQTVAMQGPARTLTMQRGMNMSVNLMPAPAYNVNSVNMNMNTLNAMNGYSMSQPMMNSGYHSNHGYMNQTPQYPMQMQMGMMGTQPYAQQPMQTPPHGNMMYTAPGHHGYMNTGMSKQSLNGSYMRR

SEQ ID NO: 42421 - protein, 1781 aa, Homo sapiens
  Payload ID: 8633
  Gene Symbol: KAT6B
  Gene Name: K(lysine) acetyltransferase 6B
  Uniprot ID: Q8WYB5
  ENSP ID: ENSP00000361799
MVKLANPLYTEWILEAIQKIKKQKQRPSEERICHAVSTSHGLDKKTVSEQLELSVQDGSVLKVTNKGLASYKDPDNPGRFSSVKPGTFPKSAKGSRGSCNDLRNVDWNKLLRRAIEGLEEPNGSSLKNIEKYLRSQSDLTSTTNNPAFQQRLRLGAKRAVNNGRLLKDGPQYRVNYGSLDGKGAPQYPSAFPSSLPPVSLLPHEKDQPRADPIPICSFCLGTKESNREKKPEELLSCADCGSSGHPSCLKFCPELTTNVKALRWQCIECKTCSACRVQGRNADNMLFCDSCDRGFHMECCDPPLSRMPKGMWICQVCRPKKKGRKLLHEKAAQIKRRYAKPIGRPKNKLKQRLLSVTSDEGSMNAFTGRGSPDTEIKINIKQESADVNVIGNKDVVTEEDLDVFKQAQELSWEKIECESGVEDCGRYPSVIEFGKYEIQTWYSSPYPQEYARLPKLYLCEFCLKYMKSKNILLRHSKKCGWFHPPANEIYRRKDLSVFEVDGNMSKIYCQNLCLLAKLFLDHKTLYYDVEPFLFYVLTKNDEKGCHLVGYFSKEKLCQQKYNVSCIMIMPQHQRQGFGRFLIDFSYLLSRREGQAGSPEKPLSDLGRLSYLAYWKSVILEYLYHHHERHISIKAISRATGMCPHDIATTLQHLHMIDKRDGRFVIIRREKLILSHMEKLKTCSRANELDPDSLRWTPILISNAAVSEEEREAEKEAERLMEQASCWEKEEQEILSTRANSRQSPAKVQSKNKYLHSPESRPVTGERGQLLELSKESSEEEEEEEDEEEEEEEEEEEEDEEEEEEEEEEEEEENIQSSPPRLTKPQSVAIKRKRPFVLKKKRGRKRRRINSSVTTETISETTEVLNEPFDNSDEERPMPQLEPTCEIEVEEDGRKPVLRKAFQHQPGKKRQTEEEEGKDNHCFKNADPCRNNMNDDSSNLKEGSKDNPEPLKCKQVWPKGTKRGLSKWRQNKERKTGFKLNLYTPPETPMEPDEQVTVEEQKETSEGKTSPSPIRIEEEVKETGEALLPQEENRREETCAPVSPNTSPGEKPEDDLIKPEEEEEEEEEEEEEEEEEEGEEEEGGGNVEKDPDGAKSQEKEEPEISTEKEDSARLDDHEEEEEEDEEPSHNEDHDADDEDDSHMESAEVEKEELPRESFKEVLENQETFLDLNVQPGHSNPEVLMDCGVDLTASCNSEPKELAGDPEAVPESDEEPPPGEQAQKQDQKNSKEVDTEFKEGNPATMEIDSETVQAVQSLTQESSEQDDTFQDCAETQEACRSLQNYTRADQSPQIATTLDDCQQSDHSSPVSSVHSHPGQSVRSVNSPSVPALENSYAQISPDQSAISVPSLQNMETSPMMDVPSVSDHSQQVVDSGFSDLGSIESTTENYENPSSYDSTMGGSICGNGSSQNSCSYSNLTSSSLTQSSCAVTQQMSNISGSCSMLQQTSISSPPTCSVKSPQGCVVERPPSSSQQLAQCSMAANFTPPMQLAEIPETSNANIGLYERMGQSDFGAGHYPQPSATFSLAKLQQLTNTLIDHSLPYSHSAAVTSYANSASLSTPLSNTGLVQLSQSPHSVPGGPQAQATMTPPPNLTPPPMNLPPPLLQRNMAASNIGISHSQRLQTQIASKGHISMRTKSASLSPAAATHQSQIYGRSQTVAMQGPARTLTMQRGMNMSVNLMPAPAYNVNSVNMNMNTLNAMNGYSMSQPMMNSGYHSNHGYMNQTPQYPMQMQMGMMGTQPYAQQPMQTPPHGNMMYTAPGHHGYMNTGMSKQSLNGSYMRR

SEQ ID NO: 42422 - protein, 1781 aa, Homo sapiens; identical to SEQ ID NO: 42421
  Payload ID: 8633
  Gene Symbol: KAT6B
  Gene Name: K(lysine) acetyltransferase 6B
  Uniprot ID: Q8WYB5
  ENSP ID: ENSP00000361809

SEQ ID NO: 42423 - protein, 1781 aa, Homo sapiens; identical to SEQ ID NO: 42421
  Payload ID: 8633
  Gene Symbol: KAT6B
  Gene Name: K(lysine) acetyltransferase 6B
  Uniprot ID: Q8WYB5
  ENSP ID: ENSP00000361810

SEQ ID NO: 42424 - protein, 1781 aa, Homo sapiens; identical to SEQ ID NO: 42421
  Payload ID: 8633
  Gene Symbol: KAT6B
  Gene Name: K(lysine) acetyltransferase 6B
  ENSP ID: ENSP00000485896

SEQ ID NO: 42425 - protein, 2073 aa, Homo sapiens; identical to SEQ ID NO: 42419
  Payload ID: 8633
  Gene Symbol: KAT6B
  Gene Name: K(lysine) acetyltransferase 6B
  ENSP ID: ENSP00000486595

SEQ ID NO: 42426 - protein, 1890 aa, Homo sapiens; identical to SEQ ID NO: 42420
  Payload ID: 8633
  Gene Symbol: KAT6B
  Gene Name: K(lysine) acetyltransferase 6B
  ENSP ID: ENSP00000486731

SEQ ID NO: 42427 - protein, 1781 aa, Homo sapiens; identical to SEQ ID NO: 42421
  Payload ID: 8633
  Gene Symbol: KAT6B
  Gene Name: K(lysine) acetyltransferase 6B
  ENSP ID: ENSP00000487219

SEQ ID NO: 42428 - protein, 1781 aa, Homo sapiens; identical to SEQ ID NO: 42421
  Payload ID: 8633
  Gene Symbol: KAT6B
  Gene Name: K(lysine) acetyltransferase 6B
  ENSP ID: ENSP00000487238

SEQ ID NO: 42429 - protein, 611 aa, Homo sapiens
  Payload ID: 8634
  Gene Symbol: KAT7
  Gene Name: K(lysine) acetyltransferase 7
  Uniprot ID: O95251
  ENSP ID: ENSP00000259021
MPRRKRNAGSSSDGTEDSDFSTDLEHTDSSESDGTSRRSARVTRSSARLSQSSQDSSPVRNLQSFGTEEPAYSTRRVTRSQQQPTPVTPKKYPLRQTRSSGSETEQVVDFSDRETKNTADHDESPPRTPTGNAPSSESDIDISSPNVSHDESIAKDMSLKDSGSDLSHRPKRRRFHESYNFNMKCPTPGCNSLGHLTGKHERHFSISGCPLYHNLSADECKVRAQSRDKQIEERMLSHRQDDNNRHATRHQAPTERQLRYKEKVAELRKKRNSGLSKEQKEKYMEHRQTYGNTREPLLENLTSEYDLDLFRRAQARASEDLEKLRLQGQITEGSNMIKTIAFGRYELDTWYHSPYPEEYARLGRLYMCEFCLKYMKSQTILRRHMAKCVWKHPPGDEIYRKGSISVFEVDGKKNKIYCQNLCLLAKLFLDHKTLYYDVEPFLFYVMTEADNTGCHLIGYFSKEKNSFLNYNVSCILTMPQYMRQGYGKMLIDFSYLLSKVEEKVGSPERPLSDLGLISYRSYWKEVLLRYLHNFQGKEISIKEISQETAVNPVDIVSTLQALQMLKYWKGKHLVLKRQDLIDEWIAKEAKRSNSNKTMDPSCLKWTPPKGT

SEQ ID NO: 42430 - protein, 581 aa, Homo sapiens
  Payload ID: 8634
  Gene Symbol: KAT7
  Gene Name: K(lysine) acetyltransferase 7
  Uniprot ID: O95251
  ENSP ID: ENSP00000398961
MPRRKRNAGSSSDGTEDSDFSTDLEHTDSSESDGTSRRSARVTRSSARLSQSSQDSSPVRNLQSFGTEEPAYSTRRVTRSQQQPTPVTPKKYPLRQTRSSGSETEQVVDFSDRETKNTADHDESPPRTPTGNAPSSESDIDISSPNVSHDESIAKDMSLKDSGSDLSHRPKRRRFHESYNFNMKCPTPGCNSLGHLTGKHERHFSISGCPLYHNLSADECKAPTERQLRYKEKVAELRKKRNSGLSKEQKEKYMEHRQTYGNTREPLLENLTSEYDLDLFRRAQARASEDLEKLRLQGQITEGSNMIKTIAFGRYELDTWYHSPYPEEYARLGRLYMCEFCLKYMKSQTILRRHMAKCVWKHPPGDEIYRKGSISVFEVDGKKNKIYCQNLCLLAKLFLDHKTLYYDVEPFLFYVMTEADNTGCHLIGYFSKEKNSFLNYNVSCILTMPQYMRQGYGKMLIDFSYLLSKVEEKVGSPERPLSDLGLISYRSYWKEVLLRYLHNFQGKEISIKEISQETAVNPVDIVSTLQALQMLKYWKGKHLVLKRQDLIDEWIAKEAKRSNSNKTMDPSCLKWTPPKGT

SEQ ID NO: 42431 - protein, 425 aa, Homo sapiens
  Payload ID: 8634
  Gene Symbol: KAT7
  Gene Name: K(lysine) acetyltransferase 7
  ENSP ID: ENSP00000409477
MSLKDSGSDLSHRPKRRRFHESYNFNMKCPTPGCNSLGHLTGKHERHFSISGCPLYHNLSADECKAPTERQLRYKEKVAELRKKRNSGLSKEQKEKYMEHRQTYGNTREPLLENLTSEYDLDLFRRAQARASEDLEKLRLQGQITEGSNMIKTIAFGRYELDTWYHSPYPEEYARLGRLYMCEFCLKYMKSQTILRRHMAKCVWKHPPGDEIYRKGSISVFEVDGKKNKIYCQNLCLLAKLFLDHKTLYYDVEPFLFYVMTEADNTGCHLIGYFSKEKNSFLNYNVSCILTMPQYMRQGYGKMLIDFSYLLSKVEEKVGSPERPLSDLGLISYRSYWKEVLLRYLHNFQGKEISIKEISQETAVNPVDIVSTLQALQMLKYWKGKHLVLKRQDLIDEWIAKEAKRSNSNKTMDPSCLKWTPPKGT

SEQ ID NO: 42432 - protein, 472 aa, Homo sapiens
  Payload ID: 8634
  Gene Symbol: KAT7
  Gene Name: K(lysine) acetyltransferase 7
  Uniprot ID: O95251
  ENSP ID: ENSP00000413415
MPRRKRNAGSSSDGTEDSDFSTDLEHTDSSESDGTSRRSARVTRSSARLSQSSQGHLTGKHERHFSISGCPLYHNLSADECKVRAQSRDKQIEERMLSHRQDDNNRHATRHQAPTERQLRYKEKVAELRKKRNSGLSKEQKEKYMEHRQTYGNTREPLLENLTSEYDLDLFRRAQARASEDLEKLRLQGQITEGSNMIKTIAFGRYELDTWYHSPYPEEYARLGRLYMCEFCLKYMKSQTILRRHMAKCVWKHPPGDEIYRKGSISVFEVDGKKNKIYCQNLCLLAKLFLDHKTLYYDVEPFLFYVMTEADNTGCHLIGYFSKEKNSFLNYNVSCILTMPQYMRQGYGKMLIDFSYLLSKVEEKVGSPERPLSDLGLISYRSYWKEVLLRYLHNFQGKEISIKEISQETAVNPVDIVSTLQALQMLKYWKGKHLVLKRQDLIDEWIAKEAKRSNSNKTMDPSCLKWTPPKGT

SEQ ID NO: 42433 - protein, 16 aa, Homo sapiens
  Payload ID: 8634
  Gene Symbol: KAT7
  Gene Name: K(lysine) acetyltransferase 7
  ENSP ID: ENSP00000421368
MSLKDSGSDLSHRPKR

SEQ ID NO: 42434 - protein, 442 aa, Homo sapiens
  Payload ID: 8634
  Gene Symbol: KAT7
  Gene Name: K(lysine) acetyltransferase 7
  Uniprot ID: O95251
  ENSP ID: ENSP00000423385
MPRRKRNAGSSSDGTEDSDFSTDLEHTDSSESDGTSRRSARVTRSSARLSQSSQGHLTGKHERHFSISGCPLYHNLSADECKAPTERQLRYKEKVAELRKKRNSGLSKEQKEKYMEHRQTYGNTREPLLENLTSEYDLDLFRRAQARASEDLEKLRLQGQITEGSNMIKTIAFGRYELDTWYHSPYPEEYARLGRLYMCEFCLKYMKSQTILRRHMAKCVWKHPPGDEIYRKGSISVFEVDGKKNKIYCQNLCLLAKLFLDHKTLYYDVEPFLFYVMTEADNTGCHLIGYFSKEKNSFLNYNVSCILTMPQYMRQGYGKMLIDFSYLLSKVEEKVGSPERPLSDLGLISYRSYWKEVLLRYLHNFQGKEISIKEISQETAVNPVDIVSTLQALQMLKYWKGKHLVLKRQDLIDEWIAKEAKRSNSNKTMDPSCLKWTPPKGT

SEQ ID NO: 42435 - protein, 501 aa, Homo sapiens
  Payload ID: 8634
  Gene Symbol: KAT7
  Gene Name: K(lysine) acetyltransferase 7
  Uniprot ID: O95251
  ENSP ID: ENSP00000424577
MPRRKRNAGSSSDGTEDSDFSTDLEHTDSSESDGTSRRSARVTRSSARLSQSSQDSSPVRNLQSFGTEEPAYSTRRVTRSQQQPTPVTPKKYPLRQTRSSGSETEQVVDFSDRGHLTGKHERHFSISGCPLYHNLSADECKAPTERQLRYKEKVAELRKKRNSGLSKEQKEKYMEHRQTYGNTREPLLENLTSEYDLDLFRRAQARASEDLEKLRLQGQITEGSNMIKTIAFGRYELDTWYHSPYPEEYARLGRLYMCEFCLKYMKSQTILRRHMAKCVWKHPPGDEIYRKGSISVFEVDGKKNKIYCQNLCLLAKLFLDHKTLYYDVEPFLFYVMTEADNTGCHLIGYFSKEKNSFLNYNVSCILTMPQYMRQGYGKMLIDFSYLLSKVEEKVGSPERPLSDLGLISYRSYWKEVLLRYLHNFQGKEISIKEISQETAVNPVDIVSTLQALQMLKYWKGKHLVLKRQDLIDEWIAKEAKRSNSNKTMDPSCLKWTPPKGT

SEQ ID NO: 42436 - protein, 458 aa, Homo sapiens
  Payload ID: 8635
  Gene Symbol: KAT8
  Gene Name: K(lysine) acetyltransferase 8
  Uniprot ID: Q9H7Z6
  ENSP ID: ENSP00000219797
MAAQGAAAAVAAGTSGVAGEGEPGPGENAAAEGTAPSPGRVSPPTPARGEPEVTVEIGETYLCRRPDSTWHSAEVIQSRVNDQEGREEFYVHYVGFNRRLDEWVDKNRLALTKTVKDAVQKNSEKYLSELAEQPERKITRNQKRKHDEINHVQKTYAEMDPTTAALEKEHEAITKVKYVDKIHIGNYEIDAWYFSPFPEDYGKQPKLWLCEYCLKYMKYEKSYRFHLGQCQWRQPPGKEIYRKSNISVYEVDGKDHKIYCQNLCLLAKLFLDHKTLYFDVEPFVFYILTEVDRQGAHIVGYFSKEKESPDGNNVACILTLPPYQRRGYGKFLIAFSYELSKLESTVGSPEKPLSDLGKLSYRSYWSWVLLEILRDFRGTLSIKDLSQMTSITQNDIISTLQSLNMVKYWKGQHVICVTPKLVEEHLKSAQYKKPPITVDSVCLKWAPPKHKQVKLSKK

SEQ ID NO: 42437 - protein, 467 aa, Homo sapiens
  Payload ID: 8635
  Gene Symbol: KAT8
  Gene Name: K(lysine) acetyltransferase 8
  Uniprot ID: Q9H7Z6
  ENSP ID: ENSP00000406037
MAAQGAAAAVAAGTSGVAGEGEPGPGENAAAEGTAPSPGRVSPPTPARGEPEVTVEIGETYLCRRPDSTWHSAEVIQSRVNDQEGREEFYVHYVGFNRRLDEWVDKNRLALTKTVKDAVQKNSEKYLSELAEQPERKITRNQKRKHDEINHVQKTYAEMDPTTAALEKEHEAITKVKYVDKIHIGNYEIDAWYFSPFPEDYGKQPKLWLCEYCLKYMKYEKSYRFHLGQCQWRQPPGKEIYRKSNISVYEVDGKDHKIYCQNLCLLAKLFLDHKTLYFDVEPFVFYILTEVDRQGAHIVGYFSKEKESPDGNNVACILTLPPYQRRGYGKFLIAFSYELSKLESTVGSPEKPLSDLGKLSYRSYWSWVLLEILRDFRGTLSIKDLSQMTSITQNDIISTLQSLNMVKYWKGQHVICVTPKLVEEHLKSAQYKKPPITGGWGAAVCRGRWGSVSIWTGRSQGLLIAVT

SEQ ID NO: 42438 - protein, 187 aa, Homo sapiens
  Payload ID: 8635
  Gene Symbol: KAT8
  Gene Name: K(lysine) acetyltransferase 8
  ENSP ID: ENSP00000454592
  MOD_RES (1)..(1): Any amino acid
XYGKQPKLWLCEYCLKYMKYEKSYRFHLGQCQWRQPPGKEIYRKSNISVYEVDGKDHKIYCQNLCLLAKLFLDHKTLYFDVEPFVFYILTEVDRQGAHIVGYFSKEKESPDGNNVACILTLPPYQRRGYGKFLIAFSYELSKLESTVGSPEKPLSDLGKLSYRSYWSWVLLEILRDFRGTLSIKDLR

SEQ ID NO: 42439 - protein, 458 aa, Homo sapiens; identical to SEQ ID NO: 42436
  Payload ID: 8635
  Gene Symbol: KAT8
  Gene Name: K(lysine) acetyltransferase 8
  Uniprot ID: Q9H7Z6
  ENSP ID: ENSP00000456933

SEQ ID NO: 42440 - protein, 1663 aa, Homo sapiens
  Payload ID: 8636
  Gene Symbol: KALRN
  Gene Name: kalirin, RhoGEF kinase
  Uniprot ID: O60229
  ENSP ID: ENSP00000240874
MTDRFWDQWYLWYLRLLRLLDRGSFRNDGLKASDVLPILKEKVAFVSGGRDKRGGPILTFPARSNHDRIRQEDLRKLVTYLASVPSEDVCKRGFTVIIDMRGSKWDLIKPLLKTLQEAFPAEIHVALIIKPDNFWQKQKTNFGSSKFIFETSMVSVEGLTKLVDPSQLTEEFDGSLDYNHEEWIELRLSLEEFFNSAVHLLSRLEDLQEMLARKEFPVDVEGSRRLIDEHTQLKKKVLKAPVEELDREGQRLLQCIRCSDGFSGRNCIPGSADFQSLVPKITSLLDKLHSTRQHLHQMWHVRKLKLDQCFQLRLFEQDAEKMFDWISHNKELFLQSHTEIGVSYQYALDLQTQHNHFAMNSMNAYVNINRIMSVASRLSEAGHYASQQIKQISTQLDQEWKSFAAALDERSTILAMSAVFHQKAEQFLSGVDAWCKMCSEGGLPSEMQDLELAIHHHQTLYEQVTQAYTEVSQDGKALLDVLQRPLSPGNSESLTATANYSKAVHQVLDVVHEVLHHQRRLESIWQHRKVRLHQRLQLCVFQQDVQQVLDWIENHGEAFLSKHTGVGKSLHRARALQKRHDDFEEVAQNTYTNADKLLEAAEQLAQTGECDPEEIYKAARHLEVRIQDFVRRVEQRKLLLDMSVSFHTHTKELWTWMEDLQKEMLEDVCADSVDAVQELIKQFQQQQTATLDATLNVIKEGEDLIQQLRSAPPSLGEPSEARDSAVSNNKTPHSSSISHIESVLQQLDDAQVQMEELFHERKIKLDIFLQLRIFEQYTIEVTAELDAWNEDLLRQMNDFNTEDLTLAEQRLQRHTERKLAMNNMTFEVIQQGQDLHQYITEVQASGIELICEKDIDLAAQVQELLEFLHEKQHELELNAEQTHKRLEQCLQLRHLQAEVKQVLGWIRNGESMLNASLVNASSLSEAEQLQREHEQFQLAIESLFHATSLQKTHQSALQVQQKAEVLLQAGHYDADAIRECAEKVALHWQQLMLKMEDRLKLVNASVAFYKTSEQVCSVLESLEQEYRRDEDWCGGRDKLGPAAEIDHVIPLISKHLEQKEAFLKACTLARRNAEVFLKYIHRNNVSMPSVASHTRGPEQQVKAILSELLQRENRVLHFWTLKKRRLDQCQQYVVFERSAKQALDWIQETGEFYLSTHTSTGETTEETQELLKEYGEFRVPAKQTKEKVKLLIQLADSFVEKGHIHATEIRKWVTTVDKHYRDFSLRMGKYRYSLEKALGVNTEDNKDLELDIIPASLSDREVKLRDANHEVNEEKRKSARKKEFIMAELLQTEKAYVRDLHECLETYLWEMTSGVEEIPPGILNKEHIIFGNIQEIYDFHNNIFLKELEKYEQLPEDVGHCFVTWADKFQMYVTYCKNKPDSNQLILEHAGTFFDEIQQRHGLANSISSYLIKPVQRITKYQLLLKELLTCCEEGKGELKDGLEVMLSVPKKANDAMHVSMLEGFDENLDVQGELILQDAFQVWDPKSLIRKGRERHLFLFEISLVFSKEIKDSSGHTKYVYKNKLLTSELGVTEHVEGDPCKFALWSGRTPSSDNKTVLKASNIETKQEWIKNIREVIQERIIHLKGALKEPLQLPKTPAKQRNNSKRDGVEDIDSQGDGSSQPDTISIASRTSQNTVDSDKDGNLVPRWHLGPGDPFSTYV

SEQ ID NO: 42441 - protein, 1289 aa, Homo sapiens
  Payload ID: 8636
  Gene Symbol: KALRN
  Gene Name: kalirin, RhoGEF kinase
  Uniprot ID: O60229
  ENSP ID: ENSP00000291478
MKGGDRAYTRGPSLGWLFAKCCCCFPCRDAYSHSSSENGGKSESVANLQAQPSLNSIHSSPGPKRSTNTLKKWLTSPVRRLNSGKADGNIKKQKKVRDGRKSFDLGSPKPGDETTPQGDSADEKSKKGWGEDEPDEESHTPLPPPMKIFDNDPTQDEMSSSLLAARQASTEVPTAADLVNAIEKLVKNKLSLEGSSYRGSLKDPAGCLNEGMAPPTPPKNPEEEQKAKALRGRMFVLNELVQTEKDYVKDLGIVVEGFMKRIEEKGVPEDMRGKDKIVFGNIHQIYDWHKDFFLAELEKCIQEQDRLAQLFIKHERKLHIYVWYCQNKPRSEYIVAEYDAYFEEVKQEINQRLTLSDFLIKPIQRITKYQLLLKDFLRYSEKAGLECSDIEKAVELMCLVPKRCNDMMNLGRLQGFEGTLTAQGKLLQQDTFYVIELDAGMQSRTKERRVFLFEQIVIFSELLRKGSLTPGYMFKRSIKMNYLVLEENVDNDPCKFALMNRETSERVVLQAANADIQQAWVQDINQVLETQRDFLNALQSPIEYQRKERSTAVMRSQPARLPQASPRPYSSVPAGSEKPPKGSSYNPPLPPLKISTSNGSPGFEYHQPGDKFEASKQNDLGGCNGTSSMAVIKDYYALKENEICVSQGEVVQVLAVNQQNMCLVYQPASDHSPAAEGWVPGSILAPLTKATAAESSDGSIKKSCSWHTLRMRKRAEVENTGKNEATGPRKPKDILGNKVSVKETNSSEESECDDLDPNTSMEILNPNFIQEVAPEFLVPLVDVTCLLGDTVILQCKVCGRPKPTITWKGPDQNILDTDNSSATYTVSSCDSGEITLKICNLMPQDSGIYTCIATNDHGTTSTSATVKVQGVPAAPNRPIAQERSCTSVILRWLPPSSTGNCTISGYTVEYREEGSQIWQQSVASTLDTYLVIEDLSPGCPYQFRVSASNPWGISLPSEPSEFVRLPEYDAAADGATISWKENFDSAYTELNEIGRGRFSIVKKCIHKATRKDVAVKFVSKKMKKKEQAAHEAALLQHLQHPQYITLHDTYESPTSYILILELMDDGRLLDYLMNHDELMEEKVAFYIRDIMEALQYLHNCRVAHLDIKPENLLIDLRIPVPRVKLIDLEDAVQISGHFHIHHLLGNPEFAAPEVIQGIPVSLGTDIWSIGVLTYVMLSGVSPFLDESKEETCINVCRVDFSFPHEYFCGVSNAARDFINVILQEDFRRRPTAATCLQHPWLQPHNGSYSKIPLDTSRLACFIERRKHQNDVRPIPNVKSYIVNRVNQGT

SEQ ID NO: 42442 - protein, 2955 aa, Homo sapiens
  Payload ID: 8636
  Gene Symbol: KALRN
  Gene Name: kalirin, RhoGEF kinase
  ENSP ID: ENSP00000346122
  MOD_RES (1)..(1): Any amino acid
XSFRNDGLKASDVLPILKEKVAFVSGGRDKRGGPILTFPARSNHDRIRQEDLRKLVTYLASVPSEDVCKRGFTVIIDMRGSKWDLIKPLLKTLQEAFPAEIHVALIIKPDNFWQKQKTNFGSSKFIFETSMVSVEGLTKLVDPSQLTEEFDGSLDYNHEEWIELRLSLEEFFNSAVHLLSRLEDLQEMLARKEFPVDVEGSRRLIDEHTQLKKKVLKAPVEELDREGQRLLQCIRCSDGFSGRNCIPGSADFQSLVPKITSLLDKLHSTRQHLHQMWHVRKLKLDQCFQLRLFEQDAEKMFDWISHNKELFLQSHTEIGVSYQYALDLQTQHNHFAMNSMNAYVNINRIMSVASRLSEAGHYASQQIKQISTQLDQEWKSFAAALDERSTILAMSAVFHQKAEQFLSGVDAWCKMCSEGGLPSEMQDLELAIHHHQTLYEQVTQAYTEVSQDGKALLDVLQRPLSPGNSESLTATANYSKAVHQVLDVVHEVLHHQRRLESIWQHRKVRLHQRLQLCVFQQDVQQVLDWIENHGEAFLSKHTGVGKSLHRARALQKRHDDFEEVAQNTYTNADKLLEAAEQLAQTGECDPEEIYKAARHLEVRIQDFVRRVEQRKLLLDMSVSFHTHTKELWTWMEDLQKEMLEDVCADSVDAVQELIKQFQQQQTATLDATLNVIKEGEDLIQQLRSAPPSLGEPSEARDSAVSNNKTPHSSSISHIESVLQQLDDAQVQMEELFHERKIKLDIFLQLRIFEQYTIEVTAELDAWNEDLLRQMNDFNTEDLTLAEQRLQRHTERKLAMNNMTFEVIQQGQDLHQYITEVQASGIELICEKDIDLAAQVQELLEFLHEKQHELELNAEQTHKRLEQCLQLRHLQAEVKQVLGWIRNGESMLNASLVNASSLSEAEQLQREHEQFQLAIEKTHQSALQVQQKAEVLLQAGHYDADAIRECAEKVALHWQQLMLKMEDRLKLVNASVAFYKTSEQVCSVLESLEQEYRRDEDWCGGRDKLGPAAEIDHVIPLISKHLEQKEAFLKACTLARRNAEVFLKYIHRNNVSMPSVASHTRGPEQQVKAILSELLQRENRVLHFWTLKKRRLDQCQQYVVFERSAKQALDWIQETGEFYLSTHTSTGETTEETQELLKEYGEFRVPAKQTKEKVKLLIQLADSFVEKGHIHATEIRKWVTTVDKHYRDFSLRMGKYRYSLEKALGVNTEDNKDLELDIIPASLSDREVKLRDANHEVNEEKRKSARKKEFIMAELLQTEKAYVRDLHECLETYLWEMTSGVEEIPPGILNKEHIIFGNIQEIYDFHNNIFLKELEKYEQLPEDVGHCFVTWADKFQMYVTYCKNKPDSNQLILEHAGTFFDEIQQRHGLANSISSYLIKPVQRITKYQLLLKELLTCCEEGKGELKDGLEVMLSVPKKANDAMHVSMLEGFDENLDVQGELILQDAFQVWDPKSLIRKGRERHLFLFEISLVFSKEIKDSSGHTKYVYKNKLLTSELGVTEHVEGDPCKFALWSGRTPSSDNKTVLKASNIETKQEWIKNIREVIQERIIHLKGALKEPLQLPKTPAKQRNNSKRDGVEDIDSQGDGSSQPDTISIASRTSQNTVDSDKLSGGCELTVVLQDFSAGHSSELTIQVGQTVELLERPSERPGWCLVRTTERSPPLEGLVPSSALCISHSRSSVEMDCFFPLVKDAYSHSSSENGGKSESVANLQAQPSLNSIHSSPGPKRSTNTLKKWLTSPVRRLNSGKADGNIKKQKKVRDGRKSFDLGSPKPGDETTPQGDSADEKSKKGWGEDEPDEESHTPLPPPMKIFDNDPTQDEMSSSLLAARQASTEVPTAADLVNAIEKLVKNKLSLEGSSYRGSLKDPAGCLNEGMAPPTPPKNPEEEQKAKALRGRMFVLNELVQTEKDYVKDLGIVVEGFMKRIEEKGVPEDMRGKDKIVFGNIHQIYDWHKDFFLAELEKCIQEQDRLAQLFIKHERKLHIYVWYCQNKPRSEYIVAEYDAYFEEVKQEINQRLTLSDFLIKPIQRITKYQLLLKDFLRYSEKAGLECSDIEKAVELMCLVPKRCNDMMNLGRLQGFEGTLTAQGKLLQQDTFYVIELDAGMQSRTKERRVFLFEQIVIFSELLRKGSLTPGYMFKRSIKMNYLVLEENVDNDPCKFALMNRETSERVVLQAANADIQQAWVQDINQVLETQRDFLNALQSPIEYQRKERSTAVMRSQPARLPQASPRPYSSVPAGSEKPPKGSSYNPPLPPLKISTSNGSPGFEYHQPGDKFEASKQNDLGGCNGTSSMAVIKDYYALKENEICVSQGEVVQVLAVNQQNMCLVYQPASDHSPAAEGWVPGSILAPLTKATAAESSDGSIKKSCSWHTLRMRKRAEVENTGKNEATGPRKPKDILGNKVSVKETNSSEESECDDLDPNTSMEILNPNFIQEVAPEFLVPLVDVTCLLGDTVILQCKVCGRPKPTITWKGPDQNILDTDNSSATYTVSSCDSGEITLKICNLMPQDSGIYTCIATNDHGTTSTSATVKVQGVPAAPNRPIAQERSCTSVILRWLPPSSTGNCTISGYTVEYREEGSQIWQQSVASTLDTYLVIEDLSPGCPYQFRVSASNPWGISLPSEPSEFVRLPEYDAAADGATISWKENFDSAYTELNEIGRGRFSIVKKCIHKATRKDVAVKFVSKKMKKKEQAAHEAALLQHLQHPQYITLHDTYESPTSYILILELMDDGRLLDYLMNHDELMEEKVAFYIRDIMEALQYLHNCRVAHLDIKPENLLIDLRIPVPRVKLIDLEDAVQISGHFHIHHLLGNPEFAAPEVIQGIPVSLGTDIWSIGVLTYVMLSGVSPFLDESKEETCINVCRVDFSFPHEYFCGVSNAARDFINVILQEDFRRRPTAATCLQHPWLQPHNGSYSKIPLDTSRLACFIERRKHQNDVRPIPNVKSYIVNRVNQGT

SEQ ID NO: 42443 - protein, 2986 aa, Homo sapiens
  Payload ID: 8636
  Gene Symbol: KALRN
  Gene Name: kalirin, RhoGEF kinase
  ENSP ID: ENSP00000353109
MTDRFWDQWYLWYLRLLRLLDRGSFRNDGLKASDVLPILKEKVAFVSGGRDKRGGPILTFPARSNHDRIRQEDLRKLVTYLASVPSEDVCKRGFTVIIDMRGSKWDLIKPLLKTLQEAFPAEIHVALIIKPDNFWQKQKTNFGSSKFIFETSMVSVEGLTKLVDPSQLTEEFDGSLDYNHEEWIELRLSLEEFFNSAVHLLSRLEDLQEMLARKEFPVDVEGSRRLIDEHTQLKKKVLKAPVEELDREGQRLLQCIRCSDGFSGRNCIPGSADFQSLVPKITSLLDKLHSTRQHLHQMWHVRKLKLDQCFQLRLFEQDAEKMFDWISHNKELFLQSHTEIGVSYQYALDLQTQHNHFAMNSMNAYVNINRIMSVASRLSEAGHYASQQIKQISTQLDQEWKSFAAALDERSTILAMSAVFHQKAEQFLSGVDAWCKMCSEGGLPSEMQDLELAIHHHQTLYEQVTQAYTEVSQDGKALLDVLQRPLSPGNSESLTATANYSKAVHQVLDVVHEVLHHQRRLESIWQHRKVRLHQRLQLCVFQQDVQQVLDWIENHGEAFLSKHTGVGKSLHRARALQKRHDDFEEVAQNTYTNADKLLEAAEQLAQTGECDPEEIYKAARHLEVRIQDFVRRVEQRKLLLDMSVSFHTHTKELWTWMEDLQKEMLEDVCADSVDAVQELIKQFQQQQTATLDATLNVIKEGEDLIQQLRSAPPSLGEPSEARDSAVSNNKTPHSSSISHIESVLQQLDDAQVQMEELFHERKIKLDIFLQLRIFEQYTIEVTAELDAWNEDLLRQMNDFNTEDLTLAEQRLQRHTERKLAMNNMTFEVIQQGQDLHQYITEVQASGIELICEKDIDLAAQVQELLEFLHEKQHELELNAEQTHKRLEQCLQLRHLQAEVKQVLGWIRNGESMLNASLVNASSLSEAEQLQREHEQFQLAIESLFHATSLQKTHQSALQVQQKAEVLLQAGHYDADAIRECAEKVALHWQQLMLKMEDRLKLVNASVAFYKTSEQVCSVLESLEQEYRRDEDWCGGRDKLGPAAEIDHVIPLISKHLEQKEAFLKACTLARRNAEVFLKYIHRNNVSMPSVASHTRGPEQQVKAILSELLQRENRVLHFWTLKKRRLDQCQQYVVFERSAKQALDWIQETGEFYLSTHTSTGETTEETQELLKEYGEFRVPAKQTKEKVKLLIQLADSFVEKGHIHATEIRKWVTTVDKHYRDFSLRMGKYRYSLEKALGVNTEDNKDLELDIIPASLSDREVKLRDANHEVNEEKRKSARKKEFIMAELLQTEKAYVRDLHECLETYLWEMTSGVEEIPPGILNKEHIIFGNIQEIYDFHNNIFLKELEKYEQLPEDVGHCFVTWADKFQMYVTYCKNKPDSNQLILEHAGTFFDEIQQRHGLANSISSYLIKPVQRITKYQLLLKELLTCCEEGKGELKDGLEVMLSVPKKANDAMHVSMLEGFDENLDVQGELILQDAFQVWDPKSLIRKGRERHLFLFEISLVFSKEIKDSSGHTKYVYKNKLLTSELGVTEHVEGDPCKFALWSGRTPSSDNKTVLKASNIETKQEWIKNIREVIQERIIHLKGALKEPLQLPKTPAKQRNNSKRDGVEDIDSQGDGSSQPDTISIASRTSQNTVDSDKLSGGCELTVVLQDFSAGHSSELTIQVGQTVELLERPSERPGWCLVRTTERSPPLEGLVPSSALCISHSRSSVEMDCFFPLVKDAYSHSSSENGGKSESVANLQAQPSLNSIHSSPGPKRSTNTLKKWLTSPVRRLNSGKADGNIKKQKKVRDGRKSFDLGSPKPGDETTPQGDSADEKSKKGWGEDEPDEESHTPLPPPMKIFDNDPTQDEMSSSLLAARQASTEVPTAADLVNAIEKLVKNKLSLEGSSYRGSLKDPAGCLNEGMAPPTPPKNPEEEQKAKALRGRMFVLNELVQTEKDYVKDLGIVVEGFMKRIEEKGVPEDMRGKDKIVFGNIHQIYDWHKDFFLAELEKCIQEQDRLAQLFIKHERKLHIYVWYCQNKPRSEYIVAEYDAYFEEVKQEINQRLTLSDFLIKPIQRITKYQLLLKDFLRYSEKAGLECSDIEKAVELMCLVPKRCNDMMNLGRLQGFEGTLTAQGKLLQQDTFYVIELDAGMQSRTKERRVFLFEQIVIFSELLRKGSLTPGYMFKRSIKMNYLVLEENVDNDPCKFALMNRETSERVVLQAANADIQQAWVQDINQVLETQRDFLNALQSPIEYQRKERSTAVMRSQPARLPQASPRPYSSVPAGSEKPPKGSSYNPPLPPLKISTSNGSPGFEYHQPGDKFEASKQNDLGGCNGTSSMAVIKDYYALKENEICVSQGEVVQVLAVNQQNMCLVYQPASDHSPAAEGWVPGSILAPLTKATAAESSDGSIKKSCSWHTLRMRKRAEVENTGKNEATGPRKPKDILGNKVSVKETNSSEESECDDLDPNTSMEILNPNFIQEVAPEFLVPLVDVTCLLGDTVILQCKVCGRPKPTITWKGPDQNILDTDNSSATYTVSSCDSGEITLKICNLMPQDSGIYTCIATNDHGTTSTSATVKVQGVPAAPNRPIAQERSCTSVILRWLPPSSTGNCTISGYTVEYREEGSQIWQQSVASTLDTYLVIEDLSPGCPYQFRVSASNPWGISLPSEPSEFVRLPEYDAAADGATISWKENFDSAYTELNEIGRGRFSIVKKCIHKATRKDVAVKFVSKKMKKKEQAAHEAALLQHLQHPQYITLHDTYESPTSYILILELMDDGRLLDYLMNHDELMEEKVAFYIRDIMEALQYLHNCRVAHLDIKPENLLIDLRIPVPRVKLIDLEDAVQISGHFHIHHLLGNPEFAAPEVIQGIPVSLGTDIWSIGVLTYVMLSGVSPFLDESKEETCINVCRVDFSFPHEYFCGVSNAARDFINVILQEDFRRRPTAATCLQHPWLQPHNGSYSKIPLDTSRLACFIERRKHQNDVRPIPNVKSYIVNRVNQGT

SEQ ID NO: 42444 - protein, 268 aa, Homo sapiens
  Payload ID: 8636
  Gene Symbol: KALRN
  Gene Name: kalirin, RhoGEF kinase
  ENSP ID: ENSP00000395236
  MOD_RES (1)..(1): Any amino acid
XCILCCQCSCCQNWIQPIVPDKIRATSMENITSSIFDVISKGKVAPTFSYWSFRNDGLKASDVLPILKEKVAFVSGGRDKRGGPILTFPARSNHDRIRQEDLRKLVTYLASVPSEDVCKRGFTVIIDMRGSKWDLIKPLLKTLQEAFPAEIHVALIIKPDNFWQKQKTNFGSSKFIFETSMVSVEGLTKLVDPSQLTEEFDGSLDYNHEEWIELRLSLEEFFNSAVHLLSRLEDLQEMLARKEFPVDVEGSRRLIDEHTQLKKKVLKA

SEQ ID NO: 42445 - protein, 194 aa, Homo sapiens
  Payload ID: 8636
  Gene Symbol: KALRN
  Gene Name: kalirin, RhoGEF kinase
  ENSP ID: ENSP00000400064
MKGGDRAYTRGPSLGWLFAKCCCCFPCRDAYSHSSSENGGKSESVANLQAQPSLNSIHSSPGPKRSTNTLKKWLTSPVRRLNSGKADGNIKKQKKVRDGRKSFDLGSPKPGDETTPQGDSADEKSKKGWGEDEPDEESHTPLPPPMKIFDNDPTQDEMSLEGSSYRGSLKDPAGCLNEGMAPPTPPKNPEEEQK

SEQ ID NO: 42446 - protein, 215 aa, Homo sapiens
  Payload ID: 8636
  Gene Symbol: KALRN
  Gene Name: kalirin, RhoGEF kinase
  ENSP ID: ENSP00000402950
WQHRKVRLHQRLQLCVFQQDVQQVLDWIENHGEAFLSKHTGVGKSLHRARALQKRHDDFEEVAQNTYTNADKLLEAAEQLAQTGECDPEEIYKAARHLEVRIQDFVRRVEQRKLLLDMSVSFHTHTKELWTWMEDLQKEMLEDVCADSVDAVQELIKQFQQQQTATLDATLNVIKEGEDLIQQLRSAPPSLGEPSEARSAWAELSSGKCLGLDVR

SEQ ID NO: 42447 - protein, 1654 aa, Homo sapiens
  Payload ID: 8636
  Gene Symbol: KALRN
  Gene Name: kalirin, RhoGEF kinase
  ENSP ID: ENSP00000418611
MTDRFWDQWYLWYLRLLRLLDRGSFRNDGLKASDVLPILKEKVAFVSGGRDKRGGPILTFPARSNHDRIRQEDLRKLVTYLASVPSEDVCKRGFTVIIDMRGSKWDLIKPLLKTLQEAFPAEIHVALIIKPDNFWQKQKTNFGSSKFIFETSMVSVEGLTKLVDPSQLTEEFDGSLDYNHEEWIELRLSLEEFFNSAVHLLSRLEDLQEMLARKEFPVDVEGSRRLIDEHTQLKKKVLKAPVEELDREGQRLLQCIRCSDGFSGRNCIPGSADFQSLVPKITSLLDKLHSTRQHLHQMWHVRKLKLDQCFQLRLFEQDAEKMFDWISHNKELFLQSHTEIGVSYQYALDLQTQHNHFAMNSMNAYVNINRIMSVASRLSEAGHYASQQIKQISTQLDQEWKSFAAALDERSTILAMSAVFHQKAEQFLSGVDAWCKMCSEGGLPSEMQDLELAIHHHQTLYEQVTQAYTEVSQDGKALLDVLQRPLSPGNSESLTATANYSKAVHQVLDVVHEVLHHQRRLESIWQHRKVRLHQRLQLCVFQQDVQQVLDWIENHGEAFLSKHTGVGKSLHRARALQKRHDDFEEVAQNTYTNADKLLEAAEQLAQTGECDPEEIYKAARHLEVRIQDFVRRVEQRKLLLDMSVSFHTHTKELWTWMEDLQKEMLEDVCADSVDAVQELIKQFQQQQTATLDATLNVIKEGEDLIQQLRSAPPSLGEPSEARDSAVSNNKTPHSSSISHIESVLQQLDDAQVQMEELFHERKIKLDIFLQLRIFEQYTIEVTAELDAWNEDLLRQMNDFNTEDLTLAEQRLQRHTERKLAMNNMTFEVIQQGQDLHQYITEVQASGIELICEKDIDLAAQVQELLEFLHEKQHELELNAEQTHKRLEQCLQLRHLQAEVKQVLGWIRNGESMLNASLVNASSLSEAEQLQREHEQFQLAIEKTHQSALQVQQKAEVLLQAGHYDADAIRECAEKVALHWQQLMLKMEDRLKLVNASVAFYKTSEQVCSVLESLEQEYRRDEDWCGGRDKLGPAAEIDHVIPLISKHLEQKEAFLKACTLARRNAEVFLKYIHRNNVSMPSVASHTRGPEQQVKAILSELLQRENRVLHFWTLKKRRLDQCQQYVVFERSAKQALDWIQETGEFYLSTHTSTGETTEETQELLKEYGEFRVPAKQTKEKVKLLIQLADSFVEKGHIHATEIRKWVTTVDKHYRDFSLRMGKYRYSLEKALGVNTEDNKDLELDIIPASLSDREVKLRDANHEVNEEKRKSARKKEFIMAELLQTEKAYVRDLHECLETYLWEMTSGVEEIPPGILNKEHIIFGNIQEIYDFHNNIFLKELEKYEQLPEDVGHCFVTWADKFQMYVTYCKNKPDSNQLILEHAGTFFDEIQQRHGLANSISSYLIKPVQRITKYQLLLKELLTCCEEGKGELKDGLEVMLSVPKKANDAMHVSMLEGFDENLDVQGELILQDAFQVWDPKSLIRKGRERHLFLFEISLVFSKEIKDSSGHTKYVYKNKLLTSELGVTEHVEGDPCKFALWSGRTPSSDNKTVLKASNIETKQEWIKNIREVIQERIIHLKGALKEPLQLPKTPAKQRNNSKRDGVEDIDSQGDGSSQPDTISIASRTSQNTVDSDKDGNLVPRWHLGPGDPFSTYV

SEQ ID NO: 42448 - protein, 53 aa, Homo sapiens
  Payload ID: 8636
  Gene Symbol: KALRN
  Gene Name: kalirin, RhoGEF kinase
  ENSP ID: ENSP00000487487
MTDRFWDQWYLWYLRLLRLLDRVPSMLLQMTGFPFYRLSLHSVDCFPCCAEAF

SEQ ID NO: 42449 - protein, 262 aa, Homo sapiens
  Payload ID: 8637
  Gene Symbol: KLK1
  Gene Name: kallikrein 1
  Uniprot ID: P06870
  ENSP ID: ENSP00000301420
MWFLVLCLALSLGGTGAAPPIQSRIVGGWECEQHSQPWQAALYHFSTFQCGGILVHRQWVLTAAHCISDNYQLWLGRHNLFDDENTAQFVHVSESFPHPGFNMSLLENHTRQADEDYSHDLMLLRLTEPADTITDAVKVVELPTEEPEVGSTCLASGWGSIEPENFSFPDDLQCVDLKILPNDECKKAHVQKVTDFMLCVGHLEGGKDTCVGDSGGPLMCDGVLQGVTSWGYVPCGTPNKPSVAVRVLSYVKWIEDTIAENS

SEQ ID NO: 42450 - protein, 56 aa, Homo sapiens
  Payload ID: 8637
  Gene Symbol: KLK1
  Gene Name: kallikrein 1
  ENSP ID: ENSP00000472939
MWFLVLCLALSLGGTALVFWNPTPRILNAFSASASALASPKIASKRTPYPSSTLRP

SEQ ID NO: 42451 - protein, 638 aa, Homo sapiens
  Payload ID: 8638
  Gene Symbol: KLKB1
  Gene Name: kallikrein B, plasma (Fletcher factor) 1
  Uniprot ID: P03952
  ENSP ID: ENSP00000264690
MILFKQATYFISLFATVSCGCLTQLYENAFFRGGDVASMYTPNAQYCQMRCTFHPRCLLFSFLPASSINDMEKRFGCFLKDSVTGTLPKVHRTGAVSGHSLKQCGHQISACHRDIYKGVDMRGVNFNVSKVSSVEECQKRCTSNIRCQFFSYATQTFHKAEYRNNCLLKYSPGGTPTAIKVLSNVESGFSLKPCALSEIGCHMNIFQHLAFSDVDVARVLTPDAFVCRTICTYHPNCLFFTFYTNVWKIESQRNVCLLKTSESGTPSSSTPQENTISGYSLLTCKRTLPEPCHSKIYPGVDFGGEELNVTFVKGVNVCQETCTKMIRCQFFTYSLLPEDCKEEKCKCFLRLSMDGSPTRIAYGTQGSSGYSLRLCNTGDNSVCTTKTSTRIVGGTNSSWGEWPWQVSLQVKLTAQRHLCGGSLIGHQWVLTAAHCFDGLPLQDVWRIYSGILNLSDITKDTPFSQIKEIIIHQNYKVSEGNHDIALIKLQAPLNYTEFQKPICLPSKGDTSTIYTNCWVTGWGFSKEKGEIQNILQKVNIPLVTNEECQKRYQDYKITQRMVCAGYKEGGKDACKGDSGGPLVCKHNGMWRLVGITSWGEGCARREQPGVYTKVAEYMDWILEKTQSSDGKAQMQSPA

SEQ ID NO: 42452 - protein, 148 aa, Homo sapiens
  Payload ID: 8638
  Gene Symbol: KLKB1
  Gene Name: kallikrein B, plasma (Fletcher factor) 1
  ENSP ID: ENSP00000412366
MILFKQATYFISLFATVSCGCLTQLYENAFFRGGDVASMYTPNAQYCQMRCTFHPRCLLFSFLPASSINDMEKRFGCFLKDSVTGTLPKVHRTGAVSGHSLKQCGHQISACHRDIYKGVDMRGVNFNVSKVSSVEECQKRCTSNIRCQ

SEQ ID NO: 42453 - protein, 141 aa, Homo sapiens
  Payload ID: 8638
  Gene Symbol: KLKB1
  Gene Name: kallikrein B, plasma (Fletcher factor) 1
  ENSP ID: ENSP00000415563
MYTPNAQYCQMRCTFHPRCLLFSFLPASSINDMEKRFGCFLKDSVTGTLPKVHRTGAVSGHSLKQCGHQISACHRDIYKGVDMRGVNFNVSKVSSVEECQKRCTSNIRCQFFSYATQTFHKAEYRNNCLLKYSPGGTPTAI

SEQ ID NO: 42454 - protein, 514 aa, Homo sapiens
  Payload ID: 8638
  Gene Symbol: KLKB1
  Gene Name: kallikrein B, plasma (Fletcher factor) 1
  ENSP ID: ENSP00000424469
MYTPNAQYCQMRCTFHPRCLLFSFLPASSINDMEKRFGCFLKDSVTGTLPKVHRTGAVSGHSLKQCGHQISACHRDIYKGVDMRGVNFNVSKVSSVEECQKRCTSNIRCQFFSYATQTFHKAEYRNNCLLKYSPGGTPTAIKVLSNVESGFSLKPCALSEIGCHMNIFQHLAFSDVDVARVLTPDAFVCRTICTYHPNCLFFTFYTNVWKIESQRNVCLLKTSESGTPSSSTPQENTISGYSLLTCKRTLPEPCHSKIYPGVDFGGEELNVTFVKGVNVCQETCTKMIRCQFFTYSLLPEDCKEEKCKCFLRLSMDGSPTRIAYGTQGSSGYSLRLCNTGDNSVCTTKTSTRIVGGTNSSWGEWPWQVSLQVKLTAQRHLCGGSLIGHQWVLTAAHCFDGLPLQDVWRIYSGILNLSDITKDTPFSQIKEIIIHQNYKVSEGNHDIALIKLQAPLNYTEFQKPICLPSKGDTSTIYTNCWVTGWGFSKEKGRFRWSLSLQTQWNVAFGGHHQLG

SEQ ID NO: 42455 - protein, 686 aa, Homo sapiens
  Payload ID: 8638
  Gene Symbol: KLKB1
  Gene Name: kallikrein B, plasma (Fletcher factor) 1
  ENSP ID: ENSP00000426629
  MOD_RES (1)..(1): Any amino acid
XSEDCEVAGYRVLKGTEAVIIPYALHRDPRYFPNPEEFQPERFFPENAQGRHPYAYVPFSAGPRNCIGCLTQLYENAFFRGGDVASMYTPNAQYCQMRCTFHPRCLLFSFLPASSINDMEKRFGCFLKDSVTGTLPKVHRTGAVSGHSLKQCGHQISACHRDIYKGVDMRGVNFNVSKVSSVEECQKRCTSNIRCQFFSYATQTFHKAEYRNNCLLKYSPGGTPTAIKVLSNVESGFSLKPCALSEIGCHMNIFQHLAFSDVDVARVLTPDAFVCRTICTYHPNCLFFTFYTNVWKIESQRNVCLLKTSESGTPSSSTPQENTISGYSLLTCKRTLPEPCHSKIYPGVDFGGEELNVTFVKGVNVCQETCTKMIRCQFFTYSLLPEDCKEEKCKCFLRLSMDGSPTRIAYGTQGSSGYSLRLCNTGDNSVCTTKTSTRIVGGTNSSWGEWPWQVSLQVKLTAQRHLCGGSLIGHQWVLTAAHCFDGLPLQDVWRIYSGILNLSDITKDTPFSQIKEIIIHQNYKVSEGNHDIALIKLQAPLNYTEFQKPICLPSKGDTSTIYTNCWVTGWGFSKEKGEIQNILQKVNIPLVTNEECQKRYQDYKITQRMVCAGYKEGGKDACKGDSGGPLVCKHNGMWRLVGITSWGEGCARREQPGVYTKVAEYMDWILEKTQSSDGKAQMQSPA

SEQ ID NO: 42456 - protein, 250 aa, Homo sapiens
  Payload ID: 8639
  Gene Symbol:
  Gene Name: Kallikrein-9  [Source:UniProtKB/Swiss-Prot
  Acc:Q9UKQ9]
  Uniprot ID: Q9UKQ9
  ENSP ID: ENSP00000250366
MKLGLLCALLSLLAGHGWADTRAIGAEECRPNSQPWQAGLFHLTRLFCGATLISDRWLLTAAHCRKPYLWVRLGEHHLWKWEGPEQLFRVTDFFPHPGFNKDLSANDHNDDIMLIRLPRQARLSPAVQPLNLSQTCVSPGMQCLISGWGAVSSPKALFPVTLQCANISILENKLCHWAYPGHISDSMLCAGLWEGGRGSCQGDSGGPLVCNGTLAGVVSGGAEPCSRPRRPAVYTSVCHYLDWIQEIMEN

SEQ ID NO: 42457 - protein, 91 aa, Homo sapiens
  Payload ID: 8639
  Gene Symbol:
  Gene Name: Kallikrein-9  [Source:UniProtKB/Swiss-Prot
  Acc:Q9UKQ9]
  ENSP ID: ENSP00000471395
VTLQCANISILENKLCHWAYPGHISDSMLCAGLWEGGRGSCQGDSGGPLVCNGTLAGVVSGGAEPCSRPRRPAVYTSVCHYLDWIQEIMEN

SEQ ID NO: 42458 - protein, 276 aa, Homo sapiens
  Payload ID: 8640
  Gene Symbol: KLK10
  Gene Name: kallikrein-related peptidase 10
  Uniprot ID: O43240
  ENSP ID: ENSP00000311746
MRAPHLHLSAASGARALAKLLPLLMAQLWAAEAALLPQNDTRLDPEAYGSPCARGSQPWQVSLFNGLSFHCAGVLVDQSWVLTAAHCGNKPLWARVGDDHLLLLQGEQLRRTTRSVVHPKYHQGSGPILPRRTDEHDLMLLKLARPVVLGPRVRALQLPYRCAQPGDQCQVAGWGTTAARRVKYNKGLTCSSITILSPKECEVFYPGVVTNNMICAGLDRGQDPCQSDSGGPLVCDETLQGILSWGVYPCGSAQHPAVYTQICKYMSWINKVIRSN

SEQ ID NO: 42459 - protein, 276 aa, Homo sapiens; identical to SEQ ID NO: 42458
  Payload ID: 8640
  Gene Symbol: KLK10
  Gene Name: kallikrein-related peptidase 10
  Uniprot ID: O43240
  ENSP ID: ENSP00000351640

SEQ ID NO: 42460 - protein, 276 aa, Homo sapiens; identical to SEQ ID NO: 42458
  Payload ID: 8640
  Gene Symbol: KLK10
  Gene Name: kallikrein-related peptidase 10
  Uniprot ID: O43240
  ENSP ID: ENSP00000375681

SEQ ID NO: 42461 - protein, 143 aa, Homo sapiens
  Payload ID: 8640
  Gene Symbol: KLK10
  Gene Name: kallikrein-related peptidase 10
  ENSP ID: ENSP00000471610
MRAPHLHLSAASGARALAKLLPLLMAQLWAAEAALLPQNDTRLDPEAYGSPCARGSQPWQVSLFNGLSFHCAGVLVDQSWVLTAAHCGNKPLWARVGDDHLLLLQGEQLRRTTRSVVHPKYHQGSGPILPRRTDEHDLMLLKL

SEQ ID NO: 42462 - protein, 43 aa, Homo sapiens
  Payload ID: 8640
  Gene Symbol: KLK10
  Gene Name: kallikrein-related peptidase 10
  ENSP ID: ENSP00000472773
MTTCCFFRESSSAGPLALLSIPSTTRAQAPSCQGERMSTISCC

SEQ ID NO: 42463 - protein, 250 aa, Homo sapiens
  Payload ID: 8641
  Gene Symbol: KLK11
  Gene Name: kallikrein-related peptidase 11
  Uniprot ID: Q9UBX7
  ENSP ID: ENSP00000324269
MRILQLILLALATGLVGGETRIIKGFECKPHSQPWQAALFEKTRLLCGATLIAPRWLLTAAHCLKPRYIVHLGQHNLQKEEGCEQTRTATESFPHPGFNNSLPNKDHRNDIMLVKMASPVSITWAVRPLTLSSRCVTAGTSCLISGWGSTSSPQLRLPHTLRCANITIIEHQKCENAYPGNITDTMVCASVQEGGKDSCQGDSGGPLVCNQSLQGIISWGQDPCAITRKPGVYTKVCKYVDWIQETMKNN

SEQ ID NO: 42464 - protein, 116 aa, Homo sapiens
  Payload ID: 8641
  Gene Symbol: KLK11
  Gene Name: kallikrein-related peptidase 11
  ENSP ID: ENSP00000324414
MQRLRWLRDWKSSGRGLTAAKEPGARSSPLQAMRILQLILLALATGLVGGETRIIKGFECKPHSQPWQAALFEKTRLLCGATLIAPRWLLTAAHCLKPWPLHSSPGAAQPPEGGGL

SEQ ID NO: 42465 - protein, 275 aa, Homo sapiens
  Payload ID: 8641
  Gene Symbol: KLK11
  Gene Name: kallikrein-related peptidase 11
  Uniprot ID: Q9UBX7
  ENSP ID: ENSP00000375680
MRILQLILLALATGLVGGETRIIKGFECKPHSQPWQAALFEKTRLLCGATLIAPRWLLTAAHCLKPWVSLTSPTHVSPDLSSSNYCLSHLSRYIVHLGQHNLQKEEGCEQTRTATESFPHPGFNNSLPNKDHRNDIMLVKMASPVSITWAVRPLTLSSRCVTAGTSCLISGWGSTSSPQLRLPHTLRCANITIIEHQKCENAYPGNITDTMVCASVQEGGKDSCQGDSGGPLVCNQSLQGIISWGQDPCAITRKPGVYTKVCKYVDWIQETMKNN

SEQ ID NO: 42466 - protein, 250 aa, Homo sapiens; identical to SEQ ID NO: 42463
  Payload ID: 8641
  Gene Symbol: KLK11
  Gene Name: kallikrein-related peptidase 11
  Uniprot ID: Q9UBX7
  ENSP ID: ENSP00000413958

SEQ ID NO: 42467 - protein, 141 aa, Homo sapiens
  Payload ID: 8641
  Gene Symbol: KLK11
  Gene Name: kallikrein-related peptidase 11
  ENSP ID: ENSP00000470113
  MOD_RES (1)..(1): Any amino acid
XNSLPNKDHRNDIMLVKMASPVSITWAVRPLTLSSRCVTAGTSCLISGWGSTSSPQLRLPHTLRCANITIIEHQKCENAYPGNITDTMVCASVQEGGKDSCQSLQGIISWGQDPCAITRKPGVYTKVCKYVDWIQETMKNN

SEQ ID NO: 42468 - protein, 170 aa, Homo sapiens
  Payload ID: 8641
  Gene Symbol: KLK11
  Gene Name: kallikrein-related peptidase 11
  ENSP ID: ENSP00000470574
MRILQLILLALATGLVGGETRIIKGFECKPHSQPWQAALFEKTRLLCGATLIAPRWLLTAAHCLKPRYIVHLGQHNLQKEEGCEQTRTATESFPHPGFNNSLPNKDHRNDIMLVKMASPVSITWAVRPLTLSSRCVTAGTSCLISGWGSTSSPQLRLPHTLRCANITIIE

SEQ ID NO: 42469 - protein, 68 aa, Homo sapiens
  Payload ID: 8641
  Gene Symbol: KLK11
  Gene Name: kallikrein-related peptidase 11
  ENSP ID: ENSP00000470783
MRILQLILLALATGLVGGETRIIKGFECKPHSQPWQAALFEKTRLLCGATLIAPRWLLTAAHCLKPRY

SEQ ID NO: 42470 - protein, 109 aa, Homo sapiens
  Payload ID: 8641
  Gene Symbol: KLK11
  Gene Name: kallikrein-related peptidase 11
  ENSP ID: ENSP00000471636
MRILQLILLALATVRLPHTLRCANITIIEHQKCENAYPGNITDTMVCASVQEGGKDSCQGDSGGPLVCNQSLQGIISWGQDPCAITRKPGVYTKVCKYVDWIQETMKNN

SEQ ID NO: 42471 - protein, 282 aa, Homo sapiens
  Payload ID: 8641
  Gene Symbol: KLK11
  Gene Name: kallikrein-related peptidase 11
  Uniprot ID: Q9UBX7
  ENSP ID: ENSP00000473047
MQRLRWLRDWKSSGRGLTAAKEPGARSSPLQAMRILQLILLALATGLVGGETRIIKGFECKPHSQPWQAALFEKTRLLCGATLIAPRWLLTAAHCLKPRYIVHLGQHNLQKEEGCEQTRTATESFPHPGFNNSLPNKDHRNDIMLVKMASPVSITWAVRPLTLSSRCVTAGTSCLISGWGSTSSPQLRLPHTLRCANITIIEHQKCENAYPGNITDTMVCASVQEGGKDSCQGDSGGPLVCNQSLQGIISWGQDPCAITRKPGVYTKVCKYVDWIQETMKNN

SEQ ID NO: 42472 - protein, 254 aa, Homo sapiens
  Payload ID: 8642
  Gene Symbol: KLK12
  Gene Name: kallikrein-related peptidase 12
  Uniprot ID: Q9UKR0
  ENSP ID: ENSP00000250351
MGLSIFLLLCVLGLSQAATPKIFNGTECGRNSQPWQVGLFEGTSLRCGGVLIDHRWVLTAAHCSGSRYWVRLGEHSLSQLDWTEQIRHSGFSVTHPGYLGASTSHEHDLRLLRLRLPVRVTSSVQPLPLPNDCATAGTECHVSGWGITNHPRNPFPDLLQCLNLSIVSHATCHGVYPGRITSNMVCAGGVPGQDACQGDSGGPLVCGGVLQGLVSWGSVGPCGQDGIPGVYTYICNSTLVGLGTSWNFNSCQPF

SEQ ID NO: 42473 - protein, 248 aa, Homo sapiens
  Payload ID: 8642
  Gene Symbol: KLK12
  Gene Name: kallikrein-related peptidase 12
  Uniprot ID: Q9UKR0
  ENSP ID: ENSP00000324181
MGLSIFLLLCVLGLSQAATPKIFNGTECGRNSQPWQVGLFEGTSLRCGGVLIDHRWVLTAAHCSGSRYWVRLGEHSLSQLDWTEQIRHSGFSVTHPGYLGASTSHEHDLRLLRLRLPVRVTSSVQPLPLPNDCATAGTECHVSGWGITNHPRNPFPDLLQCLNLSIVSHATCHGVYPGRITSNMVCAGGVPGQDACQGDSGGPLVCGGVLQGLVSWGSVGPCGQDGIPGVYTYICKYVDWIRMIMRNN

SEQ ID NO: 42474 - protein, 111 aa, Homo sapiens
  Payload ID: 8642
  Gene Symbol: KLK12
  Gene Name: kallikrein-related peptidase 12
  Uniprot ID: Q9UKR0
  ENSP ID: ENSP00000434036
MGLSIFLLLCVLGLSQAATPKIFNGTECGRNSQPWQVGLFEGTSLRCGGVLIDHRWVLTAAHCSGRPIPGSAPVPQPLHRLPCHLPWCVSRENHEQHGVCRRRPGAGCLPG

SEQ ID NO: 42475 - protein, 79 aa, Homo sapiens
  Payload ID: 8642
  Gene Symbol: KLK12
  Gene Name: kallikrein-related peptidase 12
  ENSP ID: ENSP00000434339
MGLSIFLLLCVLGEFSRSRERAGLRLDPFTPMRRPHHPPHLSSGPQPGGEEERGFLCASIYLQLSGAQPGSHTEDFQWH

SEQ ID NO: 42476 - protein, 79 aa, Homo sapiens; identical to SEQ ID NO: 42475
  Payload ID: 8642
  Gene Symbol: KLK12
  Gene Name: kallikrein-related peptidase 12
  ENSP ID: ENSP00000434604

SEQ ID NO: 42477 - protein, 177 aa, Homo sapiens
  Payload ID: 8642
  Gene Symbol: KLK12
  Gene Name: kallikrein-related peptidase 12
  ENSP ID: ENSP00000436121
MGLSIFLLLCVLGLSQAATPKIFNGTECGRNSQPWQVGLFEGTSLRCGGVLIDHRWVLTAAHCSGSRYWVRLGEHSLSQLDWTEQIRHSGFSVTHPGYLGASTSHEHDLRLLRLRLPVRVTSSVQPLPLPNDCATAGTECHVSGWGITNHPRSKGPRARGQGSGWVQVWDAGREVES

SEQ ID NO: 42478 - protein, 248 aa, Homo sapiens; identical to SEQ ID NO: 42473
  Payload ID: 8642
  Gene Symbol: KLK12
  Gene Name: kallikrein-related peptidase 12
  Uniprot ID: Q9UKR0
  ENSP ID: ENSP00000436458

SEQ ID NO: 42479 - protein, 99 aa, Homo sapiens
  Payload ID: 8643
  Gene Symbol: KLK13
  Gene Name: kallikrein-related peptidase 13
  ENSP ID: ENSP00000156476
MWPLALVIASLTLALSGGVSQESSKVLNTNGTSGFLPGGYTCFPHSQPWQAALLVQGRLLCGGVLVHPKWVLTAAHCLKEGLKVYLGKHALGRVEAGEQ

SEQ ID NO: 42480 - protein, 125 aa, Homo sapiens
  Payload ID: 8643
  Gene Symbol: KLK13
  Gene Name: kallikrein-related peptidase 13
  Uniprot ID: Q9UKR3
  ENSP ID: ENSP00000334079
MWPLALVIASLTLALSGVNYPKTLQCANIQLRSDEECRQVYPGKITDNMLCAGTKEGGKDSCEGDSGGPLVCNRTLYGIVSWGDFPCGQPDRPGVYTRVSRYVLWIRETIRKYETQQQKWLKGPQ

SEQ ID NO: 42481 - protein, 98 aa, Homo sapiens
  Payload ID: 8643
  Gene Symbol: KLK13
  Gene Name: kallikrein-related peptidase 13
  ENSP ID: ENSP00000365995
MGLIYKCLPEKVTVNIETRCLPGVFQGSQHQWDQWVSPRWLHLLPPLSALAGCPTSARAATLWGSPGPPQMGPHCRTLSKGGAQSLPRQARPRACGSW

SEQ ID NO: 42482 - protein, 93 aa, Homo sapiens
  Payload ID: 8643
  Gene Symbol: KLK13
  Gene Name: kallikrein-related peptidase 13
  ENSP ID: ENSP00000392640
MWPLALVIASLTLALSGGEDFKEPSQGPRDVMAASRPEAFPKGLTLEPRPEKGGICGCLAPGTILGLKVGWLFSSGDTPWIHARATPECHTLG

SEQ ID NO: 42483 - protein, 204 aa, Homo sapiens
  Payload ID: 8643
  Gene Symbol: KLK13
  Gene Name: kallikrein-related peptidase 13
  ENSP ID: ENSP00000470245
MWPLALVIASLTLALSGGVSQESSKVLNTNGTSGFLPGGYTCFPHSQPWQAALLVQGRLLCGGVLVHPKWVLTAAHCLKEGLKVYLGKHALGRVEAVNYPKTLQCANIQLRSDEECRQVYPGKITDNMLCAGTKEGGKDSCEGDSGGPLVCNRTLYGIVSWGDFPCGQPDRPGVYTRVSRYVLWIRETIRKYETQQQKWLKGPQ

SEQ ID NO: 42484 - protein, 277 aa, Homo sapiens
  Payload ID: 8643
  Gene Symbol: KLK13
  Gene Name: kallikrein-related peptidase 13
  Uniprot ID: Q9UKR3
  ENSP ID: ENSP00000470555
MWPLALVIASLTLALSGGVSQESSKVLNTNGTSGFLPGGYTCFPHSQPWQAALLVQGRLLCGGVLVHPKWVLTAAHCLKEGLKVYLGKHALGRVEAGEQVREVVHSIPHPEYRRSPTHLNHDHDIMLLELQSPVQLTGYIQTLPLSHNNRLTPGTTCRVSGWGTTTSPQVNYPKTLQCANIQLRSDEECRQVYPGKITDNMLCAGTKEGGKDSCEGDSGGPLVCNRTLYGIVSWGDFPCGQPDRPGVYTRVSRYVLWIRETIRKYETQQQKWLKGPQ

SEQ ID NO: 42485 - protein, 98 aa, Homo sapiens; identical to SEQ ID NO: 42481
  Payload ID: 8643
  Gene Symbol: KLK13
  Gene Name: kallikrein-related peptidase 13
  ENSP ID: ENSP00000470931

SEQ ID NO: 42486 - protein, 180 aa, Homo sapiens
  Payload ID: 8643
  Gene Symbol: KLK13
  Gene Name: kallikrein-related peptidase 13
  ENSP ID: ENSP00000472248
MWPLALVIASLTLALSGGVSQESSKVLNTNGTSGFLPGGYTCFPHSQPWQAALLVQGRLLCGGVLVHPKWVLTAAHCLKEGLKVYLGKHALGRVEAGEQVREVVHSIPHPEYRRSPTHLNHDHDIMLLELQSPVQLTGYIQTLPLSHNNRLTPGTTCRVSGWGTTTSPQGMHPHRWPEAP

SEQ ID NO: 42487 - protein, 93 aa, Homo sapiens; identical to SEQ ID NO: 42482
  Payload ID: 8643
  Gene Symbol: KLK13
  Gene Name: kallikrein-related peptidase 13
  ENSP ID: ENSP00000472596

SEQ ID NO: 42488 - protein, 267 aa, Homo sapiens
  Payload ID: 8644
  Gene Symbol: KLK14
  Gene Name: kallikrein-related peptidase 14
  Uniprot ID: Q9P0G3
  ENSP ID: ENSP00000156499
MSLRVLGSGTWPSAPKMFLLLTALQVLAIAMTQSQEDENKIIGGHTCTRSSQPWQAALLAGPRRRFLCGGALLSGQWVITAAHCGRPILQVALGKHNLRRWEATQQVLRVVRQVTHPNYNSRTHDNDLMLLQLQQPARIGRAVRPIEVTQACASPGTSCRVSGWGTISSPIARYPASLQCVNINISPDEVCQKAYPRTITPGMVCAGVPQGGKDSCQGDSGGPLVCRGQLQGLVSWGMERCALPGYPGVYTNLCKYRSWIEETMRDK

SEQ ID NO: 42489 - protein, 267 aa, Homo sapiens; identical to SEQ ID NO: 42488
  Payload ID: 8644
  Gene Symbol: KLK14
  Gene Name: kallikrein-related peptidase 14
  Uniprot ID: Q9P0G3
  ENSP ID: ENSP00000375678

SEQ ID NO: 42490 - protein, 255 aa, Homo sapiens
  Payload ID: 8645
  Gene Symbol: KLK15
  Gene Name: kallikrein-related peptidase 15
  Uniprot ID: Q9H2R5
  ENSP ID: ENSP00000314783
MWLLLTLSFLLASTAQDGDKLLEGDECAPHSQPWQVALYERGRFNCGASLISPHWVLSAAHCQSRFMRVRLGEHNLRKRDGPEQLRTTSRVIPHPRYEARSHRNDIMLLRLVQPARLNPQVRPAVLPTRCPHPGEACVVSGWGLVSHNEPGTAGSPRSQVSLPDTLHCANISIISDTSCDKSYPGRLTNTMVCAGAEGRGAESCEGDSGGPLVCGGILQGIVSWGDVPCDNTTKPGVYTKVCHYLEWIRETMKRN

SEQ ID NO: 42491 - protein, 120 aa, Homo sapiens
  Payload ID: 8645
  Gene Symbol: KLK15
  Gene Name: kallikrein-related peptidase 15
  ENSP ID: ENSP00000468856
MWLLLTLSFLLASTAQDGDKLLEGDECAPHSQPWQVALYERGRFNCGASLISPHWVLSAAHCQSRFMRVRLGEHNLRKRDGPEQLRTTSRVIPHPRYEARSHRNDIMLLRLVQPARLNPQ

SEQ ID NO: 42492 - protein, 256 aa, Homo sapiens
  Payload ID: 8645
  Gene Symbol: KLK15
  Gene Name: kallikrein-related peptidase 15
  Uniprot ID: Q9H2R5
  ENSP ID: ENSP00000469315
MWLLLTLSFLLASTAAQDGDKLLEGDECAPHSQPWQVALYERGRFNCGASLISPHWVLSAAHCQSRFMRVRLGEHNLRKRDGPEQLRTTSRVIPHPRYEARSHRNDIMLLRLVQPARLNPQVRPAVLPTRCPHPGEACVVSGWGLVSHNEPGTAGSPRSQVSLPDTLHCANISIISDTSCDKSYPGRLTNTMVCAGAEGRGAESCEGDSGGPLVCGGILQGIVSWGDVPCDNTTKPGVYTKVCHYLEWIRETMKRN

SEQ ID NO: 42493 - protein, 160 aa, Homo sapiens
  Payload ID: 8645
  Gene Symbol: KLK15
  Gene Name: kallikrein-related peptidase 15
  ENSP ID: ENSP00000471164
MWLLLTLSFLLASTAQDGDKLLEGDECAPHSQPWQVALYERGRFNCGASLISPHWVLSAAHCQSRFMRVRLGEHNLRKRDGPEQLRTTSRVIPHPRYEARSHRNDIMLLRLVQPARLNPQVRPAVLPTRCPHPGEACVVSGWGLVSHNEPGTAGSPRSQG

SEQ ID NO: 42494 - protein, 43 aa, Homo sapiens
  Payload ID: 8645
  Gene Symbol: KLK15
  Gene Name: kallikrein-related peptidase 15
  ENSP ID: ENSP00000472523
MRVRLGEHNLRKRDGPEQLRTTSRVIPHPRYEARSHRNDIMLL

SEQ ID NO: 42495 - protein, 261 aa, Homo sapiens
  Payload ID: 8646
  Gene Symbol: KLK2
  Gene Name: kallikrein-related peptidase 2
  Uniprot ID: P20151
  ENSP ID: ENSP00000313581
MWDLVLSIALSVGCTGAVPLIQSRIVGGWECEKHSQPWQVAVYSHGWAHCGGVLVHPQWVLTAAHCLKKNSQVWLGRHNLFEPEDTGQRVPVSHSFPHPLYNMSLLKHQSLRPDEDSSHDLMLLRLSEPAKITDVVKVLGLPTQEPALGTTCYASGWGSIEPEEFLRPRSLQCVSLHLLSNDMCARAYSEKVTEFMLCAGLWTGGKDTCGGDSGGPLVCNGVLQGITSWGPEPCALPEKPAVYTKVVHYRKWIKDTIAANP

SEQ ID NO: 42496 - protein, 223 aa, Homo sapiens
  Payload ID: 8646
  Gene Symbol: KLK2
  Gene Name: kallikrein-related peptidase 2
  Uniprot ID: P20151
  ENSP ID: ENSP00000350748
MWDLVLSIALSVGCTGAVPLIQSRIVGGWECEKHSQPWQVAVYSHGWAHCGGVLVHPQWVLTAAHCLKKNSQVWLGRHNLFEPEDTGQRVPVSHSFPHPLYNMSLLKHQSLRPDEDSSHDLMLLRLSEPAKITDVVKVLGLPTQEPALGTTCYASGWGSIEPEEFLRPRSLQCVSLHLLSNDMCARAYSEKVTEFMLCAGLWTGGKDTCGVSHPYSQHLEGKG

SEQ ID NO: 42497 - protein, 159 aa, Homo sapiens
  Payload ID: 8646
  Gene Symbol: KLK2
  Gene Name: kallikrein-related peptidase 2
  Uniprot ID: P20151
  ENSP ID: ENSP00000375686
MSLLKHQSLRPDEDSSHDLMLLRLSEPAKITDVVKVLGLPTQEPALGTTCYASGWGSIEPEEFLRPRSLQCVSLHLLSNDMCARAYSEKVTEFMLCAGLWTGGKDTCGGDSGGPLVCNGVLQGITSWGPEPCALPEKPAVYTKVVHYRKWIKDTIAANP

SEQ ID NO: 42498 - protein, 122 aa, Homo sapiens
  Payload ID: 8646
  Gene Symbol: KLK2
  Gene Name: kallikrein-related peptidase 2
  ENSP ID: ENSP00000469318
MWDLVLSIALSVGCTGAVPLIQSRIVGGWECEKHSQPWQVAVYSHGWAHCGGVLVHPQWVLTAAHCLKKACQDHRCCEGPGPAHPGASTGDHLLRLRLGQHRTRGVLAPQESSVCEPPSPVQ

SEQ ID NO: 42499 - protein, 49 aa, Homo sapiens
  Payload ID: 8646
  Gene Symbol: KLK2
  Gene Name: kallikrein-related peptidase 2
  ENSP ID: ENSP00000469770
MWDLVLSIALSVGCTGIARSGWVGTTCLSLKTQARGSLSATASHTRSTI

SEQ ID NO: 42500 - protein, 49 aa, Homo sapiens; identical to SEQ ID NO: 42499
  Payload ID: 8646
  Gene Symbol: KLK2
  Gene Name: kallikrein-related peptidase 2
  ENSP ID: ENSP00000471014

SEQ ID NO: 42501 - protein, 164 aa, Homo sapiens
  Payload ID: 8646
  Gene Symbol: KLK2
  Gene Name: kallikrein-related peptidase 2
  Uniprot ID: P20151
  ENSP ID: ENSP00000471214
MWDLVLSIALSVGCTGAVPLIQSRIVGGWECEKHSQPWQVAVYSHGWAHCGGVLVHPQWVLTAAHCLKKNSQVWLGRHNLFEPEDTGQRVPVSHSFPHPLYNMSLLKHQSLRPDEDSSHDLMLLRLSEPAKITDVVKVLGLPTQEPALGTTCYASGWGSIEPEE

SEQ ID NO: 42502 - protein, 51 aa, Homo sapiens
  Payload ID: 8646
  Gene Symbol: KLK2
  Gene Name: kallikrein-related peptidase 2
  ENSP ID: ENSP00000471321
  MOD_RES (1)..(1): Any amino acid
XEKVTEFMLCAGLWTGGKDTCGHNSPIPVLSTCLLGTCYVTSIAVDPGKQQ

SEQ ID NO: 42503 - protein, 43 aa, Homo sapiens
  Payload ID: 8646
  Gene Symbol: KLK2
  Gene Name: kallikrein-related peptidase 2
  ENSP ID: ENSP00000471323
MSLLKHQSLRPDEDSSHDLMLLRLSEPAKITDVVKVLGLPTQE

SEQ ID NO: 42504 - protein, 184 aa, Homo sapiens
  Payload ID: 8646
  Gene Symbol: KLK2
  Gene Name: kallikrein-related peptidase 2
  ENSP ID: ENSP00000471725
  MOD_RES (1)..(1): Any amino acid
XPDEDSSHDLMLLRLSEPAKITDVVKVLGLPTQEPALGTTCYASGWGSIEPEEFLRPRSLQCVSLHLLSNDMCARAYSEKVTEFMLCAGLWTGGKDTCGESGAVDGAGQKKDRAWLRVILGVHLSVMVCFKVSHHGALSHVPCLKSLLCTPRWCITGSGSRTPSQPTPECPCPTPTSSKFKSTS

SEQ ID NO: 42505 - protein, 69 aa, Homo sapiens
  Payload ID: 8646
  Gene Symbol: KLK2
  Gene Name: kallikrein-related peptidase 2
  ENSP ID: ENSP00000472095
MWDLVLSIALSVGCTGAVPLIQSRIVGGWECEKHSQPWQVAVYSHGWAHCGGVLVHPQWVLTAAHCLKK

SEQ ID NO: 42506 - protein, 49 aa, Homo sapiens; identical to SEQ ID NO: 42499
  Payload ID: 8646
  Gene Symbol: KLK2
  Gene Name: kallikrein-related peptidase 2
  ENSP ID: ENSP00000472499

SEQ ID NO: 42507 - protein, 22 aa, Homo sapiens
  Payload ID: 8646
  Gene Symbol: KLK2
  Gene Name: kallikrein-related peptidase 2
  ENSP ID: ENSP00000472852
MSLLKHQSLRPDEDSSHDLMLL

SEQ ID NO: 42508 - protein, 261 aa, Homo sapiens
  Payload ID: 8647
  Gene Symbol: KLK3
  Gene Name: kallikrein-related peptidase 3
  Uniprot ID: P07288
  ENSP ID: ENSP00000314151
MWVPVVFLTLSVTWIGAAPLILSRIVGGWECEKHSQPWQVLVASRGRAVCGGVLVHPQWVLTAAHCIRNKSVILLGRHSLFHPEDTGQVFQVSHSFPHPLYDMSLLKNRFLRPGDDSSHDLMLLRLSEPAELTDAVKVMDLPTQEPALGTTCYASGWGSIEPEEFLTPKKLQCVDLHVISNDVCAQVHPQKVTKFMLCAGRWTGGKSTCSGDSGGPLVCNGVLQGITSWGSEPCALPERPSLYTKVVHYRKWIKDTIVANP

SEQ ID NO: 42509 - protein, 238 aa, Homo sapiens
  Payload ID: 8647
  Gene Symbol: KLK3
  Gene Name: kallikrein-related peptidase 3
  Uniprot ID: P07288
  ENSP ID: ENSP00000353829
MWVPVVFLTLSVTWIGAAPLILSRIVGGWECEKHSQPWQVLVASRGRAVCGGVLVHPQWVLTAAHCIRNKSVILLGRHSLFHPEDTGQVFQVSHSFPHPLYDMSLLKNRFLRPGDDSSHDLMLLRLSEPAELTDAVKVMDLPTQEPALGTTCYASGWGSIEPEEFLTPKKLQCVDLHVISNDVCAQVHPQKVTKFMLCAGRWTGGKSTCSWVILITELTMPALPMVLHGSLVPWRGGV

SEQ ID NO: 42510 - protein, 90 aa, Homo sapiens
  Payload ID: 8647
  Gene Symbol: KLK3
  Gene Name: kallikrein-related peptidase 3
  ENSP ID: ENSP00000393628
MWVPVVFLTLSVTWIGAAPLILSRIVGGWECEKHSQPWQVLVASRGRAVCGGVLVHPQWVLTAAHCIRNKSVILLGRHSLFHPEDTGQAR

SEQ ID NO: 42511 - protein, 124 aa, Homo sapiens
  Payload ID: 8647
  Gene Symbol: KLK3
  Gene Name: kallikrein-related peptidase 3
  ENSP ID: ENSP00000468912
MWVPVVFLTLSVTWIGAAPLILSRIVGGWECEKHSQPWQVLVASRGRAVCGGVLVHPQWVLTAAHCIRNKSVILLGRHSLFHPEDTGQVFQVSHSFPHPLYDMSLLKNRFLRPGDDSTLNQRSS

SEQ ID NO: 42512 - protein, 172 aa, Homo sapiens
  Payload ID: 8647
  Gene Symbol: KLK3
  Gene Name: kallikrein-related peptidase 3
  ENSP ID: ENSP00000470523
MWVPVVFLTLAVCGGVLVHPQWVLTAAHCIRNKSVILLGRHSLFHPEDTGQVFQVSHSFPHPLYDMSLLKNRFLRPGDDSSHDLMLLRLSEPAELTDAVKVMDLPTQEPALGTTCYASGWGSIEPEEFLTPKKLQCVDLHVISNDVCAQVHPQKVTKFMLCAGRWTGGKSTC

SEQ ID NO: 42513 - protein, 218 aa, Homo sapiens
  Payload ID: 8647
  Gene Symbol: KLK3
  Gene Name: kallikrein-related peptidase 3
  Uniprot ID: P07288
  ENSP ID: ENSP00000471155
MWVPVVFLTLSVTWIGAAPLILSRIVGGWECEKHSQPWQVLVASRGRAVCGGVLVHPQWVLTAAHCIRKPGDDSSHDLMLLRLSEPAELTDAVKVMDLPTQEPALGTTCYASGWGSIEPEEFLTPKKLQCVDLHVISNDVCAQVHPQKVTKFMLCAGRWTGGKSTCSGDSGGPLVCNGVLQGITSWGSEPCALPERPSLYTKVVHYRKWIKDTIVANP

SEQ ID NO: 42514 - protein, 104 aa, Homo sapiens
  Payload ID: 8647
  Gene Symbol: KLK3
  Gene Name: kallikrein-related peptidase 3
  ENSP ID: ENSP00000471648
MWVPVVFLTLSVTWIGERGHGWGDAGEGASPDCQAEALSPPTQHPSPDRELGSFLSLPAPLQAHTPSPSILQQSSLPHQVPAPSHLPQNFLPIAQPAPCSQLLY

SEQ ID NO: 42515 - protein, 262 aa, Homo sapiens
  Payload ID: 8647
  Gene Symbol: KLK3
  Gene Name: kallikrein-related peptidase 3
  ENSP ID: ENSP00000471827
  MOD_RES (1)..(1): Any amino acid
XFLTLSVTWIGAAPLILSRIVGGWECEKHSQPWQVLVASRGRAVCGGVLVHPQWVLTAAHCIRNKSVILLGRHSLFHPEDTGQVFQVSHSFPHPLYDMSLLKNRFLRPGDDSSHDLMLLRLSEPAELTDAVKVMDLPTQEPALGTTCYASGWGSIEPEECTPGPDVLTPKKLQCVDLHVISNDVCAQVHPQKVTKFMLCAGRWTGGKSTCSGDSGGPLVCNGVLQGITSWGSEPCALPERPSLYTKVVHYRKWIKDTIVANP

SEQ ID NO: 42516 - protein, 172 aa, Homo sapiens
  Payload ID: 8647
  Gene Symbol: KLK3
  Gene Name: kallikrein-related peptidase 3
  ENSP ID: ENSP00000472213
MWVPVVFLTLSVTWIAPPLQVLVASRGRAVCGGVLVHPQWVLTAAHCIRNKSVILLGRHSLFHPEDTGQVFQVSHSFPHPLYDMSLLKNRFLRPGDDSSHDLMLLRLSEPAELTDAVKVMDLPTQEPALGTTCYASGWGSIEPEEFLTPKKLQCVDLHVISNDVCAQVHPQK

SEQ ID NO: 42517 - protein, 195 aa, Homo sapiens
  Payload ID: 8647
  Gene Symbol: KLK3
  Gene Name: kallikrein-related peptidase 3
  ENSP ID: ENSP00000472411
MWVPVVFLTLSVTWIGAAPLILSRIVGGWECEKHSQPWQVLVASRGRAVCGGVLVHPQWVLTAAHCIRKPGDDSSHDLMLLRLSEPAELTDAVKVMDLPTQEPALGTTCYASGWGSIEPEEFLTPKKLQCVDLHVISNDVCAQVHPQKVTKFMLCAGRWTGGKSTCSWVILITELTMPALPMVLHGSLVPWRGGV

SEQ ID NO: 42518 - protein, 227 aa, Homo sapiens
  Payload ID: 8647
  Gene Symbol: KLK3
  Gene Name: kallikrein-related peptidase 3
  Uniprot ID: P07288
  ENSP ID: ENSP00000472907
MWVPVVFLTLSVTWIGAAPLILSRIVGGWECEKHSQPWQVLVASRGRAVCGGVLVHPQWVLTAAHCIRNKSVILLGRHSLFHPEDTGQVFQVSHSFPHPLYDMSLLKNRFLRPGDDSSHDLMLLRLSEPAELTDAVKVMDLPTQEPALGTTCYASGWGSIEPEEFLTPKKLQCVDLHVISNDVCAQVHPQKVTKFMLCAGRWTGGKSTCSVSHPYSQDLEGKGEWGP

SEQ ID NO: 42519 - protein, 220 aa, Homo sapiens
  Payload ID: 8647
  Gene Symbol: KLK3
  Gene Name: kallikrein-related peptidase 3
  ENSP ID: ENSP00000483513
MWVPVVFLTLSVTWIGAAPLILSRIVGGWECEKHSQPWQVLVASRGRAVCGGVLVHPQWVLTAAHCIRNKSVILLGRHSLFHPEDTGQVFQVSHSFPHPLYDMSLLKNRFLRPGDDSSIEPEEFLTPKKLQCVDLHVISNDVCAQVHPQKVTKFMLCAGRWTGGKSTCSGDSGGPLVCNGVLQGITSWGSEPCALPERPSLYTKVVHYRKWIKDTIVANP

SEQ ID NO: 42520 - protein, 254 aa, Homo sapiens
  Payload ID: 8648
  Gene Symbol: KLK4
  Gene Name: kallikrein-related peptidase 4
  ENSP ID: ENSP00000326159
MATAGNPWGWFLGYLILGVAGSLVSGSCSQIINGEDCSPHSQPWQAALVMENELFCSGVLVHPQWVLSAAHCFQNSYTIGLGLHSLEADQEPGSQMVEASLSVRHPEYNRPLLANDLMLIKLDESVSESDTIRSISIASQCPTAGNSCLVSGWGLLANGRMPTVLQCVNVSVVSEEVCSKLYDPLYHPSMFCAGGGQDQKDSCNGDSGGPLICNGYLQGLVSFGKAPCGQVGVPGVYTNLCKFTEWIEKTVQAS

SEQ ID NO: 42521 - protein, 110 aa, Homo sapiens
  Payload ID: 8648
  Gene Symbol: KLK4
  Gene Name: kallikrein-related peptidase 4
  Uniprot ID: Q9Y5K2
  ENSP ID: ENSP00000399448
MENELFCSGVLVHPQWVLSAAHCFQNSYTIGLGLHSLEADQEPGSQMVEASLSVRHPEYNRPLLANDLMLIKLDESVSESDTIRSISIASQCPTAGNSCLVSGWGLLANG

SEQ ID NO: 42522 - protein, 71 aa, Homo sapiens
  Payload ID: 8648
  Gene Symbol: KLK4
  Gene Name: kallikrein-related peptidase 4
  ENSP ID: ENSP00000469769
MVEASLSVRHPEYNRPLLANDLMLIKLDESVSESDTIRSISIASQCPTAGNSCLVSGWGLLANECLPCCSA

SEQ ID NO: 42523 - protein, 71 aa, Homo sapiens; identical to SEQ ID NO: 42522
  Payload ID: 8648
  Gene Symbol: KLK4
  Gene Name: kallikrein-related peptidase 4
  ENSP ID: ENSP00000469963

SEQ ID NO: 42524 - protein, 75 aa, Homo sapiens
  Payload ID: 8648
  Gene Symbol: KLK4
  Gene Name: kallikrein-related peptidase 4
  ENSP ID: ENSP00000472091
MATAGNPWGWFLGYLILGVAGSLVSGSCSQIINGEDCSPHSQPWQAALVMENELFCSGVLVHPQWVLSAAHCFQK

SEQ ID NO: 42525 - protein, 293 aa, Homo sapiens
  Payload ID: 8649
  Gene Symbol: KLK5
  Gene Name: kallikrein-related peptidase 5
  Uniprot ID: Q9Y337
  ENSP ID: ENSP00000337733
MATARPPWMWVLCALITALLLGVTEHVLANNDVSCDHPSNTVPSGSNQDLGAGAGEDARSDDSSSRIINGSDCDMHTQPWQAALLLRPNQLYCGAVLVHPQWLLTAAHCRKKVFRVRLGHYSLSPVYESGQQMFQGVKSIPHPGYSHPGHSNDLMLIKLNRRIRPTKDVRPINVSSHCPSAGTKCLVSGWGTTKSPQVHFPKVLQCLNISVLSQKRCEDAYPRQIDDTMFCAGDKAGRDSCQGDSGGPVVCNGSLQGLVSWGDYPCARPNRPGVYTNLCKFTKWIQETIQANS

SEQ ID NO: 42526 - protein, 293 aa, Homo sapiens; identical to SEQ ID NO: 42525
  Payload ID: 8649
  Gene Symbol: KLK5
  Gene Name: kallikrein-related peptidase 5
  Uniprot ID: Q9Y337
  ENSP ID: ENSP00000375685

SEQ ID NO: 42527 - protein, 205 aa, Homo sapiens
  Payload ID: 8649
  Gene Symbol: KLK5
  Gene Name: kallikrein-related peptidase 5
  ENSP ID: ENSP00000469439
MATARPPWMWVLCALITALLLGVTEHVLANNDVSCDHPSNTVPSGSNQDLGAGAGEDARSDDSSSRIINGSDCDMHTQPWQAALLLRPNQLYCGAVLVHPQWLLTAAHCRKKVFRVRLGHYSLSPVYESGQQMFQGVKSIPHPGYSHPGHSNDLMLIKLNRRIRPTKDVRPINVSSHCPSAGTKCLVSGWGTTKSPQVHFPKVLQ

SEQ ID NO: 42528 - protein, 293 aa, Homo sapiens; identical to SEQ ID NO: 42525
  Payload ID: 8649
  Gene Symbol: KLK5
  Gene Name: kallikrein-related peptidase 5
  Uniprot ID: Q9Y337
  ENSP ID: ENSP00000471966

SEQ ID NO: 42529 - protein, 244 aa, Homo sapiens
  Payload ID: 8650
  Gene Symbol: KLK6
  Gene Name: kallikrein-related peptidase 6
  Uniprot ID: Q92876
  ENSP ID: ENSP00000309148
MKKLMVVLSLIAAAWAEEQNKLVHGGPCDKTSHPYQAALYTSGHLLCGGVLIHPLWVLTAAHCKKPNLQVFLGKHNLRQRESSQEQSSVVRAVIHPDYDAASHDQDIMLLRLARPAKLSELIQPLPLERDCSANTTSCHILGWGKTADGDFPDTIQCAYIHLVSREECEHAYPGQITQNMLCAGDEKYGKDSCQGDSGGPLVCGDHLRGLVSWGNIPCGSKEKPGVYTNVCRYTNWIQKTIQAK

SEQ ID NO: 42530 - protein, 244 aa, Homo sapiens; identical to SEQ ID NO: 42529
  Payload ID: 8650
  Gene Symbol: KLK6
  Gene Name: kallikrein-related peptidase 6
  Uniprot ID: Q92876
  ENSP ID: ENSP00000366047

SEQ ID NO: 42531 - protein, 120 aa, Homo sapiens
  Payload ID: 8650
  Gene Symbol: KLK6
  Gene Name: kallikrein-related peptidase 6
  ENSP ID: ENSP00000366049
MKKLMVVLSLIAAAWAEEQNKLVHGGPCDKTSHPYQAALYTSGHLLCGGVLIHPLWVLTAAHCKKPVILGVRWYVETTSEALCHGVTSPVDQRRSQESTPTSADTRTGSKKPFRPSDPDM

SEQ ID NO: 42532 - protein, 137 aa, Homo sapiens
  Payload ID: 8650
  Gene Symbol: KLK6
  Gene Name: kallikrein-related peptidase 6
  Uniprot ID: Q92876
  ENSP ID: ENSP00000375684
MLLRLARPAKLSELIQPLPLERDCSANTTSCHILGWGKTADGDFPDTIQCAYIHLVSREECEHAYPGQITQNMLCAGDEKYGKDSCQGDSGGPLVCGDHLRGLVSWGNIPCGSKEKPGVYTNVCRYTNWIQKTIQAK

SEQ ID NO: 42533 - protein, 40 aa, Homo sapiens
  Payload ID: 8650
  Gene Symbol: KLK6
  Gene Name: kallikrein-related peptidase 6
  Uniprot ID: Q92876
  ENSP ID: ENSP00000469630
MKKLMVVLSLIAAGIFRSSWGSITFGKGRVPRSRVLLSGL

SEQ ID NO: 42534 - protein, 69 aa, Homo sapiens
  Payload ID: 8650
  Gene Symbol: KLK6
  Gene Name: kallikrein-related peptidase 6
  ENSP ID: ENSP00000469702
MADPATRHLTPTKLPSTPRATCSVVGSLSIHCGSSQLPTAKNRIFRSSWGSITFGKGRVPRSRVLLSGL

SEQ ID NO: 42535 - protein, 244 aa, Homo sapiens; identical to SEQ ID NO: 42529
  Payload ID: 8650
  Gene Symbol: KLK6
  Gene Name: kallikrein-related peptidase 6
  Uniprot ID: Q92876
  ENSP ID: ENSP00000470482

SEQ ID NO: 42536 - protein, 40 aa, Homo sapiens; identical to SEQ ID NO: 42533
  Payload ID: 8650
  Gene Symbol: KLK6
  Gene Name: kallikrein-related peptidase 6
  Uniprot ID: Q92876
  ENSP ID: ENSP00000471948

SEQ ID NO: 42537 - protein, 66 aa, Homo sapiens
  Payload ID: 8651
  Gene Symbol: KLK7
  Gene Name: kallikrein-related peptidase 7
  ENSP ID: ENSP00000304791
MARSLLLPLQILLLSLALETAGEEVSTPCTWAVIRWATGELRGSRPRSHSATPATPHRPMLMTSCS

SEQ ID NO: 42538 - protein, 253 aa, Homo sapiens
  Payload ID: 8651
  Gene Symbol: KLK7
  Gene Name: kallikrein-related peptidase 7
  Uniprot ID: P49862
  ENSP ID: ENSP00000375683
MARSLLLPLQILLLSLALETAGEEAQGDKIIDGAPCARGSHPWQVALLSGNQLHCGGVLVNERWVLTAAHCKMNEYTVHLGSDTLGDRRAQRIKASKSFRHPGYSTQTHVNDLMLVKLNSQARLSSMVKKVRLPSRCEPPGTTCTVSGWGTTTSPDVTFPSDLMCVDVKLISPQDCTKVYKDLLENSMLCAGIPDSKKNACNGDSGGPLVCRGTLQGLVSWGTFPCGQPNDPGVYTQVCKFTKWINDTMKKHR

SEQ ID NO: 42539 - protein, 181 aa, Homo sapiens
  Payload ID: 8651
  Gene Symbol: KLK7
  Gene Name: kallikrein-related peptidase 7
  Uniprot ID: P49862
  ENSP ID: ENSP00000469950
MNEYTVHLGSDTLGDRRAQRIKASKSFRHPGYSTQTHVNDLMLVKLNSQARLSSMVKKVRLPSRCEPPGTTCTVSGWGTTTSPDVTFPSDLMCVDVKLISPQDCTKVYKDLLENSMLCAGIPDSKKNACNGDSGGPLVCRGTLQGLVSWGTFPCGQPNDPGVYTQVCKFTKWINDTMKKHR

SEQ ID NO: 42540 - protein, 69 aa, Homo sapiens
  Payload ID: 8651
  Gene Symbol: KLK7
  Gene Name: kallikrein-related peptidase 7
  ENSP ID: ENSP00000470084
MNEYTVHLGSDTLGDRRAQRIKASKSFRHPGYSTQTHVNDLMLVKLNSQARLSSMVKKVRLPSRCEPPG

SEQ ID NO: 42541 - protein, 253 aa, Homo sapiens; identical to SEQ ID NO: 42538
  Payload ID: 8651
  Gene Symbol: KLK7
  Gene Name: kallikrein-related peptidase 7
  Uniprot ID: P49862
  ENSP ID: ENSP00000470538

SEQ ID NO: 42542 - protein, 139 aa, Homo sapiens
  Payload ID: 8652
  Gene Symbol: KLK8
  Gene Name: kallikrein-related peptidase 8
  ENSP ID: ENSP00000291726
MLLQLRDQASLGSKVKPISLADHCTQPGQKCTVSGWGTVTSPRENFPDTLNCAEVKIFPQKKCEDAYPGQITDGMVCAGSSKGADTCQGDSGGPLVCDGALQGITSWGSDPCGRSDKPGVYTNICRYLDWIKKIIGSKG

SEQ ID NO: 42543 - protein, 32 aa, Homo sapiens
  Payload ID: 8652
  Gene Symbol: KLK8
  Gene Name: kallikrein-related peptidase 8
  Uniprot ID: O60259
  ENSP ID: ENSP00000325072
MGRPRPRAAKTWMFLLLLGGAWAGRFWRPPGV

SEQ ID NO: 42544 - protein, 119 aa, Homo sapiens
  Payload ID: 8652
  Gene Symbol: KLK8
  Gene Name: kallikrein-related peptidase 8
  Uniprot ID: O60259
  ENSP ID: ENSP00000341555
MGRPRPRAAKTWMFLLLLGGAWAENFPDTLNCAEVKIFPQKKCEDAYPGQITDGMVCAGSSKGADTCQGDSGGPLVCDGALQGITSWGSDPCGRSDKPGVYTNICRYLDWIKKIIGSKG

SEQ ID NO: 42545 - protein, 305 aa, Homo sapiens
  Payload ID: 8652
  Gene Symbol: KLK8
  Gene Name: kallikrein-related peptidase 8
  Uniprot ID: O60259
  ENSP ID: ENSP00000375682
MGRPRPRAAKTWMFLLLLGGAWAACGSLDLLTKLYAENLPCVHLNPQWPSQPSHCPRGWRSNPLPPAAGHSRAQEDKVLGGHECQPHSQPWQAALFQGQQLLCGGVLVGGNWVLTAAHCKKPKYTVRLGDHSLQNKDGPEQEIPVVQSIPHPCYNSSDVEDHNHDLMLLQLRDQASLGSKVKPISLADHCTQPGQKCTVSGWGTVTSPRENFPDTLNCAEVKIFPQKKCEDAYPGQITDGMVCAGSSKGADTCQGDSGGPLVCDGALQGITSWGSDPCGRSDKPGVYTNICRYLDWIKKIIGSKG

SEQ ID NO: 42546 - protein, 32 aa, Homo sapiens; identical to SEQ ID NO: 42543
  Payload ID: 8652
  Gene Symbol: KLK8
  Gene Name: kallikrein-related peptidase 8
  Uniprot ID: O60259
  ENSP ID: ENSP00000469278

SEQ ID NO: 42547 - protein, 260 aa, Homo sapiens
  Payload ID: 8652
  Gene Symbol: KLK8
  Gene Name: kallikrein-related peptidase 8
  Uniprot ID: O60259
  ENSP ID: ENSP00000472016
MGRPRPRAAKTWMFLLLLGGAWAGHSRAQEDKVLGGHECQPHSQPWQAALFQGQQLLCGGVLVGGNWVLTAAHCKKPKYTVRLGDHSLQNKDGPEQEIPVVQSIPHPCYNSSDVEDHNHDLMLLQLRDQASLGSKVKPISLADHCTQPGQKCTVSGWGTVTSPRENFPDTLNCAEVKIFPQKKCEDAYPGQITDGMVCAGSSKGADTCQGDSGGPLVCDGALQGITSWGSDPCGRSDKPGVYTNICRYLDWIKKIIGSKG

SEQ ID NO: 42548 - protein, 97 aa, Homo sapiens
  Payload ID: 8652
  Gene Symbol: KLK8
  Gene Name: kallikrein-related peptidase 8
  ENSP ID: ENSP00000472273
MGRPRPRAAKTWMFLLLLGGAWAGHSRAQEDKVLGGHECQPHSQPWQAALFQGQQLLCGGVLVGGNWVLTAAHCKKPKYTVRLGDHSLQNKDGPEQE

SEQ ID NO: 42549 - protein, 54 aa, Homo sapiens
  Payload ID: 8652
  Gene Symbol: KLK8
  Gene Name: kallikrein-related peptidase 8
  ENSP ID: ENSP00000473067
  MOD_RES (1)..(1): Any amino acid
XLLLLGGAWAGNTQYAWETTAYRIKMAQSKKYLWFSPSHTPATTAAMWRTTTMI

SEQ ID NO: 42550 - protein, 61 aa, Homo sapiens
  Payload ID: 8653
  Gene Symbol: KLK9
  Gene Name: kallikrein-related peptidase 9
  Uniprot ID: Q9UKQ9
  ENSP ID: ENSP00000443289
MKLGLLCALLSLLAGICGSALESTTSGNGRVRSSCSGLRTSSPTLASTRTSAPMTTMMTSC

SEQ ID NO: 42551 - protein, 250 aa, Homo sapiens; identical to SEQ ID NO: 42456
  Payload ID: 8653
  Gene Symbol: KLK9
  Gene Name: kallikrein-related peptidase 9
  Uniprot ID: Q9UKQ9
  ENSP ID: ENSP00000469417

SEQ ID NO: 42552 - protein, 436 aa, Homo sapiens
  Payload ID: 8654
  Gene Symbol: KPTN
  Gene Name: kaptin (actin binding protein)
  Uniprot ID: Q9Y664
  ENSP ID: ENSP00000337850
MMGEAAVAAGPCPLREDSFTRFSSQSNVYGLAGGAGGRGELLAATLKGKVLGFRYQDLRQKIRPVAKELQFNYIPVDAEIVSIDTFNKSPPKRGLVVGITFIKDSGDKGSPFLNIYCDYEPGSEYNLDSIAQSCLNLELQFTPFQLCHAEVQVGDQLETVFLLSGNDPAIHLYKENEGLHQFEEQPVENLFPELTNLTSSVLWLDVHNFPGTSRRLSALGCQSGYVRVAHVDQRSREVLQMWSVLQDGPISRVIVFSLSAAKETKDRPLQDEYSVLVASMLEPAVVYRDLLNRGLEDQLLLPGSDQFDSVLCSLVTDVDLDGRPEVLVATYGQELLCYKYRGPESGLPEAQHGFHLLWQRSFSSPLLAMAHVDLTGDGLQELAVVSLKGVHILQHSLIQASELVLTRLRHQVEQRRRRLQGLEDGAGAGPAENAAS

SEQ ID NO: 42553 - protein, 263 aa, Homo sapiens
  Payload ID: 8654
  Gene Symbol: KPTN
  Gene Name: kaptin (actin binding protein)
  ENSP ID: ENSP00000469446
MMGEAAVAAGPCPLREDSFTRFSSQSNVYGLAGGAGGRGELLAATLKGKVLGFRYQDLRQKIRPVAKELQFNYIPESCLNLELQFTPFQLCHAEVQVGDQLETVFLLSGNDPAIHLYKENEGLHQFEEQPVENLFPELTNLTSSVLWLDVHNFPGTSRRLSALGCQSGYVRVAHVDQRSREVLQMWSVLQDGPISRVIVFSLSAAKETKDRPLQDEYSVLVASMLEPAVVYRDLLNRGLEDQLLLPGSDQFDSVLCSLVTDVD

SEQ ID NO: 42554 - protein, 150 aa, Homo sapiens
  Payload ID: 8654
  Gene Symbol: KPTN
  Gene Name: kaptin (actin binding protein)
  ENSP ID: ENSP00000470364
MMGEAAVAAGPCPLREDSFTRFSSQSNVYGLAGGAGGRGELLAATLKGKVLGFRYQDLRQKIRPVAKELQFNYIPVDAEIVSIDTFNKSPPKRGLVVGITFIKDSGDKGSPFLNIYCDYEPGSEYNLDSIAQSCLNLELQFTPFQLCHAE

SEQ ID NO: 42555 - protein, 42 aa, Homo sapiens
  Payload ID: 8654
  Gene Symbol: KPTN
  Gene Name: kaptin (actin binding protein)
  ENSP ID: ENSP00000472291
MWSVLQDGPISRVIVFSLSAAKETKDRPLQDEYSVLVASMLE

SEQ ID NO: 42556 - protein, 876 aa, Homo sapiens
  Payload ID: 8655
  Gene Symbol: KPNB1
  Gene Name: karyopherin (importin) beta 1
  Uniprot ID: Q14974
  ENSP ID: ENSP00000290158
MELITILEKTVSPDRLELEAAQKFLERAAVENLPTFLVELSRVLANPGNSQVARVAAGLQIKNSLTSKDPDIKAQYQQRWLAIDANARREVKNYVLQTLGTETYRPSSASQCVAGIACAEIPVNQWPELIPQLVANVTNPNSTEHMKESTLEAIGYICQDIDPEQLQDKSNEILTAIIQGMRKEEPSNNVKLAATNALLNSLEFTKANFDKESERHFIMQVVCEATQCPDTRVRVAALQNLVKIMSLYYQYMETYMGPALFAITIEAMKSDIDEVALQGIEFWSNVCDEEMDLAIEASEAAEQGRPPEHTSKFYAKGALQYLVPILTQTLTKQDENDDDDDWNPCKAAGVCLMLLATCCEDDIVPHVLPFIKEHIKNPDWRYRDAAVMAFGCILEGPEPSQLKPLVIQAMPTLIELMKDPSVVVRDTAAWTVGRICELLPEAAINDVYLAPLLQCLIEGLSAEPRVASNVCWAFSSLAEAAYEAADVADDQEEPATYCLSSSFELIVQKLLETTDRPDGHQNNLRSSAYESLMEIVKNSAKDCYPAVQKTTLVIMERLQQVLQMESHIQSTSDRIQFNDLQSLLCATLQNVLRKVQHQDALQISDVVMASLLRMFQSTAGSGGVQEDALMAVSTLVEVLGGEFLKYMEAFKPFLGIGLKNYAEYQVCLAAVGLVGDLCRALQSNIIPFCDEVMQLLLENLGNENVHRSVKPQILSVFGDIALAIGGEFKKYLEVVLNTLQQASQAQVDKSDYDMVDYLNELRESCLEAYTGIVQGLKGDQENVHPDVMLVQPRVEFILSFIDHIAGDEDHTDGVVACAAGLIGDLCTAFGKDVLKLVEARPMIHELLTEGRRSKTNKAKTLATWATKELRKLKNQA

SEQ ID NO: 42557 - protein, 731 aa, Homo sapiens
  Payload ID: 8655
  Gene Symbol: KPNB1
  Gene Name: karyopherin (importin) beta 1
  Uniprot ID: Q14974
  ENSP ID: ENSP00000438253
MKESTLEAIGYICQDIDPEQLQDKSNEILTAIIQGMRKEEPSNNVKLAATNALLNSLEFTKANFDKESERHFIMQVVCEATQCPDTRVRVAALQNLVKIMSLYYQYMETYMGPALFAITIEAMKSDIDEVALQGIEFWSNVCDEEMDLAIEASEAAEQGRPPEHTSKFYAKGALQYLVPILTQTLTKQDENDDDDDWNPCKAAGVCLMLLATCCEDDIVPHVLPFIKEHIKNPDWRYRDAAVMAFGCILEGPEPSQLKPLVIQAMPTLIELMKDPSVVVRDTAAWTVGRICELLPEAAINDVYLAPLLQCLIEGLSAEPRVASNVCWAFSSLAEAAYEAADVADDQEEPATYCLSSSFELIVQKLLETTDRPDGHQNNLRSSAYESLMEIVKNSAKDCYPAVQKTTLVIMERLQQVLQMESHIQSTSDRIQFNDLQSLLCATLQNVLRKVQHQDALQISDVVMASLLRMFQSTAGSGGVQEDALMAVSTLVEVLGGEFLKYMEAFKPFLGIGLKNYAEYQVCLAAVGLVGDLCRALQSNIIPFCDEVMQLLLENLGNENVHRSVKPQILSVFGDIALAIGGEFKKYLEVVLNTLQQASQAQVDKSDYDMVDYLNELRESCLEAYTGIVQGLKGDQENVHPDVMLVQPRVEFILSFIDHIAGDEDHTDGVVACAAGLIGDLCTAFGKDVLKLVEARPMIHELLTEGRRSKTNKAKTLATWATKELRKLKNQA

SEQ ID NO: 42558 - protein, 731 aa, Homo sapiens; identical to SEQ ID NO: 42557
  Payload ID: 8655
  Gene Symbol: KPNB1
  Gene Name: karyopherin (importin) beta 1
  Uniprot ID: Q14974
  ENSP ID: ENSP00000438964

SEQ ID NO: 42559 - protein, 22 aa, Homo sapiens
  Payload ID: 8655
  Gene Symbol: KPNB1
  Gene Name: karyopherin (importin) beta 1
  ENSP ID: ENSP00000462243
  MOD_RES (1)..(1): Any amino acid
XNKAKTLATWATKELRKLKNQA

SEQ ID NO: 42560 - protein, 690 aa, Homo sapiens
  Payload ID: 8655
  Gene Symbol: KPNB1
  Gene Name: karyopherin (importin) beta 1
  ENSP ID: ENSP00000463066
  MOD_RES (1)..(1): Any amino acid
XACAEIPVNQWPELIPQLVANVTNPNSTEHMKESTLEAIGYICQDIDPEQLQDKSNEILTAIIQGMRKEEPSNNVKLAATNALLNSLEFTKANFDKESERHFIMQVVCEATQCPDTRVRVAALQNLVKIMSLYYQYMETYMGPALFADENDDDDDWNPCKAAGVCLMLLATCCEDDIVPHVLPFIKEHIKNPDWRYRDAAVMAFGCILEGPEPSQLKPLVIQAMPTLIELMKDPSVVVRDTAAWTVGRICELLPEAAINDVYLAPLLQCLIEGLSAEPRVASNVCWAFSSLAEAAYEAADVADDQEEPATYCLSSSFELIVQKLLETTDRPDGHQNNLRSSAYESLMEIVKNSAKDCYPAVQKTTLVIMERLQQVLQMESHIQSTSDRIQFNDLQSLLCATLQNVLRKVQHQDALQISDVVMASLLRMFQSTAGSGGVQEDALMAVSTLVEVLGGEFLKYMEAFKPFLGIGLKNYAEYQVCLAAVGLVGDLCRALQSNIIPFCDEVMQLLLENLGNENVHRSVKPQILSVFGDIALAIGGEFKKYLEVVLNTLQQASQAQVDKSDYDMVDYLNELRESCLEAYTGIVQGLKGDQENVHPDVMLVQPRVEFILSFIDHIAGDEDHTDGVVACAAGLIGDLCTAFGKDVLKLVEARPMIHELLTEGRRSKTNKAKTLATWATKELRKLKNQA

SEQ ID NO: 42561 - protein, 248 aa, Homo sapiens
  Payload ID: 8655
  Gene Symbol: KPNB1
  Gene Name: karyopherin (importin) beta 1
  ENSP ID: ENSP00000463190
  MOD_RES (1)..(1): Any amino acid
XLEGPEPSQLKPLVIQAMPTLIELMKDPSVVVRDTAAWTVGRICELLPEAAINDVYLAPLLQCLIEGLSAEPRVASNVCWAFSSLAEAAYEAADVADDQEEPATYCLSSSFELIVQKLLETTDSRDRVSPCWTGWSRSPDPRDPPAFAPQSARITGMSHHARPTTIFLYRMKNLGPDGHQNNLRSSAYESLMEIVKNSAKDCYPAVQKTTLVIMERLQQVLQMESHIQSTSDRIQFNDLQSLLCATLQ

SEQ ID NO: 42562 - protein, 148 aa, Homo sapiens
  Payload ID: 8655
  Gene Symbol: KPNB1
  Gene Name: karyopherin (importin) beta 1
  ENSP ID: ENSP00000464042
MELITILEKTVSPDRLELEAAQKFLERAAVENLPTFLVELSRVLANPGNSQVARVAAGLQIKNSLTSKDPDIKAQYQQRWLAIDANARREVKNYVLQTLGTETYRPSSASQCVAGIACAEIPVNQWPELIPQLVANVTNPNSTEHMKE

SEQ ID NO: 42563 - protein, 60 aa, Homo sapiens
  Payload ID: 8655
  Gene Symbol: KPNB1
  Gene Name: karyopherin (importin) beta 1
  ENSP ID: ENSP00000464200
MKESTLEAIGYICQDIDPEQLQDKSNEILTAIIQGMRKEEPSNNVKLAATNALLNSLEFT

SEQ ID NO: 42564 - protein, 538 aa, Homo sapiens
  Payload ID: 8656
  Gene Symbol: KPNA1
  Gene Name: karyopherin alpha 1 (importin alpha 5)
  Uniprot ID: P52294
  ENSP ID: ENSP00000343701
MTTPGKENFRLKSYKNKSLNPDEMRRRREEEGLQLRKQKREEQLFKRRNVATAEEETEEEVMSDGGFHEAQISNMEMAPGGVITSDMIEMIFSKSPEQQLSATQKFRKLLSKEPNPPIDEVISTPGVVARFVEFLKRKENCTLQFESAWVLTNIASGNSLQTRIVIQAGAVPIFIELLSSEFEDVQEQAVWALGNIAGDSTMCRDYVLDCNILPPLLQLFSKQNRLTMTRNAVWALSNLCRGKSPPPEFAKVSPCLNVLSWLLFVSDTDVLADACWALSYLSDGPNDKIQAVIDAGVCRRLVELLMHNDYKVVSPALRAVGNIVTGDDIQTQVILNCSALQSLLHLLSSPKESIKKEACWTISNITAGNRAQIQTVIDANIFPALISILQTAEFRTRKEAAWAITNATSGGSAEQIKYLVELGCIKPLCDLLTVMDSKIVQVALNGLENILRLGEQEAKRNGTGINPYCALIEEAYGLDKIEFLQSHENQEIYQKAFDLIEHYFGTEDEDSSIAPQVDLNQQQYIFQQCEAPMEGFQL

SEQ ID NO: 42565 - protein, 214 aa, Homo sapiens
  Payload ID: 8656
  Gene Symbol: KPNA1
  Gene Name: karyopherin alpha 1 (importin alpha 5)
  ENSP ID: ENSP00000417166
MTTPGKENFRLKSYKNKSLNPDEMRRRREEEGLQLRKQKREEQLFKRRNVATAEEETEEEVMSDGGFHEAQISNMEMAPGGVITSDMIEMIFSKSPEQQLSATQKFRKLLSKEPNPPIDEVISTPGVVARFVEFLKRKENCTLQFESAWVLTNIASGNSLQTRIVIQAGAVPIFIELLSSEFEDVQEQAVWALGNIAGDSTMCRDYVLDCNILP

SEQ ID NO: 42566 - protein, 169 aa, Homo sapiens
  Payload ID: 8656
  Gene Symbol: KPNA1
  Gene Name: karyopherin alpha 1 (importin alpha 5)
  ENSP ID: ENSP00000417319
MTTPGKENFRLKSYKNKSLNPDEMRRRREEEGLQLRKQKREEQLFKRRNVATAEEETEEEVMSDGGFHEAQISNMEMAPGGVITSDMIEMIFSKSPEQQLSATQKFRKLLSKEPNPPIDEVISTPGVVARFVEFLKRKENCTLQAVWALGNIAGDSTMCRDYVLDCNIL

SEQ ID NO: 42567 - protein, 182 aa, Homo sapiens
  Payload ID: 8656
  Gene Symbol: KPNA1
  Gene Name: karyopherin alpha 1 (importin alpha 5)
  ENSP ID: ENSP00000418394
MTTPGKENFRLKSYKNKSLNPDEMRRRREEEGLQLRKQKREEQLFKRRNVATAEEETEEEVMSDGGFHEAQISNMEMAPGGVITSDMIEMIFSKSPEQQLSATQKFRKLLSKEPNPPIDEVISTPGVVARFVEFLKRKENCTLQVSLAFARNQSGTGKVASNRVLIQMEKGNQAYLNLEWET

SEQ ID NO: 42568 - protein, 174 aa, Homo sapiens
  Payload ID: 8656
  Gene Symbol: KPNA1
  Gene Name: karyopherin alpha 1 (importin alpha 5)
  ENSP ID: ENSP00000419257
MTTPGKENFRLKSYKNKSLNPDEMRRRREEEGLQLRKQKREEQLFKRRNVATAEEETEEEVMSDGGFHEAQISNMEMAPGGVITSDMIEMIFSKSPEQQLSATQKFRKLLSKEPNPPIDEVISTPGVVARFVEFLKRKENCTLQFESAWVLTNIASGNSLQTRIVIQAGAVPIF

SEQ ID NO: 42569 - protein, 328 aa, Homo sapiens
  Payload ID: 8656
  Gene Symbol: KPNA1
  Gene Name: karyopherin alpha 1 (importin alpha 5)
  ENSP ID: ENSP00000419890
MTTPGKENFRLKSYKNKSLNPDEMRRRREEEGLQLRKQKREEQLFKRRNVATAEEETEEEVMSDGGFHEAQISNMEMAPGGVITSDMIEMIFSKSPEQQLSATQKFRKLLSKEPNPPIDEVISTPGVVARFVEFLKRKENCTLQFESAWVLTNIASGNSLQTRIVIQAGAVPIFIELLSSEFEDVQEQAVWALGNIAGDSTMCRDYVLDCNILPPLLQLFSKQNRLTMTRNAVWALSNLCRGKSPPPEFAKVSPCLNVLSWLLFVSDTDVLADACWALSYLSDGPNDKIQAVIDAGVCRRLVELLMHNDYKVVSPALRAVGNIVTGDD

SEQ ID NO: 42570 - protein, 182 aa, Homo sapiens; identical to SEQ ID NO: 42567
  Payload ID: 8656
  Gene Symbol: KPNA1
  Gene Name: karyopherin alpha 1 (importin alpha 5)
  ENSP ID: ENSP00000420013

SEQ ID NO: 42571 - protein, 529 aa, Homo sapiens [sequence omitted]

SEQ ID NO: 42572 - protein, 529 aa, Homo sapiens [sequence omitted]

SEQ ID NO: 42573 - protein, 143 aa, Homo sapiens
  Payload ID: 8657
  Gene Symbol: KPNA2
  Gene Name: karyopherin alpha 2 (RAG cohort 1, importin alpha 1)
  ENSP ID: ENSP00000462331
MSTNENANTPAARLHRFKNKGKDSTEMRRRRIEVNVELRKAKKDDQMLKRRNVSSFPDDATSPLQENRNNQGTVNWSVDDIVKGINSSNVENQLQATQAARKLLSREKQPPIDNIIRAGLIPKFVSFLGRTDCSPIQFESAWA

SEQ ID NO: 42574 - protein, 50 aa, Homo sapiens
  Payload ID: 8657
  Gene Symbol: KPNA2
  Gene Name: karyopherin alpha 2 (RAG cohort 1, importin alpha 1)
  ENSP ID: ENSP00000463320
MSTNENANTPAARLHRFKNKGKDSTVKRHVIFSQGNEASQNRGQCGAEES

SEQ ID NO: 42575 - protein, 134 aa, Homo sapiens
  Payload ID: 8657
  Gene Symbol: KPNA2
  Gene Name: karyopherin alpha 2 (RAG cohort 1, importin alpha 1)
  ENSP ID: ENSP00000463602
MSTNENANTPAARLHRFKNKGKDSTEMRRRRIEVNVELRKAKKDDQMLKRRNVSSFPDDATSPLQENRNNQGTVNWSVDDIVKGINSSNVENQLQATQAARKLLSREKQPPIDNIIRAGLIPKFVSFLGRTDCS

SEQ ID NO: 42576 - protein, 521 aa, Homo sapiens
  Payload ID: 8658
  Gene Symbol: KPNA3
  Gene Name: karyopherin alpha 3 (importin alpha 4)
  Uniprot ID: O00505
  ENSP ID: ENSP00000261667
MAENPSLENHRIKSFKNKGRDVETMRRHRNEVTVELRKNKRDEHLLKKRNVPQEESLEDSDVDADFKAQNVTLEAILQNATSDNPVVQLSAVQAARKLLSSDRNPPIDDLIKSGILPILVKCLERDDNPSLQFEAAWALTNIASGTSAQTQAVVQSNAVPLFLRLLRSPHQNVCEQAVWALGNIIGDGPQCRDYVISLGVVKPLLSFISPSIPITFLRNVTWVIVNLCRNKDPPPPMETVQEILPALCVLIYHTDINILVDTVWALSYLTDGGNEQIQMVIDSGVVPFLVPLLSHQEVKVQTAALRAVGNIVTGTDEQTQVVLNCDVLSHFPNLLSHPKEKINKEAVWFLSNITAGNQQQVQAVIDAGLIPMIIHQLAKGDFGTQKEAAWAISNLTISGRKDQVEYLVQQNVIPPFCNLLSVKDSQVVQVVLDGLKNILIMAGDEASTIAEIIEECGGLEKIEVLQQHENEDIYKLAFEIIDQYFSGDDIDEDPCLIPEATQGGTYNFDPTANLQTKEFNF

SEQ ID NO: 42577 - protein, 91 aa, Homo sapiens
  Payload ID: 8658
  Gene Symbol: KPNA3
  Gene Name: karyopherin alpha 3 (importin alpha 4)
  ENSP ID: ENSP00000393869
  MOD_RES (1)..(1): Any amino acid
XPFCNLLSVKDSQVVQVVLDGLKNILIMAGDEASTIAEIIEECGGLEKIEVLQQHENEDIYKLAFEIIDQYFSGDDIDEDPCLIPEATQGG

SEQ ID NO: 42578 - protein, 521 aa, Homo sapiens
  Payload ID: 8659
  Gene Symbol: KPNA4
  Gene Name: karyopherin alpha 4 (importin alpha 3)
  Uniprot ID: O00629
  ENSP ID: ENSP00000334373
MADNEKLDNQRLKNFKNKGRDLETMRRQRNEVVVELRKNKRDEHLLKRRNVPHEDICEDSDIDGDYRVQNTSLEAIVQNASSDNQGIQLSAVQAARKLLSSDRNPPIDDLIKSGILPILVHCLERDDNPSLQFEAAWALTNIASGTSEQTQAVVQSNAVPLFLRLLHSPHQNVCEQAVWALGNIIGDGPQCRDYVISLGVVKPLLSFISPSIPITFLRNVTWVMVNLCRHKDPPPPMETIQEILPALCVLIHHTDVNILVDTVWALSYLTDAGNEQIQMVIDSGIVPHLVPLLSHQEVKVQTAALRAVGNIVTGTDEQTQVVLNCDALSHFPALLTHPKEKINKEAVWFLSNITAGNQQQVQAVIDANLVPMIIHLLDKGDFGTQKEAAWAISNLTISGRKDQVAYLIQQNVIPPFCNLLTVKDAQVVQVVLDGLSNILKMAEDEAETIGNLIEECGGLEKIEQLQNHENEDIYKLAYEIIDQFFSSDDIDEDPSLVPEAIQGGTFGFNSSANVPTEGFQF

SEQ ID NO: 42579 - protein, 170 aa, Homo sapiens
  Payload ID: 8659
  Gene Symbol: KPNA4
  Gene Name: karyopherin alpha 4 (importin alpha 3)
  ENSP ID: ENSP00000417172
QEVKVQTAALRAVGNIVTGTDEQTQVVLNCDALSHFPALLTHPKEKINKEAVWFLSNITAGNQQQVQAVIDANLVPMIIHLLDKVAYLIQQNVIPPFCNLLTVKDAQVVQVVLDGLSNILKMAEDEAETIGNLIEECGGLEKIEQLQNHENEDIYKLAYEIIDQFFSSDD

SEQ ID NO: 42580 - protein, 539 aa, Homo sapiens
  Payload ID: 8660
  Gene Symbol: KPNA5
  Gene Name: karyopherin alpha 5 (importin alpha 6)
  Uniprot ID: O15131
  ENSP ID: ENSP00000348704
MDAMASPGKDNYRMKSYKNKALNPQEMRRRREEEGIQLRKQKREEQLFKRRNVYLPRNDESMLESPIQDPDISSTVPIPEEEVVTTDMVQMIFSNNADQQLTATQKFRKLLSKEPNPPIDQVIQKPGVVQRFVKFLERNENCTLQFEAAWALTNIASGTFLHTKVVIETGAVPIFIKLLNSEHEDVQEQAVWALGNIAGDNAECRDFVLNCEILPPLLELLTNSNRLTTTRNAVWALSNLCRGKNPPPNFSKVSPCLNVLSRLLFSSDPDVLADVCWALSYLSDGPNDKIQAVIDSGVCRRLVELLMHNDYKVVSPALRAVGNIVTGDDIQTQVILNCSALPCLLHLLSSPKESIRKEACWTVSNITAGNRAQIQAVIDANIFPVLIEILQKAEFRTRKEAAWAITNATSGGTPEQIRYLVALGCIKPLCDLLTVMDSKIVQVALNGLENILRLGEQESKQNGIGINPYCALIEEAYGLDKIEFLQSHENQEIYQKAFDLIEHYFGVEEDDPSIVPQVDENQQQFIFQQQEAPMDGFQL

SEQ ID NO: 42581 - protein, 539 aa, Homo sapiens; identical to SEQ ID NO: 42580
  Payload ID: 8660
  Gene Symbol: KPNA5
  Gene Name: karyopherin alpha 5 (importin alpha 6)
  Uniprot ID: O15131
  ENSP ID: ENSP00000357552

SEQ ID NO: 42582 - protein, 122 aa, Homo sapiens
  Payload ID: 8660
  Gene Symbol: KPNA5
  Gene Name: karyopherin alpha 5 (importin alpha 6)
  ENSP ID: ENSP00000376302
  MOD_RES (1)..(1): Any amino acid
XYLVALGCIKPLCDLLTVMDSKIVQVALNGLENILRLGEQESKQNGIGINPYCALIEEAYGLDKIEFLQSHENQEIYQKAFDLIEHYFGVEEDDPSIVPQVDENQQQFIFQQQEAPMDGFQL

SEQ ID NO: 42583 - protein, 142 aa, Homo sapiens
  Payload ID: 8660
  Gene Symbol: KPNA5
  Gene Name: karyopherin alpha 5 (importin alpha 6)
  ENSP ID: ENSP00000396791
MASPGKDNYRMKSYKNKALNPQEMRRRREEEGIQLRKQKREEQLFKRRNVYLPRNDESMLESPIQDPDISSTVPIPEEEVVTTDMVQMIFSNNADQQLTATQKFRKLLSKEPNPPIDQVIQKPGVVQRFVKFLERNENCTLQ

SEQ ID NO: 42584 - protein, 536 aa, Homo sapiens
  Payload ID: 8661
  Gene Symbol: KPNA6
  Gene Name: karyopherin alpha 6 (importin alpha 7)
  Uniprot ID: O60684
  ENSP ID: ENSP00000362728
METMASPGKDNYRMKSYKNNALNPEEMRRRREEEGIQLRKQKREQQLFKRRNVELINEEAAMFDSLLMDSYVSSTTGESVITREMVEMLFSDDSDLQLATTQKFRKLLSKEPSPPIDEVINTPRVVDRFVEFLKRNENCTLQFEAAWALTNIASGTSQQTKIVIEAGAVPIFIELLNSDFEDVQEQAVWALGNIAGDSSVCRDYVLNCSILNPLLTLLTKSTRLTMTRNAVWALSNLCRGKNPPPEFAKVSPCLPVLSRLLFSSDSDLLADACWALSYLSDGPNEKIQAVIDSGVCRRLVELLMHNDYKVASPALRAVGNIVTGDDIQTQVILNCSALPCLLHLLSSPKESIRKEACWTISNITAGNRAQIQAVIDANIFPVLIEILQKAEFRTRKEAAWAITNATSGGTPEQIRYLVSLGCIKPLCDLLTVMDSKIVQVALNGLENILRLGEQEGKRSGSGVNPYCGLIEEAYGLDKIEFLQSHENQEIYQKAFDLIEHYFGVEDDDSSLAPQVDETQQQFIFQQPEAPMEGFQL

SEQ ID NO: 42585 - protein, 321 aa, Homo sapiens
  Payload ID: 8661
  Gene Symbol: KPNA6
  Gene Name: karyopherin alpha 6 (importin alpha 7)
  ENSP ID: ENSP00000415677
RRNVELINEEAAMFDSLLMDSYVSSTTGESVITREMVEMLFSDDSDLQLATTQKFRKLLSKEPSPPIDEVINTPRVVDRFVEFLKRNENCTLQAVWALGNIAGDSSVCRDYVLNCSILNPLLTLLTKSTRLTMTRNAVWALSNLCRGKNPPPEFAKVSPCLPVLSRLLFSSDSDLLADACWALSYLSDGPNEKIQAVIDSGVCRRLVELLMHNDYKVASPALRAVGNIVTGDDIQTQVILNCSALPCLLHLLSSPKESIRKEACWTISNITAGNRAQIQAVIDANIFPVLIEILQKAEFRTRKEAAWAITNATSGGTPEQI

SEQ ID NO: 42586 - protein, 186 aa, Homo sapiens
  Payload ID: 8661
  Gene Symbol: KPNA6
  Gene Name: karyopherin alpha 6 (importin alpha 7)
  ENSP ID: ENSP00000474234
METMASPGKDNYRMKSYKNNALNPEEMRRRREEEGIQLRKQKREQQLFKRRNVELINEEAAMFDSLLMDSYESVITREMVEMLFSDDSDLQLATTQKFRKLLSKEPSPPIDEVINTPRVVDRFVEFLKRNENCTLQFEAAWALTNIASGTSQQTKIVIEAGAVPIFIELLNSDFEDVQEQSGHWET

SEQ ID NO: 42587 - protein, 516 aa, Homo sapiens
  Payload ID: 8662
  Gene Symbol: KPNA7
  Gene Name: karyopherin alpha 7 (importin alpha 8)
  Uniprot ID: A9QM74
  ENSP ID: ENSP00000330878
MPTLDAPEERRRKFKYRGKDVSLRRQQRMAVSLELRKAKKDEQTLKRRNITSFCPDTPSEKTAKGVAVSLTLGEIIKGVNSSDPVLCFQATQTARKMLSQEKNPPLKLVIEAGLIPRMVEFLKSSLYPCLQFEAAWALTNIASGTSEQTRAVVEGGAIQPLIELLSSSNVAVCEQAVWALGNIAGDGPEFRDNVITSNAIPHLLALISPTLPITFLRNITWTLSNLCRNKNPYPCDTAVKQILPALLHLLQHQDSEVLSDACWALSYLTDGSNKRIGQVVNTGVLPRLVVLMTSSELNVLTPSLRTVGNIVTGTDEQTQMAIDAGMLNVLPQLLQHNKPSIQKEAAWALSNVAAGPCHHIQQLLAYDVLPPLVALLKNGEFKVQKEAVWMVANFATGATMDQLIQLVHSGVLEPLVNLLTAPDVKIVLIILDVISCILQAAEKRSEKENLCLLIEELGGIDRIEALQLHENRQIGQSALNIIEKHFGEEEDESQTLLSQVIDQDYEFIDYECLAKK

SEQ ID NO: 42588 - protein, 1105 aa, Homo sapiens
  Payload ID: 8663
  Gene Symbol: KANSL1
  Gene Name: KAT8 regulatory NSL complex subunit 1
  Uniprot ID: Q7Z3B3
  ENSP ID: ENSP00000262419
MAAMAPALTDAAAEAHHIRFKLAPPSSTLSPGSAENNGNANILIAANGTKRKAIAAEDPSLDFRNNPTKEDLGKLQPLVASYLCSDVTSVPSKESLKLQGVFSKQTVLKSHPLLSQSYELRAELLGRQPVLEFSLENLRTMNTSGQTALPQAPVNGLAKKLTKSSTHSDHDNSTSLNGGKRALTSSALHGGEMGGSESGDLKGGMTNCTLPHRSLDVEHTTLYSNNSTANKSSVNSMEQPALQGSSRLSPGTDSSSNLGGVKLEGKKSPLSSILFSALDSDTRITALLRRQADIESRARRLQKRLQVVQAKQVERHIQHQLGGFLEKTLSKLPNLESLRPRSQLMLTRKAEAALRKAASETTTSEGLSNFLKSNSISEELERFTASGIANLRCSEQAFDSDVTDSSSGGESDIEEEELTRADPEQRHVPLRRRSEWKWAADRAAIVSRWNWLQAHVSDLEYRIRQQTDIYKQIRANKGLIVLGEVPPPEHTTDLFLPLSSEVKTDHGTDKLIESVSQPLENHGAPIIGHISESLSTKSCGALRPVNGVINTLQPVLADHIPGDSSDAEEQLHKKQRLNLVSSSSDGTCVAARTRPVLSCKKRRLVRPNSIVPLSKKVHRNSTIRPGCDVNPSCALCGSGSINTMPPEIHYEAPLLERLSQLDSCVHPVLAFPDDVPTSLHFQSMLKSQWQNKPFDKIKPPKKLSLKHRAPMPGSLPDSARKDRHKLVSSFLTTAKLSHHQTRPDRTHRQHLDDVGAVPMVERVTAPKAERLLNPPPPVHDPNHSKMRLRDHSSERSEVLKHHTDMSSSSYLAATHHPPHSPLVRQLSTSSDSPAPASSSSQVTASTSQQPVRRRRGESSFDINNIVIPMSVAATTRVEKLQYKEILTPSWREVDLQSLKGSPDEENEEIEDLSDAAFAALHAKCEEMERARWLWTTSVPPQRRGSRSYRSSDGRTTPQLGSANPSTPQPASPDVSSSHSLSEYSHGQSPRSPISPELHSAPLTPVARDTPRHLASEDTRCSTPELGLDEQSVQPWERRTFPLAHSPQAECEDQLDAQERAARCTRRTSGSKTGRETEAAPTSPPIVPLKSRHLVAAATAQRPTHR

SEQ ID NO: 42589 - protein, 1104 aa, Homo sapiens
  Payload ID: 8663
  Gene Symbol: KANSL1
  Gene Name: KAT8 regulatory NSL complex subunit 1
  Uniprot ID: Q7Z3B3
  ENSP ID: ENSP00000387393
MAAMAPALTDAAAEAHHIRFKLAPPSSTLSPGSAENNGNANILIAANGTKRKAIAAEDPSLDFRNNPTKEDLGKLQPLVASYLCSDVTSVPSKESLKLQGVFSKQTVLKSHPLLSQSYELRAELLGRQPVLEFSLENLRTMNTSGQTALPQAPVNGLAKKLTKSSTHSDHDNSTSLNGGKRALTSSALHGGEMGGSESGDLKGGMTNCTLPHRSLDVEHTTLYSNNSTANKSSVNSMEQPALQGSSRLSPGTDSSSNLGGVKLEGKKSPLSSILFSALDSDTRITALLRRQADIESRARRLQKRLQVVQAKQVERHIQHQLGGFLEKTLSKLPNLESLRPRSQLMLTRKAEAALRKAASETTTSEGLSNFLKSNSISEELERFTASGIANLRCSEQAFDSDVTDSSSGGESDIEEEELTRADPEQRHVPLRRRSEWKWAADRAAIVSRWNWLQAHVSDLEYRIRQQTDIYKQIRANKGLIVLGEVPPPEHTTDLFLPLSSEVKTDHGTDKLIESVSQPLENHGAPIIGHISESLSTKSCGALRPVNGVINTLQPVLADHIPGDSSDAEEQLHKKQRLNLVSSSSDGTCVAARTRPVLSCKKRRLVRPNSIVPLSKKVHRNSTIRPGCDVNPSCALCGSGSINTMPPEIHYEAPLLERLSQLDSCVHPVLAFPDDVPTSLHFQSMLKSQWQNKPFDKIKPPKKLSLKHRAPMPGSLPDSARKDRHKLVSSFLTTAKLSHHQTRPDRTHRQHLDDVGAVPMVERVTAPKAERLLNPPPPVHDPNHSKMRLRDHSSERSEVLKHHTDMSSSSYLAATHHPPHSPLVRQLSTSSDSPAPASSSSQVTASTSQPVRRRRGESSFDINNIVIPMSVAATTRVEKLQYKEILTPSWREVDLQSLKGSPDEENEEIEDLSDAAFAALHAKCEEMERARWLWTTSVPPQRRGSRSYRSSDGRTTPQLGSANPSTPQPASPDVSSSHSLSEYSHGQSPRSPISPELHSAPLTPVARDTPRHLASEDTRCSTPELGLDEQSVQPWERRTFPLAHSPQAECEDQLDAQERAARCTRRTSGSKTGRETEAAPTSPPIVPLKSRHLVAAATAQRPTHR

SEQ ID NO: 42590 - protein, 122 aa, Homo sapiens
  Payload ID: 8663
  Gene Symbol: KANSL1
  Gene Name: KAT8 regulatory NSL complex subunit 1
  ENSP ID: ENSP00000459330
MAAMAPALTDAAAEAHHIRFKLAPPSSTLSPGSAENNGNANILIAANGTKRKAIAAEDPSLDFRNNPTKEDLGKLQPLVASYLCSDVTSVPSKESLKLQGVFSKQTVLKSHPLLSQSYELRA

SEQ ID NO: 42591 - protein, 139 aa, Homo sapiens
  Payload ID: 8663
  Gene Symbol: KANSL1
  Gene Name: KAT8 regulatory NSL complex subunit 1
  ENSP ID: ENSP00000459359
MAAMAPALTDAAAEAHHIRFKLAPPSSTLSPGSAENNGNANILIAANGTKRKAIAAEDPSLDFRNNPTKEDLGKLQPLVASYLCSDVTSVPSKESLKLQGVFSKQTVLKSHPLLSQSYELRAELLGRQPVLEFSLENLR

SEQ ID NO: 42592 - protein, 9 aa, Homo sapiens
  Payload ID: 8663
  Gene Symbol: KANSL1
  Gene Name: KAT8 regulatory NSL complex subunit 1
  ENSP ID: ENSP00000459627
MAAMAPALT

SEQ ID NO: 42593 - protein, 1041 aa, Homo sapiens
  Payload ID: 8663
  Gene Symbol: KANSL1
  Gene Name: KAT8 regulatory NSL complex subunit 1
  ENSP ID: ENSP00000461299
MAAMAPALTDAAAEAHHIRFKLAPPSSTLSPGSAENNGNANILIAANGTKRKAIAAEDPSLDFRNNPTKEDLGKLQPLVASYLCSDVTSVPSKESLKLQGVFSKQTVLKSHPLLSQSYELRAELLGRQPVLEFSLENLRTMNTSGQTALPQAPVNGLAKKLTKSSTHSDHDNSTSLNGGKRALTSSALHGGEMGGSESGDLKGGMTNCTLPHRSLDVEHTTLYSNNSTANKSSVNSMEQPALQGSSRLSPGTDSSSNLGGVKLEGKKSPLSSILFSALDSDTRITALLRRQADIESRARRLQKRLQVVQAKQVERHIQHQLGGFLEKTLSKLPNLESLRPRSQLMLTRKAEAALRKAASETTTSEGLSNFLKSNSISEELERFTASGIANLRCSEQAFDSDVTDSSSGGESDIEEEELTRADPEQRHVPLRRRSEWKWAADRAAIVSRWNWLQAHVSDLEYRIRQQTDIYKQIRANKGLIVLGEVPPPEHTTDLFLPLSSEVKTDHGTDKLIESVSQPLENHGAPIIGHISESLSTKSCGALRPVNGVINTLQPVLADHIPGDSSDAEEQLHKKQRLNLVSSSSDGTCVAARTRPVLSCKKRRLVRPNSIVPLSKKVHRNSTIRPGCDVNPSCALCGSGSINTMPPEIHYEAPLLERLSQLDSCVHPVLAFPDDVPTSLHFQSMLKSQWQNKPFDKIKPPKKLSLKHRAPMPGSLPDSARKDRHKLVSSFLTTAMLKHHTDMSSSSYLAATHHPPHSPLVRQLSTSSDSPAPASSSSQVTASTSQPVRRRRGESSFDINNIVIPMSVAATTRVEKLQYKEILTPSWREVDLQSLKGSPDEENEEIEDLSDAAFAALHAKCEEMERARWLWTTSVPPQRRGSRSYRSSDGRTTPQLGSANPSTPQPASPDVSSSHSLSEYSHGQSPRSPISPELHSAPLTPVARDTPRHLASEDTRCSTPELGLDEQSVQPWERRTFPLAHSPQAECEDQLDAQERAARCTRRTSGSKTGRETEAAPTSPPIVPLKSRHLVAAATAQRPTHR

SEQ ID NO: 42594 - protein, 1105 aa, Homo sapiens; identical to SEQ ID NO: 42588
  Payload ID: 8663
  Gene Symbol: KANSL1
  Gene Name: KAT8 regulatory NSL complex subunit 1
  Uniprot ID: Q7Z3B3
  ENSP ID: ENSP00000461484

SEQ ID NO: 42595 - protein, 1105 aa, Homo sapiens; identical to SEQ ID NO: 42588
  Payload ID: 8663
  Gene Symbol: KANSL1
  Gene Name: KAT8 regulatory NSL complex subunit 1
  Uniprot ID: Q7Z3B3
  ENSP ID: ENSP00000461812

SEQ ID NO: 42596 - protein, 1105 aa, Homo sapiens
  Payload ID: 8663
  Gene Symbol: KANSL1
  Gene Name: KAT8 regulatory NSL complex subunit 1
  ENSP ID: ENSP00000479863
MAAMAPALTDAAAEAHHIRFKLAPPSSTLSPGSAENNGNANILIAANGTKRKAIAAEDPSLDFRNNPTKEDLGKLQPLVASYLCSDVTSVPSKESLKLQGVFSKQTVLKSHPLLSQSYELRAELLGRQPVLEFSLENLRTMNTSGQTALPQAPVNGLAKKLTKSSTHSDHDNSTSLNGGKRALTSSALHGGEMGGSESGDLKGGMTNCTLPHRSLDVEHTTLYSNNSTANKSSVNSMEQPALQGSSRLSPGTDSSSNLGGVKLEGKKSPLSSILFSALDSDTRITALLRRQADIESRARRLQKRLQVVQAKQVERHIQHQLGGFLEKTLSKLPNLESLRPRSQLMLTRKAEAALRKAASETTTSEGLSNFLKSNSISEELERFTASGIANLRCSEQAFDSDVTDSSSGGESDIEEEELTRADPEQRHVPLRRRSEWKWAADRAAIVSRWNWLQAHVSDLEYRIRQQTDIYKQIRANKGLIVLGEVPPPEHTTDLFLPLSSEVKTDHGTDKLIESVSQPLENHGAPIIGHISESLSTKSCGALRPVNGVINTLQPVLADHIPGDSSDAEEQLHKKQRLNLVSSSSDGTCVAARTRPVLSCKKRRLVRPNSIVPLSKKVHRNSTIRPGCDVNPSCALCGSGSINTMPPEIHYEAPLLERLSQLDSCVHPVLAFPDDVPTSLHFQSMLKSQWQNKPFDKIKPPKKLSLKHRAPMPGSLPDPARKDRHKLVSSFLTTAKLSHHQTRPDRTHRQHLDDVGAVPMVERVTAPKAERLLNPPPPVHDPNHSKMRLRDHSSERSEVLKHHTDMSSSSYLAATHHPPHSPLVRQLSTSSDSPAPASSSSQVTASTSQQPVRRRRGESSFDINNIVIPMSVAATTRVEKLQYKEILTPSWREVDLQSLKGSPDEENEEIEDLSDAAFAALHAKCEEMERARWLWTTSVPPQRRGSRSYRSSDGRTTPQLGSANPSTPQPASPDVSSSHSLSEYSHGQSPRSPISPELHSAPLTPVARDTPRHLASEDTRCSTPELGLDEQSVQPWERRTFPLAHSPQAECEDQLDAQERAARCTRRTSGSKTGRETEAAPTSPPTVPLKSRHLVAAATAQRPTHR

SEQ ID NO: 42597 - protein, 1104 aa, Homo sapiens
  Payload ID: 8663
  Gene Symbol: KANSL1
  Gene Name: KAT8 regulatory NSL complex subunit 1
  ENSP ID: ENSP00000480995
MAAMAPALTDAAAEAHHIRFKLAPPSSTLSPGSAENNGNANILIAANGTKRKAIAAEDPSLDFRNNPTKEDLGKLQPLVASYLCSDVTSVPSKESLKLQGVFSKQTVLKSHPLLSQSYELRAELLGRQPVLEFSLENLRTMNTSGQTALPQAPVNGLAKKLTKSSTHSDHDNSTSLNGGKRALTSSALHGGEMGGSESGDLKGGMTNCTLPHRSLDVEHTTLYSNNSTANKSSVNSMEQPALQGSSRLSPGTDSSSNLGGVKLEGKKSPLSSILFSALDSDTRITALLRRQADIESRARRLQKRLQVVQAKQVERHIQHQLGGFLEKTLSKLPNLESLRPRSQLMLTRKAEAALRKAASETTTSEGLSNFLKSNSISEELERFTASGIANLRCSEQAFDSDVTDSSSGGESDIEEEELTRADPEQRHVPLRRRSEWKWAADRAAIVSRWNWLQAHVSDLEYRIRQQTDIYKQIRANKGLIVLGEVPPPEHTTDLFLPLSSEVKTDHGTDKLIESVSQPLENHGAPIIGHISESLSTKSCGALRPVNGVINTLQPVLADHIPGDSSDAEEQLHKKQRLNLVSSSSDGTCVAARTRPVLSCKKRRLVRPNSIVPLSKKVHRNSTIRPGCDVNPSCALCGSGSINTMPPEIHYEAPLLERLSQLDSCVHPVLAFPDDVPTSLHFQSMLKSQWQNKPFDKIKPPKKLSLKHRAPMPGSLPDSARKDRHKLVSSFLTTAKLSHHQTRPDRTHRQHLDDVGAVPMVERVTAPKAERLLNPPPPVHDPNHSKMRLRDHSSERSEVLKHHTDMSSSSYLAATHHPPHSPLVRQLSTSSDSPAPASSSSQVTASTSQPVRRRRGESSFDINNIVIPMSVAATTRVEKLQYKEILTPSWREVDLQSLKGSPDEENEEIEDLSDAAFAALHAKCEEMERARWLWTTSVPPQRRGSRSYRSSDGRTTPQLGSANPSTPQPASPDVSSSHSLSEYSHGQSPRSPISPELHSAPLTPVARDTLRHLASEDTRCSTPELGLDEQSVQPWERRTFPLAHSPQAECEDQLDAQERAARCTRRTSGSKTGRETEAAPTSPPIVPLKSRHLVAAATAQRPTHR

SEQ ID NO: 42598 - protein, 1105 aa, Homo sapiens
  Payload ID: 8663
  Gene Symbol: KANSL1
  Gene Name: KAT8 regulatory NSL complex subunit 1
  ENSP ID: ENSP00000482074
MAAMAPALTDAAAEAHHIRFKLAPPSSTLSPGSAENNGNANILIAANGTKRKAIAAEDPSLDFRNNPTKEDLGKLQPLVASYLCSDVTSVPSKESLKLQGVFSKQTVLKSHPLLSQSYELRAELLGRQPVLEFSLENLRTMNTSGQTALPQAPVNGLAKKLTKSSTHSDHDNSTSLNGGKRALTSSALHGGEMGGSESGDLKGGMTNCTLPHRSLDVEHTTLYSNNSTANKSSVNSMEQPALQGSSRLSPGTDSSSNLGGVKLEGKKSPLSSILFSALDSDTRITALLRRQADIESRARRLQKRLQVVQAKQVERHIQHQLGGFLEKTLSKLPNLESLRPRSQLMLTRKAEAALRKAASETTTSEGLSNFLKSNSISEELERFTASGIANLRCSEQAFDSDVTDSSSGGESDIEEEELTRADPEQRHVPLRRRSEWKWAADRAAIVSRWNWLQAHVSDLEYRIRQQTDIYKQIRANKGLIVLGEVPPPEHTTDLFLPLSSEVKTDHGTDKLIESVSQPLENHGAPIIGHISESLSTKSCGALRPVNGVINTLQPVLADHIPGDSSDAEEQLHKKQRLNLVSSSSDGTCVAARTRPVLSCKKRRLVRPNSIVPLSKKVHRNSTIRPGCDVNPSCALCGSGSINTMPPEIHYEAPLLERLSQLDSCVHPVLAFPDDVPTSLHFQSMLKSQWQNKPFDKIKPPKKLSLKHRAPMPGSLPDSARKDRHKLVSSFLTTAKLSHHQTRPDRTHRQHLDDVGAVPMVERVTAPKAERLLNPPPPVHDPNHSKMRLRDHSSERSEVLKHHTDMSSSSYLAATHHPPHSPLVRQLSTSSDSPAPASSSSQVTASTSQQPVRRRRGESSFDINNIVIPMSVAATTRVEKLQYKEILTPSWREVDLQSLKGSPDEENEEIEDLSDAAFAALHAKCEEMERARWLWTTSVPPQRRGSRSYRSSDGRTTPQLGSANPSTPQPASPDVSSSHSLSEYSHGQSPRSPISPELHSAPLTPVARDTLRHLASEDTRCSTPELGLDEQSVQPWERRTFPLAHSPQAECEDQLDAQERAARCTRRTSGSKTGRETEAAPTSPPIVPLKSRHLVAAATAQRPTHR

SEQ ID NO: 42599 - protein, 1105 aa, Homo sapiens; identical to SEQ ID NO: 42598
  Payload ID: 8663
  Gene Symbol: KANSL1
  Gene Name: KAT8 regulatory NSL complex subunit 1
  ENSP ID: ENSP00000484212

SEQ ID NO: 42600 - protein, 1105 aa, Homo sapiens; identical to SEQ ID NO: 42596
  Payload ID: 8663
  Gene Symbol: KANSL1
  Gene Name: KAT8 regulatory NSL complex subunit 1
  ENSP ID: ENSP00000485807

SEQ ID NO: 42601 - protein, 1041 aa, Homo sapiens
  Payload ID: 8663
  Gene Symbol: KANSL1
  Gene Name: KAT8 regulatory NSL complex subunit 1
  ENSP ID: ENSP00000485811
MAAMAPALTDAAAEAHHIRFKLAPPSSTLSPGSAENNGNANILIAANGTKRKAIAAEDPSLDFRNNPTKEDLGKLQPLVASYLCSDVTSVPSKESLKLQGVFSKQTVLKSHPLLSQSYELRAELLGRQPVLEFSLENLRTMNTSGQTALPQAPVNGLAKKLTKSSTHSDHDNSTSLNGGKRALTSSALHGGEMGGSESGDLKGGMTNCTLPHRSLDVEHTTLYSNNSTANKSSVNSMEQPALQGSSRLSPGTDSSSNLGGVKLEGKKSPLSSILFSALDSDTRITALLRRQADIESRARRLQKRLQVVQAKQVERHIQHQLGGFLEKTLSKLPNLESLRPRSQLMLTRKAEAALRKAASETTTSEGLSNFLKSNSISEELERFTASGIANLRCSEQAFDSDVTDSSSGGESDIEEEELTRADPEQRHVPLRRRSEWKWAADRAAIVSRWNWLQAHVSDLEYRIRQQTDIYKQIRANKGLIVLGEVPPPEHTTDLFLPLSSEVKTDHGTDKLIESVSQPLENHGAPIIGHISESLSTKSCGALRPVNGVINTLQPVLADHIPGDSSDAEEQLHKKQRLNLVSSSSDGTCVAARTRPVLSCKKRRLVRPNSIVPLSKKVHRNSTIRPGCDVNPSCALCGSGSINTMPPEIHYEAPLLERLSQLDSCVHPVLAFPDDVPTSLHFQSMLKSQWQNKPFDKIKPPKKLSLKHRAPMPGSLPDPARKDRHKLVSSFLTTAMLKHHTDMSSSSYLAATHHPPHSPLVRQLSTSSDSPAPASSSSQVTASTSQPVRRRRGESSFDINNIVIPMSVAATTRVEKLQYKEILTPSWREVDLQSLKGSPDEENEEIEDLSDAAFAALHAKCEEMERARWLWTTSVPPQRRGSRSYRSSDGRTTPQLGSANPSTPQPASPDVSSSHSLSEYSHGQSPRSPISPELHSAPLTPVARDTPRHLASEDTRCSTPELGLDEQSVQPWERRTFPLAHSPQAECEDQLDAQERAARCTRRTSGSKTGRETEAAPTSPPTVPLKSRHLVAAATAQRPTHR

SEQ ID NO: 42602 - protein, 1105 aa, Homo sapiens; identical to SEQ ID NO: 42596
  Payload ID: 8663
  Gene Symbol: KANSL1
  Gene Name: KAT8 regulatory NSL complex subunit 1
  ENSP ID: ENSP00000486009

SEQ ID NO: 42603 - protein, 9 aa, Homo sapiens
  Payload ID: 8663
  Gene Symbol: KANSL1
  Gene Name: KAT8 regulatory NSL complex subunit 1
  ENSP ID: ENSP00000486043
MAAMAPALT

SEQ ID NO: 42604 - protein, 1105 aa, Homo sapiens; identical to SEQ ID NO: 42596
  Payload ID: 8663
  Gene Symbol: KANSL1
  Gene Name: KAT8 regulatory NSL complex subunit 1
  ENSP ID: ENSP00000486326

SEQ ID NO: 42605 - protein, 139 aa, Homo sapiens; identical to SEQ ID NO: 42591
  Payload ID: 8663
  Gene Symbol: KANSL1
  Gene Name: KAT8 regulatory NSL complex subunit 1
  ENSP ID: ENSP00000486338

SEQ ID NO: 42606 - protein, 122 aa, Homo sapiens; identical to SEQ ID NO: 42590
  Payload ID: 8663
  Gene Symbol: KANSL1
  Gene Name: KAT8 regulatory NSL complex subunit 1
  ENSP ID: ENSP00000487137

SEQ ID NO: 42607 - protein, 1041 aa, Homo sapiens
  Payload ID: 8663
  Gene Symbol: KANSL1
  Gene Name: KAT8 regulatory NSL complex subunit 1
  ENSP ID: ENSP00000487644
MAAMAPALTDAAAEAHHIRFKLAPPSSTLSPGSAENNGNANILIAANGTKRKAIAAEDPSLDFRNNPTKEDLGKLQPLVASYLCSDVTSVPSKESLKLQGVFSKQTVLKSHPLLSQSYELRAELLGRQPVLEFSLENLRTMNTSGQTALPQAPVNGLAKKLTKSSTHSDHDNSTSLNGGKRALTSSALHGGEMGGSESGDLKGGMTNCTLPHRSLDVEHTTLYSNNSTANKSSVNSMEQPALQGSSRLSPGTDSSSNLGGVKLEGKKSPLSSILFSALDSDTRITALLRRQADIESRARRLQKRLQVVQAKQVERHIQHQLGGFLEKTLSKLPNLESLRPRSQLMLTRKAEAALRKAASETTTSEGLSNFLKSNSISEELERFTASGIANLRCSEQAFDSDVTDSSSGGESDIEEEELTRADPEQRHVPLRRRSEWKWAADRAAIVSRWNWLQAHVSDLEYRIRQQTDIYKQIRANKGLIVLGEVPPPEHTTDLFLPLSSEVKTDHGTDKLIESVSQPLENHGAPIIGHISESLSTKSCGALRPVNGVINTLQPVLADHIPGDSSDAEEQLHKKQRLNLVSSSSDGTCVAARTRPVLSCKKRRLVRPNSIVPLSKKVHRNSTIRPGCDVNPSCALCGSGSINTMPPEIHYEAPLLERLSQLDSCVHPVLAFPDDVPTSLHFQSMLKSQWQNKPFDKIKPPKKLSLKHRAPMPGSLPDSARKDRHKLVSSFLTTAMLKHHTDMSSSSYLAATHHPPHSPLVRQLSTSSDSPAPASSSSQVTASTSQPVRRRRGESSFDINNIVIPMSVAATTRVEKLQYKEILTPSWREVDLQSLKGSPDEENEEIEDLSDAAFAALHAKCEEMERARWLWTTSVPPQRRGSRSYRSSDGRTTPQLGSANPSTPQPASPDVSSSHSLSEYSHGQSPRSPISPELHSAPLTPVARDTLRHLASEDTRCSTPELGLDEQSVQPWERRTFPLAHSPQAECEDQLDAQERAARCTRRTSGSKTGRETEAAPTSPPIVPLKSRHLVAAATAQRPTHR

SEQ ID NO: 42608 - protein, 139 aa, Homo sapiens; identical to SEQ ID NO: 42591
  Payload ID: 8663
  Gene Symbol: KANSL1
  Gene Name: KAT8 regulatory NSL complex subunit 1
  ENSP ID: ENSP00000487645

SEQ ID NO: 42609 - protein, 1105 aa, Homo sapiens; identical to SEQ ID NO: 42598
  Payload ID: 8663
  Gene Symbol: KANSL1
  Gene Name: KAT8 regulatory NSL complex subunit 1
  ENSP ID: ENSP00000487763

SEQ ID NO: 42610 - protein, 122 aa, Homo sapiens; identical to SEQ ID NO: 42590
  Payload ID: 8663
  Gene Symbol: KANSL1
  Gene Name: KAT8 regulatory NSL complex subunit 1
  ENSP ID: ENSP00000488307

SEQ ID NO: 42611 - protein, 9 aa, Homo sapiens
  Payload ID: 8663
  Gene Symbol: KANSL1
  Gene Name: KAT8 regulatory NSL complex subunit 1
  ENSP ID: ENSP00000488578
MAAMAPALT

SEQ ID NO: 42612 - protein, 987 aa, Homo sapiens
  Payload ID: 8664
  Gene Symbol: KANSL1L
  Gene Name: KAT8 regulatory NSL complex subunit 1-like
  Uniprot ID: A0AUZ9
  ENSP ID: ENSP00000281772
MTPALREATAKGISFSSLPSTMESDKMLYMESPRTVDEKLKGDTFSQMLGFPTPEPTLNTNFVNLKHFGSPQSSKHYQTVFLMRSNSTLNKHNENYKQKKLGEPSCNKLKNILYNGSNIQLSKICLSHSEEFIKKEPLSDTTSQCMKDVQIILDSNITKDTNVDKVQLQNCKWYQENALLDKVTDAEIKKGLLHCTQKKIVPGHSNVPVSSSAAEKEEEVHARLLHCVSKQKILLSQARRTQKHLQMLLAKHVVKHYGQQMKLSMKHQLPKMKTFHEPTTILGNSLPKCTEIKPEVNTLTAENKLWDDAKNGFARCTAAEIQRFAFSATGLLSHVEEGLDSDATDSSSDDDLDEYTLRKNVAVNCSTEWKWLVDRARVGSRWTWLQAQISDLECKIQQLTDIHRQIRASKGIVVLEECQLPKDILKKQMQFADQAASLNILGNPQVPQECQDPVPEQDFEMSPSSPTLLLRNIEKQSAQLTEIINSLIAPLNLSPTSSPLSSKSCSHKCLANGIYRSASENLDELSSSSSWLLNQKHSKKKRKDRTRLKSSSLTFMSTSARTRPLQSFHKRKLYRLSPTFYWTPQTLPSKETAFLNTTQMPCLQSASTWSSYEHNSESYLLREHVSELDSSFHSVLSLPSDVPLHFHFETLLKKTEIKGNLAENKFVDEYIISPSPVHSTLNQWRNGYSPICKPQIRSESSAQLLQGRKKRHLSETALGERTKLEESDFQHTESGSHSNFTAVSNVNVLSRIQNSSRNTARRRLRSESSYDIDNIVIPMSLVAPAKLEKLQYKEILTPSWRMVVLQPLDEYNLGKEEIEDLSDEVFSLRHKKYEEREQARWSLWEQSKWHRRNSRAYSKNVEGQDLLLKEYPNNFSSSQQCAAASPPGLPSENQDLCAYGLPSLNQSQETKSLWWERRAFPLKGEDMAALLCQDEKKDQVERSSTAFHGEIFGTSVPENGHHPKKQSDGMEEYKTFGLGLTNVKKNR

SEQ ID NO: 42613 - protein, 199 aa, Homo sapiens
  Payload ID: 8664
  Gene Symbol: KANSL1L
  Gene Name: KAT8 regulatory NSL complex subunit 1-like
  ENSP ID: ENSP00000388182
  MOD_RES (1)..(1): Any amino acid
XGNSLPKCTEIKPEVNTLTAENKLWDDAKNGFARCTAAEIQRFAFSATGLLSHVEEGLDSDATDSSSDDDLDEYTLRKNVAVNCSTEWKWLVDRARVGSRWTWLQAQISDLECKIQQLTDIHRQIRASKGIVVLEECQLPKDILKKQMQFADQAASLNILGNPQVPQECQDPVPEQDFEMSPSSPTLLLRNIEKQVKSK

SEQ ID NO: 42614 - protein, 705 aa, Homo sapiens
  Payload ID: 8664
  Gene Symbol: KANSL1L
  Gene Name: KAT8 regulatory NSL complex subunit 1-like
  Uniprot ID: A0AUZ9
  ENSP ID: ENSP00000393432
MTPALREATAKGISFSSLPSTMESDKMLYMESPRTVDEKLKGDTFSQMLGFPTPEPTLNTNFVNLKHFGSPQSSKHYQTVFLMRSNSTLNKHNENYKQKKLGEPSCNKLKNILYNGSNIQLSKICLSHSEEFIKKEPLSDTTSQCMKDVQIILDSNITKDTNVDKVQLQNCKWYQENALLDKVTDAEIKKGLLHCTQKKIVPGHSNVPVSSSAAEKEEEVHARLLHCVSKQKILLSQARRTQKHLQMLLAKHVVKHYGQQMKLSMKHQLPKMKTFHEPTTILGNSLPKCTEIKPEVNTLTAENKLWDDAKNGFARCTAAEIQRFAFSATGLLSHVEEGLDSDATDSSSDDDLDEYTLRKNVAVNCSTEWKWLVDRARVGSRWTWLQAQISDLECKIQQLTDIHRQIRASKGIVVLEECQLPKDILKKQMQFADQAASLNILGNPQVPQECQDPVPEQDFEMSPSSPTLLLRNIEKQSAQLTEIINSLIAPLNLSPTSSPLSSKSCSHKCLANGIYRSASENLDELSSSSSWLLNQKHSKKKRKDRTRLKSSSLTFMSTSARTRPLQSFHKRKLYRLSPTFYWTPQTLPSKETAFLNTTQMPCLQSASTWSSYEHNSESYLLREHVSELDSSFHSVLSLPSDVPLHFHFETLLKKTEIKGNLAENKFVDEYIISPSPGMSHLQFLYSICLFMSLYLLFLHSKKNKI

SEQ ID NO: 42615 - protein, 705 aa, Homo sapiens; identical to SEQ ID NO: 42614
  Payload ID: 8664
  Gene Symbol: KANSL1L
  Gene Name: KAT8 regulatory NSL complex subunit 1-like
  Uniprot ID: A0AUZ9
  ENSP ID: ENSP00000401408

SEQ ID NO: 42616 - protein, 343 aa, Homo sapiens
  Payload ID: 8664
  Gene Symbol: KANSL1L
  Gene Name: KAT8 regulatory NSL complex subunit 1-like
  ENSP ID: ENSP00000402261
  MOD_RES (1)..(1): Any amino acid
XDDAKNGFARCTAAEIQRFAFSATGLLSHVEEGLDSDATDSSSDDDLDEYTLRKNVAVNCSTEWKWLVDRARVGSRWTWLQAQISDLECKIQQLTDIHRQIRASKGIVVLEECQLPKDILKKQMQFADQAASLNILGNPQVPQECQDPVPEQDFEMSPSSPTLLLRNIEKQSAQLTEIINSLIAPLNLSPTSSPLSSKSCSHKCLANGIYRSASENLDELSSSSSWLLNQKHSKKKRKDRTRLKSSSLTFMSTSARTRPLQSFHKRKLYRLSPTFYWTPQTLPSKETAFLNTTQMPCLQSASTWSSYEHNSESYLLREHVSELDSSFHSVLSLPSGKPPCNNF

SEQ ID NO: 42617 - protein, 945 aa, Homo sapiens
  Payload ID: 8664
  Gene Symbol: KANSL1L
  Gene Name: KAT8 regulatory NSL complex subunit 1-like
  Uniprot ID: A0AUZ9
  ENSP ID: ENSP00000405724
MTPALREATAKGISFSSLPSTMESDKMLYMESPRTVDEKLKGDTFSQMLGFPTPEPTLNTNFVNLKHFGSPQSSKHYQTVFLMRSNSTLNKHNENYKQKKLGEPSCNKLKNILYNGSNIQLSKICLSHSEEFIKKEPLSDTTSQCMKDVQIILDSNITKDTNVDKVQLQNCKWYQENALLDKVTDAEIKKGLLHCTQKKIVPGHSNVPVSSSAAEKEEEVHARLLHCVSKQKILLSQARRTQKHLQMLLAKHVVKHYGQQMKLSMKHQLPKMKTFHEPTTILGNSLPKCTEIKPEVNTLTAENKLWDDAKNGFARCTAAEIQRFAFSATGLLSHVEEGLDSDATDSSSDDDLDEYTLRKNVAVNCSTEWKWLVDRARVGSRWTWLQAQISDLECKIQQLTDIHRQIRASKGIVVLEECQLPKDILKKQMQFADQAASLNILGNPQVPQECQDPVPEQDFEMSPSSPTLLLRNIEKQSAQLTEIINSLIAPLNLSPTSSPLSSKSCSHKCLANGIYRSASENLDELSSSSSWLLNQKHSKKKRKDRTRLKSSSLTFMSTSARTRPLQSFHKRKLYRLSPTFYWTPQTLPSKETAFLNTTQMPCLQSASTWSSYEHNSESYLLREHVSELDSSFHSVLSLPSDVPLHFHFETLLKKTEIKGNLAENKFVDEYIISPSPGERTKLEESDFQHTESGSHSNFTAVSNVNVLSRIQNSSRNTARRRLRSESSYDIDNIVIPMSLVAPAKLEKLQYKEILTPSWRMVVLQPLDEYNLGKEEIEDLSDEVFSLRHKKYEEREQARWSLWEQSKWHRRNSRAYSKNVEGQDLLLKEYPNNFSSSQQCAAASPPGLPSENQDLCAYGLPSLNQSQETKSLWWERRAFPLKGEDMAALLCQDEKKDQVERSSTAFHGEIFGTSVPENGHHPKKQSDGMEEYKTFGLGLTNVKKNR

SEQ ID NO: 42618 - protein, 191 aa, Homo sapiens
  Payload ID: 8664
  Gene Symbol: KANSL1L
  Gene Name: KAT8 regulatory NSL complex subunit 1-like
  ENSP ID: ENSP00000407495
  MOD_RES (1)..(1): Any amino acid
XATGLLSHVEEGLDSDATDSSSDDDLDEYTLRKNVAVNCSTEWKWLVDRARVGSRWTWLQAQISDLECKIQQLTDIHRQIRASKGIVVLEECQLPKDILKKQMQFADQAASLNILGNPQVPQECQDPVPEQDFEMSPSSPTLLLRNIEKQSAQLTEIINSLIAPLNLSPTSSPLSSKSCSHKCLANGIYRR

SEQ ID NO: 42619 - protein, 70 aa, Homo sapiens
  Payload ID: 8664
  Gene Symbol: KANSL1L
  Gene Name: KAT8 regulatory NSL complex subunit 1-like
  ENSP ID: ENSP00000489299
  MOD_RES (1)..(1): Any amino acid
XRNTARRRLRSESSYDIDNIVIPMSLVAPAKLEKLQYKEILTPSWRMVVLQPLDEYNLGKEEIFGFWNCR

SEQ ID NO: 42620 - protein, 492 aa, Homo sapiens
  Payload ID: 8665
  Gene Symbol: KANSL2
  Gene Name: KAT8 regulatory NSL complex subunit 2
  Uniprot ID: Q9H9L4
  ENSP ID: ENSP00000415436
MNRIRIHVLPTNRGRITPVPRSQEPLSCAFTHRPCSHPRLEGQEFCIKHILEDKNAPFKQCSYISTKNGKRCPNAAPKPEKKDGVSFCAEHVRRNALALHAQMKKTNPGPVGETLLCQLSSYAKTELGSQTPESSRSEASRILDEDSWSDGEQEPITVDQTWRGDPDSEADSIDSDQEDPLKHAGVYTAEEVALIMREKLIRLQSLYIDQFKRLQHLLKEKKRRYLHNRKVEHEALGSSLLTGPEGLLAKERENLKRLKCLRRYRQRYGVEALLHRQLKERRMLATDGAAQQAHTTRSSQRCLAFVDDVRCSNQSLPMTRHCLTHICQDTNQVLFKCCQGSEEVPCNKPVPVSLSEDPCCPLHFQLPPQMYKPEQVLSVPDDLEAGPMDLYLSAAELQPTESLPLEFSDDLDVVGDGMQCPPSPLLFDPSLTLEDHLVKEIAEDPVDILGQMQMAGDGCRSQGSRNSEKASAPLSQSGLATANGKPEPTSIS

SEQ ID NO: 42621 - protein, 69 aa, Homo sapiens
  Payload ID: 8665
  Gene Symbol: KANSL2
  Gene Name: KAT8 regulatory NSL complex subunit 2
  ENSP ID: ENSP00000446493
MNRIRIHVLPTNRGRITPVPRSQEPLSCAFTHRPCSHPRLEGQEFCIKHILEDKNAPFKQCSYISTKNG

SEQ ID NO: 42622 - protein, 25 aa, Homo sapiens
  Payload ID: 8665
  Gene Symbol: KANSL2
  Gene Name: KAT8 regulatory NSL complex subunit 2
  ENSP ID: ENSP00000447093
  MOD_RES (1)..(1): Any amino acid
XPESSRSEASRILDMLVSTQQKKWP

SEQ ID NO: 42623 - protein, 206 aa, Homo sapiens
  Payload ID: 8665
  Gene Symbol: KANSL2
  Gene Name: KAT8 regulatory NSL complex subunit 2
  ENSP ID: ENSP00000447608
ENLKRLKCLRRYRQRYGVEALLHRQLKERRMLATDGAAQQAHTTRSSQRCLAFVDDVRCSNQSLPMTRHCLTHICQDTNQVLFKCCQGSEEVPCNKPVPVSLSEDPCCPLHFQLPPQMYKPEQDLDVVGDGMQCPPSPLLFDPSLTLEDHLVKEIAEDPVDILGQMQMAGDGCRSQGSRNSEKASAPLSQSGLATANGKPEPTSIS

SEQ ID NO: 42624 - protein, 133 aa, Homo sapiens
  Payload ID: 8665
  Gene Symbol: KANSL2
  Gene Name: KAT8 regulatory NSL complex subunit 2
  ENSP ID: ENSP00000448129
MNRIRIHVLPTNRGRITPVPRVSFCAEHVRRNALALHAQMKKTNPGPVGETLLCQLSSYAKTELGSQTPESSRSEASRILDEDSWSDGEQEPITVDQTWRGDPDSEADSIDSDQEDPLKHAGVYTAEEVALIM

SEQ ID NO: 42625 - protein, 155 aa, Homo sapiens
  Payload ID: 8665
  Gene Symbol: KANSL2
  Gene Name: KAT8 regulatory NSL complex subunit 2
  Uniprot ID: Q9H9L4
  ENSP ID: ENSP00000448131
MNRIRIHVLPTNRGRITPVPRSQEPLSCAFTHRPCSHPRLEGQEFCIKHILEDKNAPFKQCSYISTKNGKRCPNAAPKPEKKDGVSFCAEHVRRNALALHAQMKKTNPGPVGETLLCQLSSYAKTELGSQTPESSRSEASRILDMLVSTQQKKWP

SEQ ID NO: 42626 - protein, 108 aa, Homo sapiens
  Payload ID: 8665
  Gene Symbol: KANSL2
  Gene Name: KAT8 regulatory NSL complex subunit 2
  ENSP ID: ENSP00000448473
MNRIRIHVLPTNRGRITPVPRSQEPLSCAFTHRPCSHPRLEGQEFCIKHILEDKNAPFKQCSYISTKNGKRCPNAAPKPEKKDGVSFCAEHVRRNALALHAQMKKTNP

SEQ ID NO: 42627 - protein, 454 aa, Homo sapiens
  Payload ID: 8665
  Gene Symbol: KANSL2
  Gene Name: KAT8 regulatory NSL complex subunit 2
  ENSP ID: ENSP00000448833
MNRIRIHVLPTNRGRITPVPRSQEPLSCAFTHRPCSHPRLEGQEFCIKHILEDKNAPFKQCSYISTKNGKRCPNAAPKPEKKDGVSFCAEHVRRNALALHAQMKKTNPGPVGETLLCQLSSYAKTELGSQTPESSRSEASRILDEDSWSDGEQEPITVDQTWRGDPDSEADSIDSDQEDPLKHAGVYTAEEVALIMREKLIRLQSLYIDQFKRLQHLLKEKKRRYLHNRKVEHEALGSSLLTGPEGLLAKERENLKRLKCLRRYRQRYGVEALLHRQLKERRMLATDGAAQQAHTTRSSQRCLAFVDDVRCSNQSLPMTRHCLTHICQDTNQVLFKCCQGSEEVPCNKPVPVSLSEDPCCPLHFQLPPQMYKPEQDLDVVGDGMQCPPSPLLFDPSLTLEDHLVKEIAEDPGQMQMAGDGCRSQGSRNSEKASAPLSQSGLATANGKPEPTSIS

SEQ ID NO: 42628 - protein, 74 aa, Homo sapiens
  Payload ID: 8665
  Gene Symbol: KANSL2
  Gene Name: KAT8 regulatory NSL complex subunit 2
  ENSP ID: ENSP00000449126
PNAAPKPEKKDGVSFCAEHVRRNALALHAQMKKTNPGPVGETLLCQLSSYAKTELGSQTPESSRSEASRILGLG

SEQ ID NO: 42629 - protein, 675 aa, Homo sapiens
  Payload ID: 8665
  Gene Symbol: KANSL2
  Gene Name: KAT8 regulatory NSL complex subunit 2
  ENSP ID: ENSP00000449747
MAVLFPLSSCGWAAISLFLSAQSCYSASKQCQSQSPSCRLPGARISGDWSRRTKWRSHRLPRPGPVVRSEAGRDKGGVRGGGVAAAWGWCCRFPSCCSCASPEDTFSVVWFGVGPGMEGHAKGRQSHRCLWRLGEGGGDLRSVPYGDDFCMSFGNCPRDLCGAGIFGKGKGFLVFRLTPQVLVMNRIRIHVLPTNRGRITPVPRSQEPLSCAFTHRPCSHPRLEGQEFCIKHILEDKNAPFKQCSYISTKNGKRCPNAAPKPEKKDGVSFCAEHVRRNALALHAQMKKTNPGPVGETLLCQLSSYAKTELGSQTPESSRSEASRILDEDSWSDGEQEPITVDQTWRGDPDSEADSIDSDQEDPLKHAGVYTAEEVALIMREKLIRLQSLYIDQFKRLQHLLKEKKRRYLHNRKVEHEALGSSLLTGPEGLLAKERENLKRLKCLRRYRQRYGVEALLHRQLKERRMLATDGAAQQAHTTRSSQRCLAFVDDVRCSNQSLPMTRHCLTHICQDTNQVLFKCCQGSEEVPCNKPVPVSLSEDPCCPLHFQLPPQMYKPEQVLSVPDDLEAGPMDLYLSAAELQPTESLPLEFSDDLDVVGDGMQCPPSPLLFDPSLTLEDHLVKEIAEDPVDILGQMQMAGDGCRSQGSRNSEKASAPLSQSGLATANGKPEPTSIS

SEQ ID NO: 42630 - protein, 340 aa, Homo sapiens
  Payload ID: 8665
  Gene Symbol: KANSL2
  Gene Name: KAT8 regulatory NSL complex subunit 2
  ENSP ID: ENSP00000449891
  MOD_RES (1)..(1): Any amino acid
XLPTNRGRITPVPRSQEPLSCAFTHRPCSHPRLEGQEFCIKHILEDKNAPFKQCSYISTKNGKRCPNAAPKPEKKDGVSFCAEHVRRNALALHAQMKKTNPGPVGETLLCQLSSYAKTELGSQTPESSRSEASRILDEDSWSDGEQEPITVDQTWRGDPDSEADSIDSDQEDPLKHAGVYTAEEVALIMREKLIRLQSLYIDQFKRLQHLLKEKKRRYLHNRKVEHEALGSSLLTGPEGLLAKERENLKRLKCLRRYRQRYGVEALLHRQLKERRMLATDGAAQQAHTTRSSQRCLAFVDDVRCSNQSLPMTRHCLTQKDATAIGDLLTLYCGLMETALD

SEQ ID NO: 42631 - protein, 72 aa, Homo sapiens
  Payload ID: 8666
  Gene Symbol: KANSL3
  Gene Name: KAT8 regulatory NSL complex subunit 3
  ENSP ID: ENSP00000346144
MAHRGGERDFQTSARRMGTSLLFQLSVHERELDLVFLDHSYAKPWSAHPDASSARPTRMLFVTPRRQHESTI

SEQ ID NO: 42632 - protein, 93 aa, Homo sapiens
  Payload ID: 8666
  Gene Symbol: KANSL3
  Gene Name: KAT8 regulatory NSL complex subunit 3
  ENSP ID: ENSP00000394476
SESDVPIDVETVTSTPMPLYDNQKARSVMNECERHVIFARTDADAPPPPEDWEEHVNRVSLCHPDCSAVARSQLTTSLDLQDSVSLWTTTLLL

SEQ ID NO: 42633 - protein, 878 aa, Homo sapiens
  Payload ID: 8666
  Gene Symbol: KANSL3
  Gene Name: KAT8 regulatory NSL complex subunit 3
  Uniprot ID: Q9P2N6
  ENSP ID: ENSP00000396749
MAHRGGERDFQTSARRMGTSLLFQLSVHERELDLVFLDHSYAKPWSAHPDASSARPTRMLFVTPRRQHESTIESDVPIDVETVTSTPMPLYDNQKARSVMNECERHVIFARTDADAPPPPEDWEEHVNRTGWTMAQNKLFNKILKALQSDRLARLANEGACNEPVLRRVAVDKCARRVRQALASVSWDTKLIQWLHTTLVETLSLPMLAAYLDALQTLKGKIPTLIDRMLVSSNTKTGAAGAEALSLLLKRPWDPAVGVLSHNKPSKLPGSPLILIASSGPSSSVFPTSRRHRFWQSQLSCLGKVIPVATHLLNNGSGVGVLQCLEHMIGAVRSKVLEIHSHFPHKPIILIGWNTGALVACHVSVMEYVTAVVCLGFPLLTVDGPRGDVDDPLLDMKTPVLFVIGQNSLQCHPEAMEDFREKIRAENSLVVVGGADDNLRISKAKKKSEGLTQSMVDRCIQDEIVDFLTGVLTRAEGHMGSEPRDQDAEKKKKPRDVARRDLAFEVPERGSRPASPAAKLPASPSGSEDLSSVSSSPTSSPKTKVTTVTSAQKSSQIGSSQLLKRHVQRTEAVLTHKQAQVPISSEPPEEGEKEDLRVQLKRHHPSSPLPGSKTSKRPKIKVSLISQGDTAGGPCAPSQGSAPEAAGGKPITMTLGQASAGAKELTGLLTTAKSSSSEGGVSASPVPSVVSSSTAPSALHTLQSRLVATSPGSSLPGATSASSLLQGLSFSLQDISSKTSGLPANPSPGPAPQATSVKLPTPMQSLGAITTGTSTIVRTIPVATTLSSLGATPGGKPTAIHQLLTNGGLAKLASSLPGLAQISNQASGLKVPTTITLTLRGQPSRITTLSPMGSGAAPSEESSSQVLPSSSQRLPPAP

SEQ ID NO: 42634 - protein, 76 aa, Homo sapiens
  Payload ID: 8666
  Gene Symbol: KANSL3
  Gene Name: KAT8 regulatory NSL complex subunit 3
  ENSP ID: ENSP00000397994
MAHRGGERDFQTSARRMGTSLLFQLSVHERELDLVFLDHSYAKPWSAHPDASSARPTRMLFVTPRRQHESTMLCTK

SEQ ID NO: 42635 - protein, 172 aa, Homo sapiens
  Payload ID: 8666
  Gene Symbol: KANSL3
  Gene Name: KAT8 regulatory NSL complex subunit 3
  ENSP ID: ENSP00000405988
MLAAYLDALQTLKGKIPTLIDRMLVSSNTKTGAAGAEALSLLLKRPWDPAVGVLSHNKPSKLPGSPLILIASSGPSSSVFPTSRRHRFWQSQLSCLGKVIPVATHLLNNGSGVGVLQCLEHMIGAVRSKVLEIHSHFPHKPIILIGWNTGALVACHVSNFYLIWRLSWDGIP

SEQ ID NO: 42636 - protein, 75 aa, Homo sapiens
  Payload ID: 8666
  Gene Symbol: KANSL3
  Gene Name: KAT8 regulatory NSL complex subunit 3
  ENSP ID: ENSP00000410775
MAHRGGERDFQTSARRMGTSLLFQLSVHERELDLVFLDHSYAKPWSAHPDASSARPTRMLFVTPRRQHESTISQP

SEQ ID NO: 42637 - protein, 72 aa, Homo sapiens; identical to SEQ ID NO: 42631
  Payload ID: 8666
  Gene Symbol: KANSL3
  Gene Name: KAT8 regulatory NSL complex subunit 3
  ENSP ID: ENSP00000413229

SEQ ID NO: 42638 - protein, 780 aa, Homo sapiens
  Payload ID: 8666
  Gene Symbol: KANSL3
  Gene Name: KAT8 regulatory NSL complex subunit 3
  Uniprot ID: Q9P2N6
  ENSP ID: ENSP00000414426
MAHRGGERDFQTSARRMGTSLLFQLSVHERELDLVFLDHSYAKPWSAHPDASSARPTRMLFVTPRRQHESTIESDVPIDVETVTSTPMPLYDNQKARSVMNECERHVIFARTDADAPPPPEDWEEHVNRTGWTMAQNKLFNKILKALQSDRLARLANEGACNEPVLRRVAVDKCARRVRQALASVSWDTKLIQWLHTTLVETLSLPMLAAYLDALQTLKGKIPTLIDRMLVSSNTKTGAAGAEALSLLLKRPWDPAVGVLSHNKPSKLPGSPLILIASSGPSSSVFPTSRRHRFWQSQLSCLGKVIPVATHLLNNGSGVGVLQCLEHMIGAVRSKVLEIHSHFPHKPIILIGWNTGALVACHVSVMEYVTAVVCLGFPLLTVDGPRGDVDDPLLDMKTPVLFVIGQNSLQCHPEAMEDFREKIRAENSLVVVGGADDNLRISKAKKKSEGLTQSMVDRCIQDEIVDFLTGVLTRAEGHMGSEPRDQDAEKKKKPRDVARRDLAFEVPERGSRPASPAAKLPASPSGSEDLSSVSSSPTSSPKTKVTTVTSAQKSSQIGSSQLLKRHVQRTEAVLTHKQAQAQFAAFLKQNMLVRKALPPGTSSCLFVPISSEPPEEGEKEDLRVQLKRHHPSSPLPGSKTSKRPKIKVSLISQGDTAGGPCAPSQGSAPEAAGGKPITMTLGQASAGAKELTGLLTTAKSSSSEGGVSASPVPSVVSSSTAPSALHTLQSRLVATSPGSSLPGATSASSLLQGLSFSLQDISSKTSGLPANPSPGPAPQA

SEQ ID NO: 42639 - protein, 154 aa, Homo sapiens
  Payload ID: 8666
  Gene Symbol: KANSL3
  Gene Name: KAT8 regulatory NSL complex subunit 3
  ENSP ID: ENSP00000415041
MAHRGGERDFQTSARRMGTSLLFQLSVHERELDLVFLDHSYAKPWSAHPDASSARPTRMLFVTPRRQHESTIESDVPIDVETVTSTPMPLYDNQKARSVMNECERHVIFARTDADAPPPPEDWEEHVNRLVMSQCCAVLLWTSVQGECGRLWQV

SEQ ID NO: 42640 - protein, 67 aa, Homo sapiens
  Payload ID: 8666
  Gene Symbol: KANSL3
  Gene Name: KAT8 regulatory NSL complex subunit 3
  ENSP ID: ENSP00000415236
MPLYDNQKARSVMNECERHVIFARTDADAPPPPEDWEEHVNRLVMSQCCAVLLWTSVQGECGRLWQV

SEQ ID NO: 42641 - protein, 132 aa, Homo sapiens
  Payload ID: 8666
  Gene Symbol: KANSL3
  Gene Name: KAT8 regulatory NSL complex subunit 3
  ENSP ID: ENSP00000415403
MAHRGGERDFQTSARRMGTSLLFQLSVHERELDLVFLDHSYAKPWSAHPDASSARPTRMLFVTPRRQHESTIESDVPIDVETVTSTPMPLYDNQKARSVMNECERHVIFARTDADAPPPPEDWEEHVNRSQP

SEQ ID NO: 42642 - protein, 154 aa, Homo sapiens; identical to SEQ ID NO: 42639
  Payload ID: 8666
  Gene Symbol: KANSL3
  Gene Name: KAT8 regulatory NSL complex subunit 3
  ENSP ID: ENSP00000473116

SEQ ID NO: 42643 - protein, 491 aa, Homo sapiens
  Payload ID: 8667
  Gene Symbol: KATNA1
  Gene Name: katanin p60 (ATPase containing) subunit A 1
  Uniprot ID: O75449
  ENSP ID: ENSP00000335106
MSLLMISENVKLAREYALLGNYDSAMVYYQGVLDQMNKYLYSVKDTYLQQKWQQVWQEINVEAKHVKDIMKTLESFKLDSTPLKAAQHDLPASEGEVWSMPVPVERRPSPGPRKRQSSQYSDPKSHGNRPSTTVRVHRSSAQNVHNDRGKAVRCREKKEQNKGREEKNKSPAAVTEPETNKFDSTGYDKDLVEALERDIISQNPNVRWDDIADLVEAKKLLKEAVVLPMWMPEFFKGIRRPWKGVLMVGPPGTGKTLLAKAVATECKTTFFNVSSSTLTSKYRGESEKLVRLLFEMARFYSPATIFIDEIDSICSRRGTSEEHEASRRVKAELLVQMDGVGGTSENDDPSKMVMVLAATNFPWDIDEALRRRLEKRIYIPLPSAKGREELLRISLRELELADDVDLASIAENMEGYSGADITNVCRDASLMAMRRRIEGLTPEEIRNLSKEEMHMPTTMEDFEMALKKVSKSVSAADIERYEKWIFEFGSC

SEQ ID NO: 42644 - protein, 311 aa, Homo sapiens
  Payload ID: 8667
  Gene Symbol: KATNA1
  Gene Name: katanin p60 (ATPase containing) subunit A 1
  Uniprot ID: O75449
  ENSP ID: ENSP00000335180
MSLLMISENVKLAREYALLGNYDSAMVYYQGVLDQMNKYLYSVKDTYLQQKWQQVWQEINVEAKHVKDIMKTLESFKLDSTPLKAAQHDLPASEGEVWSMPVPVERRPSPGPRKRQSSQYSDPKSHGNRPSTTVRVHRSSAQNVHNDRGKAVRCREKKEQNKGREEKGVLMVGPPGTGKTLLAKAVATECKTTFFNVSSSTLTSKYRGESEKLVRLLFEMARFYSPATIFIDEIDSICSRRGTSEEHEASRRVKAELLVQMDGVGGTSENDDPSKMVMVLAATNFPWDIDEALRRRLEKRIYIPLPSGMRP

SEQ ID NO: 42645 - protein, 491 aa, Homo sapiens; identical to SEQ ID NO: 42643
  Payload ID: 8667
  Gene Symbol: KATNA1
  Gene Name: katanin p60 (ATPase containing) subunit A 1
  Uniprot ID: O75449
  ENSP ID: ENSP00000356381

SEQ ID NO: 42646 - protein, 280 aa, Homo sapiens
  Payload ID: 8667
  Gene Symbol: KATNA1
  Gene Name: katanin p60 (ATPase containing) subunit A 1
  ENSP ID: ENSP00000390322
MSLLMISENVKLAREYALLGNYDSAMVYYQGVLDQMNKYLYSVKDTYLQQKWQQVWQEINVEAKHVKDIMKTLESFKLDSTPLKAAQHDLPASEGEVWSMPVPVERRPSPGPRKRQSSQYSDPKSHGNRPSTTVRVHRSSAQNVHNDRGKAVRCREKKEQNKGREEKNKSPAAVTEPETNKFDSTGYDKDLVEALERDIISQNPNVRWDDIADLVEAKKLLKEAVVLPMWMPEFFKGIRRPWKGVLMVGPPGTGKTLLAKAVATECKTTFFNVSSSTLTS

SEQ ID NO: 42647 - protein, 211 aa, Homo sapiens
  Payload ID: 8667
  Gene Symbol: KATNA1
  Gene Name: katanin p60 (ATPase containing) subunit A 1
  ENSP ID: ENSP00000398993
MSLLMISENVKLAREYALLGNYDSAMVYYQGVLDQMNKYLYSVKDTYLQQKWQQVWQEINVEAKHVKDIMKTLESFKLDSTPLKAAQHDLPASEGEVWSMPVPVERRPSPGPRKRQSSQYSDPKSHGNRPSTTVRVHRSSAQNVHNDRGKAVRCREKKEQNKGREEKNKSPAAVTEPETNKFDSTGYDKDLVEALERDIISQNPNVRWDDI

SEQ ID NO: 42648 - protein, 490 aa, Homo sapiens
  Payload ID: 8668
  Gene Symbol: KATNAL1
  Gene Name: katanin p60 subunit A-like 1
  Uniprot ID: Q9BW62
  ENSP ID: ENSP00000369989
MNLAEICDNAKKGREYALLGNYDSSMVYYQGVMQQIQRHCQSVRDPAIKGKWQQVRQELLEEYEQVKSIVSTLESFKIDKPPDFPVSCQDEPFRDPAVWPPPVPAEHRAPPQIRRPNREVRPLRKEMAGVGARGPVGRAHPISKSEKPSTSRDKDYRARGRDDKGRKNMQDGASDGEMPKFDGAGYDKDLVEALERDIVSRNPSIHWDDIADLEEAKKLLREAVVLPMWMPDFFKGIRRPWKGVLMVGPPGTGKTMLAKAVATECGTTFFNVSSSTLTSKYRGESEKLVRLLFEMARFYAPTTIFIDEIDSICSRRGTSDEHEASRRVKSELLIQMDGVGGALENDDPSKMVMVLAATNFPWDIDEALRRRLEKRIYIPLPTAKGRAELLKINLREVELDPDIQLEDIAEKIEGYSGADITNVCRDASLMAMRRRINGLSPEEIRALSKEELQMPVTKGDFELALKKIAKSVSAADLEKYEKWMVEFGSA

SEQ ID NO: 42649 - protein, 490 aa, Homo sapiens; identical to SEQ ID NO: 42648
  Payload ID: 8668
  Gene Symbol: KATNAL1
  Gene Name: katanin p60 subunit A-like 1
  Uniprot ID: Q9BW62
  ENSP ID: ENSP00000369991

SEQ ID NO: 42650 - protein, 153 aa, Homo sapiens
  Payload ID: 8668
  Gene Symbol: KATNAL1
  Gene Name: katanin p60 subunit A-like 1
  ENSP ID: ENSP00000397776
MNLAEICDNAKKGREYALLGNYDSSMVYYQGVMQQIQRHCQSVRDPAIKGKWQQVRQELLEEYEQVKSIVSTLESFKIDKPPDFPVSCQDEPFRDPAVWPPPVPAEHRAPPQIRRPNREVRPLRKEMAGVGARGPVGRAHPISKSEKPSTSRD

SEQ ID NO: 42651 - protein, 150 aa, Homo sapiens
  Payload ID: 8668
  Gene Symbol: KATNAL1
  Gene Name: katanin p60 subunit A-like 1
  ENSP ID: ENSP00000407792
MNLAEICDNAKKGREYALLGNYDSSMVYYQGVMQQIQRHCQSVRDPAIKGKWQQVRQELLEEYEQVKSIVSTLESFKIDKPPDFPVSCQDEPFRDPAVWPPPVPAEHRAPPQIRRPNREVRPLRKEMAGVGARGPVGRAHPISKSEKPST

SEQ ID NO: 42652 - protein, 466 aa, Homo sapiens
  Payload ID: 8669
  Gene Symbol: KATNAL2
  Gene Name: katanin p60 subunit A-like 2
  Uniprot ID: Q8IYT4
  ENSP ID: ENSP00000245121
MEYESYYFVKFQKYPKIVKKSSDTAENNLPQRSRGKTRRMMNDSCQNLPKINQQRPRSKTTAGKTGDTKSLNKEHPNQEVVDNTRLESANFGLHISRIRKDSGEENAHPRRGQIIDFQGLLTDAIKGATSELALNTFDHNPDPSERLLKPLSAFIGMNSEMRELAAVVSRDIYLHNPNIKWNDIIGLDAAKQLVKEAVVYPIRYPQLFTGILSPWKGLLLYGPPGTGKTLLAKAVATECKTTFFNISASTIVSKWRGDSEKLVRVLFELARYHAPSTIFLDELESVMSQRGTASGGEHEGSLRMKTELLVQMDGLARSEDLVFVLAASNLPWELDCAMLRRLEKRILVDLPSREARQAMIYHWLPPVSKSRALELHTELEYSVLSQETEGYSGSDIKLVCREAAMRPVRKIFDALENHQSESSDLPRIQLDIVTTADFLDVLTHTKPSAKNLAQRYSDWQREFESV

SEQ ID NO: 42653 - protein, 538 aa, Homo sapiens
  Payload ID: 8669
  Gene Symbol: KATNAL2
  Gene Name: katanin p60 subunit A-like 2
  Uniprot ID: Q8IYT4
  ENSP ID: ENSP00000348478
MELSYQTLKFTHQAREACEMRTEARRKNLLILISHYLTQEGYIDTANALEQETKLGLRRFEVCDNIDLETILMEYESYYFVKFQKYPKIVKKSSDTAENNLPQRSRGKTRRMMNDSCQNLPKINQQRPRSKTTAGKTGDTKSLNKEHPNQEVVDNTRLESANFGLHISRIRKDSGEENAHPRRGQIIDFQGLLTDAIKGATSELALNTFDHNPDPSERLLKPLSAFIGMNSEMRELAAVVSRDIYLHNPNIKWNDIIGLDAAKQLVKEAVVYPIRYPQLFTGILSPWKGLLLYGPPGTGKTLLAKAVATECKTTFFNISASTIVSKWRGDSEKLVRVLFELARYHAPSTIFLDELESVMSQRGTASGGEHEGSLRMKTELLVQMDGLARSEDLVFVLAASNLPWELDCAMLRRLEKRILVDLPSREARQAMIYHWLPPVSKSRALELHTELEYSVLSQETEGYSGSDIKLVCREAAMRPVRKIFDALENHQSESSDLPRIQLDIVTTADFLDVLTHTKPSAKNLAQRYSDWQREFESV

SEQ ID NO: 42654 - protein, 341 aa, Homo sapiens
  Payload ID: 8669
  Gene Symbol: KATNAL2
  Gene Name: katanin p60 subunit A-like 2
  ENSP ID: ENSP00000464779
  MOD_RES (1)..(1): Any amino acid
XMMNDSCQNLPKINQQRPRSKTTAGKTGDTKSLNKEHPNQEVVDNTRLESANFGLHISRIRKDSGEENAHPRRGQIIDFQGLLTDAIKGATSELALNTFDHNPDPSERLLKPLSAFIGMNSEMRELAAVVSRYPQLFTGILSPWKGLLLYGPPGTGKTLLAKAVATECKTTFFNISASTIVSKWRGDSEKLVRVLFELARYHAPSTIFLDELESVMSQRGTASGGEHEGSLRMKTELLVQMDGLARSEDLVFVLAASNLPWELDCAMLRRLEKRILVDLPSREARQAMIYHWLPPVSKSRALELHTELEYSVLSQTEGYSGSDIKLVCREAAMRPVRKIFD

SEQ ID NO: 42655 - protein, 128 aa, Homo sapiens
  Payload ID: 8669
  Gene Symbol: KATNAL2
  Gene Name: katanin p60 subunit A-like 2
  ENSP ID: ENSP00000466302
PQLFTGILSPWKGLLLYGPPGTGKTLLAKAVATECKTTFFNISASTIVSKWRGDSEKLVRVLFELARYHAPSTIFLDELESVMSQRGTASGGEHEGSLRMKTELLVQMDGLARSEDLVFVLAASNLPW

SEQ ID NO: 42656 - protein, 222 aa, Homo sapiens
  Payload ID: 8669
  Gene Symbol: KATNAL2
  Gene Name: katanin p60 subunit A-like 2
  ENSP ID: ENSP00000466674
MRTEARRKNLLILISHYLTQEGYIDTANALEQETKLGLRRFEVCDNIDLETILMEYESYYFVKFQKYPKIVKKSSDTENNLPQRSRGKTRRMMNDSCQNLPKINQQRPRSKTTAGKTGDTKSLNKEHPNQEVVDNTRLESANFGLHISRIRKDSGEENAHPRRGQIIDFQGLLTDAIKGATSELALNTFDHNPDPSERLLKPLSAFIGMNSEMRELAAVVSR

SEQ ID NO: 42657 - protein, 154 aa, Homo sapiens
  Payload ID: 8669
  Gene Symbol: KATNAL2
  Gene Name: katanin p60 subunit A-like 2
  ENSP ID: ENSP00000467488
EKLVRVLFELARYHAPSTIFLDELESVMSQRGTASGGEHEGSLRMKTELLVQMDGLARSEDLVFVLAASNLPCLKAIALQPGDRARLRLKKKKSVLVHFHAAGEDISKTGKKKKLTGLTVSHGWGASESWRGAKDTSYMVAARENEEDARSGNP

SEQ ID NO: 42658 - protein, 105 aa, Homo sapiens
  Payload ID: 8669
  Gene Symbol: KATNAL2
  Gene Name: katanin p60 subunit A-like 2
  ENSP ID: ENSP00000467610
MELSYQTLKFTHQAREAVLFELARYHAPSTIFLDELESVMSQRGTASGGEHEGSLRMKTELLVQMDGLARSEDLVFVLAASNLPCNHMHFWAPGRSCPPCLQSRS

SEQ ID NO: 42659 - protein, 655 aa, Homo sapiens
  Payload ID: 8670
  Gene Symbol: KATNB1
  Gene Name: katanin p80 (WD repeat containing) subunit B 1
  Uniprot ID: Q9BVA0
  ENSP ID: ENSP00000368982
MATPVVTKTAWKLQEIVAHASNVSSLVLGKASGRLLATGGDDCRVNLWSINKPNCIMSLTGHTSPVESVRLNTPEELIVAGSQSGSIRVWDLEAAKILRTLMGHKANICSLDFHPYGEFVASGSQDTNIKLWDIRRKGCVFRYRGHSQAVRCLRFSPDGKWLASAADDHTVKLWDLTAGKMMSEFPGHTGPVNVVEFHPNEYLLASGSSDRTIRFWDLEKFQVVSCIEGEPGPVRSVLFNPDGCCLYSGCQDSLRVYGWEPERCFDVVLVNWGKVADLAICNDQLIGVAFSQSNVSSYVVDLTRVTRTGTVARDPVQDHRPLAQPLPNPSAPLRRIYERPSTTCSKPQRVKQNSESERRSPSSEDDRDERESRAEIQNAEDYNEIFQPKNSISRTPPRRSEPFPAPPEDDAATAKEAAKPSPAMDVQFPVPNLEVLPRPPVVASTPAPKAEPAIIPATRNEPIGLKASDFLPAVKIPQQAELVDEDAMSQIRKGHDTMCVVLTSRHKNLDTVRAVWTMGDIKTSVDSAVAINDLSVVVDLLNIVNQKASLWKLDLCTTVLPQIEKLLQSKYESYVQTGCTSLKLILQRFLPLITDMLAAPPSVGVDISREERLHKCRLCYKQLKSISGLVKSKSGLSGRHGSTFRELHLLMASLD

SEQ ID NO: 42660 - protein, 208 aa, Homo sapiens
  Payload ID: 8670
  Gene Symbol: KATNB1
  Gene Name: katanin p80 (WD repeat containing) subunit B 1
  ENSP ID: ENSP00000455270
MIQDRDRCAQAAAVAAVEEIVAHASNVSSLVLGKASGRLLATGGDDCRVNLWSINKPNCIMSLTGHTSPVESVRLNTPEELIVAGSQSGSIRVWDLEAAKILRTLMGHKANICSLDFHPYGEFVASGSQDTNIKLWDIRRKGCVFRYRGHSQAVRCLRFSPDGKWLASAADDHTVKLWDLTAGKMMSEFPGHTGPVNVVEFHPNEYLL

SEQ ID NO: 42661 - protein, 210 aa, Homo sapiens
  Payload ID: 8670
  Gene Symbol: KATNB1
  Gene Name: katanin p80 (WD repeat containing) subunit B 1
  ENSP ID: ENSP00000455350
MATPVVTKTAWKLQEIVAHASNVSSLVLGKASGRLLATGGDDCRVNLWSINKPNCIMSLTGHTSPVESVRLNTPEELIVAGSQSGSIRVWDLEAAKILRTLMGHKANICSLDFHPYGEFVASGSQDTNIKLWDIRRKGCVFRYRGHSQAVRCLRFSPDGKWLASAADDHTVKLWDLTAGKMMSEFPGHTGPVNVVEFHPNEYLLASGSSD

SEQ ID NO: 42662 - protein, 117 aa, Homo sapiens
  Payload ID: 8670
  Gene Symbol: KATNB1
  Gene Name: katanin p80 (WD repeat containing) subunit B 1
  ENSP ID: ENSP00000457046
MATPVVTKTAWKLQEIVAHASNVSSLVLGKASGRLLATGGDDCRVNLWSINKPNCIMSLTGHTSPVESVRLNTPEELIVAGSQSGSIRVWDLEAAKTLGHQEERLCLPIQGAQPGRA

SEQ ID NO: 42663 - protein, 276 aa, Homo sapiens
  Payload ID: 8670
  Gene Symbol: KATNB1
  Gene Name: katanin p80 (WD repeat containing) subunit B 1
  ENSP ID: ENSP00000457334
  MOD_RES (1)..(1): Any amino acid
XRAEIQNAEDYNEIFQPKNSISRTPPRRSEPFPAPPEDDAATAKEAAKPSPAMDVQFPVPNLEVLPRPPVVASTPAPKAEPAIIPATRNEPIGLKASDFLPAVKIPQQAELVDEDAMSQIRKGHDTMCVVLTSRHKNLDTVRAVWTMGDIKGHTVPHCPTPDGALFAQTSVDSAVAINDLSVVVDLLNIVNQKASLWKLDLCTTVLPQIEKLLQSKYESYVQTGCTSLKLILQRFLPLITDMLAAPPSVGVDISREERLHKCRLCYKQLKSISGLV

SEQ ID NO: 42664 - protein, 79 aa, Homo sapiens
  Payload ID: 8670
  Gene Symbol: KATNB1
  Gene Name: katanin p80 (WD repeat containing) subunit B 1
  ENSP ID: ENSP00000457347
MATPVVTKTAWKLQEIVAHASNVSSLVLGKASGRLLATGGDDCRVNLWSINKPNCIMSLTGHTSPVESVRLNTPEELIV

SEQ ID NO: 42665 - protein, 304 aa, Homo sapiens
  Payload ID: 8671
  Gene Symbol: KATNBL1
  Gene Name: katanin p80 subunit B-like 1
  Uniprot ID: Q9H079
  ENSP ID: ENSP00000256544
MASETHNVKKRNFCNKIEDHFIDLPRKKISNFTNKNMKEVKKSPKQLAAYINRTVGQTVKSPDKLRKVIYRRKKVHHPFPNPCYRKKQSPGSGGCDMANKENELACAGHLPEKLHHDSRTYLVNSSDSGSSQTESPSSKYSGFFSEVSQDHETMAQVLFSRNMRLNVALTFWRKRSISELVAYLLRIEDLGVVVDCLPVLTNCLQEEKQYISLGCCVDLLPLVKSLLKSKFEEYVIVGLNWLQAVIKRWWSELSSKTEIINDGNIQILKQQLSGLWEQENHLTLVPGYTGNIAKDVDAYLLQLH

SEQ ID NO: 42666 - protein, 178 aa, Homo sapiens
  Payload ID: 8671
  Gene Symbol: KATNBL1
  Gene Name: katanin p80 subunit B-like 1
  ENSP ID: ENSP00000452963
MASETHNVKKRNFCNKIEDHFIDLPRKKISNFTNKNMKEVKKSPKQLAAYINRTVGQTVKSPDKLRKVIYRRKKVHHPFPNPCYRKKQSPGSGGCDMANKENELACAGHLPEKLHHDSRTYLVNSSDSGSSQTESPSSKYSGFFSEVSQDHETMAQVLFSRNMRLNVALTFWRKRSIS

SEQ ID NO: 42667 - protein, 168 aa, Homo sapiens
  Payload ID: 8671
  Gene Symbol: KATNBL1
  Gene Name: katanin p80 subunit B-like 1
  ENSP ID: ENSP00000453072
KSPDKLRKVIYRRKKVHHPFPNPCYRKKQSPGSGGCDMANKENELACAGHLPEKLHHDSRTYLVNSSDSGSSQTESPSSKYSGFFSEVSQDHETMAQVLFSRNMRLNVALTFWRKRSISELVAYLLRNIQILKQQLSGLWEQENHLTLVPGYTGNIAKDVDAYLLQLH

SEQ ID NO: 42668 - protein, 39 aa, Homo sapiens
  Payload ID: 8671
  Gene Symbol: KATNBL1
  Gene Name: katanin p80 subunit B-like 1
  ENSP ID: ENSP00000453283
MASETHNVKKRNFCNKIEDHFIDLPRKKISNFTNKNMKE

SEQ ID NO: 42669 - protein, 111 aa, Homo sapiens
  Payload ID: 8671
  Gene Symbol: KATNBL1
  Gene Name: katanin p80 subunit B-like 1
  ENSP ID: ENSP00000453383
  MOD_RES (1)..(1): Any amino acid
XSKFEEYVIVGLNWLQAVIKRWWSELSSKTEIINDGNIQILKQQLSGLWEQENHLTLVPGYTGNIAKKLKEEGRARWLMPVIPVLWEAKVGRSRAQEIETIPANMVKPHLY

SEQ ID NO: 42670 - protein, 152 aa, Homo sapiens
  Payload ID: 8671
  Gene Symbol: KATNBL1
  Gene Name: katanin p80 subunit B-like 1
  ENSP ID: ENSP00000453713
VSQDHETMAQVLFSRNMRLNVALTFWRKRSISELVAYLLRIEDLGVVVDCLPVLTNCLQEEKQYISLGCCVDLLPLVKSLLKSKFEEYVIVGLNWLQAVIKRWWSELSSKTEIINDGNIQILKQQLSGLWEQENHLTLVPGYTGNIAKVLCV

SEQ ID NO: 42671 - protein, 74 aa, Homo sapiens
  Payload ID: 8671
  Gene Symbol: KATNBL1
  Gene Name: katanin p80 subunit B-like 1
  ENSP ID: ENSP00000453991
MASETHNVKKRNFCNKIEDHFIDLPRKKISNFTNKNMKEVKKSPKQLAAYINRTVGQTVKSPDKLRKVIYRRKK

SEQ ID NO: 42672 - protein, 177 aa, Homo sapiens
  Payload ID: 8671
  Gene Symbol: KATNBL1
  Gene Name: katanin p80 subunit B-like 1
  ENSP ID: ENSP00000453996
MASETHNVKKRNFCNKIEDHFIDLPRKKISNFTNKNMKEVKKSPKQLAAYINRTVGQTVKSPDKLRKVIYRRKKVHHPFPNPCYRKKQSPGSGGCDMANKENELACAGHLPEKLHHDSRTYLVNSSDSGSSQTESPSSKYSGFFSEVSQDHETMAQVLFSRNMRLNVALTFWRKRSI

SEQ ID NO: 42673 - protein, 81 aa, Homo sapiens
  Payload ID: 8671
  Gene Symbol: KATNBL1
  Gene Name: katanin p80 subunit B-like 1
  ENSP ID: ENSP00000454010
MANKENELACAGHLPEKLHHDSRTYLVNSSDSGSSQTESPSSKYSGFFSEVSQDHETMAQVLFSRNMRLNVALTFWRKRSI

SEQ ID NO: 42674 - protein, 126 aa, Homo sapiens
  Payload ID: 8671
  Gene Symbol: KATNBL1
  Gene Name: katanin p80 subunit B-like 1
  ENSP ID: ENSP00000454181
MANKENELACAGHLPEKLHHDSRTYLVNSSDSGSSQTESPSSKYSGFFSEVSQDHETMAQVLFSRNMRLNVALTFWRKRSISELVAYLLRIEDLGVVVDCLPVLTNCLQEEKQYISLGCCVDLLPL

SEQ ID NO: 42675 - protein, 304 aa, Homo sapiens
  Payload ID: 8672
  Gene Symbol: KAZALD1
  Gene Name: Kazal-type serine peptidase inhibitor domain 1
  Uniprot ID: Q96I82
  ENSP ID: ENSP00000359219
MLPPPRPAAALALPVLLLLLVVLTPPPTGARPSPGPDYLRRGWMRLLAEGEGCAPCRPEECAAPRGCLAGRVRDACGCCWECANLEGQLCDLDPSAHFYGHCGEQLECRLDTGGDLSRGEVPEPLCACRSQSPLCGSDGHTYSQICRLQEAARARPDANLTVAHPGPCESGPQIVSHPYDTWNVTGQDVIFGCEVFAYPMASIEWRKDGLDIQLPGDDPHISVQFRGGPQRFEVTGWLQIQAVRPSDEGTYRCLGRNALGQVEAPASLTVLTPDQLNSTGIPQLRSLNLVPEEEAESEENDDYY

SEQ ID NO: 42676 - protein, 415 aa, Homo sapiens
  Payload ID: 8673
  Gene Symbol: KAZN
  Gene Name: kazrin, periplakin interacting protein
  Uniprot ID: Q674X7
  ENSP ID: ENSP00000354727
MRAADSGSWERVRQLAAQGEPAPSCGAGAGPARPPGPAACEQCVDAAGPGDRPRAGVPRVRADGDCSQPVLLREEVSRLQEEVHLLRQMKEMLAKDLEESQGGKSSEVLSATELRVQLAQKEQELARAKEALQAMKADRKRLKGEKTDLVSQMQQLYATLESREEQLRDFIRNYEQHRKESEDAVKALAKEKDLLEREKWELRRQAKEATDHATALRSQLDLKDNRMKELEAELAMAKQSLATLTKDVPKRHSLAMPGETVLNGNQEWVVQADLPLTAAIRQSQQTLYHSHPPHPADRQAVRVSPCHSRQPSVISDASAAEGDRSSTPSDINSPRHRTHSLCNGDSPGPVQKNLHNPIVQSLEDLEDQKRKKKKEKMGFGSISRVFARGKQRKSLDPGLFDGTAPDYYIEEDADW

SEQ ID NO: 42677 - protein, 166 aa, Homo sapiens
  Payload ID: 8673
  Gene Symbol: KAZN
  Gene Name: kazrin, periplakin interacting protein
  ENSP ID: ENSP00000365196
MKEMLAKDLEESQGGKSSEVLSATELRVQLAQKEQELARAKEALQAMKADRKRLKGEKTDLVSQMQQLYATLESREEQLRDFIRNYEQHRKESEDAVKALAKEKDLLEREKWELRRQAKEATDHATALRSQLDLKDNRMKELEAELAMAKQSLATLTKDVPKRHSL

SEQ ID NO: 42678 - protein, 775 aa, Homo sapiens
  Payload ID: 8673
  Gene Symbol: KAZN
  Gene Name: kazrin, periplakin interacting protein
  Uniprot ID: Q674X7
  ENSP ID: ENSP00000365198
MMEDNKQLALRIDGAVQSASQEVTNLRAELTATNRRLAELSGGGGPGPGPGAAASASAAGDSAATNMENPQLGAQVLLREEVSRLQEEVHLLRQMKEMLAKDLEESQGGKSSEVLSATELRVQLAQKEQELARAKEALQAMKADRKRLKGEKTDLVSQMQQLYATLESREEQLRDFIRNYEQHRKESEDAVKALAKEKDLLEREKWELRRQAKEATDHATALRSQLDLKDNRMKELEAELAMAKQSLATLTKDVPKRHSLAMPGETVLNGNQEWVVQADLPLTAAIRQSQQTLYHSHPPHPADRQAVRVSPCHSRQPSVISDASAAEGDRSSTPSDINSPRHRTHSLCNGDSPGPVQKNLHNPIVQSLEDLEDQKRKKKKEKMGFGSISRVFARGKQRKSLDPGLFDDSDSQCSPTRQSLSLSEGEEQMDRLQQVELVRTTPMSHWKAGTVQAWLEVVMAMPMYVKACTENVKSGKVLLSLSDEDLQLGLGVCSSLHRRKLRLAIEDYRDAEAGRSLSKAAELDHHWVAKAWLNDIGLSQYSQAFQNHLVDGRMLNSLMKRDLEKHLNVSKKFHQVSILLGIELLYQVNFSREALQERRARCETQNIDPVVWTNQRVLKWVRDIDLKEYADNLTNSGVHGAVLVLEPTFNAEAMATALGIPSGKHILRRHLAEEMSAVFHPANSTGIREAERFGTPPGRASSVTRAGKEENSSGLKYKAGRLPLGKIGRGFSSKDPDFHDDYGSLQNEDCGDDDPQSRLEQCRLEGYNSLEVTNV

SEQ ID NO: 42679 - protein, 327 aa, Homo sapiens
  Payload ID: 8673
  Gene Symbol: KAZN
  Gene Name: kazrin, periplakin interacting protein
  Uniprot ID: Q674X7
  ENSP ID: ENSP00000383601
MKEMLAKDLEESQGGKSSEVLSATELRVQLAQKEQELARAKEALQAMKADRKRLKGEKTDLVSQMQQLYATLESREEQLRDFIRNYEQHRKESEDAVKALAKEKDLLEREKWELRRQAKEATDHATALRSQLDLKDNRMKELEAELAMAKQSLATLTKDVPKRHSLAMPGETVLNGNQEWVVQADLPLTAAIRQSQQTLYHSHPPHPADRQAVRVSPCHSRQPSVISDASAAEGDRSSTPSDINSPRHRTHSLCNGDSPGPVQKNLHNPIVQSLEDLEDQKRKKKKEKMGFGSISRVFARGKQRKSLDPGLFDGTAPDYYIEEDADW

SEQ ID NO: 42680 - protein, 327 aa, Homo sapiens; identical to SEQ ID NO: 42679
  Payload ID: 8673
  Gene Symbol: KAZN
  Gene Name: kazrin, periplakin interacting protein
  Uniprot ID: Q674X7
  ENSP ID: ENSP00000383602

SEQ ID NO: 42681 - protein, 421 aa, Homo sapiens
  Payload ID: 8673
  Gene Symbol: KAZN
  Gene Name: kazrin, periplakin interacting protein
  Uniprot ID: Q674X7
  ENSP ID: ENSP00000426015
MMEDNKQLALRIDGAVQSASQEVTNLRAELTATNRRLAELSGGGGPGPGPGAAASASAAGDSAATNMENPQLGAQVLLREEVSRLQEEVHLLRQMKEMLAKDLEESQGGKSSEVLSATELRVQLAQKEQELARAKEALQAMKADRKRLKGEKTDLVSQMQQLYATLESREEQLRDFIRNYEQHRKESEDAVKALAKEKDLLEREKWELRRQAKEATDHATALRSQLDLKDNRMKELEAELAMAKQSLATLTKDVPKRHSLAMPGETVLNGNQEWVVQADLPLTAAIRQSQQTLYHSHPPHPADRQAVRVSPCHSRQPSVISDASAAEGDRSSTPSDINSPRHRTHSLCNGDSPGPVQKNLHNPIVQSLEDLEDQKRKKKKEKMGFGSISRVFARGKQRKSLDPGLFDGTAPDYYIEEDADW

SEQ ID NO: 42682 - protein, 132 aa, Homo sapiens
  Payload ID: 8674
  Gene Symbol:
  Gene Name: KCNE1B
  ENSP ID: ENSP00000477875
MPRMILSNTTAVTPFLTKLWQETVQQGGNMSGLARRSPRSGDGKLEALYVLMVLGFFGFFTLGIMLSYIRSKKLEHSNDPFNVYIESNAWQEKDKAYVQARVLESYRSCYVVENHLAIEQPNTHLPETKPSP

SEQ ID NO: 42683 - protein, 129 aa, Homo sapiens
  Payload ID: 8674
  Gene Symbol:
  Gene Name: KCNE1B
  ENSP ID: ENSP00000478461
MILSNTTAVTPFLTKLWQETVQQGGNMSGLARRSPRSGDGKLEALYVLMVLGFFGFFTLGIMLSYIRSKKLEHSNDPFNVYIESNAWQEKDKAYVQARVLESYRSCYVVENHLAIEQPNTHLPETKPSP

SEQ ID NO: 42684 - protein, 90 aa, Homo sapiens
  Payload ID: 8674
  Gene Symbol:
  Gene Name: KCNE1B
  ENSP ID: ENSP00000480511
MPRMILSNTTAVTPFLTKLWQETVQQGGNMSGLARRSPRSGDGKLEALYVLMVLGFFGFFTLGIMLSYIRSKKLEHSNDPFNVYIESNAW

SEQ ID NO: 42685 - protein, 132 aa, Homo sapiens; identical to SEQ ID NO: 42682
  Payload ID: 8674
  Gene Symbol:
  Gene Name: KCNE1B
  ENSP ID: ENSP00000485125

SEQ ID NO: 42686 - protein, 502 aa, Homo sapiens
  Payload ID: 8675
  Gene Symbol: KDELC1
  Gene Name: KDEL (Lys-Asp-Glu-Leu) containing 1
  Uniprot ID: Q6UW63
  ENSP ID: ENSP00000365172
MFGTLLLYCFFLATVPALAETGGERQLSPEKSEIWGPGLKADVVLPARYFYIQAVDTSGNKFTSSPGEKVFQVKVSAPEEQFTRVGVQVLDRKDGSFIVRYRMYASYKNLKVEIKFQGQHVAKSPYILKGPVYHENCDCPLQDSAAWLREMNCPETIAQIQRDLAHFPAVDPEKIAVEIPKRFGQRQSLCHYTLKDNKVYIKTHGEHVGFRIFMDAILLSLTRKVKMPDVELFVNLGDWPLEKKKSNSNIHPIFSWCGSTDSKDIVMPTYDLTDSVLETMGRVSLDMMSVQANTGPPWESKNSTAVWRGRDSRKERLELVKLSRKHPELIDAAFTNFFFFKHDENLYGPIVKHISFFDFFKHKYQINIDGTVAAYRLPYLLVGDSVVLKQDSIYYEHFYNELQPWKHYIPVKSNLSDLLEKLKWAKDHDEEAKKIAKAGQEFARNNLMGDDIFCYYFKLFQEYANLQVSEPQIREGMKRVEPQTEDDLFPCTCHRKKTKDEL

SEQ ID NO: 42687 - protein, 507 aa, Homo sapiens
  Payload ID: 8676
  Gene Symbol: KDELC2
  Gene Name: KDEL (Lys-Asp-Glu-Leu) containing 2
  Uniprot ID: Q7Z4H8
  ENSP ID: ENSP00000315386
MRRLPRALLLQLRLALLVAAGAPEVLVSAPRSLVWGPGLQAAVVLPVRYFYLQAVNSEGQNLTRSPAGETPFKVVVKSLSPKELVRIHVPKPLDRNDGTFLMRYRMYETVDEGLKIEVLYGDEHVAQSPYILKGPVYHEYCECPEDPQAWQKTLSCPTKEPQIAKDFASFPSINLQQMLKEVPKRFGDERGAIVHYTILNNHVYRRSLGKYTDFKMFSDEILLSLTRKVLLPDLEFYVNLGDWPLEHRKVNGTPSPIPIISWCGSLDSRDVVLPTYDITHSMLEAMRGVTNDLLSIQGNTGPSWINKTERAFFRGRDSREERLQLVQLSKENPQLLDAGITGYFFFQEKEKELGKAKLMGFFDFFKYKYQVNVDGTVAAYRYPYLMLGDSLVLKQDSPYYEHFYMALEPWKHYVPIKRNLSDLLEKVKWAKENDEEAKKIAKEGQLMARDLLQPHRLYCYYYQVLQKYAERQSSKPEVRDGMELVPQPEDSTAICQCHRKKPSREEL

SEQ ID NO: 42688 - protein, 451 aa, Homo sapiens
  Payload ID: 8676
  Gene Symbol: KDELC2
  Gene Name: KDEL (Lys-Asp-Glu-Leu) containing 2
  Uniprot ID: Q7Z4H8
  ENSP ID: ENSP00000413429
MVELFIFLFLLGETPFKVVVKSLSPKELVRIHVPKPLDRNDGTFLMRYRMYETVDEGLKIEVLYGDEHVAQSPYILKGPVYHEYCECPEDPQAWQKTLSCPTKEPQIAKDFASFPSINLQQMLKEVPKRFGDERGAIVHYTILNNHVYRRSLGKYTDFKMFSDEILLSLTRKVLLPDLEFYVNLGDWPLEHRKVNGTPSPIPIISWCGSLDSRDVVLPTYDITHSMLEAMRGVTNDLLSIQGNTGPSWINKTERAFFRGRDSREERLQLVQLSKENPQLLDAGITGYFFFQEKEKELGKAKLMGFFDFFKYKYQVNVDGTVAAYRYPYLMLGDSLVLKQDSPYYEHFYMALEPWKHYVPIKRNLSDLLEKVKWAKENDEEAKKIAKEGQLMARDLLQPHRLYCYYYQVLQKYAERQSSKPEVRDGMELVPQPEDSTAICQCHRKKPSREEL

SEQ ID NO: 42689 - protein, 409 aa, Homo sapiens
  Payload ID: 8676
  Gene Symbol: KDELC2
  Gene Name: KDEL (Lys-Asp-Glu-Leu) containing 2
  Uniprot ID: Q7Z4H8
  ENSP ID: ENSP00000431796
MVELFIFLFLLGETPFKVVVKSLSPKELVRIHVPKPLDRNDGTFLMRYRMYETVDEGLKIEVLYGDEHVAQSPYILKGPVYHEYCECPEDPQAWQKTLSCPTKEPQIAKDFASFPSINLQQMLKEVPKRFGDERGAIVHYTILNNHVYRRSLGKYTDFKMFSDEILLSLTRKVLLPDLEFYVNLGDWPLEHRKVNGTPSPIPIISWCGSLDSRDVVLPTYDITHSMLEAMRGVTNDLLSIQGNTGPSWINKTERAFFRGRDSREERLQLVQLSKENPQLLDAGITGYFFFQEKEKELGKAKLMGFFDFFKYKYQVNVDGTVAAYRYPYLMLGDSLVLKQDSPYYEHFYMALEPWKHYVPIKRNLSDLLEKVKWAKSFTLSPRLECSGTISTHCNLCLPGSRNFVPQPPE

SEQ ID NO: 42690 - protein, 160 aa, Homo sapiens
  Payload ID: 8676
  Gene Symbol: KDELC2
  Gene Name: KDEL (Lys-Asp-Glu-Leu) containing 2
  ENSP ID: ENSP00000436147
  MOD_RES (1)..(1): Any amino acid
XEAMRGVTNDLLSIQGNTGPSWINKTERAFFRGRDSREERLQLVQLSKENPQLLDAGITGYFFFQEKEKELGKAKLMGFFDFFKENDEEAKKIAKEGQLMARDLLQPHRLYCYYYQVLQKYAERQSSKPEVRDGMELVPQPEDSTAICQCHRKKPSREEL

SEQ ID NO: 42691 - protein, 212 aa, Homo sapiens
  Payload ID: 8677
  Gene Symbol: KDELR1
  Gene Name: KDEL (Lys-Asp-Glu-Leu) endoplasmic reticulum protein retention receptor 1
  Uniprot ID: P24390
  ENSP ID: ENSP00000329471
MNLFRFLGDLSHLLAIILLLLKIWKSRSCAGISGKSQVLFAVVFTARYLDLFTNYISLYNTCMKVVYIACSFTTVWLIYSKFKATYDGNHDTFRVEFLVVPTAILAFLVNHDFTPLEILWTFSIYLESVAILPQLFMVSKTGEAETITSHYLFALGVYRTLYLFNWIWRYHFEGFFDLIAIVAGLVQTVLYCDFFYLYITKVLKGKKLSLPA

SEQ ID NO: 42692 - protein, 150 aa, Homo sapiens
  Payload ID: 8677
  Gene Symbol: KDELR1
  Gene Name: KDEL (Lys-Asp-Glu-Leu) endoplasmic reticulum protein retention receptor 1
  Uniprot ID: P24390
  ENSP ID: ENSP00000470841
MKVVYIACSFTTVWLIYSKFKATYDGNHDTFRVEFLVVPTAILAFLVNHDFTPLEILWTFSIYLESVAILPQLFMVSKTGEAETITSHYLFALGVYRTLYLFNWIWRYHFEGFFDLIAIVAGLVQTVLYCDFFYLYITKVLKGKKLSLPA

SEQ ID NO: 42693 - protein, 220 aa, Homo sapiens
  Payload ID: 8677
  Gene Symbol: KDELR1
  Gene Name: KDEL (Lys-Asp-Glu-Leu) endoplasmic reticulum protein retention receptor 1
  ENSP ID: ENSP00000472182
MNLFRFLGDLSHLLAIILLLLKIWKSRSCAGISGKSQVLFAVVFTARYLDLFTNYISLYNTCMKVVYIACSFTTVWLIYSKFKATYDGNHDTFRVEFLVVPTAILAFLVNHDFTPLEEDRPGWPDVLIFSTEAIIQEFSDPLDLLHLPGVSGHLAAAVHGEQDRRGGDHHQPLLVCARRLPHALSLQLDLALPFRGLLRPHRHCGRPGPDSPLLRFLLPL

SEQ ID NO: 42694 - protein, 212 aa, Homo sapiens
  Payload ID: 8678
  Gene Symbol: KDELR2
  Gene Name: KDEL (Lys-Asp-Glu-Leu) endoplasmic reticulum protein retention receptor 2
  Uniprot ID: P33947
  ENSP ID: ENSP00000258739
MNIFRLTGDLSHLAAIVILLLKIWKTRSCAGISGKSQLLFALVFTTRYLDLFTSFISLYNTSMKVIYLACSYATVYLIYLKFKATYDGNHDTFRVEFLVVPVGGLSFLVNHDFSPLEILWTFSIYLESVAILPQLFMISKTGEAETITTHYLFFLGLYRALYLVNWIWRFYFEGFFDLIAVVAGVVQTILYCDFFYLYITKVLKGKKLSLPA

SEQ ID NO: 42695 - protein, 38 aa, Homo sapiens
  Payload ID: 8678
  Gene Symbol: KDELR2
  Gene Name: KDEL (Lys-Asp-Glu-Leu) endoplasmic reticulum protein retention receptor 2
  ENSP ID: ENSP00000371702
MNIFRLTGDLSHLAAIVILLLKIWKTRSCAGLACLLGT

SEQ ID NO: 42696 - protein, 186 aa, Homo sapiens
  Payload ID: 8678
  Gene Symbol: KDELR2
  Gene Name: KDEL (Lys-Asp-Glu-Leu) endoplasmic reticulum protein retention receptor 2
  Uniprot ID: P33947
  ENSP ID: ENSP00000420501
MNIFRLTGDLSHLAAIVILLLKIWKTRSCAGISGKSQLLFALVFTTRYLDLFTSFISLYNTSMKVIYLACSYATVYLIYLKFKATYDGNHDTFRVEFLVVPVGGLSFLVNHDFSPLEYSRERSSVCQHKCQRPSPASVLQGARTEFLPQQRHKMLDTENQKLNSFVADSHQWLCKNAEEKSQKVSV

SEQ ID NO: 42697 - protein, 214 aa, Homo sapiens
  Payload ID: 8679
  Gene Symbol: KDELR3
  Gene Name: KDEL (Lys-Asp-Glu-Leu) endoplasmic reticulum protein retention receptor 3
  Uniprot ID: O43731
  ENSP ID: ENSP00000216014
MNVFRILGDLSHLLAMILLLGKIWRSKCCKGISGKSQILFALVFTTRYLDLFTNFISIYNTVMKVVFLLCAYVTVYMIYGKFRKTFDSENDTFRLEFLLVPVIGLSFLENYSFTLLEILWTFSIYLESVAILPQLFMISKTGEAETITTHYLFFLGLYRALYLANWIRRYQTENFYDQIAVVSGVVQTIFYCDFFYLYVTKVLKGKKLSLPMPI

SEQ ID NO: 42698 - protein, 220 aa, Homo sapiens
  Payload ID: 8679
  Gene Symbol: KDELR3
  Gene Name: KDEL (Lys-Asp-Glu-Leu) endoplasmic reticulum protein retention receptor 3
  Uniprot ID: O43731
  ENSP ID: ENSP00000386918
MNVFRILGDLSHLLAMILLLGKIWRSKCCKGISGKSQILFALVFTTRYLDLFTNFISIYNTVMKVVFLLCAYVTVYMIYGKFRKTFDSENDTFRLEFLLVPVIGLSFLENYSFTLLEILWTFSIYLESVAILPQLFMISKTGEAETITTHYLFFLGLYRALYLANWIRRYQTENFYDQIAVVSGVVQTIFYCDFFYLYVTKGRSWDDSNADTGLRSYSSI

SEQ ID NO: 42699 - protein, 406 aa, Homo sapiens
  Payload ID: 8680
  Gene Symbol: KLHDC1
  Gene Name: kelch domain containing 1
  Uniprot ID: Q8N7A1
  ENSP ID: ENSP00000352282
MADSQLFCVAEERSGHCAVVDGNFLYVWGGYVSIEDNEVYLPNDEIWTYDIDSGLWRMHLMEGELPASMSGSCGACINGKLYIFGGYDDKGYSNRLYFVNLRTRDETYIWEKITDFEGQPPTPRDKLSCWVYKDRLIYFGGYGCRRHSELQDCFDVHDASWEEQIFWGWHNDVHIFDTKTQTWFQPEIKGGVPPQPRAAHTCAVLGNKGYIFGGRVLQTRMNDLHYLNLDTWTWSGRITINGESPKHRSWHTLTPIADDKLFLCGGLSADNIPLSDGWIHNVTTNCWKQLTHLPKTRPRLWHTACLGKENEIMVFGGSKDDLLALDTGHCNDLLIFQTQPYSLLRSCLDCIGKNSIMLESQISLLPPKLLQQVLKKITFWAAANHREEQRVQKEETENKYQWISSN

SEQ ID NO: 42700 - protein, 96 aa, Homo sapiens
  Payload ID: 8680
  Gene Symbol: KLHDC1
  Gene Name: kelch domain containing 1
  ENSP ID: ENSP00000450595
MADSQLFCVAEERSGHCAVVDGNFLYVWGGYVSIEDNEVYLPNDEIWTYDIDSGLWRMHLMEGELPASMSGSCGACINGKLYIFGGYDDKGYSNRR

SEQ ID NO: 42701 - protein, 196 aa, Homo sapiens
  Payload ID: 8680
  Gene Symbol: KLHDC1
  Gene Name: kelch domain containing 1
  ENSP ID: ENSP00000451407
MADSQLFCVAEERSGHCAVVDGNFLYVWGGYVEEQIFWGWHNDVHIFDTKTQTWFQPEIKGGVPPQPRAAHTCAVLGNKGYIFGGRVLQTRMNDLHYLNLDTWTWSGRITINGESPKHRSWHTLTPIADDKLFLCGGLSADNIPLSDGWIHNVTTNCWKQLTHLPKTRPRLWHTACLGKENEIMVFGGSKDDLLAL

SEQ ID NO: 42702 - protein, 67 aa, Homo sapiens
  Payload ID: 8680
  Gene Symbol: KLHDC1
  Gene Name: kelch domain containing 1
  ENSP ID: ENSP00000451819
MADSQLFCVAEERSGHCAVVDGNFLYVWGGYVMESRSCPGWSAVARSRLTATSASQVQPILLPQPPE

SEQ ID NO: 42703 - protein, 190 aa, Homo sapiens
  Payload ID: 8680
  Gene Symbol: KLHDC1
  Gene Name: kelch domain containing 1
  ENSP ID: ENSP00000452543
MADSQLFCVAEERSGHCAVVDGNFLYVWGGYVSIEDNEVYLPNDEIWTYDIDSGLWRMHLMEGELPASMSGSCGACINGKLYIFGGYDDKGYSNRLYFVNLRTRDETYIWEKITDFEGQPPTPRDKLSCWVYKDRKSRYSGDGIMMSTYLTQRHRLGFNQKLKVEFHHSHEPRIHVQFLEIRVISLADVF

SEQ ID NO: 42704 - protein, 442 aa, Homo sapiens
  Payload ID: 8681
  Gene Symbol: KLHDC10
  Gene Name: kelch domain containing 10
  Uniprot ID: Q6PID8
  ENSP ID: ENSP00000334140
MSAAQGWDRNRRRGGGAAGAGGGGSGAGGGSGGSGGRGTGQLNRFVQLSGRPHLPGKKKIRWDPVRRRFIQSCPIIRIPNRFLRGHRPPPARSGHRCVADNTNLYVFGGYNPDYDESGGPDNEDYPLFRELWRYHFATGVWHQMGTDGYMPRELASMSLVLHGNNLLVFGGTGIPFGESNGNDVHVCNVKYKRWALLSCRGKKPSRIYGQAMAIINGSLYVFGGTTGYIYSTDLHKLDLNTREWTQLKPNNLSCDLPEERYRHEIAHDGQRIYILGGGTSWTAYSLNKIHAYNLETNAWEEIATKPHEKIGFPAARRCHSCVQIKNDVFICGGYNGEVILGDIWKLNLQTFQWVKLPATMPEPVYFHCAAVTPAGCMYIHGGVVNIHENKRTGSLFKIWLVVPSLLELAWEKLLAAFPNLANLSRTQLLHLGLTQGLIERLK

SEQ ID NO: 42705 - protein, 144 aa, Homo sapiens
  Payload ID: 8681
  Gene Symbol: KLHDC10
  Gene Name: kelch domain containing 10
  ENSP ID: ENSP00000420034
MGTDGYMPRELASMSLVLHGNNLLVFGGTGIPFGESNGNDVHVCNVKYKRWALLSCRGKKPSRIYGQAMAIINGSLYVFGGTTGYIYSTDLHKLDLNTREWTQLKPNNLSCDLPEERYRHEIAHDGQRIYILGGGTSWTAYSLN

SEQ ID NO: 42706 - protein, 136 aa, Homo sapiens
  Payload ID: 8681
  Gene Symbol: KLHDC10
  Gene Name: kelch domain containing 10
  ENSP ID: ENSP00000420083
MSAAQGWDRNRRRGGGAAGAGGGGSGAGGGSGGSGGRGTGQLNRFVQLSGRPHLPGHRPPPARSGHRCVADNTNLYVFGGYNPDYDESGGPDNEDYPLFRELWRYHFATGVWHQMGTDGYMPRELASMSLVLHGNN

SEQ ID NO: 42707 - protein, 406 aa, Homo sapiens
  Payload ID: 8682
  Gene Symbol: KLHDC2
  Gene Name: kelch domain containing 2
  Uniprot ID: Q9Y2U9
  ENSP ID: ENSP00000298307
MADGNEDLRADDLPGPAFESYESMELACPAERSGHVAVSDGRHMFVWGGYKSNQVRGLYDFYLPREELWIYNMETGRWKKINTEGDVPPSMSGSCAVCVDRVLYLFGGHHSRGNTNKFYMLDSRSTDRVLQWERIDCQGIPPSSKDKLGVWVYKNKLIFFGGYGYLPEDKVLGTFEFDETSFWNSSHPRGWNDHVHILDTETFTWSQPITTGKAPSPRAAHACATVGNRGFVFGGRYRDARMNDLHYLNLDTWEWNELIPQGICPVGRSWHSLTPVSSDHLFLFGGFTTDKQPLSDAWTYCISKNEWIQFNHPYTEKPRLWHTACASDEGEVIVFGGCANNLLVHHRAAHSNEILIFSVQPKSLVRLSLEAVICFKEMLANSWNCLPKHLLHSVNQRFGSNNTSGS

SEQ ID NO: 42708 - protein, 249 aa, Homo sapiens
  Payload ID: 8682
  Gene Symbol: KLHDC2
  Gene Name: kelch domain containing 2
  Uniprot ID: Q9Y2U9
  ENSP ID: ENSP00000450539
MADGNEDLRADDLPGPAFESYESMELACPAERSGHVAVSDGRHMFVWGGYKSNQVRGLYDFYLPREELWIYNMETGRWKKINTEGDVPPSMSGSCAVCVDRVLYLFGGHHSRGNTNKFYMLDSRSTDRVLQWERIDCQGIPPSSKDKLGVWVYKNKLIFFGGYGYLPEDKVLGTFEFDETSFWNSSHPRGWNDHVHILDTETFTWSQPITTGKAPSPRAAHACATVGNRGFVFGGRYRVSIQTTSMTCF

SEQ ID NO: 42709 - protein, 307 aa, Homo sapiens
  Payload ID: 8682
  Gene Symbol: KLHDC2
  Gene Name: kelch domain containing 2
  ENSP ID: ENSP00000450658
MADGNEDLRADDLPGPAFESYESMELACPAERSGHVAVSDGRHMFVWGGYKSNQVRGLYDFYLPREELWIYNMETGRWKKINTEGDVPPSMSGSCAVCVDRVLYLFGGHHSRGNTNKFYMLDSRSTDRVLQWERIDCQGIPPSSKDKLGVWVYKNKLIFFGGYGYLPEDKVLGTFEFDETSFWNSSHPRGWNDHVHILDTETFTWSQPITTGKAPSPRAAHACATVGNRGFVFGGRYRDARMNDLHYLNLDTWEWNELIPQGICPVGRSWHSLTPVSSDHLFLFGGFTTDKQPLSYGTQLVPAMKEK

SEQ ID NO: 42710 - protein, 249 aa, Homo sapiens; identical to SEQ ID NO: 42708
  Payload ID: 8682
  Gene Symbol: KLHDC2
  Gene Name: kelch domain containing 2
  Uniprot ID: Q9Y2U9
  ENSP ID: ENSP00000450944

SEQ ID NO: 42711 - protein, 357 aa, Homo sapiens
  Payload ID: 8682
  Gene Symbol: KLHDC2
  Gene Name: kelch domain containing 2
  ENSP ID: ENSP00000451439
MADGNEDLRADDLPGPAFESYESMELACPAERSGHVAVSDGRHMFVWGGYKSNQVRGLYDFYLPREELWIYNMETGRWKKINTEGDVPPSMSGSCAVCVDRVLYLFGGHHSRGNTNKFYMLDSRSTDRVLQWERIDCQGIPPSSKDKLGVWVYKNKLIFFGGYGYLPEDKVLGTFEFDETSFWNSSHPRGWNDHVHILDTETFTWSQPITTGKAPSPRAAHACATVGNRGFVFGGRYRDARMNDLHYLNLDTWEWNELIPQGICPVGRSWHSLTPVSSDHLFLFGGFTTDKQPLSDAWTYCISKNEWIQFNHPYTEKPRLWHTACASDEGEVIVFGGCANNLLVHHRAAKLRSSHLL

SEQ ID NO: 42712 - protein, 248 aa, Homo sapiens
  Payload ID: 8683
  Gene Symbol: KLHDC3
  Gene Name: kelch domain containing 3
  ENSP ID: ENSP00000244670
MTPKGPAMCSMPLTSADCFSNDIHKLDTSTMTWTLICTKGSPARWRDFHSATMLGSHMYVFGGRADRFGPFHSNNEIYCNRIRVFDTRTEAWLDCPPTPVLPEGRRSHSAFGYNGELYIFGGYNARLNRHFHDLWKFNPVSFTWKKIEPKGKGPCPRRRQCCCIVGDKIVLFGGTSPSPEEGLGDEFDLIDHSDLHILDFSPSLKTLCKLAVIQYNLDQSCLPHDIRWELNAMTTNSNISRPIVSSHG

SEQ ID NO: 42713 - protein, 382 aa, Homo sapiens
  Payload ID: 8683
  Gene Symbol: KLHDC3
  Gene Name: kelch domain containing 3
  Uniprot ID: Q9BQ90
  ENSP ID: ENSP00000313995
MLRWTVHLEGGPRRVNHAAVAVGHRVYSFGGYCSGEDYETLRQIDVHIFNAVSLRWTKLPPVKSAIRGQAPVVPYMRYGHSTVLIDDTVLLWGGRNDTEGACNVLYAFDVNTHKWFTPRVSGTVPGARDGHSACVLGKIMYIFGGYEQQADCFSNDIHKLDTSTMTWTLICTKGSPARWRDFHSATMLGSHMYVFGGRADRFGPFHSNNEIYCNRIRVFDTRTEAWLDCPPTPVLPEGRRSHSAFGYNGELYIFGGYNARLNRHFHDLWKFNPVSFTWKKIEPKGKGPCPRRRQCCCIVGDKIVLFGGTSPSPEEGLGDEFDLIDHSDLHILDFSPSLKTLCKLAVIQYNLDQSCLPHDIRWELNAMTTNSNISRPIVSSHG

SEQ ID NO: 42714 - protein, 389 aa, Homo sapiens [sequence omitted]

SEQ ID NO: 42715 - protein, 463 aa, Homo sapiens
  Payload ID: 8684
  Gene Symbol: KLHDC4
  Gene Name: kelch domain containing 4
  Uniprot ID: Q8TBB5
  ENSP ID: ENSP00000262530
MGKKGKKEKKGRGAEKTAAKMEKKVSKRSRKEETFLYNELYVYNTRKDTWTKVDIPSPPPRRCAHQAVVVPQGGGQLWVFGGEFASPNGEQFYHYKDLWVLHLATKTWEQVKSTGGPSGRSGHRMVAWKRQLILFGGFHESTRDYIYYNDVYAFNLDTFTWSKLSPSGTGPTPRSGCQMSVTPQGGIVVYGGYSKQRVKKDVDKGTRHSDMFLLKPEDGREDKWVWTRMNPSGVKPTPRSGFSVAMAPNHQTLFFGGVCDEEEEESLSGEFFNDLYFYDATRNRWFEGQLKGPKSEKKKRRRGRKEEPEGGSRPACGGAGTQGPVQLVKEVVAEDGTVVTIKQVLTAPGSAGQPRSEDEDSLEEAGSPAPGPCPRSNAMLAVKHGVLYVYGGMFEAGDRQVTLSDLHCLDLHRMEAWKALVEMDPETQEWLEETDSEEDSEEVEGAEGGVDDEDSGEESGAED

SEQ ID NO: 42716 - protein, 520 aa, Homo sapiens
  Payload ID: 8684
  Gene Symbol: KLHDC4
  Gene Name: kelch domain containing 4
  Uniprot ID: Q8TBB5
  ENSP ID: ENSP00000270583
MGKKGKKEKKGRGAEKTAAKMEKKVSKRSRKEEEDLEALIAHFQTLDAKRTQTVELPCPPPSPRLNASLSVHPEKDELILFGGEYFNGQKTFLYNELYVYNTRKDTWTKVDIPSPPPRRCAHQAVVVPQGGGQLWVFGGEFASPNGEQFYHYKDLWVLHLATKTWEQVKSTGGPSGRSGHRMVAWKRQLILFGGFHESTRDYIYYNDVYAFNLDTFTWSKLSPSGTGPTPRSGCQMSVTPQGGIVVYGGYSKQRVKKDVDKGTRHSDMFLLKPEDGREDKWVWTRMNPSGVKPTPRSGFSVAMAPNHQTLFFGGVCDEEEEESLSGEFFNDLYFYDATRNRWFEGQLKGPKSEKKKRRRGRKEEPEGGSRPACGGAGTQGPVQLVKEVVAEDGTVVTIKQVLTAPGSAGQPRSEDEDSLEEAGSPAPGPCPRSNAMLAVKHGVLYVYGGMFEAGDRQVTLSDLHCLDLHRMEAWKALVEMDPETQEWLEETDSEEDSEEVEGAEGGVDDEDSGEESGAED

SEQ ID NO: 42717 - protein, 489 aa, Homo sapiens
  Payload ID: 8684
  Gene Symbol: KLHDC4
  Gene Name: kelch domain containing 4
  Uniprot ID: Q8TBB5
  ENSP ID: ENSP00000325717
MGKKGKKEKKGRGAEKTAAKMEKKVSKRSRKEEEDLEALIAHFQTLDAKRTQTVELPCPPPSPRLNASLSVHPEKDELILFGGEYFNGQKTFLYNELYVYNTRKDTWTKVDIPSPPPRRCAHQAVVVPQGGGQLWVFGGEFASPNGEQFYHYKDLWVLHLATKTWEQVKDYIYYNDVYAFNLDTFTWSKLSPSGTGPTPRSGCQMSVTPQGGIVVYGGYSKQRVKKDVDKGTRHSDMFLLKPEDGREDKWVWTRMNPSGVKPTPRSGFSVAMAPNHQTLFFGGVCDEEEEESLSGEFFNDLYFYDATRNRWFEGQLKGPKSEKKKRRRGRKEEPEGGSRPACGGAGTQGPVQLVKEVVAEDGTVVTIKQVLTAPGSAGQPRSEDEDSLEEAGSPAPGPCPRSNAMLAVKHGVLYVYGGMFEAGDRQVTLSDLHCLDLHRMEAWKALVEMDPETQEWLEETDSEEDSEEVEGAEGGVDDEDSGEESGAED

SEQ ID NO: 42718 - protein, 291 aa, Homo sapiens
  Payload ID: 8684
  Gene Symbol: KLHDC4
  Gene Name: kelch domain containing 4
  ENSP ID: ENSP00000392909
MPGKLLPEKCALMWLHLGTRAPQRPKRESRGFPGWGCRTGQALPCRARPPAPAPSHPSSSLSLTPGPGSPRQTGPPCQTVAALYGLGAWQSHCGGGVGCHGQGRQPLGCQGWWSTLNPYLLESPGLFHTRSCGKLWDPKAVLISGVTSSHSSLGSPGTRPGVSLCKELPGCWAELCCRPRKMTKKDRAEPHLPLLGGPEGARAQQSPILHSLGSKRLPRCGWQLLTSSGGAAGGLCPMGHRREKDGGRVCTLGRTGGRHRPEQVAWAHEKGVSETGCLSQMPGVDEADEWQ

SEQ ID NO: 42719 - protein, 44 aa, Homo sapiens
  Payload ID: 8684
  Gene Symbol: KLHDC4
  Gene Name: kelch domain containing 4
  ENSP ID: ENSP00000454681
MGKKGKKEKKGRGAEKTAAKMEKKVSKRSRKEERANNHHSSPEQ

SEQ ID NO: 42720 - protein, 86 aa, Homo sapiens
  Payload ID: 8684
  Gene Symbol: KLHDC4
  Gene Name: kelch domain containing 4
  ENSP ID: ENSP00000455214
MGKKGKKEKKGRGAEKTAAKMEKKVSKRSRKEEEDLEALIAHFQTLDAKRTQTVELPCPPPSPRLNASLSVHPEKDELILFGDFFV

SEQ ID NO: 42721 - protein, 105 aa, Homo sapiens
  Payload ID: 8684
  Gene Symbol: KLHDC4
  Gene Name: kelch domain containing 4
  ENSP ID: ENSP00000455666
MGKKGKKEKKGRGAEKTAAKMEKKVSKRSRKEEEDLEALIAHFQTLDAKRTQTVELPCPPPSPRLNASLSVHPEKDELILFGERTPGPKLTSPVHLRGAVLTRRW

SEQ ID NO: 42722 - protein, 334 aa, Homo sapiens
  Payload ID: 8684
  Gene Symbol: KLHDC4
  Gene Name: kelch domain containing 4
  ENSP ID: ENSP00000455780
MGKKGKKEKKGRGAEKTAAKMEKKVSKRSRKEEAVVVPQGGGQLWVFGGEFASPNGEQFYHYKDLWVLHLATKTWEQVKSTGGPSGRSGHRMVAWKRQLILFGGFHESTRDYIYYNDVYAFNLDTFTWSKLSPSGTGPTPRSGCQMSVTPQGGIVVYGGYSKQRVKKDVDKGTRHSDMFLLKPEDGREDKWVWTRMNPSGVKPTPRSGFSVAMAPNHQTLFFGGVCDEEEEESLSGEFFNDLYFYDATRNRWFEGQLKGPKSEKKKRRRGRKEEPEGGSRPACGGAGTQGPVQLVKEVVAEDGTVVTIKQVLTAPGSAGQPRSEDEDSLEEAGS

SEQ ID NO: 42723 - protein, 99 aa, Homo sapiens
  Payload ID: 8684
  Gene Symbol: KLHDC4
  Gene Name: kelch domain containing 4
  ENSP ID: ENSP00000455824
MGKKGKKEKKGRGAEKTAAKMEKKVSKRSRKEEEDLEALIAHFQTLDAKRTQTVELPCPPPSPRLFCITSSMSTIPERTPGPKLTSPVHLRGAVLTRRW

SEQ ID NO: 42724 - protein, 38 aa, Homo sapiens
  Payload ID: 8684
  Gene Symbol: KLHDC4
  Gene Name: kelch domain containing 4
  ENSP ID: ENSP00000457098
MGKKGKKEKKGRGAEKTAAKMEKKVSKRSRKEETWKRS

SEQ ID NO: 42725 - protein, 520 aa, Homo sapiens; identical to SEQ ID NO: 42716
  Payload ID: 8684
  Gene Symbol: KLHDC4
  Gene Name: kelch domain containing 4
  Uniprot ID: Q8TBB5
  ENSP ID: ENSP00000457570

SEQ ID NO: 42726 - protein, 44 aa, Homo sapiens; identical to SEQ ID NO: 42719
  Payload ID: 8684
  Gene Symbol: KLHDC4
  Gene Name: kelch domain containing 4
  ENSP ID: ENSP00000457857

SEQ ID NO: 42727 - protein, 173 aa, Homo sapiens
  Payload ID: 8684
  Gene Symbol: KLHDC4
  Gene Name: kelch domain containing 4
  ENSP ID: ENSP00000457990
MGKKGKKEKKGRGAEKTAAKMEKKVSKRSRKEEPGVCRRIRPDLGVECSAAAAHGFPNRGQFYGLPCARHSSLGFTPHEQEDLEALIAHFQTLDAKRTQTVELPCPPPSPRLNASLSVHPEKDELILFGGEYFNGQKTFLYNELYVYNTRKDTWTKVDIPSPPPRRCAHQAVV

SEQ ID NO: 42728 - protein, 258 aa, Homo sapiens
  Payload ID: 8684
  Gene Symbol: KLHDC4
  Gene Name: kelch domain containing 4
  ENSP ID: ENSP00000482433
MVAWKRQLILFGGFHESTRDYIYYNDVYAFNLDTFTWSKLSPSGTGPTPRSGCQMSVTPQGGIVVYGGYSKQRVKKDVDKGTRHSDMFLLKPEDGREDKWVWTRMNPSGVKPTPRSGFSVAMAPNHQTLFFGGVCDEEEEESLSGEFFNDLYFYDATRNRWFEGQLKKLRSGWRRRTRKRTVRRLRAPRVGSTTKTAERRAVRRTESPCQGRLASAVPTSAQDPAVLSEALGASVRPDAQERAEGGWPRPGCELSPMV

SEQ ID NO: 42729 - protein, 777 aa, Homo sapiens
  Payload ID: 8685
  Gene Symbol: KLHDC7A
  Gene Name: kelch domain containing 7A
  Uniprot ID: Q5VTJ3
  ENSP ID: ENSP00000383505
MFPRGAEAQDWHLDMQLTGKVVLSAAALLLVTVAYRLYKSRPAPAQRWGGNGQAEAKEEAEGSGQPAVQEASPGVLLRGPRRRRSSKRAEAPQGCSCENPRGPYVLVTGATSTDRKPQRKGSGEERGGQGSDSEQVPPCCPSQETRTAVGSNPDPPHFPRLGSEPKSSPAGLIAAADGSCAGGEPSPWQDSKPREHPGLGQLEPPHCHYVAPLQGSSDMNQSWVFTRVIGVSREEAGALEAASDVDLTLHQQEGAPNSSYTFSSIARVRMEEHFIQKAEGVEPRLKGKVYDYYVESTSQAIFQGRLAPRTAALTEVPSPRPPPGSLGTGAASGGQAGDTKGAAERAASPQTGPWPSTRGFSRKESLLQIAENPELQLQPDGFRLPAPPCPDPGALPGLGRSSREPHVQPVAGTNFFHIPLTPASAPQVRLDLGNCYEVLTLAKRQNLEALKEAAYKVMSENYLQVLRSPDIYGCLSGAERELILQRRLRGRQYLVVADVCPKEDSGGLCCYDDEQDVWRPLARMPPEAVSRGCAICSLFNYLFVVSGCQGPGHQPSSRVFCYNPLTGIWSEVCPLNQARPHCRLVALDGHLYAIGGECLNSVERYDPRLDRWDFAPPLPSDTFALAHTATVRAKEIFVTGGSLRFLLFRFSAQEQRWWAGPTGGSKDRTAEMVAVNGFLYRFDLNRSLGIAVYRCSASTRLWYECATYRTPYPDAFQCAVVDNLIYCVGRRSTLCFLADSVSPRFVPKELRSFPAPQGTLLPTVLTLPTPDLPQTRV

SEQ ID NO: 42730 - protein, 594 aa, Homo sapiens
  Payload ID: 8686
  Gene Symbol: KLHDC7B
  Gene Name: kelch domain containing 7B
  Uniprot ID: Q96G42
  ENSP ID: ENSP00000379034
MVLRSHPFPRQDRPQGSVPRAVPGSPVGPSTSTHSEDRHGPSSSVGTVIGTGTGGLVEAGGQPQPRSSETNGSPSPDPPPGLRGEGTREKSLDPLPQAAMPRGPAQPPAQRPPGPAASSSARRSQPVPQLRKRSRCEIAPSSEQEVRPAASGDPQGEAPGEGGSPAGRSGALTEKQEEARKLMVFLQRPGGWGVVEGPRKPSSRALEPATAAALRRRLDLGSCLDVLAFAQQHGEPGLAQETYALMSDNLLRVLGDPCLYRRLSAADRERILSLRTGRGRAVLGVLVLPSLYQGGRSGLPRGPRGEEPPAAAPVSLPLPAHLHVFNPRENTWRPLTQVPEEAPLRGCGLCTMHNYLFLAGGIRGSGAKAVCSNEVFCYNPLTNIWSQVRPMQQARAQLKLVALDGLLYAIGGECLYSMECYDPRTDAWTPRAPLPAGTFPVAHEAVACRGDIYVTGGHLFYRLLRYSPVKDAWDECPYSASHRRSSDIVALGGFLYRFDLLRGVGAAVMRYNTVTGSWSRAASLPLPAPAPLHCTTLGNTIYCLNPQVTATFTVSGGTAQFQAKELQPFPLGSTGVLSPFILTLPPEDRLQTSL

SEQ ID NO: 42731 - protein, 350 aa, Homo sapiens
  Payload ID: 8687
  Gene Symbol: KLHDC8A
  Gene Name: kelch domain containing 8A
  Uniprot ID: Q8IYD2
  ENSP ID: ENSP00000356123
MEVPNVKDFQWKRLAPLPSRRVYCSLLETGGQVYAIGGCDDNGVPMDCFEVYSPEADQWTALPRLPTARAGVAVTALGKRIMVIGGVGTNQLPLKVVEMYNIDEGKWKKRSMLREAAMGISVTAKDYRVYAAGGMGLDLRPHNHLQHYDMLKDMWVSLAPMPTPRYAATSFLRGSKIYVLGGRQSKYAVNAFEVFDIETRSWTKFPNIPYKRAFSSFVTLDNHLYSLGGLRQGRLYRQPKFLRTMDVFDMEQGGWLKMERSFFLKKRRADFVAGSLSGRVIVAGGLGNQPTVLETAEAFHPGKNKWEILPAMPTPRCACSSIVVKNCLLAVGGVNQGLSDAVEALCVSDS

SEQ ID NO: 42732 - protein, 350 aa, Homo sapiens; identical to SEQ ID NO: 42731
  Payload ID: 8687
  Gene Symbol: KLHDC8A
  Gene Name: kelch domain containing 8A
  Uniprot ID: Q8IYD2
  ENSP ID: ENSP00000356124

SEQ ID NO: 42733 - protein, 350 aa, Homo sapiens; identical to SEQ ID NO: 42731
  Payload ID: 8687
  Gene Symbol: KLHDC8A
  Gene Name: kelch domain containing 8A
  Uniprot ID: Q8IYD2
  ENSP ID: ENSP00000442229

SEQ ID NO: 42734 - protein, 79 aa, Homo sapiens
  Payload ID: 8687
  Gene Symbol: KLHDC8A
  Gene Name: kelch domain containing 8A
  ENSP ID: ENSP00000475290
MEVPNVKDFQWKRLAPLPSRRVYCSLLETGGQVYAIGGCDDNGVPMDCFEVYSPEADQWTALPRLPTARAGVAVTALGK

SEQ ID NO: 42735 - protein, 66 aa, Homo sapiens
  Payload ID: 8687
  Gene Symbol: KLHDC8A
  Gene Name: kelch domain containing 8A
  ENSP ID: ENSP00000475334
MEVPNVKDFQWKRLAPLPSRRVYCSLLETGGQVYAIGGCDDNGVPMDCFEVYSPEADQWTALPRLP

SEQ ID NO: 42736 - protein, 175 aa, Homo sapiens
  Payload ID: 8687
  Gene Symbol: KLHDC8A
  Gene Name: kelch domain containing 8A
  ENSP ID: ENSP00000475745
MGLDLRPHNHLQHYDMLKDMWVSLAPMPTPRYAATSFLRGSKIYVLGGRQSKYAVNAFEVFDIETRSWTKFPNIPYKRAFSSFVTLDNHLYSLGGLRQGRLYRQPKFLRTMDVFDMEQGGWLKMERSFFLKKRRADFVAGSLSGRVIVAGGLGNQPTVLETAEAFHPGKNKWEIL

SEQ ID NO: 42737 - protein, 216 aa, Homo sapiens
  Payload ID: 8687
  Gene Symbol: KLHDC8A
  Gene Name: kelch domain containing 8A
  ENSP ID: ENSP00000475871
MGLDLRPHNHLQHYDMLKDMWVSLAPMPTPRYAATSFLRGSKIYVLGGRQSKYAVNAFEVFDIETRSWTKFPNIPYKRAFSSFVTLDNHLYSLGGLRQGRLYRQPKFLRTMDVFDMEQGGWLKMERSFFLKKRRADFVAGSLSGRVIVAGGLGNQPTVLETAEAFHPGKNKWEILPAMPTPRCACSSIVVKNCLLAVGGVNQGLSDAVEALCVSDS

SEQ ID NO: 42738 - protein, 83 aa, Homo sapiens
  Payload ID: 8687
  Gene Symbol: KLHDC8A
  Gene Name: kelch domain containing 8A
  ENSP ID: ENSP00000475902
MDCFEVYSPEADQWTALPRLPTARAGVAVTALGKRIMVIGGVGTNQLPLKVVEMYNIDEGKWKKRSMLREAAMGISVTAKDYR

SEQ ID NO: 42739 - protein, 26 aa, Homo sapiens
  Payload ID: 8687
  Gene Symbol: KLHDC8A
  Gene Name: kelch domain containing 8A
  ENSP ID: ENSP00000475955
MEVPNVKDFQWKRLAPLPSRRVYCSL

SEQ ID NO: 42740 - protein, 354 aa, Homo sapiens
  Payload ID: 8688
  Gene Symbol: KLHDC8B
  Gene Name: kelch domain containing 8B
  Uniprot ID: Q8IXV7
  ENSP ID: ENSP00000327468
MSAGGGRAFAWQVFPPMPTCRVYGTVAHQDGHLLVLGGCGRAGLPLDTAETLDMASHTWLALAPLPTARAGAAAVVLGKQVLVVGGVDEVQSPVAAVEAFLMDEGRWERRATLPQAAMGVATVERDGMVYALGGMGPDTAPQAQVRVYEPRRDCWLSLPSMPTPCYGASTFLHGNKIYVLGGRQGKLPVTAFEAFDLEARTWTRHPSLPSRRAFAGCAMAEGSVFSLGGLQQPGPHNFYSRPHFVNTVEMFDLEHGSWTKLPRSLRMRDKRADFVVGSLGGHIVAIGGLGNQPCPLGSVESFSLARRRWEALPAMPTARCSCSSLQAGPRLFVIGGVAQGPSQAVEALCLRDGV

SEQ ID NO: 42741 - protein, 349 aa, Homo sapiens
  Payload ID: 8689
  Gene Symbol: KLHDC9
  Gene Name: kelch domain containing 9
  Uniprot ID: Q8NEP7
  ENSP ID: ENSP00000356990
MAVAVPPGRAAGSGWAWRPVARDALLARAFHSCTELRGRFYLVGGLLAGGAREPSSDTVVFDPARGQAVRLGARGSPPRSHHDAAPVDGRWLCVVGGWDGSRRLATVTALDTERGVWEAWTGTPGDCPPAGLSSHTCTRISDRELQVAGREGGIHTQRRYGSIYTLRLDPSARTYCYKQEGCHTASRSGHCAALLQTPGPHPGHQLLLFGGCNLAEPEVAGHWSHGKIKEEPPVAPHLMEQLARLVSSGQGSQKGPHGLRHHSCSVVGPFAVLFGGETLTRARDTICNDLYIYDTRTSPPLWFHFPCADRGMKRMGHRTCLWNDQLYLVGGFGEDGRTASPQVCILDFI

SEQ ID NO: 42742 - protein, 288 aa, Homo sapiens
  Payload ID: 8689
  Gene Symbol: KLHDC9
  Gene Name: kelch domain containing 9
  Uniprot ID: Q8NEP7
  ENSP ID: ENSP00000376030
MAVAVPPGRAAGSGWAWRPVARDALLARAFHSCTELRGRFYLVGGLLAGGAREPSSDTVVFDPARGQAVRLGARGSPPRSHHDAAPVDGRWLCVVGGWDGSRRLATVTALDTERGVWEAWTGTPGDCPPAGLSSHTCTRISDRELQVAGREGGIHTQRRYGSIYTLRLDPSARTYCYKQEGCHTASRSGHCAALLQTPGPHPGHQLLLFGGCNLAEPEVAGHWSHGKIKSFLSPQGGTTCCSSFDGTACKACEQWAGVPEGAPWTTASLMFCGRALCCAVWWRNSDQS

SEQ ID NO: 42743 - protein, 623 aa, Homo sapiens
  Payload ID: 8690
  Gene Symbol: KBTBD11
  Gene Name: kelch repeat and BTB (POZ) domain containing 11
  Uniprot ID: O94819
  ENSP ID: ENSP00000321544
MEHAVAPCVLYPGTEPGAAGESESEGAASPAQTPCSLGASLCFSSGEESPPQSLASAAEGAATSPPSSGGPRVVERQWEAGSAGAASPEELASPEERACPEEPAAPSPEPRVWLEDPASPEEPGEPAPVPPGFGAVYGEPDLVLEVSGRRLRAHKAVLAARSDYFRARASRDVLRVQGVSLTALRLLLADAYSGRMAGVRPDNVAEVVAGARRLQLPGAAQRATDAVGPQLSLANCYEVLSAAKRQRLNELRDAAYCFMSDHYLEVLREPAVFGRLSGAERDLLLRRRLRAGRAHLLAAALGPAGERAGSRPQSPSGDADARGDAAVYCFHAAAGEWRELTRLPEGAPARGCGLCVLYNYLFVAGGVAPAGPDGRARPSDQVFCYNPATDSWSAVRPLRQARSQLRLLALDGHLYAVGGECLLSVERYDPRADRWAPVAPLPRGAFAVAHEATTCHGEIYVSGGSLFYRLLKYDPRRDEWQECPCSSSRERSADMVALDGFIYRFDLSGSRGEAQAAGPSGVSVSRYHCLAKQWSPCVAPLRLPGGPTGLQPFRCAALDGAIYCVSRAGTWRFQPAREGEAGGDAGQGGGFEALGAPLDVRGVLIPFALSLPEKPPRGEQGAP

SEQ ID NO: 42744 - protein, 623 aa, Homo sapiens; identical to SEQ ID NO: 42743
  Payload ID: 8690
  Gene Symbol: KBTBD11
  Gene Name: kelch repeat and BTB (POZ) domain containing 11
  Uniprot ID: O94819
  ENSP ID: ENSP00000481889

SEQ ID NO: 42745 - protein, 198 aa, Homo sapiens
  Payload ID: 8691
  Gene Symbol: KBTBD12
  Gene Name: kelch repeat and BTB (POZ) domain containing 12
  Uniprot ID: Q3ZCT8
  ENSP ID: ENSP00000345478
MIEETSFGKSYAQLNFENSMLWMDLPDEEPDRLSNKLLQYDPSQDQWSVRAPMKYSKYRFSTAVVNSEIYVLGGIGCVGQDKGQVRKCLDVVEIYNPDGDFWREGPPMPSPLLSLRTNSTNAGAVDGKLYVCGGFHGADRHEVISKEILELDPWENQWNVVAINVLMHDSYDVCLVARMNPRDLIPPPSDLVEEGNEH

SEQ ID NO: 42746 - protein, 230 aa, Homo sapiens
  Payload ID: 8691
  Gene Symbol: KBTBD12
  Gene Name: kelch repeat and BTB (POZ) domain containing 12
  ENSP ID: ENSP00000385830
MKIKNQYLITNCVDKYSVERDNWKRVSPLPLQLACHAVVTVNNKLYVIGGWTPQMDLPDEEPDRLSNKLLQYDPSQDQWSVRAPMKYSKYRFSTAVVNSEIYVLGGIGCVGQDKGQVRKCLDVVEIYNPDGDFWREGPPMPSPLLSLRTNSTNAGAVDGKLYVCGGFHGADRHEVISKEILELDPWENQWNVVAINVLMHDSYDVCLVARMNPRDLIPPPSDLVEEGNEH

SEQ ID NO: 42747 - protein, 623 aa, Homo sapiens
  Payload ID: 8691
  Gene Symbol: KBTBD12
  Gene Name: kelch repeat and BTB (POZ) domain containing 12
  Uniprot ID: Q3ZCT8
  ENSP ID: ENSP00000385879
MECKIEGKEKYQHSLNLLNKIQNMKELAEMIDVVLTAEGEKFPCHRLVLAAFSPYFKAMFTCGLLECNQREVILYDITAESVSVLLNYMYNAALEINNANVQTVAMAAYFMQMEEVFSVCQKYMMDHMDASNCLGIYYFAKQIGAEDLSDRSKKYLYQHFAEVSLHEEILEIEVHQFLTLIKSDDLNISREESILDLVLRWVNHNKELRTVHLVELLKQVRLELVNPSFLRQALRRNTMLLCDADCVDIIQNAFKAIKTPQQHSLNLRYGMETTSLLLCIGNNSSGIRSRHRSYGDASFCYDPVSRKTYFISSPKYGEGLGTVCTGVVMENNTIIVAGEASASKLSRQKNKNVEIYRYHDRGNQFWEKLCTAEFRELYALGSIHNDLYVIGGQMKIKNQYLITNCVDKYSVERDNWKRVSPLPLQLACHAVVTVNNKLYVIGGWTPQMDLPDEEPDRLSNKLLQYDPSQDQWSVRAPMKYSKYRFSTAVVNSEIYVLGGIGCVGQDKGQVRKCLDVVEIYNPDGDFWREGPPMPSPLLSLRTNSTNAGAVDGKLYVCGGFHGADRHEVISKEILELDPWENQWNVVAINVLMHDSYDVCLVARMNPRDLIPPPSDLVEEGNEH

SEQ ID NO: 42748 - protein, 623 aa, Homo sapiens; identical to SEQ ID NO: 42747
  Payload ID: 8691
  Gene Symbol: KBTBD12
  Gene Name: kelch repeat and BTB (POZ) domain containing 12
  Uniprot ID: Q3ZCT8
  ENSP ID: ENSP00000385957

SEQ ID NO: 42749 - protein, 458 aa, Homo sapiens
  Payload ID: 8692
  Gene Symbol: KBTBD13
  Gene Name: kelch repeat and BTB (POZ) domain containing 13
  Uniprot ID: C9JR72
  ENSP ID: ENSP00000388723
MARGPQTLVQVWVGGQLFQADRALLVEHCGFFRGLFRSGMRETRAAEVRLGVLSAGGFRATLQVLRGDRPALAAEDELLQAVECAAFLQAPALARFLEHNLTSDNCALLCDAAAAFGLRDVFHSAALFICDGERELAAELALPEARAYVAALRPSSYAAVSTHTPAPGFLEDASRTLCYLDEEEDAWRTLAALPLEASTLLAGVATLGNKLYIVGGVRGASKEVVELGFCYDPDGGTWHEFPSPHQPRYDTALAGFDGRLYAIGGEFQRTPISSVERYDPAAGCWSFVADLPQPAAGVPCAQACGRLFVCLWRPADTTAVVEYAVRTDAWLPVAELRRPQSYGHCMVAHRDSLYVVRNGPSDDFLHCAIDCLNLATGQWTALPGQFVNSKGALFTAVVRGDTVYTVNRMFTLLYAIEGGTWRLLREKAGFPRPGSLQTFLLRLPPGAPGPVTSTTAEL

SEQ ID NO: 42750 - protein, 623 aa, Homo sapiens
  Payload ID: 8693
  Gene Symbol: KBTBD2
  Gene Name: kelch repeat and BTB (POZ) domain containing 2
  Uniprot ID: Q8IY47
  ENSP ID: ENSP00000302586
MSTQDERQINTEYAVSLLEQLKLFYEQQLFTDIVLIVEGTEFPCHKMVLATCSSYFRAMFMSGLSESKQTHVHLRNVDAATLQIIITYAYTGNLAMNDSTVEQLYETACFLQVEDVLQRCREYLIKKINAENCVRLLSFADLFSCEELKQSAKRMVEHKFTAVYHQDAFMQLSHDLLIDILSSDNLNVEKEETVREAAMLWLEYNTESRSQYLSSVLSQIRIDALSEVTQRAWFQGLPPNDKSVVVQGLYKSMPKFFKPRLGMTKEEMMIFIEASSENPCSLYSSVCYSPQAEKVYKLCSPPADLHKVGTVVTPDNDIYIAGGQVPLKNTKTNHSKTSKLQTAFRTVNCFYWFDAQQNTWFPKTPMLFVRIKPSLVCCEGYIYAIGGDSVGGELNRRTVERYDTEKDEWTMVSPLPCAWQWSAAVVVHDCIYVMTLNLMYCYFPRSDSWVEMAMRQTSRSFASAAAFGDKIFYIGGLHIATNSGIRLPSGTVDGSSVTVEIYDVNKNEWKMAANIPAKRYSDPCVRAVVISNSLCVFMRETHLNERAKYVTYQYDLELDRWSLRQHISERVLWDLGRDFRCTVGKLYPSCLEESPWKPPTYLFSTDGTEEFELDGEMVALPPV

SEQ ID NO: 42751 - protein, 4 aa, Homo sapiens
  Payload ID: 8693
  Gene Symbol: KBTBD2
  Gene Name: kelch repeat and BTB (POZ) domain containing 2
  ENSP ID: ENSP00000388236
MSTQ

SEQ ID NO: 42752 - protein, 47 aa, Homo sapiens
  Payload ID: 8693
  Gene Symbol: KBTBD2
  Gene Name: kelch repeat and BTB (POZ) domain containing 2
  ENSP ID: ENSP00000395715
MSTQDERQINTEYAVSLLEQLKLFYEQQLFTDIVLIVEGTEFPCHKM

SEQ ID NO: 42753 - protein, 29 aa, Homo sapiens
  Payload ID: 8693
  Gene Symbol: KBTBD2
  Gene Name: kelch repeat and BTB (POZ) domain containing 2
  ENSP ID: ENSP00000407059
MSTQDERQINTEYAVSLLEQLKLFYEQQL

SEQ ID NO: 42754 - protein, 13 aa, Homo sapiens
  Payload ID: 8693
  Gene Symbol: KBTBD2
  Gene Name: kelch repeat and BTB (POZ) domain containing 2
  ENSP ID: ENSP00000407520
MSTQDERQINTEY

SEQ ID NO: 42755 - protein, 334 aa, Homo sapiens
  Payload ID: 8693
  Gene Symbol: KBTBD2
  Gene Name: kelch repeat and BTB (POZ) domain containing 2
  ENSP ID: ENSP00000481197
MSTQDERQINTEYAVSLLEQLKLFYEQQLFTDIVLIVEGTEFPCHKMVLATCSSYFRAMFMSGLSESKQTHVHLRNVDAATLQIIITYAYTGNLAMNDSTVEQLYETACFLQVEDVLQRCREYLIKKINAENCVRLLSFADLFSCEELKQSAKRMVEHKFTAVYHQDAFMQLSHDLLIDILSSDNLNVEKEETVREAAMLWLEYNTESRSQYLSSVLSQIRIDALSEVTQRAWFQGLPPNDKSVVVQGLYKSMPKFFKPRLGMTKEEMMIFIEASSENPCSLYSSVCYSPQAEKVYKLCSPPADLHKVGTVVTPDNDIYIAGGQVPLKHKNKSQ

SEQ ID NO: 42756 - protein, 533 aa, Homo sapiens
  Payload ID: 8694
  Gene Symbol: KBTBD3
  Gene Name: kelch repeat and BTB (POZ) domain containing 3
  ENSP ID: ENSP00000431910
MFEVNMKERDDGSVTITNLSSKAVKAFLDYAYTGKTKITDDNVEMFFQLSSFLQVSFLSKACSDFLIKSINLVNCLQLLSISDSYGSTSLFDHALHFVQHHFSLLFKSSDFLEMNFGVLQKCLESDELNVPEEEMVLKVVLSWTKHNLESRQKYLPHLIEKVRLHQLSEETLQDCLFNEESLLKSTNCFDIIMDAIKCVQGSGGLFPDARPSTTEKYIFIHKTEENGENQYTFCYNIKSDSWKILPQSHLIDLPGSSLSSYGEKIFLTGGCKGKCCRTVRLHIAESYHDATDQTWCYCPVKNDFFLVSTMKTPRTMHTSVMALDRLFVIGGKTRGSRDIKSLLDVESYNPLSKEWISVSPLPRGIYYPEASTCQNVIYVLGSEVEITDAFNPSLDCFFKYNATTDQWSELVAEFGQFFHATLIKAVPVNCTLYICDLSTYKVYSFCPDTCVWKGEGSFECAGFNAGAIGIEDKIYILGGDYAPDEITDEVQVYHSNRSEWEEVSPMPRALTEFYCQVIQFNKYRDPWFSNLCA

SEQ ID NO: 42757 - protein, 612 aa, Homo sapiens
  Payload ID: 8694
  Gene Symbol: KBTBD3
  Gene Name: kelch repeat and BTB (POZ) domain containing 3
  Uniprot ID: Q8NAB2
  ENSP ID: ENSP00000432163
MELAMDNSYAFNQRSTCNGIPSEKKNNFLVSEDHGQKILSVLQNFREQNVFYDFKIIMKDEIIPCHRCVLAACSDFFRAMFEVNMKERDDGSVTITNLSSKAVKAFLDYAYTGKTKITDDNVEMFFQLSSFLQVSFLSKACSDFLIKSINLVNCLQLLSISDSYGSTSLFDHALHFVQHHFSLLFKSSDFLEMNFGVLQKCLESDELNVPEEEMVLKVVLSWTKHNLESRQKYLPHLIEKVRLHQLSEETLQDCLFNEESLLKSTNCFDIIMDAIKCVQGSGGLFPDARPSTTEKYIFIHKTEENGENQYTFCYNIKSDSWKILPQSHLIDLPGSSLSSYGEKIFLTGGCKGKCCRTVRLHIAESYHDATDQTWCYCPVKNDFFLVSTMKTPRTMHTSVMALDRLFVIGGKTRGSRDIKSLLDVESYNPLSKEWISVSPLPRGIYYPEASTCQNVIYVLGSEVEITDAFNPSLDCFFKYNATTDQWSELVAEFGQFFHATLIKAVPVNCTLYICDLSTYKVYSFCPDTCVWKGEGSFECAGFNAGAIGIEDKIYILGGDYAPDEITDEVQVYHSNRSEWEEVSPMPRALTEFYCQVIQFNKYRDPWFSNLCA

SEQ ID NO: 42758 - protein, 33 aa, Homo sapiens
  Payload ID: 8694
  Gene Symbol: KBTBD3
  Gene Name: kelch repeat and BTB (POZ) domain containing 3
  ENSP ID: ENSP00000433493
MFEVNMKERDDGSVTITNLSSKAVKAFLDYAYT

SEQ ID NO: 42759 - protein, 612 aa, Homo sapiens; identical to SEQ ID NO: 42757
  Payload ID: 8694
  Gene Symbol: KBTBD3
  Gene Name: kelch repeat and BTB (POZ) domain containing 3
  Uniprot ID: Q8NAB2
  ENSP ID: ENSP00000436262

SEQ ID NO: 42760 - protein, 91 aa, Homo sapiens
  Payload ID: 8694
  Gene Symbol: KBTBD3
  Gene Name: kelch repeat and BTB (POZ) domain containing 3
  ENSP ID: ENSP00000475836
MELAMDNSYAFNQRSTCNGIPSEKKNNFLVSEDHGQKILSVLQNFREQNVFYDFKIIMKDEIIPCHRCVLAACSDFFRSSQVSISQSSLEH

SEQ ID NO: 42761 - protein, 518 aa, Homo sapiens
  Payload ID: 8695
  Gene Symbol: KBTBD4
  Gene Name: kelch repeat and BTB (POZ) domain containing 4
  Uniprot ID: Q9NVX7
  ENSP ID: ENSP00000378703
MESPEEPGASMDENYFVNYTFKDRSHSGRVAQGIMKLCLEEELFADVTISVEGREFQLHRLVLSAQSCFFRSMFTSNLKEAHNRVIVLQDVSESVFQLLVDYIYHGTVKLRAEELQEIYEVSDMYQLTSLFEECSRFLARTVQVGNCLQVMWLADRHSDPELYTAAKHCAKTHLAQLQNTEEFLHLPHRLLTDIISDGVPCSQNPTEAIEAWINFNKEEREAFAESLRTSLKEIGENVHIYLIGKESSRTHSLAVSLHCAEDDSISVSGQNSLCHQITAACKHGGDLYVVGGSIPRRMWKCNNATVDWEWCAPLPRDRLQHTLVSVPGKDAIYSLGGKTLQDTLSNAVIYYRVGDNVWTETTQLEVAVSGAAGANLNGIIYLLGGEENDLDFFTKPSRLIQCFDTETDKCHVKPYVLPFAGRMHAAVHKDLVFIVAEGDSLVCYNPLLDSFTRLCLPEAWSSAPSLWKIASCNGSIYVFRDRYKKGDANTYKLDPATSAVTVTRGIKVLLTNLQFVLA

SEQ ID NO: 42762 - protein, 534 aa, Homo sapiens
  Payload ID: 8695
  Gene Symbol: KBTBD4
  Gene Name: kelch repeat and BTB (POZ) domain containing 4
  Uniprot ID: Q9NVX7
  ENSP ID: ENSP00000415106
MKGGNADSWQREKLASMESPEEPGASMDENYFVNYTFKDRSHSGRVAQGIMKLCLEEELFADVTISVEGREFQLHRLVLSAQSCFFRSMFTSNLKEAHNRVIVLQDVSESVFQLLVDYIYHGTVKLRAEELQEIYEVSDMYQLTSLFEECSRFLARTVQVGNCLQVMWLADRHSDPELYTAAKHCAKTHLAQLQNTEEFLHLPHRLLTDIISDGVPCSQNPTEAIEAWINFNKEEREAFAESLRTSLKEIGENVHIYLIGKESSRTHSLAVSLHCAEDDSISVSGQNSLCHQITAACKHGGDLYVVGGSIPRRMWKCNNATVDWEWCAPLPRDRLQHTLVSVPGKDAIYSLGGKTLQDTLSNAVIYYRVGDNVWTETTQLEVAVSGAAGANLNGIIYLLGGEENDLDFFTKPSRLIQCFDTETDKCHVKPYVLPFAGRMHAAVHKDLVFIVAEGDSLVCYNPLLDSFTRLCLPEAWSSAPSLWKIASCNGSIYVFRDRYKKGDANTYKLDPATSAVTVTRGIKVLLTNLQFVLA

SEQ ID NO: 42763 - protein, 173 aa, Homo sapiens
  Payload ID: 8695
  Gene Symbol: KBTBD4
  Gene Name: kelch repeat and BTB (POZ) domain containing 4
  ENSP ID: ENSP00000433124
MKGGNAGYSRWCCFADSWQREKLASMESPEEPGASMDENYFVNYTFKDRSHSGRVAQGIMKLCLEEELFADVTISVEGREFQLHRLVLSAQSCFFRSMFTSNLKEAHNRVIVLQDVSESVFQLLVDYIYHGTVKLRAEELQEIYEVSDMYQLTSLFEECSRFLARTVQVGNCL

SEQ ID NO: 42764 - protein, 518 aa, Homo sapiens; identical to SEQ ID NO: 42761
  Payload ID: 8695
  Gene Symbol: KBTBD4
  Gene Name: kelch repeat and BTB (POZ) domain containing 4
  Uniprot ID: Q9NVX7
  ENSP ID: ENSP00000433340

SEQ ID NO: 42765 - protein, 198 aa, Homo sapiens
  Payload ID: 8695
  Gene Symbol: KBTBD4
  Gene Name: kelch repeat and BTB (POZ) domain containing 4
  ENSP ID: ENSP00000433404
MESPEEPGASMDENYFVNYTFKDRSHSGRVAQGIMKLCLEEELFADVTISVEGREFQLHRLVLSAQSCFFRSMFTSNLKEAHNRVIVLQDVSESVFQLLVDYIYHGTVKLRAEELQEIYEVSDMYQLTSLFEECSRFLARTVQVGNCLQVMWLADRHSDPELYTAAKHCAKTHLAQLQNTEEFLHLPHRLLTDIISGK

SEQ ID NO: 42766 - protein, 161 aa, Homo sapiens
  Payload ID: 8695
  Gene Symbol: KBTBD4
  Gene Name: kelch repeat and BTB (POZ) domain containing 4
  ENSP ID: ENSP00000433653
MESPEEPGASMDENYFVNYTFKDRSHSGRVAQGIMKLCLEEELFADVTISVEGREFQLHRLVLSAQSCFFRSMFTSNLKEAHNRVIVLQDVSESVFQLLVDYIYHGTVKLRAEELQEIYEVSDMYQLTSLFEECSRFLARTVQVGNCLQVMWLADRHSDPE

SEQ ID NO: 42767 - protein, 286 aa, Homo sapiens
  Payload ID: 8695
  Gene Symbol: KBTBD4
  Gene Name: kelch repeat and BTB (POZ) domain containing 4
  ENSP ID: ENSP00000434477
MGLPVPRPGGGWTQVLGRSHRESFERAGKCGGSSSEESKYSWQREKLASMESPEEPGASMDENYFVNYTFKDRSHSGRVAQGIMKLCLEEELFADVTISVEGREFQLHRLVLSAQSCFFRSMFTSNLKEAHNRVIVLQDVSESVFQLLVDYIYHGTVKLRAEELQEIYEVSDMYQLTSLFEECSRFLARTVQVGNCLQVMWLADRHSDPELYTAAKHCAKTHLAQLQNTEEFLHLPHRLLTDIISDGVPCSQNPTEAIEAWINFNKEEREAFAESLRTSLKVRQIS

SEQ ID NO: 42768 - protein, 159 aa, Homo sapiens
  Payload ID: 8695
  Gene Symbol: KBTBD4
  Gene Name: kelch repeat and BTB (POZ) domain containing 4
  ENSP ID: ENSP00000435651
MESPEEPGASMDENYFVNYTFKDRSHSGRVAQGIMKLCLEEELFADVTISVEGREFQLHRLVLSAQSCFFRSMFTSNLKEAHNRVIVLQDVSESVFQLLVDYIYHGTVKLRAEELQEIYEVSDMYQLTSLFEECSRFLARTVQVGNCLQVMWLADRHSD

SEQ ID NO: 42769 - protein, 31 aa, Homo sapiens
  Payload ID: 8695
  Gene Symbol: KBTBD4
  Gene Name: kelch repeat and BTB (POZ) domain containing 4
  ENSP ID: ENSP00000435850
MKGGNADYGCEFLRLLKMVLLCRQLAEREVG

SEQ ID NO: 42770 - protein, 543 aa, Homo sapiens
  Payload ID: 8695
  Gene Symbol: KBTBD4
  Gene Name: kelch repeat and BTB (POZ) domain containing 4
  ENSP ID: ENSP00000436713
MAVNSSGYSRWCCFADSWQREKLASMESPEEPGASMDENYFVNYTFKDRSHSGRVAQGIMKLCLEEELFADVTISVEGREFQLHRLVLSAQSCFFRSMFTSNLKEAHNRVIVLQDVSESVFQLLVDYIYHGTVKLRAEELQEIYEVSDMYQLTSLFEECSRFLARTVQVGNCLQVMWLADRHSDPELYTAAKHCAKTHLAQLQNTEEFLHLPHRLLTDIISDGVPCSQNPTEAIEAWINFNKEEREAFAESLRTSLKEIGENVHIYLIGKESSRTHSLAVSLHCAEDDSISVSGQNSLCHQITAACKHGGDLYVVGGSIPRRMWKCNNATVDWEWCAPLPRDRLQHTLVSVPGKDAIYSLGGKTLQDTLSNAVIYYRVGDNVWTETTQLEVAVSGAAGANLNGIIYLLGGEENDLDFFTKPSRLIQCFDTETDKCHVKPYVLPFAGRMHAAVHKDLVFIVAEGDSLVCYNPLLDSFTRLCLPEAWSSAPSLWKIASCNGSIYVFRDRYKKGDANTYKLDPATSAVTVTRGIKVLLTNLQFVLA

SEQ ID NO: 42771 - protein, 674 aa, Homo sapiens
  Payload ID: 8696
  Gene Symbol: KBTBD6
  Gene Name: kelch repeat and BTB (POZ) domain containing 6
  Uniprot ID: Q86V97
  ENSP ID: ENSP00000368799
MQSREDAPRSRRLASPRGGKRPKKIHKPTVSAFFTGPEELKDTAHSAALLAQLKSFYDARLLCDVTIEVVTPGSGPGTGRLFPCNRNVLAAACPYFKSMFTGGMYESQQASVTMHDVDAESFEVLVDYCYTGRVSLSEANVERLYAASDMLQLEYVREACASFLARRLDLTNCTAILKFADAFGHRKLRSQAQSYIAQNFKQLSHMGSIREETLADLTLAQLLAVLRLDSLDVESEQTVCHVAVQWLEAAPKERGPSAAEVFKCVRWMHFTEEDQDYLEGLLTKPIVKKYCLDVIEGALQMRYGDLLYKSLVPVPNSSSSSSSSNSLVSAAENPPQRLGMCAKEMVIFFGHPRDPFLCCDPYSGDLYKVPSPLTCLAHTRTVTTLAVCISPDHDIYLAAQPRTDLWVYKPAQNSWQQLADRLLCREGMDVAYLNGYIYILGGRDPITGVKLKEVECYNVKRNQWALVAPLPHSFLSFDLMVIRDYLYALNSKRMFCYDPSHNMWLKCVSLKRNDFQEACVFNEEIYCICDIPVMKVYNPVRAEWRQMNNIPLVSETNNYRIIKHGQKLLLITSRTPQWKKNRVTVYEYDIRGDQWINIGTTLGLLQFDSNFFCLSARVYPSCLEPGQSFLTEEEEIPSESSTEWDLGGFSEPDSESGSSSSLSDDDFWVRVAPQ

SEQ ID NO: 42772 - protein, 684 aa, Homo sapiens
  Payload ID: 8697
  Gene Symbol: KBTBD7
  Gene Name: kelch repeat and BTB (POZ) domain containing 7
  Uniprot ID: Q8WVZ9
  ENSP ID: ENSP00000368797
MQSREDVPRSRRLASPRGGRRPKRISKPSVSAFFTGPEELKDTAHSAALLAQLKSFYDARLLCDVTIEVVTPGSGPGTGRLFSCNRNVLAAACPYFKSMFTGGMYESQQASVTMHDVDAESFEVLVDYCYTGRVSLSEANVQRLYAASDMLQLEYVREACASFLARRLDLTNCTAILKFADAFDHHKLRSQAQSYIAHNFKQLSRMGSIREETLADLTLAQLLAVLRLDSLDIESERTVCHVAVQWLEAAAKERGPSAAEVFKCVRWMHFTEEDQDYLEGLLTKPIVKKYCLDVIEGALQMRYGDLLYKSLVPVPNSSSSSSSSNSLVSAAENPPQRLGMCAKEMVIFFGHPRDPFLCYDPYSGDIYTMPSPLTSFAHTKTVTSSAVCVSPDHDIYLAAQPRKDLWVYKPAQNSWQQLADRLLCREGMDVAYLNGYIYILGGRDPITGVKLKEVECYSVQRNQWALVAPVPHSFYSFELIVVQNYLYAVNSKRMLCYDPSHNMWLNCASLKRSDFQEACVFNDEIYCICDIPVMKVYNPARGEWRRISNIPLDSETHNYQIVNHDQKLLLITSTTPQWKKNRVTVYEYDTREDQWINIGTMLGLLQFDSGFICLCARVYPSCLEPGQSFITEEDDARSESSTEWDLDGFSELDSESGSSSSFSDDEVWVQVAPQRNAQDQQGSL

SEQ ID NO: 42773 - protein, 601 aa, Homo sapiens
  Payload ID: 8698
  Gene Symbol: KBTBD8
  Gene Name: kelch repeat and BTB (POZ) domain containing 8
  Uniprot ID: Q8NFY9
  ENSP ID: ENSP00000401878
MAASADLSKSSPTPNGIPSSDPASDAMDPFHACSILKQLKTMYDEGQLTDIVVEVDHGKTFSCHRNVLAAISPYFRSMFTSGLTESTQKEVRIVGVEAESMDLVLNYAYTSRVILTEANVQALFTAASIFQIPSIQDQCAKYMISHLDPQNSIGVFIFADHYGHQELGDRSKEYIRKKFLCVTKEQEFLQLTKDQLISILDSDDLNVDREEHVYESIIRWFEHEQNEREVHLPEIFAKCIRFPLMEDTFIEKIPPQFAQAIAKSCVEKGPSNTNGCTQRLGMTASEMIICFDAAHKHSGKKQTVPCLDIVTGRVFKLCKPPNDLREVGILVSPDNDIYIAGGYRPSSSEVSIDHKAENDFWMYDHSTNRWLSKPSLLRARIGCKLVYCCGKMYAIGGRVYEGDGRNSLKSVECYDSRENCWTTVCAMPVAMEFHNAVEYKEKIYVLQGEFFLFYEPQKDYWGFLTPMTVPRIQGLAAVYKDSIYYIAGTCGNHQRMFTVEAYDIELNKWTRKKDFPCDQSINPYLKLVLFQNKLHLFVRATQVTVEEHVFRTSRKNSLYQYDDIADQWMKVYETPDRLWDLGRHFECAVAKLYPQCLQKVL

SEQ ID NO: 42774 - protein, 166 aa, Homo sapiens
  Payload ID: 8698
  Gene Symbol: KBTBD8
  Gene Name: kelch repeat and BTB (POZ) domain containing 8
  ENSP ID: ENSP00000417341
MFTSGLTESTQKEVRIVGVEAESMDLVLNYAYTSRVILTEANVQALFTAASIFQIPSIQDQCAKYMISHLDPQNSIGVFIFADHYGHQELGDRSKEYIRKKFLCVTKEQEFLQLTKDQLISILDSDDLNVDREEHVYESIIRWFEHEQNEREVHLPEIFAKCIRFP

SEQ ID NO: 42775 - protein, 146 aa, Homo sapiens
  Payload ID: 8698
  Gene Symbol: KBTBD8
  Gene Name: kelch repeat and BTB (POZ) domain containing 8
  ENSP ID: ENSP00000418075
MDPFHACSILKQLKTMYDEGQLTDIVVEVDHGKTFSCHRNVLAAISPYFRSMFTSGLTESTQKEVRIVGVEAESMDLVLNYAYTSRVILTEANVQALFTAASIFQIPSIQDQCAKYMISHLDPQNSIGVFIFADHYGHQELGDRSK

SEQ ID NO: 42776 - protein, 159 aa, Homo sapiens
  Payload ID: 8698
  Gene Symbol: KBTBD8
  Gene Name: kelch repeat and BTB (POZ) domain containing 8
  Uniprot ID: Q8NFY9
  ENSP ID: ENSP00000419738
MAASAGEFFLFYEPQKDYWGFLTPMTVPRIQGLAAVYKDSIYYIAGTCGNHQRMFTVEAYDIELNKWTRKKDFPCDQSINPYLKLVLFQNKLHLFVRATQVTVEEHVFRTSRKNSLYQYDDIADQWMKVYETPDRLWDLGRHFECAVAKLYPQCLQKVL

SEQ ID NO: 42777 - protein, 624 aa, Homo sapiens
  Payload ID: 8699
  Gene Symbol: KEAP1
  Gene Name: kelch-like ECH-associated protein 1
  Uniprot ID: Q14145
  ENSP ID: ENSP00000171111
MQPDPRPSGAGACCRFLPLQSQCPEGAGDAVMYASTECKAEVTPSQHGNRTFSYTLEDHTKQAFGIMNELRLSQQLCDVTLQVKYQDAPAAQFMAHKVVLASSSPVFKAMFTNGLREQGMEVVSIEGIHPKVMERLIEFAYTASISMGEKCVLHVMNGAVMYQIDSVVRACSDFLVQQLDPSNAIGIANFAEQIGCVELHQRAREYIYMHFGEVAKQEEFFNLSHCQLVTLISRDDLNVRCESEVFHACINWVKYDCEQRRFYVQALLRAVRCHSLTPNFLQMQLQKCEILQSDSRCKDYLVKIFEELTLHKPTQVMPCRAPKVGRLIYTAGGYFRQSLSYLEAYNPSDGTWLRLADLQVPRSGLAGCVVGGLLYAVGGRNNSPDGNTDSSALDCYNPMTNQWSPCAPMSVPRNRIGVGVIDGHIYAVGGSHGCIHHNSVERYEPERDEWHLVAPMLTRRIGVGVAVLNRLLYAVGGFDGTNRLNSAECYYPERNEWRMITAMNTIRSGAGVCVLHNCIYAAGGYDGQDQLNSVERYDVETETWTFVAPMKHRRSALGITVHQGRIYVLGGYDGHTFLDSVECYDPDTDTWSEVTRMTSGRSGVGVAVTMEPCRKQIDQQNCTC

SEQ ID NO: 42778 - protein, 624 aa, Homo sapiens; identical to SEQ ID NO: 42777
  Payload ID: 8699
  Gene Symbol: KEAP1
  Gene Name: kelch-like ECH-associated protein 1
  Uniprot ID: Q14145
  ENSP ID: ENSP00000377245

SEQ ID NO: 42779 - protein, 212 aa, Homo sapiens
  Payload ID: 8699
  Gene Symbol: KEAP1
  Gene Name: kelch-like ECH-associated protein 1
  ENSP ID: ENSP00000465024
MQPDPRPSGAGACCRFLPLQSQCPEGAGDAVMYASTECKAEVTPSQHGNRTFSYTLEDHTKQAFGIMNELRLSQQLCDVTLQVKYQDAPAAQFMAHKVVLASSSPVFKAMFTNGLREQGMEVVSIEGIHPKVMERLIEFAYTASISMGEKCVLHVMNGAVMYQIDSVVRACSDFLVQQLDPSNAIGIANFAEQIGCVELHQRAREYIYMHFG

SEQ ID NO: 42780 - protein, 213 aa, Homo sapiens
  Payload ID: 8699
  Gene Symbol: KEAP1
  Gene Name: kelch-like ECH-associated protein 1
  ENSP ID: ENSP00000465126
MQPDPRPSGAGACCRFLPLQSQCPEGAGDAVMYASTECKAEVTPSQHGNRTFSYTLEDHTKQAFGIMNELRLSQQLCDVTLQVKYQDAPAAQFMAHKVVLASSSPVFKAMFTNGLREQGMEVVSIEGIHPKVMERLIEFAYTASISMGEKCVLHVMNGAVMYQIDSVVRACSDFLVQQLDPSNAIGIANFAEQIGCVELHQRAREYIYMHFGE

SEQ ID NO: 42781 - protein, 129 aa, Homo sapiens
  Payload ID: 8699
  Gene Symbol: KEAP1
  Gene Name: kelch-like ECH-associated protein 1
  ENSP ID: ENSP00000466704
  MOD_RES (1)..(1): Any amino acid
XSRWWRAAPRGDIQQRNREMEGTVRRGAWLCAPARCPTPRRRAPGTCGKGGRIAAPFPPRPFRPLPASFSGVPRPLPNRQPRPRRPRSPGAEAPRRRRRPRVPYSQEVCPPRHERCCHVPDRQRCPCLQ

SEQ ID NO: 42782 - protein, 116 aa, Homo sapiens
  Payload ID: 8699
  Gene Symbol: KEAP1
  Gene Name: kelch-like ECH-associated protein 1
  ENSP ID: ENSP00000467601
  MOD_RES (1)..(1): Any amino acid
XLEAYNPSDGTWLRLADLQVPRSGLAGCVVGGLLYAVGGRNNSPDGNTDSSALDCYNPMTNQWSPCAPMSVPRNRIGVGVIDGHIYAVGGSHGCIHHNSVERRLRPAQLYLCCWGL

SEQ ID NO: 42783 - protein, 172 aa, Homo sapiens
  Payload ID: 8699
  Gene Symbol: KEAP1
  Gene Name: kelch-like ECH-associated protein 1
  ENSP ID: ENSP00000468014
  MOD_RES (1)..(1): Any amino acid
XCYNPMTNQWSPCAPMSVPRNRIGVGVIDGHIYAVGGSHGCIHHNSVERYEPERDEWHLVAPMLTRRIGVGVAVLNRLLYAVGGFDGTNRLNSAECYYPERNEWRMITAMNTIRSGAGGYDGHTFLDSVECYDPDTDTWSEVTRMTSGRSGVGVAVTMEPCRKQIDQQNCTC

SEQ ID NO: 42784 - protein, 279 aa, Homo sapiens
  Payload ID: 8699
  Gene Symbol: KEAP1
  Gene Name: kelch-like ECH-associated protein 1
  ENSP ID: ENSP00000468671
MQPDPRPSGAGACCRFLPLQSQCPEGAGDAVMYASTECKAEVTPSQHGNRTFSYTLEDHTKQAFGIMNELRLSQQLCDVTLQVKYQDAPAAQFMAHKVVLASSSPVFKAMFTNGLREQGMEVVSIEGIHPKVMERLIEFAYTASISMGEKCVLHVMNGAVMYQIDSVVRACSDFLVQQLDPSNAIGIANFAEQIGCVELHQRAREYIYMHFGEVAKQEEFFNLSHCQLVTLISRDDLNVRCESEVFHACINWVKYDCEQRRFYVQALLRAVRCHSLTPN

SEQ ID NO: 42785 - protein, 748 aa, Homo sapiens
  Payload ID: 8700
  Gene Symbol: KLHL1
  Gene Name: kelch-like family member 1
  Uniprot ID: Q9NR64
  ENSP ID: ENSP00000367075
MSGSGRKDFDVKHILRLRWKLFSHPSPSTGGPAGGGCLQQDGSGSFEHWGPSQSRLLKSQERSGVSTFWKKPSSSSSSSSSPSSSSSSFNPLNGTLLPVATRLQQGAPGQGTQQPARTLFYVESLEEEVVPGMDFPGPHEKGLVLQELKVEPDNSSQATGEGCGHRLSSTGHSMTPQSDLDSSSSEEFYQAVHHAEQTFRKMESYLKQQQLCDVILIVGNRKIPAHRLVLSSVSDYFAAMFTSDVCEAKQEEIKMEGIDPNALWDLVQFAYTGCLELKEDTIENLLAAACLLQLPQVVEVCCHFLMKLLHPSNCLGIRAFADAQGCIELMKVAHSYTMENIMEVIRNQEFLLLPAEELHKLLASDDVNVPDEETIFHALMMWVKYDMQSRCNDLSMLLAFIRLPLLPPQILADLENHALFKNDLECQKLILEAMKYHLLPERRTLMQSPRTKPRKSTVGTLYAVGGMDNNKGATTIEKYDLRTNLWIQAGMMNGRRLQFGVAVIDDKLFVIGGRDGLKTLNTVECYNPKTKTWTVLPPMSTHRHGLGVTVLEGPIYAVGGHDGWSYLNTVERWDPQSQQWTFVASMSIARSTVGVAALNGKLYSVGGRDGSSCLSSMEYYDPHTNKWNMCAPMCKRRGGVGVATCDGFLYAVGGHDAPASNHCSRLLDYVERYDPKTDTWTMVAPLSMPRDAVGVCLLGDRLYAVGGYDGQTYLNTMESYDPQTNEWTQMASLNIGRAGACVVVIKQP

SEQ ID NO: 42786 - protein, 687 aa, Homo sapiens
  Payload ID: 8700
  Gene Symbol: KLHL1
  Gene Name: kelch-like family member 1
  ENSP ID: ENSP00000439602
MSGSGRKDFDVKHILRLRWKLFSHPSPSTGGPAGGGCLQQDGSGSFEHWGPSQSRLLKSQERSGVSTFWKKPSSSSSSSSSPSSSSSSFNPLNGTLLPVATRLQQGAPGQGTQQPARTLFYVESLEEEVVPGMDFPGPHEKGLVLQELKVEPDNSSQATGEGCGHRLVLSSVSDYFAAMFTSDVCEAKQEEIKMEGIDPNALWDLVQFAYTGCLELKEDTIENLLAAACLLQLPQVVEVCCHFLMKLLHPSNCLGIRAFADAQGCIELMKVAHSYTMENIMEVIRNQEFLLLPAEELHKLLASDDVNVPDEETIFHALMMWVKYDMQSRCNDLSMLLAFIRLPLLPPQILADLENHALFKNDLECQKLILEAMKYHLLPERRTLMQSPRTKPRKSTVGTLYAVGGMDNNKGATTIEKYDLRTNLWIQAGMMNGRRLQFGVAVIDDKLFVIGGRDGLKTLNTVECYNPKTKTWTVLPPMSTHRHGLGVTVLEGPIYAVGGHDGWSYLNTVERWDPQSQQWTFVASMSIARSTVGVAALNGKLYSVGGRDGSSCLSSMEYYDPHTNKWNMCAPMCKRRGGVGVATCDGFLYAVGGHDAPASNHCSRLLDYVERYDPKTDTWTMVAPLSMPRDAVGVCLLGDRLYAVGGYDGQTYLNTMESYDPQTNEWTQMASLNIGRAGACVVVIKQP

SEQ ID NO: 42787 - protein, 608 aa, Homo sapiens
  Payload ID: 8701
  Gene Symbol: KLHL10
  Gene Name: kelch-like family member 10
  Uniprot ID: Q6JEL2
  ENSP ID: ENSP00000293303
MEMESAAASTRFHQPHMERKMSAMACEIFNELRLEGKLCDVVIKVNGFEFSAHKNILCSCSSYFRALFTSGWNNTEKKVYNIPGISPDMMKLIIEYAYTRTVPITPDNVEKLLAAADQFNIMGIVRGCCEFLKSELCLDNCIGICKFTDYYYCPELRQKAYMFILHNFEEMVKVSAEFLELSVTELKDIIEKDELNVKQEDAVFEAILKWISHDPQNRKQHISILLPKVRLALMHAEYFMNNVKMNDYVKDSEECKPVIINALKAMYDLNMNGPSNSDFTNPLTRPRLPYAILFAIGGWSGGSPTNAIEAYDARADRWVNVTCEEESPRAYHGAAYLKGYVYIIGGFDSVDYFNSVKRFDPVKKTWHQVAPMHSRRCYVSVTVLGNFIYAMGGFDGYVRLNTAERYEPETNQWTLIAPMHEQRSDASATTLYGKVYICGGFNGNECLFTAEVYNTESNQWTVIAPMRSRRSGIGVIAYGEHVYAVGGFDGANRLRSAEAYSPVANTWRTIPTMFNPRSNFGIEVVDDLLFVVGGFNGFTTTFNVECYDEKTDEWYDAHDMSIYRSALSCCVVPGLANVEEYAARRDNFPGLALRDEVKYSASTSTLPV

SEQ ID NO: 42788 - protein, 122 aa, Homo sapiens
  Payload ID: 8701
  Gene Symbol: KLHL10
  Gene Name: kelch-like family member 10
  ENSP ID: ENSP00000391983
MEMESAAASTRFHQPHMERKMSAMACEIFNELRLEGKLCDVVIKVNGFEFSAHKNILCSCSSYFRALFTSGWNNTEKKVYNIPGISPDMMKLIIEYAYTRTVPITPDNVEKLLAAADQFNIM

SEQ ID NO: 42789 - protein, 152 aa, Homo sapiens
  Payload ID: 8701
  Gene Symbol: KLHL10
  Gene Name: kelch-like family member 10
  ENSP ID: ENSP00000416221
MEMESAAASTRFHQPHMERKMSAMACEIFNELRLEGKLCDVVIKERNVSVAASFFLFSRALFTSGWNNTEKKVYNIPGISPDMMKLIIEYAYTRTVPITPDNVEKLLAAADQFNIMGIVRGCCEFLKSELCLDNCIGICKFTDYYYCPELRQ

SEQ ID NO: 42790 - protein, 708 aa, Homo sapiens
  Payload ID: 8702
  Gene Symbol: KLHL11
  Gene Name: kelch-like family member 11
  Uniprot ID: Q9NVR0
  ENSP ID: ENSP00000314608
MAAAAVAAAAAAAAAASLQVLEMESMETAAAGSAGLAAEVRGSGTVDFGPGPGISAMEASGGDPGPEAEDFECSSHCSELSWRQNEQRRQGLFCDITLCFGGAGGREFRAHRSVLAAATEYFTPLLSGQFSESRSGRVEMRKWSSEPGPEPDTVEAVIEYMYTGRIRVSTGSVHEVLELADRFLLIRLKEFCGEFLKKKLHLSNCVAIHSLAHMYTLSQLALKAADMIRRNFHKVIQDEEFYTLPFHLIRDWLSDLEITVDSEEVLFETVLKWVQRNAEERERYFEELFKLLRLSQMKPTYLTRHVKPERLVANNEVCVKLVADAVERHALRAENIQSGTCQHPTSHVSLLPRYGQNMDVIMVIGGVSEGGDYLSECVGYFVDEDRWVNLPHIHNHLDGHAVAVTESYVYVAGSMEPGFAKTVERYNPNLNTWEHVCSLMTRKHSFGLTEVKGKLYSIGGHGNFSPGFKDVTVYNPELDKWHNLESAPKILRDVKALAIEDRFVYIAARTPVDRDTEDGLKAVITCYDTETRQWQDVESLPLIDNYCFFQMSVVNSNFYQTASCCPKSYCLENEEAVRKIASQVSDEILESLPPEVLSIEGAAICYYKDDVFIIGGWKNSDDIDKQYRKEAYRYCAERKRWMLLPPMPQPRCRATACHVRIPYRYLHGTQRYPMPQNLMWQKDRIRQMQEIHRHALNMRRVPSSQIEC

SEQ ID NO: 42791 - protein, 315 aa, Homo sapiens
  Payload ID: 8703
  Gene Symbol: KLHL12
  Gene Name: kelch-like family member 12
  ENSP ID: ENSP00000356227
MDVNKFEASVGFLDVKKFLSTWKLQNPRTHFVLSPHCFMGGIMAPKDIMTNTHAKSILNSMNSLRKSNTLCDVTLRVEQKDFPAHRIVLAACSDYFCAMFTSELSEKGKPYVDIQGLTASTMEILLDFVYTETVHVTVENVQELLPAACLLQLKGVKQACCEFLESQLDPSNCLGIRDFAETHNCVDLMQAAEVFSQKHFPEVVQHEEFILLSQGEVEKLIKCDEIQVDSEEPVFEAVINWVKHAKKEREESLPNLLQYVRMPLLTPRYITDVIDAEPFIRCSLQCRDLVDEAKKFHLRPELRSQMQGPRTRARL

SEQ ID NO: 42792 - protein, 204 aa, Homo sapiens
  Payload ID: 8703
  Gene Symbol: KLHL12
  Gene Name: kelch-like family member 12
  ENSP ID: ENSP00000356228
MQGPRTRARLGANEVLLVVGGFGSQQSPIDVVEKYDPKTQEWSFLPSITRKRRYVASVSLHDRIYVIGGYDGRSRLSSVECLDYTADEDGVWYSVAPMNVRRGLAGATTLGDMIYVSGGFDGSRRHTSMERYDPNIDQWSMLGDMQTAREGAGLVVASGVIYCLGGYDGLNILNSVEKYDPHTGHWTNVTPMATKRSDMMVIPC

SEQ ID NO: 42793 - protein, 568 aa, Homo sapiens
  Payload ID: 8703
  Gene Symbol: KLHL12
  Gene Name: kelch-like family member 12
  Uniprot ID: Q53G59
  ENSP ID: ENSP00000356230
MGGIMAPKDIMTNTHAKSILNSMNSLRKSNTLCDVTLRVEQKDFPAHRIVLAACSDYFCAMFTSELSEKGKPYVDIQGLTASTMEILLDFVYTETVHVTVENVQELLPAACLLQLKGVKQACCEFLESQLDPSNCLGIRDFAETHNCVDLMQAAEVFSQKHFPEVVQHEEFILLSQGEVEKLIKCDEIQVDSEEPVFEAVINWVKHAKKEREESLPNLLQYVRMPLLTPRYITDVIDAEPFIRCSLQCRDLVDEAKKFHLRPELRSQMQGPRTRARLGANEVLLVVGGFGSQQSPIDVVEKYDPKTQEWSFLPSITRKRRYVASVSLHDRIYVIGGYDGRSRLSSVECLDYTADEDGVWYSVAPMNVRRGLAGATTLGDMIYVSGGFDGSRRHTSMERYDPNIDQWSMLGDMQTAREGAGLVVASGVIYCLGGYDGLNILNSVEKYDPHTGHWTNVTPMATKRSGAGVALLNDHIYVVGGFDGTAHLSSVEAYNIRTDSWTTVTSMTTPRCYVGATVLRGRLYAIAGYDGNSLLSSIECYDPIIDSWEVVTSMGTQRCDAGVCVLREK

SEQ ID NO: 42794 - protein, 655 aa, Homo sapiens
  Payload ID: 8704
  Gene Symbol: KLHL13
  Gene Name: kelch-like family member 13
  Uniprot ID: Q9P2N7
  ENSP ID: ENSP00000262820
MPLKWKTSSPAIWKFPVPVLKTSRSTPLSPAYISLVEEEDQHMKLSLGGSEMGLSSHLQSSKAGPTRIFTSNTHSSVVLQGFDQLRLEGLLCDVTLMPGDTDDAFPVHRVMMASASDYFKAMFTGGMKEQDLMCIKLHGVSKVGLRKIIDFIYTAKLSLNMDNLQDTLEAASFLQILPVLDFCKVFLISGVTLDNCVEVGRIANTYNLTEVDKYVNSFVLKNFPALLSTGEFLKLPFERLAFVLSSNSLKHCTELELFKATCRWLRLEEPRMDFAAKLMKNIRFPLMTPQELINYVQTVDFMRTDNTCVNLLLEASNYQMMPYMQPVMQSDRTAIRSDTTHLVTLGGVLRQQLVVSKELRMYDEKAHEWKSLAPMDAPRYQHGIAVIGNFLYVVGGQSNYDTKGKTAVDTVFRFDPRYNKWMQVASLNEKRTFFHLSALKGYLYAVGGRNAAGELPTVECYNPRTNEWTYVAKMSEPHYGHAGTVYGGVMYISGGITHDTFQKELMCFDPDTDKWIQKAPMTTVRGLHCMCTVGERLYVIGGNHFRGTSDYDDVLSCEYYSPILDQWTPIAAMLRGQSDVGVAVFENKIYVVGGYSWNNRCMVEIVQKYDPDKDEWHKVFDLPESLGGIRACTLTVFPPEETTPSPSRESPLSAP

SEQ ID NO: 42795 - protein, 604 aa, Homo sapiens
  Payload ID: 8704
  Gene Symbol: KLHL13
  Gene Name: kelch-like family member 13
  ENSP ID: ENSP00000360943
MGLSSHLQSSKAGPTRIFTSNTHSSVVLQGFDQLRLEGLLCDVTLMPGDTDDAFPVHRVMMASASDYFKAMFTGGMKEQDLMCIKLHGVSKVGLRKIIDFIYTAKLSLNMDNLQDTLEAASFLQILPVLDFCKVFLISGVTLDNCVEVGRIANTYNLTEVDKYVNSFVLKNFPALLSTGEFLKLPFERLAFVLSSNSLKHCTELELFKATCRWLRLEEPRMDFAAKLMKNIRFPLMTPQELINYVQTVDFMRTDNTCVNLLLEASNYQMMPYMQPVMQSDRTAIRSDTTHLVTLGGVLRQQLVVSKELRMYDEKAHEWKSLAPMDAPRYQHGIAVIGNFLYVVGGQSNYDTKGKTAVDTVFRFDPRYNKWMQVASLNEKRTFFHLSALKGYLYAVGGRNAAGELPTVECYNPRTNEWTYVAKMSEPHYGHAGTVYGGVMYISGGITHDTFQKELMCFDPDTDKWIQKAPMTTVRGLHCMCTVGERLYVIGGNHFRGTSDYDDVLSCEYYSPILDQWTPIAAMLRGQSDVGVAVFENKIYVVGGYSWNNRCMVEIVQKYDPDKDEWHKVFDLPESLGGIRACTLTVFPPEETTPSPSRESPLSAP

SEQ ID NO: 42796 - protein, 604 aa, Homo sapiens; identical to SEQ ID NO: 42795
  Payload ID: 8704
  Gene Symbol: KLHL13
  Gene Name: kelch-like family member 13
  ENSP ID: ENSP00000360945

SEQ ID NO: 42797 - protein, 604 aa, Homo sapiens; identical to SEQ ID NO: 42795
  Payload ID: 8704
  Gene Symbol: KLHL13
  Gene Name: kelch-like family member 13
  ENSP ID: ENSP00000360949

SEQ ID NO: 42798 - protein, 37 aa, Homo sapiens
  Payload ID: 8704
  Gene Symbol: KLHL13
  Gene Name: kelch-like family member 13
  ENSP ID: ENSP00000393807
MGLSSHLQSSKAGPTRIFTSNTHSSVVLQGFDQLRLE

SEQ ID NO: 42799 - protein, 604 aa, Homo sapiens; identical to SEQ ID NO: 42795
  Payload ID: 8704
  Gene Symbol: KLHL13
  Gene Name: kelch-like family member 13
  ENSP ID: ENSP00000412640

SEQ ID NO: 42800 - protein, 604 aa, Homo sapiens; identical to SEQ ID NO: 42795
  Payload ID: 8704
  Gene Symbol: KLHL13
  Gene Name: kelch-like family member 13
  ENSP ID: ENSP00000419803

SEQ ID NO: 42801 - protein, 613 aa, Homo sapiens
  Payload ID: 8704
  Gene Symbol: KLHL13
  Gene Name: kelch-like family member 13
  Uniprot ID: Q9P2N7
  ENSP ID: ENSP00000440707
MKLSLGGSEMGLSSHLQSSKAGPTRIFTSNTHSSVVLQGFDQLRLEGLLCDVTLMPGDTDDAFPVHRVMMASASDYFKAMFTGGMKEQDLMCIKLHGVSKVGLRKIIDFIYTAKLSLNMDNLQDTLEAASFLQILPVLDFCKVFLISGVTLDNCVEVGRIANTYNLTEVDKYVNSFVLKNFPALLSTGEFLKLPFERLAFVLSSNSLKHCTELELFKATCRWLRLEEPRMDFAAKLMKNIRFPLMTPQELINYVQTVDFMRTDNTCVNLLLEASNYQMMPYMQPVMQSDRTAIRSDTTHLVTLGGVLRQQLVVSKELRMYDEKAHEWKSLAPMDAPRYQHGIAVIGNFLYVVGGQSNYDTKGKTAVDTVFRFDPRYNKWMQVASLNEKRTFFHLSALKGYLYAVGGRNAAGELPTVECYNPRTNEWTYVAKMSEPHYGHAGTVYGGVMYISGGITHDTFQKELMCFDPDTDKWIQKAPMTTVRGLHCMCTVGERLYVIGGNHFRGTSDYDDVLSCEYYSPILDQWTPIAAMLRGQSDVGVAVFENKIYVVGGYSWNNRCMVEIVQKYDPDKDEWHKVFDLPESLGGIRACTLTVFPPEETTPSPSRESPLSAP

SEQ ID NO: 42802 - protein, 639 aa, Homo sapiens
  Payload ID: 8704
  Gene Symbol: KLHL13
  Gene Name: kelch-like family member 13
  Uniprot ID: Q9P2N7
  ENSP ID: ENSP00000441029
MDHLHRGELVAAILRNRSLVEEEDQHMKLSLGGSEMGLSSHLQSSKAGPTRIFTSNTHSSVVLQGFDQLRLEGLLCDVTLMPGDTDDAFPVHRVMMASASDYFKAMFTGGMKEQDLMCIKLHGVSKVGLRKIIDFIYTAKLSLNMDNLQDTLEAASFLQILPVLDFCKVFLISGVTLDNCVEVGRIANTYNLTEVDKYVNSFVLKNFPALLSTGEFLKLPFERLAFVLSSNSLKHCTELELFKATCRWLRLEEPRMDFAAKLMKNIRFPLMTPQELINYVQTVDFMRTDNTCVNLLLEASNYQMMPYMQPVMQSDRTAIRSDTTHLVTLGGVLRQQLVVSKELRMYDEKAHEWKSLAPMDAPRYQHGIAVIGNFLYVVGGQSNYDTKGKTAVDTVFRFDPRYNKWMQVASLNEKRTFFHLSALKGYLYAVGGRNAAGELPTVECYNPRTNEWTYVAKMSEPHYGHAGTVYGGVMYISGGITHDTFQKELMCFDPDTDKWIQKAPMTTVRGLHCMCTVGERLYVIGGNHFRGTSDYDDVLSCEYYSPILDQWTPIAAMLRGQSDVGVAVFENKIYVVGGYSWNNRCMVEIVQKYDPDKDEWHKVFDLPESLGGIRACTLTVFPPEETTPSPSRESPLSAP

SEQ ID NO: 42803 - protein, 658 aa, Homo sapiens
  Payload ID: 8704
  Gene Symbol: KLHL13
  Gene Name: kelch-like family member 13
  Uniprot ID: Q9P2N7
  ENSP ID: ENSP00000443191
MMRVQTLREKWAYWRRRQLSLKQADFKDIFKKSTSGSLVEEEDQHMKLSLGGSEMGLSSHLQSSKAGPTRIFTSNTHSSVVLQGFDQLRLEGLLCDVTLMPGDTDDAFPVHRVMMASASDYFKAMFTGGMKEQDLMCIKLHGVSKVGLRKIIDFIYTAKLSLNMDNLQDTLEAASFLQILPVLDFCKVFLISGVTLDNCVEVGRIANTYNLTEVDKYVNSFVLKNFPALLSTGEFLKLPFERLAFVLSSNSLKHCTELELFKATCRWLRLEEPRMDFAAKLMKNIRFPLMTPQELINYVQTVDFMRTDNTCVNLLLEASNYQMMPYMQPVMQSDRTAIRSDTTHLVTLGGVLRQQLVVSKELRMYDEKAHEWKSLAPMDAPRYQHGIAVIGNFLYVVGGQSNYDTKGKTAVDTVFRFDPRYNKWMQVASLNEKRTFFHLSALKGYLYAVGGRNAAGELPTVECYNPRTNEWTYVAKMSEPHYGHAGTVYGGVMYISGGITHDTFQKELMCFDPDTDKWIQKAPMTTVRGLHCMCTVGERLYVIGGNHFRGTSDYDDVLSCEYYSPILDQWTPIAAMLRGQSDVGVAVFENKIYVVGGYSWNNRCMVEIVQKYDPDKDEWHKVFDLPESLGGIRACTLTVFPPEETTPSPSRESPLSAP

SEQ ID NO: 42804 - protein, 639 aa, Homo sapiens; identical to SEQ ID NO: 42802
  Payload ID: 8704
  Gene Symbol: KLHL13
  Gene Name: kelch-like family member 13
  Uniprot ID: Q9P2N7
  ENSP ID: ENSP00000444450

SEQ ID NO: 42805 - protein, 388 aa, Homo sapiens
  Payload ID: 8705
  Gene Symbol: KLHL14
  Gene Name: kelch-like family member 14
  Uniprot ID: Q9P2G3
  ENSP ID: ENSP00000350808
MSRSGDRTSTFDPSHSDNLLHGLNLLWRKQLFCDVTLTAQGQQFHCHKAVLASCSQYFRSLFSSHPPLGGGVGGQDGLGAPKDQQQPPQQQPSQQQQPPPQEEPGTPSSSPDDKLLTSPRAINNLVLQGCSSIGLRLVLEYLYTANVTLSLDTVEEVLSVSKILHIPQVTKLCVQFLNDQISVQNYKQVCKIAALHGLEETKKLANKYLVEDVLLLNFEEMRALLDSLPPPVESELALFQMSVLWLEHDRETRMQYAPDLMKRLRFALIPAPELVERVQSVDFMRTDPVCQKLLLDAMNYHLMPFRQHCRQSLASRIRSNKKMLLLVGGLPPGPDRLPSNLVQYYDDEKKTWKILTITGPHPISGKQESASSPEFRRRKTREFSNNTM

SEQ ID NO: 42806 - protein, 628 aa, Homo sapiens
  Payload ID: 8705
  Gene Symbol: KLHL14
  Gene Name: kelch-like family member 14
  Uniprot ID: Q9P2G3
  ENSP ID: ENSP00000352314
MSRSGDRTSTFDPSHSDNLLHGLNLLWRKQLFCDVTLTAQGQQFHCHKAVLASCSQYFRSLFSSHPPLGGGVGGQDGLGAPKDQQQPPQQQPSQQQQPPPQEEPGTPSSSPDDKLLTSPRAINNLVLQGCSSIGLRLVLEYLYTANVTLSLDTVEEVLSVSKILHIPQVTKLCVQFLNDQISVQNYKQVCKIAALHGLEETKKLANKYLVEDVLLLNFEEMRALLDSLPPPVESELALFQMSVLWLEHDRETRMQYAPDLMKRLRFALIPAPELVERVQSVDFMRTDPVCQKLLLDAMNYHLMPFRQHCRQSLASRIRSNKKMLLLVGGLPPGPDRLPSNLVQYYDDEKKTWKILTIMPYNSAHHCVVEVENFLFVLGGEDQWNPNGKHSTNFVSRYDPRFNSWIQLPPMQERRASFYACRLDKHLYVIGGRNETGYLSSVECYNLETNEWRYVSSLPQPLAAHAGAVHNGKIYISGGVHNGEYVPWLYCYDPVMDVWARKQDMNTKRAIHTLAVMNDRLYAIGGNHLKGFSHLDVMLVECYDPKGDQWNILQTPILEGRSGPGCAVLDDSIYLVGGYSWSMGAYKSSTICYCPEKGTWTELEGDVAEPLAGPACVTVILPSCVPYNK

SEQ ID NO: 42807 - protein, 227 aa, Homo sapiens
  Payload ID: 8705
  Gene Symbol: KLHL14
  Gene Name: kelch-like family member 14
  ENSP ID: ENSP00000463803
MQAEGPFLLSPGRLEEGLKPGAPSQLAMSRSGDRTSTFDPSHSDNLLHGLNLLWRKQLFCDVTLTAQGQQFHCHKAVLASCSQYFRSLFSSHPPLGGGVGGQDGLGAPKDQQQPPQQQPSQQQQPPPQEEPGTPSSSPDDKLLTSPRAINNLVLQGCSSIGLRLVLEYLYTANVTLSLDTVEEVLSVSKILHIPQVTKLCVQFLNDQISVQNYKQVCKIAALHGLEE

SEQ ID NO: 42808 - protein, 604 aa, Homo sapiens
  Payload ID: 8706
  Gene Symbol: KLHL15
  Gene Name: kelch-like family member 15
  Uniprot ID: Q96M94
  ENSP ID: ENSP00000332791
MAGDVEGFCSSIHDTSVSAGFRALYEEGLLLDVTLVIEDHQFQAHKALLATQSDYFRIMFTADMRERDQDKIHLKGLTATGFSHVLQFMYYGTIELSMNTVHEILQAAMYVQLIEVVKFCCSFLLAKICLENCAEIMRLLDDFGVNIEGVREKLDTFLLDNFVPLMSRPDFLSYLSFEKLMSYLDNDHLSRFPEIELYEAVQSWLRHDRRRWRHTDTIIQNIRFCLMTPTSVFEKVKTSEFYRYSRQLRYEVDQALNYFQNVHQQPLLDMKSSRIRSAKPQTTVFRGMIGHSMVNSKILLLKKPRVWWELEGPQVPLRPDCLAIVNNFVFLLGGEELGPDGEFHASSKVFRYDPRQNSWLQMADMSVPRSEFAVGVIGKFIYAVAGRTRDETFYSTERYDITNDKWEFVDPYPVNKYGHEGTVLNNKLFITGGITSSSTSKQVCVFDPSKEGTIEQRTRRTQVVTNCWENKSKMNYARCFHKMISYNGKLYVFGGVCVILRASFESQGCPSTEVYNPETDQWTILASMPIGRSGHGVTVLDKQIMVLGGLCYNGHYSDSILTFDPDENKWKEDEYPRMPCKLDGLQVCNLHFPDYVLDEVRRCN

SEQ ID NO: 42809 - protein, 642 aa, Homo sapiens
  Payload ID: 8707
  Gene Symbol: KLHL17
  Gene Name: kelch-like family member 17
  Uniprot ID: Q6TDP4
  ENSP ID: ENSP00000343930
MQPRSERPAGRTQSPEHGSPGPGPEAPPPPPPQPPAPEAERTRPRQARPAAPMEGAVQLLSREGHSVAHNSKRHYHDAFVAMSRMRQRGLLCDIVLHVAAKEIRAHKVVLASCSPYFHAMFTNEMSESRQTHVTLHDIDPQALDQLVQFAYTAEIVVGEGNVQTLLPAASLLQLNGVRDACCKFLLSQLDPSNCLGIRGFADAHSCSDLLKAAHRYVLQHFVDVAKTEEFMLLPLKQVLELVSSDSLNVPSEEEVYRAVLSWVKHDVDARRQHVPRLMKCVRLPLLSRDFLLGHVDAESLVRHHPDCKDLLIEALKFHLLPEQRGVLGTSRTRPRRCEGAGPVLFAVGGGSLFAIHGDCEAYDTRTDRWHVVASMSTRRARVGVAAVGNRLYAVGGYDGTSDLATVESYDPVTNTWQPEVSMGTRRSCLGVAALHGLLYSAGGYDGASCLNSAERYDPLTGTWTSVAAMSTRRRYVRVATLDGNLYAVGGYDSSSHLATVEKYEPQVNVWSPVASMLSRRSSAGVAVLEGALYVAGGNDGTSCLNSVERYSPKAGAWESVAPMNIRRSTHDLVAMDGWLYAVGGNDGSSSLNSIEKYNPRTNKWVAASCMFTRRSSVGVAVLELLNFPPPSSPTLSVSSTSL

SEQ ID NO: 42810 - protein, 154 aa, Homo sapiens
  Payload ID: 8707
  Gene Symbol: KLHL17
  Gene Name: kelch-like family member 17
  ENSP ID: ENSP00000463694
  MOD_RES (1)..(1): Any amino acid
XLLSRDFLLGHVDAESLVRHHPDCKDLLIEALKFHLLPEQRGVLGTSRTRPRRCEGAGPVLFAVGASPGAWGVAQQWDPLTSPVSTCPPQAAGACLPSTETVRPTTRAPTAGTWWPPCPRAGPGWEWLRWGTGSMLWAAMMGPQTWLPWSPTTP

SEQ ID NO: 42811 - protein, 225 aa, Homo sapiens
  Payload ID: 8707
  Gene Symbol: KLHL17
  Gene Name: kelch-like family member 17
  ENSP ID: ENSP00000479477
MKCVRLPLLSRDFLLGHVDAESLVRHHPDCKDLLIEALKFHLLPEQRGVLGTSRTRPRRCEGAGPVLFAVGGGSLFAIHGDCEAYDTRTDRWHVVASMSTRRARVGVAAVGNRLYAVGGYDGTSDLATVESYDPVTNTWQPEVSMGTRRSCLGVAALHGLLYSAGGYDGASCLNSAERYDPLTGTWTSVAAMSTRRRYVRVATLDGNLYAVGGYDSSSHLATVEK

SEQ ID NO: 42812 - protein, 574 aa, Homo sapiens
  Payload ID: 8708
  Gene Symbol: KLHL18
  Gene Name: kelch-like family member 18
  Uniprot ID: O94889
  ENSP ID: ENSP00000232766
MVEDGAEELEDLVHFSVSELPSRGYGVMEEIRRQGKLCDVTLKIGDHKFSAHRIVLAASIPYFHAMFTNDMMECKQDEIVMQGMDPSALEALINFAYNGNLAIDQQNVQSLLMGASFLQLQSIKDACCTFLRERLHPKNCLGVRQFAETMMCAVLYDAANSFIHQHFVEVSMSEEFLALPLEDVLELVSRDELNVKSEEQVFEAALAWVRYDREQRGPYLPELLSNIRLPLCRPQFLSDRVQQDDLVRCCHKCRDLVDEAKDYHLMPERRPHLPAFRTRPRCCTSIAGLIYAVGGLNSAGDSLNVVEVFDPIANCWERCRPMTTARSRVGVAVVNGLLYAIGGYDGQLRLSTVEAYNPETDTWTRVGSMNSKRSAMGTVVLDGQIYVCGGYDGNSSLSSVETYSPETDKWTVVTSMSSNRSAAGVTVFEGRIYVSGGHDGLQIFSSVEHYNHHTATWHPAAGMLNKRCRHGAASLGSKMFVCGGYDGSGFLSIAEMYSSVADQWCLIVPMHTRRSRVSLVASCGRLYAVGGYDGQSNLSSVEMYDPETDCWTFMAPMACHEGGVGVGCIPLLTI

SEQ ID NO: 42813 - protein, 59 aa, Homo sapiens
  Payload ID: 8708
  Gene Symbol: KLHL18
  Gene Name: kelch-like family member 18
  ENSP ID: ENSP00000392507
MVEDGAEELEDLVHFSVSELPSRGYGVMEEIRRQGKLCDVTLKCPGGSDQLCLQRQPCH

SEQ ID NO: 42814 - protein, 63 aa, Homo sapiens
  Payload ID: 8708
  Gene Symbol: KLHL18
  Gene Name: kelch-like family member 18
  ENSP ID: ENSP00000407114
MVEDGAEELEDLVHFSVSELPSRGYGVMEEIRRQGKLCDVTLKPTEFSDEMRRSCFSTFELPL

SEQ ID NO: 42815 - protein, 147 aa, Homo sapiens
  Payload ID: 8708
  Gene Symbol: KLHL18
  Gene Name: kelch-like family member 18
  ENSP ID: ENSP00000411839
MVEDGAEELEDLVHFSVSELPSRGYGVMEEIRRQGKLCDVTLKIGDHKFSAHRIVLAASIPYFHAMFTNDMMECKQDEIVMQGMDPSALEALINFAYNGNLAIDQQNVQSLLMGASFLQLQSIKDACCTFLRERLHPKNCLGVRQFA

SEQ ID NO: 42816 - protein, 593 aa, Homo sapiens
  Payload ID: 8709
  Gene Symbol: KLHL2
  Gene Name: kelch-like family member 2
  Uniprot ID: O95198
  ENSP ID: ENSP00000226725
METPPLPPACTKQGHQKPLDSKDDNTEKHCPVTVNPWHMKKAFKVMNELRSQNLLCDVTIVAEDMEISAHRVVLAACSPYFHAMFTGEMSESRAKRVRIKEVDGWTLRMLIDYVYTAEIQVTEENVQVLLPAAGLLQLQDVKKTCCEFLESQLHPVNCLGIRAFADMHACTDLLNKANTYAEQHFADVVLSEEFLNLGIEQVCSLISSDKLTISSEEKVFEAVIAWVNHDKDVRQEFMARLMEHVRLPLLPREYLVQRVEEEALVKNSSACKDYLIEAMKYHLLPTEQRILMKSVRTRLRTPMNLPKLMVVVGGQAPKAIRSVECYDFKEERWHQVAELPSRRCRAGMVYMAGLVFAVGGFNGSLRVRTVDSYDPVKDQWTSVANMRDRRSTLGAAVLNGLLYAVGGFDGSTGLSSVEAYNIKSNEWFHVAPMNTRRSSVGVGVVGGLLYAVGGYDGASRQCLSTVECYNATTNEWTYIAEMSTRRSGAGVGVLNNLLYAVGGHDGPLVRKSVEVYDPTTNAWRQVADMNMCRRNAGVCAVNGLLYVVGGDDGSCNLASVEYYNPTTDKWTVVSSCMSTGRSYAGVTVIDKPL

SEQ ID NO: 42817 - protein, 496 aa, Homo sapiens
  Payload ID: 8709
  Gene Symbol: KLHL2
  Gene Name: kelch-like family member 2
  ENSP ID: ENSP00000408974
MSQLWQKTWKFLLIEWCWPPVVLIFMPCLQVLLPAAGLLQLQDVKKTCCEFLESQLHPVNCLGIRAFADMHACTDLLNKANTYAEQHFADVVLSEEFLNLGIEQVCSLISSDKLTISSEEKVFEAVIAWVNHDKDVRQEFMARLMEHVRLPLLPREYLVQRVEEEALVKNSSACKDYLIEAMKYHLLPTEQRILMKSVRTRLRTPMNLPKLMVVVGGQAPKAIRSVECYDFKEERWHQVAELPSRRCRAGMVYMAGLVFAVGGFNGSLRVRTVDSYDPVKDQWTSVANMRDRRSTLGAAVLNGLLYAVGGFDGSTGLSSVEAYNIKSNEWFHVAPMNTRRSSVGVGVVGGLLYAVGGYDGASRQCLSTVECYNATTNEWTYIAEMSTRRSGAGVGVLNNLLYAVGGHDGPLVRKSVEVYDPTTNAWRQVADMNMCRRNAGVCAVNGLLYVVGGDDGSCNLASVEYYNPTTDKWTVVSSCMSTGRSYAGVTVIDKPL

SEQ ID NO: 42818 - protein, 117 aa, Homo sapiens
  Payload ID: 8709
  Gene Symbol: KLHL2
  Gene Name: kelch-like family member 2
  ENSP ID: ENSP00000421324
MKKAFKVMNELRSQNLLCDVTIVAEDMEISAHRVVLAACSPYFHAMFTGEMSESRAKRVRIKEVDGWTLRMLIDYVYTAEIQVTEENVQVLLPAAGLLQLQDVKKTCCEFLESQLHP

SEQ ID NO: 42819 - protein, 55 aa, Homo sapiens
  Payload ID: 8709
  Gene Symbol: KLHL2
  Gene Name: kelch-like family member 2
  ENSP ID: ENSP00000421844
MVWLEARPQILFVCTKQGHQKPLDSKDDNTEKHCPVTVNPWHMKKAFKVMNELRR

SEQ ID NO: 42820 - protein, 144 aa, Homo sapiens
  Payload ID: 8709
  Gene Symbol: KLHL2
  Gene Name: kelch-like family member 2
  ENSP ID: ENSP00000422113
METPPLPPACTKQGHQKPLDSKDDNTEKHCPVTVNPWHMKKAFKVMNELRRQSHSATQAGMQWRDLSSLQPPTPGFKRLSHLSLPSSWDYSQNLLCDVTIVAEDMEISAHRVVLAACSPYFHAMFTGEMSESRAKRVRIKEVDG

SEQ ID NO: 42821 - protein, 427 aa, Homo sapiens
  Payload ID: 8709
  Gene Symbol: KLHL2
  Gene Name: kelch-like family member 2
  ENSP ID: ENSP00000424108
MHACTDLLNKANTYAEQHFADVVLSEEFLNLGIEQVCSLISSDKLTISSEEKVFEAVIAWVNHDKDVRQEFMARLMEHVRLPLLPREYLVQRVEEEALVKNSSACKDYLIEAMKYHLLPTEQRILMKSVRTRLRTPMNLPKLMVVVGGQAPKAIRSVECYDFKEERWHQVAELPSRRCRAGMVYMAGLVFAVGGFNGSLRVRTVDSYDPVKDQWTSVANMRDRRSTLGAAVLNGLLYAVGGFDGSTGLSSVEAYNIKSNEWFHVAPMNTRRSSVGVGVVGGLLYAVGGYDGASRQCLSTVECYNATTNEWTYIAEMSTRRSGAGVGVLNNLLYAVGGHDGPLVRKSVEVYDPTTNAWRQVADMNMCRRNAGVCAVNGLLYVVGGDDGSCNLASVEYYNPTTDKWTVVSSCMSTGRSYAGVTVIDKPL

SEQ ID NO: 42822 - protein, 597 aa, Homo sapiens
  Payload ID: 8709
  Gene Symbol: KLHL2
  Gene Name: kelch-like family member 2
  Uniprot ID: O95198
  ENSP ID: ENSP00000424198
MVWLEARPQILFVCTKQGHQKPLDSKDDNTEKHCPVTVNPWHMKKAFKVMNELRSQNLLCDVTIVAEDMEISAHRVVLAACSPYFHAMFTGEMSESRAKRVRIKEVDGWTLRMLIDYVYTAEIQVTEENVQVLLPAAGLLQLQDVKKTCCEFLESQLHPVNCLGIRAFADMHACTDLLNKANTYAEQHFADVVLSEEFLNLGIEQVCSLISSDKLTISSEEKVFEAVIAWVNHDKDVRQEFMARLMEHVRLPLLPREYLVQRVEEEALVKNSSACKDYLIEAMKYHLLPTEQRILMKSVRTRLRTPMNLPKLMVVVGGQAPKAIRSVECYDFKEERWHQVAELPSRRCRAGMVYMAGLVFAVGGFNGSLRVRTVDSYDPVKDQWTSVANMRDRRSTLGAAVLNGLLYAVGGFDGSTGLSSVEAYNIKSNEWFHVAPMNTRRSSVGVGVVGGLLYAVGGYDGASRQCLSTVECYNATTNEWTYIAEMSTRRSGAGVGVLNNLLYAVGGHDGPLVRKSVEVYDPTTNAWRQVADMNMCRRNAGVCAVNGLLYVVGGDDGSCNLASVEYYNPTTDKWTVVSSCMSTGRSYAGVTVIDKPL

SEQ ID NO: 42823 - protein, 505 aa, Homo sapiens
  Payload ID: 8709
  Gene Symbol: KLHL2
  Gene Name: kelch-like family member 2
  Uniprot ID: O95198
  ENSP ID: ENSP00000437526
MSESRAKRVRIKEVDGWTLRMLIDYVYTAEIQVTEENVQVLLPAAGLLQLQDVKKTCCEFLESQLHPVNCLGIRAFADMHACTDLLNKANTYAEQHFADVVLSEEFLNLGIEQVCSLISSDKLTISSEEKVFEAVIAWVNHDKDVRQEFMARLMEHVRLPLLPREYLVQRVEEEALVKNSSACKDYLIEAMKYHLLPTEQRILMKSVRTRLRTPMNLPKLMVVVGGQAPKAIRSVECYDFKEERWHQVAELPSRRCRAGMVYMAGLVFAVGGFNGSLRVRTVDSYDPVKDQWTSVANMRDRRSTLGAAVLNGLLYAVGGFDGSTGLSSVEAYNIKSNEWFHVAPMNTRRSSVGVGVVGGLLYAVGGYDGASRQCLSTVECYNATTNEWTYIAEMSTRRSGAGVGVLNNLLYAVGGHDGPLVRKSVEVYDPTTNAWRQVADMNMCRRNAGVCAVNGLLYVVGGDDGSCNLASVEYYNPTTDKWTVVSSCMSTGRSYAGVTVIDKPL

SEQ ID NO: 42824 - protein, 609 aa, Homo sapiens
  Payload ID: 8710
  Gene Symbol: KLHL20
  Gene Name: kelch-like family member 20
  Uniprot ID: Q9Y2M5
  ENSP ID: ENSP00000209884
MEGKPMRRCTNIRPGETGMDVTSRCTLGDPNKLPEGVPQPARMPYISDKHPRQTLEVINLLRKHRELCDVVLVVGAKKIYAHRVILSACSPYFRAMFTGELAESRQTEVVIRDIDERAMELLIDFAYTSQITVEEGNVQTLLPAACLLQLAEIQEACCEFLKRQLDPSNCLGIRAFADTHSCRELLRIADKFTQHNFQEVMESEEFMLLPANQLIDIISSDELNVRSEEQVFNAVMAWVKYSIQERRPQLPQVLQHVRLPLLSPKFLVGTVGSDPLIKSDEECRDLVDEAKNYLLLPQERPLMQGPRTRPRKPIRCGEVLFAVGGWCSGDAISSVERYDPQTNEWRMVASMSKRRCGVGVSVLDDLLYAVGGHDGSSYLNSVERYDPKTNQWSSDVAPTSTCRTSVGVAVLGGFLYAVGGQDGVSCLNIVERYDPKENKWTRVASMSTRRLGVAVAVLGGFLYAVGGSDGTSPLNTVERYNPQENRWHTIAPMGTRRKHLGCAVYQDMIYAVGGRDDTTELSSAERYNPRTNQWSPVVAMTSRRSGVGLAVVNGQLMAVGGFDGTTYLKTIEVFDPDANTWRLYGGMNYRRLGGGVGVIKMTHCESHIW

SEQ ID NO: 42825 - protein, 597 aa, Homo sapiens
  Payload ID: 8711
  Gene Symbol: KLHL21
  Gene Name: kelch-like family member 21
  Uniprot ID: Q9UJP4
  ENSP ID: ENSP00000366886
MERPAPLAVLPFSDPAHALSLLRGLSQLRAERKFLDVTLEAAGGRDFPAHRAVLAAASPYFRAMFAGQLRESRAERVRLHGVPPDMLQLLLDFSYTGRVAVSGDNAEPLLRAADLLQFPAVKEACGAFLQQQLDLANCLDMQDFAEAFSCSGLASAAQRFILRHVGELGAEQLERLPLARLLRYLRDDGLCVPKEEAAYQLALRWVRADPPRRAAHWPQLLEAVRLPFVRRFYLLAHVEAEPLVARCPPCLRLLREARDFQAARYDRHDRGPCPRMRPRPSTGLAEILVLVGGCDQDCDELVTVDCYNPQTGQWRYLAEFPDHLGGGYSIVALGNDIYVTGGSDGSRLYDCVWRYNSSVNEWAEVAPMLKAREYHSSSVLDGLLYVVAADSTERYDHTTDSWEALQPMTYPMDNCSTTACRGRLYAIGSLAGKETMVMQCYDPDTDLWSLVDCGQLPPWSFAPKTATLNGLMYFVRDDSAEVDVYNPTRNEWDKIPSMNQVHVGGSLAVLGGKLYVSGGYDNTFELSDVVEAYDPETRAWSVVGRLPEPTFWHGSVSIFRQFMPQTFSGGRGFELDSGSDDMDPGRPRPPRDPDELH

SEQ ID NO: 42826 - protein, 539 aa, Homo sapiens
  Payload ID: 8711
  Gene Symbol: KLHL21
  Gene Name: kelch-like family member 21
  Uniprot ID: Q9UJP4
  ENSP ID: ENSP00000366891
MERPAPLAVLPFSDPAHALSLLRGLSQLRAERKFLDVTLEAAGGRDFPAHRAVLAAASPYFRAMFAGQLRESRAERVRLHGVPPDMLQLLLDFSYTGRVAVSGDNAEPLLRAADLLQFPAVKEACGAFLQQQLDLANCLDMQDFAEAFSCSGLASAAQRFILRHVGELGAEQLERLPLARLLRYLRDDGLCVPKEEAAYQLALRWVRADPPRRAAHWPQLLEAVRLPFVRRFYLLAHVEAEPLVARCPPCLRLLREARDFQAARYDRHDRGPCPRMRPRPSTGLAEILVLVGGCDQDCDELVTVDCYNPQTGQWRYLAEFPDHLGGGYSIVALGNDIYVTGGSDGSRLYDCVWRYNSSVNEWAEVAPMLKAREYHSSSVLDGLLYVVAADSTERYDHTTDSWEALQPMTYPMDNCSTTACRGRLYAIGSLAGKETMVMQCYDPDTDLWSLVDCGQLPPWSFAPKTATLNGLMYFVRDDSAEVDVYNPTRNEWDKIPSMNQVNFQAGQHWKHRLVLILQPKCHRDECLGSTAMMGGSHLN

SEQ ID NO: 42827 - protein, 230 aa, Homo sapiens
  Payload ID: 8711
  Gene Symbol: KLHL21
  Gene Name: kelch-like family member 21
  ENSP ID: ENSP00000466089
MLKAREYHSSSVLDGLLYVVAADSTERYDHTTDSWEALQPMTYPMDNCSTTACRGRLYAIGSLAGKETMVMQCYDPDTDLWSLVDCGQLPPWSFAPKTATLNGLMYFVRDDSAEVDVYNPTRNEWDKIPSMNQVHVGGSLAVLGGKLYVSGGYDNTFELSDVVEAYDPETRAWSVVGRLPEPTFWHGSVSIFRQFMPQTFSGGRGFELDSGSDDMDPGRPRPPRDPDELH

SEQ ID NO: 42828 - protein, 133 aa, Homo sapiens
  Payload ID: 8711
  Gene Symbol: KLHL21
  Gene Name: kelch-like family member 21
  ENSP ID: ENSP00000466479
MLKAREYHSSSVLDGLLYVVAADSTERYDHTTDSWEALQPMTYPMDNCSTTACRGRLYAIGSLAGKETMVMQCYDPDTDLWSLVDCGQLPPWSFAPKTATLNGLMYFVRDDSAEVDVYNPTRNEWDKIPSMNQ

SEQ ID NO: 42829 - protein, 225 aa, Homo sapiens
  Payload ID: 8711
  Gene Symbol: KLHL21
  Gene Name: kelch-like family member 21
  ENSP ID: ENSP00000468710
MLKAREYHSSSVLDGLLYVVAADSTERYDHTTDSWEALQPMTYPMDNCSTTACRGRLYAIGSLAGKETMVMQCYDPDTDLWSLVDCGQLPPWSFAPKTATLNGLMYFVRDDSAEVDVYNPTRNEWDKIPSMNQVHVGGSLAVLGGKLYVSGGYDNTFELSDVVEAYDPETRAWSVVGRLPEPTFWHGSVSIFRQFMPQTFSGGRGFELDSGSDDMDPGRPRPPRD

SEQ ID NO: 42830 - protein, 35 aa, Homo sapiens
  Payload ID: 8711
  Gene Symbol: KLHL21
  Gene Name: kelch-like family member 21
  ENSP ID: ENSP00000480631
MPQTFSGGRGFELDSGSDDMDPGRPRPPRDPDELH

SEQ ID NO: 42831 - protein, 634 aa, Homo sapiens
  Payload ID: 8712
  Gene Symbol: KLHL22
  Gene Name: kelch-like family member 22
  Uniprot ID: Q53GT1
  ENSP ID: ENSP00000331682
MAEEQEFTQLCKLPAQPSHPHCVNNTYRSAQHSQALLRGLLALRDSGILFDVVLVVEGRHIEAHRILLAASCDYFRGMFAGGLKEMEQEEVLIHGVSYNAMCQILHFIYTSELELSLSNVQETLVAACQLQIPEIIHFCCDFLMSWVDEENILDVYRLAELFDLSRLTEQLDTYILKNFVAFSRTDKYRQLPLEKVYSLLSSNRLEVSCETEVYEGALLYHYSLEQVQADQISLHEPPKLLETVRFPLMEAEVLQRLHDKLDPSPLRDTVASALMYHRNESLQPSLQSPQTELRSDFQCVVGFGGIHSTPSTVLSDQAKYLNPLLGEWKHFTASLAPRMSNQGIAVLNNFVYLIGGDNNVQGFRAESRCWRYDPRHNRWFQIQSLQQEHADLSVCVVGRYIYAVAGRDYHNDLNAVERYDPATNSWAYVAPLKREVYAHAGATLEGKMYITCGRRGEDYLKETHCYDPGSNTWHTLADGPVRRAWHGMATLLNKLYVIGGSNNDAGYRRDVHQVACYSCTSGQWSSVCPLPAGHGEPGIAVLDNRIYVLGGRSHNRGSRTGYVHIYDVEKDCWEEGPQLDNSISGLAACVLTLPRSLLLEPPRGTPDRSQADPDFASEVMSVSDWEEFDNSSED

SEQ ID NO: 42832 - protein, 251 aa, Homo sapiens
  Payload ID: 8712
  Gene Symbol: KLHL22
  Gene Name: kelch-like family member 22
  ENSP ID: ENSP00000397882
MGLGSSCHLSLPKRAEALLCSRKATVVRDLVAVRMAEEQEFTQLCKLPAQPSHPHCVNNTYRSAQHSQALLRGLLALRDSGILFDVVLVVEGRHIEAHRILLAASCDYFRGMFAGGLKEMEQEEVLIHGVSYNAMCQILHFIYTSELELSLSNVQETLVAACQLQIPEIIHFCCDFLMSWVDEENILDVYRLAELFDLSRLTEQLDTYILKNFVAFSRTDKYRQLPLEKVYSLLSSNRLEVSCETEVYEGA

SEQ ID NO: 42833 - protein, 235 aa, Homo sapiens
  Payload ID: 8712
  Gene Symbol: KLHL22
  Gene Name: kelch-like family member 22
  ENSP ID: ENSP00000398616
MAEEQEFTQLCKLPAQPSHPHCVNNTYRSAQHSQALLRGLLALRDSGILFDVVLVVEGRHIEAHRILLAASCDYFRGMFAGGLKEMEQEEVLIHGVSYNAMCQILHFIYTSELELSLSNVQETLVAACQLQIPEIIHFCCDFLMSWVDEENILDVYRLAELFDLSRLTEQLDTYILKNFVAFSRTDKYRQLPLEKVYSLLSSNRLEVSCETEVYEGALLYHYSLEQVQADQISLH

SEQ ID NO: 42834 - protein, 225 aa, Homo sapiens
  Payload ID: 8712
  Gene Symbol: KLHL22
  Gene Name: kelch-like family member 22
  ENSP ID: ENSP00000400095
MFAGGLKEMEQEEVLIHGVSYNAMCQILHFIYTSELELSLSNVQETLVAACQLQIPEIIHFCCDFLMSWVDEENILDVYRLAELFDLSRLTEQLDTYILKNFVAFSRTDKYRQLPLEKVYSLLSSNRLEVSCETEVYEGALLYHYSLEQVQADQISLHEPPKLLETVRFPLMEAEVLQRLHDKLDPSPLRDTVASALMYHRNESLQPSLQSPQTELRSDFQCVVG

SEQ ID NO: 42835 - protein, 107 aa, Homo sapiens
  Payload ID: 8712
  Gene Symbol: KLHL22
  Gene Name: kelch-like family member 22
  ENSP ID: ENSP00000402746
MPPPWHPPPRLLAVCLLTTTQATVVRDLVAVRMAEEQEFTQLCKLPAQPSHPHCVNNTYRSAQHSQALLRGLLALRDSGILFDVVLVVEGRHIEAHRILLAASCDYF

SEQ ID NO: 42836 - protein, 295 aa, Homo sapiens
  Payload ID: 8712
  Gene Symbol: KLHL22
  Gene Name: kelch-like family member 22
  ENSP ID: ENSP00000403999
MPPPWHPPPRLLAVCLLTTTQATVVRDLVAVRMAEEQEFTQLCKLPAQPSHPHCVNNTYRSAQHSQALLRGLLALRDSGILFDVVLVVEGRHIEAHRILLAASCDYFRGMFAGGLKEMEQEEVLIHGVSYNAMCQILHFIYTSELELSLSNVQETLVAACQLQIPEIIHFCCDFLMSWVDEENILDVYRLAELFDLSRLTEQLDTYILKNFVAFSRTDKYRQLPLEKVYSLLSSNRLEVSCETEVYEGALLYHYSLEQVQADQISLHEPPKLLETVRFPLMEAEVLQRLHDKLDP

SEQ ID NO: 42837 - protein, 158 aa, Homo sapiens
  Payload ID: 8712
  Gene Symbol: KLHL22
  Gene Name: kelch-like family member 22
  ENSP ID: ENSP00000409092
MAEEQEFTQLCKLPAQPSHPHCVNNTYRSAQHSQALLRGLLALRDSGILFDVVLVVEGRHIEAHRILLAASCDYFRGMFAGGLKEMEQEEVLIHGVSYNAMCQILHFIYTSELELSLSNVQETLVAACQLQMLFTSPGLNGCHSLCRSQKLSISAVIS

SEQ ID NO: 42838 - protein, 558 aa, Homo sapiens
  Payload ID: 8713
  Gene Symbol: KLHL23
  Gene Name: kelch-like family member 23
  Uniprot ID: Q8NBE8
  ENSP ID: ENSP00000272797
MALKGQEDYIYLFKDSTHPVDFLDAFRTFYLDGLFTDITLQCPSGIIFHCHRAVLAACSNYFKAMFTADMKEKFKNKIKLSGIHHDILEGLVNYAYTSQIEITKRNVQSLLEAADLLQFLSVKKACERFLVRHLDIDNCIGMHSFAEFHVCPELEKESRRILCSKFKEVWQQEEFLEISLEKFLFILSRKNLSVWKEEAIIEPVIKWTAHDVENRIECLYNLLSYINIDIDPVYLKTALGLQRSCLLTENKIRSLIYNALNPMHKEISQRSTATMYIIGGYYWHPLSEVHIWDPLTNVWIQGAEIPDYTRESYGVTCLGPNIYVTGGYRTDNIEALDTVWIYNSESDEWTEGLPMLNARYYHCAVTLGGCVYALGGYRKGAPAEEAEFYDPLKEKWIPIANMIKGVGNATACVLHDVIYVIGGHCGYRGSCTYDKVQSYNSDINEWSLITSSPHPEYGLCSVPFENKLYLVGGQTTITECYDPEQNEWREIAPMMERRMECGAVIMNGCIYVTGGYSYSKGTYLQSIEKYDPDLNKWEIVGNLPSAMRSHGCVCVYNV

SEQ ID NO: 42839 - protein, 558 aa, Homo sapiens; identical to SEQ ID NO: 42838
  Payload ID: 8713
  Gene Symbol: KLHL23
  Gene Name: kelch-like family member 23
  Uniprot ID: Q8NBE8
  ENSP ID: ENSP00000376419

SEQ ID NO: 42840 - protein, 288 aa, Homo sapiens
  Payload ID: 8713
  Gene Symbol: KLHL23
  Gene Name: kelch-like family member 23
  ENSP ID: ENSP00000394732
LEKFLFILSRKNLSVWKEEAIIEPVIKWTAHDVENRIECLYNLLSYINIDIDPVYLKTALGLQRSCLLTENKIRSLIYNALNPMHKEISQRSTATMYIIGGYYWHPLSEVHIWDPLTNVWIQGAEIPDYTRESYGVTCLGPNIYVTGGYRTDNIEALDTVWIYNSESDEWTEGLPMLNARYYHCAVTLGGCVYALGGYRKGAPAEEAEFYDPLKEKWIPIANMIKGVGNATACVLHDVIYVIGGHCGYRGSCTYDKVQSYNSDINEWSLITSSPHPGKKTWYVGAFSI

SEQ ID NO: 42841 - protein, 25 aa, Homo sapiens
  Payload ID: 8713
  Gene Symbol: KLHL23
  Gene Name: kelch-like family member 23
  ENSP ID: ENSP00000400833
  MOD_RES (1)..(1): Any amino acid
XDINEWSLITSSPHPGLPTKKTTRR

SEQ ID NO: 42842 - protein, 49 aa, Homo sapiens
  Payload ID: 8713
  Gene Symbol: KLHL23
  Gene Name: kelch-like family member 23
  ENSP ID: ENSP00000474581
MMERRMECGAVIMNGCIYVTGGYSYSKGTYLQSIEKYDPDLNKWEIVGN

SEQ ID NO: 42843 - protein, 65 aa, Homo sapiens
  Payload ID: 8713
  Gene Symbol: KLHL23
  Gene Name: kelch-like family member 23
  ENSP ID: ENSP00000475081
MMERRMECGAVIMNGCIYVTGGYSYSKGTYLQSIEKYDPDLNKWEIVGNLPSAMRSHGCVCVYNV

SEQ ID NO: 42844 - protein, 600 aa, Homo sapiens
  Payload ID: 8714
  Gene Symbol: KLHL24
  Gene Name: kelch-like family member 24
  Uniprot ID: Q6TFL4
  ENSP ID: ENSP00000242810
MVLILGRRLNREDLGVRDSPATKRKVFEMDPKSLTGHEFFDFSSGSSHAENILQIFNEFRDSRLFTDVIICVEGKEFPCHRAVLSACSSYFRAMFCNDHRESREMLVEINGILAEAMECFLQYVYTGKVKITTENVQYLFETSSLFQISVLRDACAKFLEEQLDPCNCLGIQRFADTHSLKTLFTKCKNFALQTFEDVSQHEEFLELDKDELIDYICSDELVIGKEEMVFEAVMRWVYRAVDLRRPLLHELLTHVRLPLLHPNYFVQTVEVDQLIQNSPECYQLLHEARRYHILGNEMMSPRTRPRRSTGYSEVIVVVGGCERVGGFNLPYTECYDPVTGEWKSLAKLPEFTKSEYAVCALRNDILVSGGRINSRDVWIYNSQLNIWIRVASLNKGRWRHKMAVLLGKVYVVGGYDGQNRLSSVECYDSFSNRWTEVAPLKEAVSSPAVTSCVGKLFVIGGGPDDNTCSDKVQSYDPETNSWLLRAAIPIAKRCITAVSLNNLIYVAGGLTKAIYCYDPVEDYWMHVQNTFSRQENCGMSVCNGKIYILGGRRENGEATDTILCYDPATSIITGVAAMPRPVSYHGCVTIHRYNEKCFKL

SEQ ID NO: 42845 - protein, 600 aa, Homo sapiens; identical to SEQ ID NO: 42844
  Payload ID: 8714
  Gene Symbol: KLHL24
  Gene Name: kelch-like family member 24
  Uniprot ID: Q6TFL4
  ENSP ID: ENSP00000395012

SEQ ID NO: 42846 - protein, 60 aa, Homo sapiens
  Payload ID: 8714
  Gene Symbol: KLHL24
  Gene Name: kelch-like family member 24
  ENSP ID: ENSP00000408516
MVLILGRRLNREDLGVRDSPATKRKVFEMDPKSLTGHEFFDFSSGSSHAENILQIFNEFR

SEQ ID NO: 42847 - protein, 113 aa, Homo sapiens
  Payload ID: 8714
  Gene Symbol: KLHL24
  Gene Name: kelch-like family member 24
  ENSP ID: ENSP00000408567
MVLILGRRLNREDLGVRDSPATKRKVFEMDPKSLTGHEFFDFSSGSSHAENILQIFNEFRDSRLFTDVIICVEGKEFPCHRAVLSACSSYFRAMFCNDHRESREMLVEINGIL

SEQ ID NO: 42848 - protein, 117 aa, Homo sapiens
  Payload ID: 8714
  Gene Symbol: KLHL24
  Gene Name: kelch-like family member 24
  ENSP ID: ENSP00000416836
MVLILGRRLNREDLGVRDSPATKRKVFEMDPKSLTGHEFFDFSSGSSHAENILQIFNEFRDSRLFTDVIICVEGKEFPCHRAVLSACSSYFRAMFCNDHRESREMLVEINGILAEAM

SEQ ID NO: 42849 - protein, 134 aa, Homo sapiens
  Payload ID: 8714
  Gene Symbol: KLHL24
  Gene Name: kelch-like family member 24
  ENSP ID: ENSP00000417275
MVLILGRRLNREDLGVRDSPATKRKVFEMDPKSLTGHEFFDFSSGSSHAENILQIFNEFRDSRLFTDVIICVEGKEFPCHRAVLSACSSYFRAMFCNDHRESREMLVEINGILAEAMECFLQYVYTGKVKITTE

SEQ ID NO: 42850 - protein, 127 aa, Homo sapiens
  Payload ID: 8714
  Gene Symbol: KLHL24
  Gene Name: kelch-like family member 24
  ENSP ID: ENSP00000417347
MVLILGRRLNREDLGVRDSPATKRKVFEMDPKSLTGHEFFDFSSGSSHAENILQIFNEFRDSRLFTDVIICVEGKEFPCHRAVLSACSSYFRAMFCNDHRESREMLVEINGILAEAMECFLQYVYTG

SEQ ID NO: 42851 - protein, 125 aa, Homo sapiens
  Payload ID: 8714
  Gene Symbol: KLHL24
  Gene Name: kelch-like family member 24
  ENSP ID: ENSP00000418922
MVLILGRRLNREDLGVRDSPATKRKVFEMDPKSLTGHEFFDFSSGSSHAENILQIFNEFRDSRLFTDVIICVEGKEFPCHRAVLSACSSYFRAMFCNDHRESREMLVEINGILAEAMECFLQYVY

SEQ ID NO: 42852 - protein, 537 aa, Homo sapiens
  Payload ID: 8714
  Gene Symbol: KLHL24
  Gene Name: kelch-like family member 24
  Uniprot ID: Q6TFL4
  ENSP ID: ENSP00000419010
MVLILGRRLNREDLGVRDSPATKRKVFEMDPKSLTGHEFFDFSSGSSHAENILQIFNEFRDSRLFTDVIICVEGKEFPCHRAVLSACSSYFRAMFCNDHRESREMLVEINGILAEAMECFLQYVYTGKVKITTENVQYLFETSSLFQISVLRDACAKFLEEQLDPCNCLGIQRFADTHSLKTLFTKCKNFALQTFEDVSQHEEFLELDKDELIDYICSDELVIGKEEMVFEAVMRWVYRAVDLRRPLLHELLTHVRLPLLHPNYFVQTVEVDQLIQNSPECYQLLHEARRYHILGNEMMSPRTRPRRSTGYSEVIVVVGGCERVGGFNLPYTECYDPVTGEWKSLAKLPEFTKSEYAVCALRNDILVSGGRINSRDVWIYNSQLNIWIRVASLNKGRWRHKMAVLLGKVYVVGGYDGQNRLSSVECYDSFSNRWTEVAPLKEAVSSPAVTSCVGKLFVIGGGPDDNTCSDKVQSYDPETNSWLLRAAIPIAKRCITAVSLNNLIYVAGGLTKAIYCYDPVEDYWMHVQNTFSRQVIT

SEQ ID NO: 42853 - protein, 73 aa, Homo sapiens
  Payload ID: 8714
  Gene Symbol: KLHL24
  Gene Name: kelch-like family member 24
  ENSP ID: ENSP00000419120
MVLILGRRLNREDLGVRDSPATKRKVFEMDPKSLTGHEFFDFSSGSSHAENILQIFNEFRDSRLFTDVIICVE

SEQ ID NO: 42854 - protein, 78 aa, Homo sapiens
  Payload ID: 8714
  Gene Symbol: KLHL24
  Gene Name: kelch-like family member 24
  ENSP ID: ENSP00000420207
MVLILGRRLNREDLGVRDSPATKRKVFEMDPKSLTGHEFFDFSSGSSHAENILQIFNEFRDSRLFTDVIICVEGKEFP

SEQ ID NO: 42855 - protein, 589 aa, Homo sapiens
  Payload ID: 8715
  Gene Symbol: KLHL25
  Gene Name: kelch-like family member 25
  Uniprot ID: Q9H0H3
  ENSP ID: ENSP00000336800
MSVSVHETRKSRSSTGSMNVTLFHKASHPDCVLAHLNTLRKHCMFTDVTLWAGDRAFPCHRAVLAASSRYFEAMFSHGLRESRDDTVNFQDNLHPEVLELLLDFAYSSRIAINEENAESLLEAGDMLQFHDVRDAAAEFLEKNLFPSNCLGMMLLSDAHQCRRLYEFSWRMCLVHFETVRQSEDFNSLSKDTLLDLISSDELETEDERVVFEAILQWVKHDLEPRKVHLPELLRSVRLALLPSDCLQEAVSSEALLMADERTKLIMDEALRCKTRILQNDGVVTSPCARPRKAGHTLLILGGQTFMCDKIYQVDHKAKEIIPKADLPSPRKEFSASAIGCKVYVTGGRGSENGVSKDVWVYDTVHEEWSKAAPMLIARFGHGSAELENCLYVVGGHTSLAGVFPASPSVSLKQVEKYDPGANKWMMVAPLRDGVSNAAVVSAKLKLFVFGGTSIHRDMVSKVQCYDPSENRWTIKAECPQPWRYTAAAVLGSQIFIMGGDTEFTAASAYRFDCETNQWTRIGDMTAKRMSCHALASGNKLYVVGGYFGTQRCKTLDCYDPTSDTWNCITTVPYSLIPTAFVSTWKHLPA

SEQ ID NO: 42856 - protein, 615 aa, Homo sapiens
  Payload ID: 8716
  Gene Symbol: KLHL26
  Gene Name: kelch-like family member 26
  Uniprot ID: Q53HC5
  ENSP ID: ENSP00000300976
MAESGGSSGGAGGGGAFGAGPGPERPNSTADKNGALKCTFSAPSHSTSLLQGLATLRAQGQLLDVVLTINREAFPAHKVVLAACSDYFRAMFTGGMREASQDVIELKGVSARGLRHIIDFAYSAEVTLDLDCVQDVLGAAVFLQMLPVVELCEEFLKAAMSVETCLNIGQMATTFSLASLRESVDAFTFRHFLQIAEEEDFLRLPLERLVFFLQSNRLQSCAEIDLFRAAVRWLQHDPARRPRASHVLCHIRFPLMQSSELVDSVQTLDIMVEDVLCRQYLLEAFNYQVLPFRQHEMQSPRTAVRSDVPSLVTFGGTPYTDSDRSVSSKVYQLPEPGARHFRELTEMEVGCSHTCVAVLDNFVYVAGGQHLQYRSGEGAVDACYRYDPHLNRWLRLQAMQESRIQFQLNVLCGMVYATGGRNRAGSLASVERYCPRRNEWGYACSLKRRTWGHAGAASGGRLYISGGYGISVEDKKALHCYDPVADQWEFKAPMSEPRVLHAMVGAGGRIYALGGRMDHVDRCFDVLAVEYYVPETDQWTSVSPMRAGQSEAGCCLLERKIYIVGGYNWRLNNVTGIVQVYNTDTDEWERDLHFPESFAGIACAPVLLPRAGTRR

SEQ ID NO: 42857 - protein, 185 aa, Homo sapiens
  Payload ID: 8716
  Gene Symbol: KLHL26
  Gene Name: kelch-like family member 26
  ENSP ID: ENSP00000469099
  MOD_RES (1)..(1): Any amino acid
XAESGGSSGGAGGGGAFGAGPGPERPNSTADKNGALKCTFSAPSHSTSLLQGLATLRAQGQLLDVVLTINREAFPAHKVVLAACSDYFRLLFPRPDHSWLAKTPLSHCQPHVVFLPFRAMFTGGMREASQDVIELKGVSARGLRHIIDFAYSAEVTLDLDCVQDVLGAAVFLQMLPVVELCEEFL

SEQ ID NO: 42858 - protein, 46 aa, Homo sapiens
  Payload ID: 8716
  Gene Symbol: KLHL26
  Gene Name: kelch-like family member 26
  ENSP ID: ENSP00000470999
MAESGGSSGGAGGGGAFGAGPGPERPNRTVLGLWIASHGLGSRPWR

SEQ ID NO: 42859 - protein, 145 aa, Homo sapiens
  Payload ID: 8716
  Gene Symbol: KLHL26
  Gene Name: kelch-like family member 26
  ENSP ID: ENSP00000472001
MAESGGSSGGAGGGGAFGAGPGPERPNSTADKNGALKCTFSAPSHSTSLLQGLATLRAQGQLLDVVLTINREAFPAHKVVLAACSDYFRAMFTGGMREASQDVIELKGVSARGLRHIIDFAYSAEVTLDLDCVQDVAPKTPGTLA

SEQ ID NO: 42860 - protein, 102 aa, Homo sapiens
  Payload ID: 8716
  Gene Symbol: KLHL26
  Gene Name: kelch-like family member 26
  ENSP ID: ENSP00000472032
MAESGGSSGGAGGGGAFGAGPGPERPNSTADKNGALKCTFSAPSHSTSLLQGLATLRAQGQLLDVVLTINREAFPAHKVVLAACSDYFRLECSASGLDLLIS

SEQ ID NO: 42861 - protein, 585 aa, Homo sapiens
  Payload ID: 8717
  Gene Symbol: KLHL28
  Gene Name: kelch-like family member 28
  ENSP ID: ENSP00000347193
MHFKCKYSYPALYQMDHTSPTYMLANLTHLHSEQLLQGLNLLRQHHELCDIILRVGDVKIHAHKVVLASVSPYFKAMFTGNLSEKENSEVEFQCIDETALQAIVEYAYTGTVFISQDTVESLLPAANLLQIKLVLKECCAFLESQLDPGNCIGISRFAETYGCRDLYLAATKYICQNFEAVCQTEEFFELTHADLDEIVSNDCLNVATEETVFYALESWIKYDVQERQKYLAQLLNSVRLPLLSVKFLTRLYEANHLIRDDRTCKHLLNEALKYHFMPEHRLSHQTVLMTRPRCAPKVLCAVGGKSGLFACLDSVEMYFPQNDSWIGLAPLNIPRYEFGICVLDQKVYVIGGIATNVRPGVTIRKHENSVECWNPDTNTWTSLERMNESRSTLGVVVLAGELYALGGYDGQSYLQSVEKYIPKIRKWQPVAPMTTTRSCFAAAVLDGMIYAIGGYGPAHMNSVERYDPSKDSWEMVASMADKRIHFGVGVMLGFIFVVGGHNGVSHLSSIERYDPHQNQWTVCRPMKEPRTGVGAAVIDNYLYVVGGHSGSSYLNTVQKYDPISDTWLDSAGMIYCRCNFGLTAL

SEQ ID NO: 42862 - protein, 571 aa, Homo sapiens
  Payload ID: 8717
  Gene Symbol: KLHL28
  Gene Name: kelch-like family member 28
  Uniprot ID: Q9NXS3
  ENSP ID: ENSP00000379434
MDHTSPTYMLANLTHLHSEQLLQGLNLLRQHHELCDIILRVGDVKIHAHKVVLASVSPYFKAMFTGNLSEKENSEVEFQCIDETALQAIVEYAYTGTVFISQDTVESLLPAANLLQIKLVLKECCAFLESQLDPGNCIGISRFAETYGCRDLYLAATKYICQNFEAVCQTEEFFELTHADLDEIVSNDCLNVATEETVFYALESWIKYDVQERQKYLAQLLNSVRLPLLSVKFLTRLYEANHLIRDDRTCKHLLNEALKYHFMPEHRLSHQTVLMTRPRCAPKVLCAVGGKSGLFACLDSVEMYFPQNDSWIGLAPLNIPRYEFGICVLDQKVYVIGGIATNVRPGVTIRKHENSVECWNPDTNTWTSLERMNESRSTLGVVVLAGELYALGGYDGQSYLQSVEKYIPKIRKWQPVAPMTTTRSCFAAAVLDGMIYAIGGYGPAHMNSVERYDPSKDSWEMVASMADKRIHFGVGVMLGFIFVVGGHNGVSHLSSIERYDPHQNQWTVCRPMKEPRTGVGAAVIDNYLYVVGGHSGSSYLNTVQKYDPISDTWLDSAGMIYCRCNFGLTAL

SEQ ID NO: 42863 - protein, 45 aa, Homo sapiens
  Payload ID: 8717
  Gene Symbol: KLHL28
  Gene Name: kelch-like family member 28
  ENSP ID: ENSP00000450788
MDHTSPTYMLANLTHLHSEQLLQGLNLLRQHHELCDIILRVGDVK

SEQ ID NO: 42864 - protein, 162 aa, Homo sapiens
  Payload ID: 8717
  Gene Symbol: KLHL28
  Gene Name: kelch-like family member 28
  ENSP ID: ENSP00000452061
MDHTSPTYMLANLTHLHSEQLLQGLNLLRQHHELCDIILRVGDVKIHAHKVVLASVSPYFKAMFTGNLSEKENSEVEFQCIDETALQAIVEYAYTGTVFISQDTVESLLPAANLLQIKLVLKECCAFLESQLDPGNCIGISRFAETYGCRDLYLAATKYICQ

SEQ ID NO: 42865 - protein, 84 aa, Homo sapiens
  Payload ID: 8717
  Gene Symbol: KLHL28
  Gene Name: kelch-like family member 28
  ENSP ID: ENSP00000452591
MDHTSPTYMLANLTHLHSEQLLQGLNLLRQHHELCDIILRVGDVKIHAHKVVLASVSPYFKAMFTGNLSEKENSEVEFQCIDET

SEQ ID NO: 42866 - protein, 232 aa, Homo sapiens
  Payload ID: 8717
  Gene Symbol: KLHL28
  Gene Name: kelch-like family member 28
  ENSP ID: ENSP00000462025
MDHTSPTYMLANLTHLHSEQLLQGLNLLRQHHELCDIILRVGDVKIHAHKVVLASVSPYFKAMFTGNLSEKENSEVEFQCIDETALQAIVEYAYTGTVFISQDTVESLLPAANLLQIKLVLKECCAFLESQLDPGNCIGISRFAETYGCRDLYLAATKYICQNFEAVCQTEEFFELTHADLDEIVSNDCLNVATEETVFYALESWIKYDVQERQKYLAQLLNSVRLPLLSVK

SEQ ID NO: 42867 - protein, 542 aa, Homo sapiens
  Payload ID: 8718
  Gene Symbol: KLHL29
  Gene Name: kelch-like family member 29
  ENSP ID: ENSP00000288548
  MOD_RES (1)..(1): Any amino acid
XHSYGVAQPPTFSPAVNVQAPVIGVTPSLPPHVGPQLPLMPGHYSLPQPPSQPLSSVVVNMPAQALYASPQPLAVSTLPGVGQVARPGPTAVGNGHMAGPLLPPPPPAQPSATLPSGAPATNGPPTTDSAHGLQMLRTIGVGKYEFTDPGHPREMLKELNQQRRAKAFTDLKIVVEGREFEVHQNVLASCSLYFKDLIQRSVQDSGQGGREKLELVLSNLQADVLELLLEFVYTGSLVIDSANAKTLLEAASKFQFHTFCKVCVSFLEKQLTASNCLGVLAMAEAMQCSELYHMAKAFALQIFPEVAAQEEILSISKDDFIAYVSNDSLNTKAEELVYETVIKWIKKDPATRTQYAAELLAVVRLPFIHPSYLLNVVDNEELIKSSEACRDLVNEAKRYHMLPHARQEMQTPRTRPRLSAGVAEVIVLVGGRQMVGMTQRSLVAVTCWNPQNNKWYPLASLPFYDREFFSVVSAGDNIYLSGGMESGVTLADVWCYMSLLDNWNLVSRMTVPRCRHNSLVYDGKIYTLGGLGVAGNVDHVER

SEQ ID NO: 42868 - protein, 875 aa, Homo sapiens
  Payload ID: 8718
  Gene Symbol: KLHL29
  Gene Name: kelch-like family member 29
  Uniprot ID: Q96CT2
  ENSP ID: ENSP00000420659
MSRHHSRFERDYRVGWDRREWSVNGTHGTTSICSVTSGAGGGTASSLSVRPGLLPLPVVPSRLPTPATAPAPCTTGSSEAITSLVASSASAVTTKAPGISKGDSQSQGLATSIRWGQTPINQSTPWDTDEPPSKQMRESDNPGTGPWVTTVAAGNQPTLIAHSYGVAQPPTFSPAVNVQAPVIGVTPSLPPHVGPQLPLMPGHYSLPQPPSQPLSSVVVNMPAQALYASPQPLAVSTLPGVGQVARPGPTAVGNGHMAGPLLPPPPPAQPSATLPSGAPATNGPPTTDSAHGLQMLRTIGVGKYEFTDPGHPREMLKELNQQRRAKAFTDLKIVVEGREFEVHQNVLASCSLYFKDLIQRSVQDSGQGGREKLELVLSNLQADVLELLLEFVYTGSLVIDSANAKTLLEAASKFQFHTFCKVCVSFLEKQLTASNCLGVLAMAEAMQCSELYHMAKAFALQIFPEVAAQEEILSISKDDFIAYVSNDSLNTKAEELVYETVIKWIKKDPATRTQYAAELLAVVRLPFIHPSYLLNVVDNEELIKSSEACRDLVNEAKRYHMLPHARQEMQTPRTRPRLSAGVAEVIVLVGGRQMVGMTQRSLVAVTCWNPQNNKWYPLASLPFYDREFFSVVSAGDNIYLSGGMESGVTLADVWCYMSLLDNWNLVSRMTVPRCRHNSLVYDGKIYTLGGLGVAGNVDHVERYDTITNQWEAVAPLPKAVHSAAATVCGGKIYVFGGVNEAGRAAGVLQSYVPQTNTWSFIESPMIDNKYAPAVTLNGFVFILGGAYARATTIYDPEKGNIKAGPNMNHSRQFCSAVVLDGKIYATGGIVSSEGPALGNMEAYEPTTNTWTLLPHMPCPVFRHGCVVIKKYIQSG

SEQ ID NO: 42869 - protein, 587 aa, Homo sapiens
  Payload ID: 8719
  Gene Symbol: KLHL3
  Gene Name: kelch-like family member 3
  Uniprot ID: Q9UH77
  ENSP ID: ENSP00000312397
MEGESVKLSSQTLIQAGDDEKNQRTITVNPAHMGKAFKVMNELRSKQLLCDVMIVAEDVEIEAHRVVLAACSPYFCAMFTGDMSESKAKKIEIKDVDGQTLSKLIDYIYTAEIEVTEENVQVLLPAASLLQLMDVRQNCCDFLQSQLHPTNCLGIRAFADVHTCTDLLQQANAYAEQHFPEVMLGEEFLSLSLDQVCSLISSDKLTVSSEEKVFEAVISWINYEKETRLEHMAKLMEHVRLPLLPRDYLVQTVEEEALIKNNNTCKDFLIEAMKYHLLPLDQRLLIKNPRTKPRTPVSLPKVMIVVGGQAPKAIRSVECYDFEEDRWDQIAELPSRRCRAGVVFMAGHVYAVGGFNGSLRVRTVDVYDGVKDQWTSIASMQERRSTLGAAVLNDLLYAVGGFDGSTGLASVEAYSYKTNEWFFVAPMNTRRSSVGVGVVEGKLYAVGGYDGASRQCLSTVEQYNPATNEWIYVADMSTRRSGAGVGVLSGQLYATGGHDGPLVRKSVEVYDPGTNTWKQVADMNMCRRNAGVCAVNGLLYVVGGDDGSCNLASVEYYNPVTDKWTLLPTNMSTGRSYAGVAVIHKSL

SEQ ID NO: 42870 - protein, 555 aa, Homo sapiens
  Payload ID: 8719
  Gene Symbol: KLHL3
  Gene Name: kelch-like family member 3
  Uniprot ID: Q9UH77
  ENSP ID: ENSP00000422099
MGKAFKVMNELRSKQLLCDVMIVAEDVEIEAHRVVLAACSPYFCAMFTGDMSESKAKKIEIKDVDGQTLSKLIDYIYTAEIEVTEENVQVLLPAASLLQLMDVRQNCCDFLQSQLHPTNCLGIRAFADVHTCTDLLQQANAYAEQHFPEVMLGEEFLSLSLDQVCSLISSDKLTVSSEEKVFEAVISWINYEKETRLEHMAKLMEHVRLPLLPRDYLVQTVEEEALIKNNNTCKDFLIEAMKYHLLPLDQRLLIKNPRTKPRTPVSLPKVMIVVGGQAPKAIRSVECYDFEEDRWDQIAELPSRRCRAGVVFMAGHVYAVGGFNGSLRVRTVDVYDGVKDQWTSIASMQERRSTLGAAVLNDLLYAVGGFDGSTGLASVEAYSYKTNEWFFVAPMNTRRSSVGVGVVEGKLYAVGGYDGASRQCLSTVEQYNPATNEWIYVADMSTRRSGAGVGVLSGQLYATGGHDGPLVRKSVEVYDPGTNTWKQVADMNMCRRNAGVCAVNGLLYVVGGDDGSCNLASVEYYNPVTDKWTLLPTNMSTGRSYAGVAVIHKSL

SEQ ID NO: 42871 - protein, 105 aa, Homo sapiens
  Payload ID: 8719
  Gene Symbol: KLHL3
  Gene Name: kelch-like family member 3
  ENSP ID: ENSP00000423585
MSESKAKKIEIKDVDGQTLSKLIDYIYTAEIEVTEENVQVLLPAASLLQLMDVRQNCCDFLQSQLHPTNCLGIRAFADVHTCTDLLQQANAYAALSRGDARRRIS

SEQ ID NO: 42872 - protein, 505 aa, Homo sapiens
  Payload ID: 8719
  Gene Symbol: KLHL3
  Gene Name: kelch-like family member 3
  Uniprot ID: Q9UH77
  ENSP ID: ENSP00000424828
MSESKAKKIEIKDVDGQTLSKLIDYIYTAEIEVTEENVQVLLPAASLLQLMDVRQNCCDFLQSQLHPTNCLGIRAFADVHTCTDLLQQANAYAEQHFPEVMLGEEFLSLSLDQVCSLISSDKLTVSSEEKVFEAVISWINYEKETRLEHMAKLMEHVRLPLLPRDYLVQTVEEEALIKNNNTCKDFLIEAMKYHLLPLDQRLLIKNPRTKPRTPVSLPKVMIVVGGQAPKAIRSVECYDFEEDRWDQIAELPSRRCRAGVVFMAGHVYAVGGFNGSLRVRTVDVYDGVKDQWTSIASMQERRSTLGAAVLNDLLYAVGGFDGSTGLASVEAYSYKTNEWFFVAPMNTRRSSVGVGVVEGKLYAVGGYDGASRQCLSTVEQYNPATNEWIYVADMSTRRSGAGVGVLSGQLYATGGHDGPLVRKSVEVYDPGTNTWKQVADMNMCRRNAGVCAVNGLLYVVGGDDGSCNLASVEYYNPVTDKWTLLPTNMSTGRSYAGVAVIHKSL

SEQ ID NO: 42873 - protein, 400 aa, Homo sapiens
  Payload ID: 8719
  Gene Symbol: KLHL3
  Gene Name: kelch-like family member 3
  ENSP ID: ENSP00000426173
MEGESKQLLCDVMIVAEDVEIEAHRVVLAACSPYFCAMFTGDMSESKAKKIEIKDVDGQTLSKLIDYIYTAEIEVTEENVQVLLPAASLLQLMDVRQNCCDFLQSQLHPTNCLGIRAFADVHTCTDLLQQANAYAEQHFPEVMLGEEFLSLSLDQVCSLISSDKLTVSSEEKVFEAVISWINYEKETRLEHMAKLMEHVRLPLLPRDYLVQTVEEEALIKNNNTCKDFLIEAMKYHLLPLDQRLLIKNPRTKPRTPVSLPKVMIVVGGQAPKAIRSVECYDFEEDRWDQIAELPSRRCRAGVVFMAGHVYAVGGFNGSLRVRTVDVYDGVKDQWTSIASMQERRSTLGAAVLNDLLYAVGGFDGSTGLASVEAYSYKTNEWFFVAPMNTRRSSVGVGVVE

SEQ ID NO: 42874 - protein, 578 aa, Homo sapiens
  Payload ID: 8720
  Gene Symbol: KLHL30
  Gene Name: kelch-like family member 30
  Uniprot ID: Q0D2K2
  ENSP ID: ENSP00000386389
MVRNVDDLDFHLPSHAQDMLDGLQRLRSQPKLADVTLLVGGRELPCHRGLLALSSPYFHAMFAGDFAESFSARVELRDVEPAVVGQLVDFVYTGRLTITQGNVEALTRTAARLHFPSVQKVCGRYLQQQLDAANCLGICEFGEQQGLLGVAAKAWAFLRENFEAVAREDEFLQLPRERLVTCLAGDLLQVQPEQSRLEALMRWVRHDPQARAAHLPELLSLVHLDAVPRPCVQQLLASEPLIQESEACRAALSQGHDGAPLALQQKLEEVLVVVGGQALEEEEAGEEPTPGLGNFAFYNSKAKRWMALPDFPDYHKWGFSLAALNNNIYVTGGSRGTKTDTWSTTQAWCFPLKEASWKPVAPMLKPRTNHASAALNGEIYVIGGTTLDVVEVESYDPYTDSWTPVSPALKYVSNFSAAGCRGRLYLVGSSACKYNALALQCYNPVTDAWSVIASPFLPKYLSSPRCAALHGELYLIGDNTKKVYVYDPGANLWQKVQSQHSLHENGALVPLGDALYVTGGRWQGMEGDYHVEMEAYDTVRDTWTRHGALPRLWLYHGASTVFLDVSKWTQPSGPTQEH

SEQ ID NO: 42875 - protein, 634 aa, Homo sapiens
  Payload ID: 8721
  Gene Symbol: KLHL31
  Gene Name: kelch-like family member 31
  Uniprot ID: Q9H511
  ENSP ID: ENSP00000359942
MAPKKKIVKKNKGDINEMTIIVEDSPLNKLNALNGLLEGGNGLSCISSELTDASYGPNLLEGLSKMRQENFLCDLVIGTKTKSFDVHKSVMASCSEYFYNILKKDPSIQRVDLNDISPLGLATVIAYAYTGKLTLSLYTIGSIISAAVYLQIHTLVKMCSDFLIREMSVENCMYVVNIAETYSLKNAKAAAQKFIRDNFLEFAESDQFMKLTFEQINELLIDDDLQLPSEIVAFQIAMKWLEFDQKRVKYAADLLSNIRFGTISAQDLVNYVQSVPRMMQDADCHRLLVDAMNYHLLPYHQNTLQSRRTRIRGGCRVLVTVGGRPGLTEKSLSRDILYRDPENGWSKLTEMPAKSFNQCVAVMDGFLYVAGGEDQNDARNQAKHAVSNFCRYDPRFNTWIHLASMNQKRTHFSLSVFNGLVYAAGGRNAEGSLASLECYVPSTNQWQPKTPLEVARCCHASAVADGRVLVTGGYIANAYSRSVCAYDPASDSWQELPNLSTPRGWHCAVTLSDRVYVMGGSQLGPRGERVDVLTVECYSPATGQWSYAAPLQVGVSTAGVSALHGRAYLVGGWNEGEKKYKKCIQCFSPELNEWTEDDELPEATVGVSCCTLSMPNNVTRESRASSVSSVPVSI

SEQ ID NO: 42876 - protein, 634 aa, Homo sapiens; identical to SEQ ID NO: 42875
  Payload ID: 8721
  Gene Symbol: KLHL31
  Gene Name: kelch-like family member 31
  Uniprot ID: Q9H511
  ENSP ID: ENSP00000384644

SEQ ID NO: 42877 - protein, 139 aa, Homo sapiens
  Payload ID: 8722
  Gene Symbol: KLHL32
  Gene Name: kelch-like family member 32
  ENSP ID: ENSP00000358258
MPSERCLSIQEMLTGQRLCHSESHNDSVLAALNQQRSDGILCDITLIAEEQKFHAHKAVLAACSDYFRAMFSLCMVESGADEVNLHGVTSLGLKQALEFAYTGQILLEPGVIQDVLAAGSHLQLLELLNLCSHYLIQVE

SEQ ID NO: 42878 - protein, 620 aa, Homo sapiens
  Payload ID: 8722
  Gene Symbol: KLHL32
  Gene Name: kelch-like family member 32
  Uniprot ID: Q96NJ5
  ENSP ID: ENSP00000358265
MPSERCLSIQEMLTGQRLCHSESHNDSVLAALNQQRSDGILCDITLIAEEQKFHAHKAVLAACSDYFRAMFSLCMVESGADEVNLHGVTSLGLKQALEFAYTGQILLEPGVIQDVLAAGSHLQLLELLNLCSHYLIQELNSFNYLDLYRLADLFNLTLLEKAVIDFLVKHLSELLKSRPEEVLTLPYCLLQEVLKSDRLTSLSEEQIWQLAVRWLEHNCHYQYMDELLQYIRFGLMDVDTLHTVALSHPLVQASETATALVNEALEYHQSIYAQPVWQTRRTKPRFQSDTLYIIGGKKREVCKVKELRYFNPVDQENALIAAIANWSELAPMPVGRSHHCVAVMGDFLFVAGGEVEHASGRTCAVRTACRYDPRSNSWAEIAPMKNCREHFVLGAMEEYLYAVGGRNELRQVLPTVERYCPKKNKWTFVQSFDRSLSCHAGYVADGLLWISGGVTNTAQYQNRLMVYEPNQNKWISRSPMLQRRVYHSMAAVQRKLYVLGGNDLDYNNDRILVRHIDSYNIDTDQWTRCNFNLLTGQNESGVAVHNGRIYLVGGYSIWTNEPLACIQVLDVSREGKEEVFYGPTLPFASNGIAACFLPAPYFTCPNLQTLQVPHHRIGTI

SEQ ID NO: 42879 - protein, 176 aa, Homo sapiens
  Payload ID: 8722
  Gene Symbol: KLHL32
  Gene Name: kelch-like family member 32
  ENSP ID: ENSP00000389310
ILLEPGVIQDVLAAGSHLQLLELLNLCSHYLIQELNSFNYLDLYRLADLFNLTLLEKAVIDFLVKHLSELLKSRPEEVLTLPYCLLQEVLKSDRLTSLSEEQIWQKCGICAAFCALRGDWCPGLPQWDDKTASCEVVGTQLPLPVHGRAPAIHPLWPNGCGYSPYSCPVPPPCPSK

SEQ ID NO: 42880 - protein, 584 aa, Homo sapiens
  Payload ID: 8722
  Gene Symbol: KLHL32
  Gene Name: kelch-like family member 32
  Uniprot ID: Q96NJ5
  ENSP ID: ENSP00000440382
MPSERCLSIQEMLTGQRLCHSESHNDSVLAALNQQRSDGILCDITLIAEEQKFHAHKAVLAACSDYFRILLEPGVIQDVLAAGSHLQLLELLNLCSHYLIQELNSFNYLDLYRLADLFNLTLLEKAVIDFLVKHLSELLKSRPEEVLTLPYCLLQEVLKSDRLTSLSEEQIWQLAVRWLEHNCHYQYMDELLQYIRFGLMDVDTLHTVALSHPLVQASETATALVNEALEYHQSIYAQPVWQTRRTKPRFQSDTLYIIGGKKREVCKVKELRYFNPVDQENALIAAIANWSELAPMPVGRSHHCVAVMGDFLFVAGGEVEHASGRTCAVRTACRYDPRSNSWAEIAPMKNCREHFVLGAMEEYLYAVGGRNELRQVLPTVERYCPKKNKWTFVQSFDRSLSCHAGYVADGLLWISGGVTNTAQYQNRLMVYEPNQNKWISRSPMLQRRVYHSMAAVQRKLYVLGGNDLDYNNDRILVRHIDSYNIDTDQWTRCNFNLLTGQNESGVAVHNGRIYLVGGYSIWTNEPLACIQVLDVSREGKEEVFYGPTLPFASNGIAACFLPAPYFTCPNLQTLQVPHHRIGTI

SEQ ID NO: 42881 - protein, 551 aa, Homo sapiens
  Payload ID: 8722
  Gene Symbol: KLHL32
  Gene Name: kelch-like family member 32
  Uniprot ID: Q96NJ5
  ENSP ID: ENSP00000441527
MPSERCLSIQEMLTGQRLCHSESHNDSVLAALNQQRSDGILCDITLIAEEQKFHAHKAVLAACSDYFRELNSFNYLDLYRLADLFNLTLLEKAVIDFLVKHLSELLKSRPEEVLTLPYCLLQEVLKSDRLTSLSEEQIWQLAVRWLEHNCHYQYMDELLQYIRFGLMDVDTLHTVALSHPLVQASETATALVNEALEYHQSIYAQPVWQTRRTKPRFQSDTLYIIGGKKREVCKVKELRYFNPVDQENALIAAIANWSELAPMPVGRSHHCVAVMGDFLFVAGGEVEHASGRTCAVRTACRYDPRSNSWAEIAPMKNCREHFVLGAMEEYLYAVGGRNELRQVLPTVERYCPKKNKWTFVQSFDRSLSCHAGYVADGLLWISGGVTNTAQYQNRLMVYEPNQNKWISRSPMLQRRVYHSMAAVQRKLYVLGGNDLDYNNDRILVRHIDSYNIDTDQWTRCNFNLLTGQNESGVAVHNGRIYLVGGYSIWTNEPLACIQVLDVSREGKEEVFYGPTLPFASNGIAACFLPAPYFTCPNLQTLQVPHHRIGTI

SEQ ID NO: 42882 - protein, 176 aa, Homo sapiens
  Payload ID: 8722
  Gene Symbol: KLHL32
  Gene Name: kelch-like family member 32
  ENSP ID: ENSP00000445453
MLPLSHPGGVTNTAQYQNRLMVYEPNQNKWISRSPMLQRRVYHSMAAVQRKLYVLGGNDLDYNNDRILVRHIDSYNIDTDQWTRCNFNLLTGQNESGVAVHNGRIYLVGGYSIWTNEPLACIQVLDVSREGKEEVFYGPTLPFASNGIAACFLPAPYFTCPNLQTLQVPHHRIGTI

SEQ ID NO: 42883 - protein, 156 aa, Homo sapiens
  Payload ID: 8722
  Gene Symbol: KLHL32
  Gene Name: kelch-like family member 32
  ENSP ID: ENSP00000482012
MVYEPNQNKWISRSPMLQRRVYHSMAAVQRKLYVLGGNDLDYNNDRILVRHIDSYNIDTDQWTRCNFNLLTGQNESGVAVHNGRIYLVGGYSIWTNEPLACIQVLDVSREGKEEVFYGPTLPFASNGIAACFLPAPYFTCPNLQTLQVPHHRIGTI

SEQ ID NO: 42884 - protein, 533 aa, Homo sapiens
  Payload ID: 8723
  Gene Symbol: KLHL33
  Gene Name: kelch-like family member 33
  Uniprot ID: A6NCF5
  ENSP ID: ENSP00000341549
MLLSGMRESQGTEVSLRTISTQDLRLLVSFAYSGVVRARWPGLLRAAQAALQYQSSSCLDLCQKGLARGLSPARCLALFPMAEAPGLERLWSKARHYLLTHLPAVALCPAFPSLPAACLAELLDSDELHVQEEFEAFVAARCWLAANPETQESEAKALLRCVRFGRMSTRELRRVRAAGLLPPLTPDLLHQLMVEADVPGQERRREPDRALVVIGGDGLRPDMALRQPSRAVWWARAFRCGVGLVRTVEWGQLPALPAPGRFRHGAASLAGSELYVCGGQDFYSHSNTLASTLRWEPSQEDWEEMAPLSQARSLFSLVALDGKLYALGGRHNDVALDSVETYNPELNVWRPAPALPAPCFAHAAAILEGQLYVSGGCGGTGQYLASLMHYDPKLEKPGTFLSPMGVPRAGHVMAALGGRLYVAGGLGETEDLLSFEAYELRTDSWTHLAPLPSPHVGAASAVLQGELLVLGGYSHRTYALSHLIHAYCPGLGRWLCLGTLPRPRAEMPACILTLPAVQHIALVPTPHQTKPAG

SEQ ID NO: 42885 - protein, 644 aa, Homo sapiens
  Payload ID: 8724
  Gene Symbol: KLHL34
  Gene Name: kelch-like family member 34
  Uniprot ID: Q8N239
  ENSP ID: ENSP00000368813
MSYFLSYCKAHGGALLTGYQALRAEGFLCDVTLETEGSEFPAHRSLLACSSDYFRALFKSHTQESRARVIHLHVPSAAGLQRLLDFIYTAWLSLSMDTVEDTLEAASYLQVTEALGLCGRYLERQLAPENCCFAANVAARFGLAHTLDAAERCIVSHLQELLARGAGPAGLLELNPTSLRAVLGAPDVARVPEARLLGLALAWLRQEPTTERLAHCTELLERVRFGLVPADVLRRVYSGSGLVLPARVKGLIIQALNYHTTPSRQPLMQGEQTSIRSPQTRILLVGGRRAREVVIEEVAAPQRAARGQVAAPEPEEEEEELEEEEEEEEWELTQNVVAFDVYNHRWRSLTQLPTPLLGHSVCTAGNFLFVLGGESPSGSASSPLADDSRVVTAQVHRYDPRFHAWTEVPAMREARAHFWCGAVGERLLAVGGLGAGGEVLASVEMYDLRRDRWTAAGALPRALHGHAGAVGDRGVVYISGGKAGRGEGGASSLRDLYVLGPEEQVWSKKAPMGTARFGHHMAVLRGAVFAFLGRYEPFSEIERYDPGADQWTRLRPLPYDRFCYGLAVVEETALLLGGLKWRDSRQVPTRNVVGYDLDLDRWEDIGCALPWAWSGLRCAVLQLAEGGDDEREGEVGEALDLVLG

SEQ ID NO: 42886 - protein, 363 aa, Homo sapiens
  Payload ID: 8725
  Gene Symbol: KLHL35
  Gene Name: kelch-like family member 35
  ENSP ID: ENSP00000365469
MRWVRHDAPARRGQLRRLLEHVRLPLLAPAYFLEKVEADELLQACGECRPLLLEARACFILGREAGALRTRPRRFMDLAEVIVVIGGCDRKGLLKLPFADAYHPESQRWTPLPSLPGYTRSEFAACALRNDVYVSGGHINSHDVWMFSSHLHTWIKVASLHKGRWRHKMAVVQGQLFAVGGFDGLRRLHSVERYDPFSNTWAAAAPLPEAVSSAAVASCAGKLFVIGGARQGGVNTDKVQCFDPKEDRWSLRSPAPFSQRCLEAVSLEDTIYVMGGLMSKIFTYDPGTDVWGEAAVLPSPVESCGVTVCDGKVHILGGRDDRGESTDKVFTFDPSSGQVEVQPSLQRCTSSHGCVTIIQSLGR

SEQ ID NO: 42887 - protein, 583 aa, Homo sapiens
  Payload ID: 8725
  Gene Symbol: KLHL35
  Gene Name: kelch-like family member 35
  Uniprot ID: Q6PF15
  ENSP ID: ENSP00000438526
MRQGHAPEESEPGCEAPCAGPCHAQRVLQALNAYRRSGTLTDVVLRAGGRDFPCHRAALSAGSAYFRSLFAAGRPERGPAVVPVVPVAPEAPGTSPAGAAAALAVVLDYVYGAGVRLRAEDEAAAVLALAERLGVAGLREACVRFLEGRLRAANSLALRRVAAAFSLAPLAERCGRVLRQAFAEVARHADFLELAPDEVVALLADPALGVAREEAVFEAAMRWVRHDAPARRGQLRRLLEHVRLPLLAPAYFLEKVEADELLQACGECRPLLLEARACFILGREAGALRTRPRRFMDLAEVIVVIGGCDRKGLLKLPFADAYHPESQRWTPLPSLPGYTRSEFAACALRNDVYVSGGHINSHDVWMFSSHLHTWIKVASLHKGRWRHKMAVVQGQLFAVGGFDGLRRLHSVERYDPFSNTWAAAAPLPEAVSSAAVASCAGKLFVIGGARQGGVNTDKVQCFDPKEDRWSLRSPAPFSQRCLEAVSLEDTIYVMGGLMSKIFTYDPGTDVWGEAAVLPSPVESCGVTVCDGKVHILGGRDDRGESTDKVFTFDPSSGQVEVQPSLQRCTSSHGCVTIIQSLGR

SEQ ID NO: 42888 - protein, 553 aa, Homo sapiens
  Payload ID: 8726
  Gene Symbol: KLHL36
  Gene Name: kelch-like family member 36
  Uniprot ID: Q8N4N3
  ENSP ID: ENSP00000258157
MMEGSRQTRVSRPYKISESSKVYRWADHSSTVLQRLNEQRLRGLFCDVVLVADEQRVPAHRNLLAVCSDYFNSMFTIGMREAFQKEVELIGASYIGLKAVVDFLYGGELVLDGGNIDYVLETAHLLQIWTVVDFCCEYLEQEVSEDNYLYLQELASIYSLKRLDAFIDGFILNHFGTLSFTPDFLQNVSMQKLCVYLSSSEVQRECEHDLLQAALQWLTQQPEREAHARQVLENIHFPLIPKNDLLHRVKPAVCSLLPKEANCEGFIEEAVRYHNNLAAQPVMQTKRTALRTNQERLLFVGGEVSERCLELSDDTCYLDAKSEQWVKETPLPARRSHHCVAVLGGFIFIAGGSFSRDNGGDAASNLLYRFTYGHAGTIYKDFVYISGGHDYQIGPYRKNLLCYDHRTDVWEERRPMTTARGWHSMCSLGDSIYSIGGSDDNIESMERFDVLGVEAYSPQCNQWTRVAPLLHANSESGVAVWEGRIYILGGYSWENTAFSKTVQVYDREADKWSRGVDLPKAIAGGSACVCALEPRPEDKKKKGKGKRHQDRGQ

SEQ ID NO: 42889 - protein, 97 aa, Homo sapiens
  Payload ID: 8726
  Gene Symbol: KLHL36
  Gene Name: kelch-like family member 36
  ENSP ID: ENSP00000455244
MMEGSRQTRVSRPYKISESSKVYRWADHSSTVLQRLNEQRLRGLFCDVVLVADEQRVPAHRNLLAVCSDYFNSMFTIGMREAFQKEVELIGASYIGL

SEQ ID NO: 42890 - protein, 115 aa, Homo sapiens
  Payload ID: 8726
  Gene Symbol: KLHL36
  Gene Name: kelch-like family member 36
  ENSP ID: ENSP00000455746
MMEGSRQTRVSRPYKISESSKVYRWADHSSTVLQRLNEQRLRGLFCDVVLVADEQRVPAHRNLLAVCSDYFNSMFTIGMREAFQKEVELIGASYIGLKAVVDFLYGGELVLDGGN

SEQ ID NO: 42891 - protein, 62 aa, Homo sapiens
  Payload ID: 8726
  Gene Symbol: KLHL36
  Gene Name: kelch-like family member 36
  ENSP ID: ENSP00000455966
MMEGSRQTRVSRPYKISESSKVYRWADHSSTVLQRLNEQRLRGLFCDVVLVADEQRVPAHRN

SEQ ID NO: 42892 - protein, 616 aa, Homo sapiens
  Payload ID: 8726
  Gene Symbol: KLHL36
  Gene Name: kelch-like family member 36
  Uniprot ID: Q8N4N3
  ENSP ID: ENSP00000456743
MMEGSRQTRVSRPYKISESSKVYRWADHSSTVLQRLNEQRLRGLFCDVVLVADEQRVPAHRNLLAVCSDYFNSMFTIGMREAFQKEVELIGASYIGLKAVVDFLYGGELVLDGGNIDYVLETAHLLQIWTVVDFCCEYLEQEVSEDNYLYLQELASIYSLKRLDAFIDGFILNHFGTLSFTPDFLQNVSMQKLCVYLSSSEVQRECEHDLLQAALQWLTQQPEREAHARQVLENIHFPLIPKNDLLHRVKPAVCSLLPKEANCEGFIEEAVRYHNNLAAQPVMQTKRTALRTNQERLLFVGGEVSERCLELSDDTCYLDAKSEQWVKETPLPARRSHHCVAVLGGFIFIAGGSFSRDNGGDAASNLLYRYDPRCKQWIKVASMNQRRVDFYLASIEDMLVAIGGRNENGALSSVETYSPKTDSWSYVAGLPRFTYGHAGTIYKDFVYISGGHDYQIGPYRKNLLCYDHRTDVWEERRPMTTARGWHSMCSLGDSIYSIGGSDDNIESMERFDVLGVEAYSPQCNQWTRVAPLLHANSESGVAVWEGRIYILGGYSWENTAFSKTVQVYDREADKWSRGVDLPKAIAGGSACVCALEPRPEDKKKKGKGKRHQDRGQ

SEQ ID NO: 42893 - protein, 581 aa, Homo sapiens
  Payload ID: 8727
  Gene Symbol: KLHL38
  Gene Name: kelch-like family member 38
  Uniprot ID: Q2WGJ6
  ENSP ID: ENSP00000321475
MDEESLDGLLFKDHDFSSDLLRQLNSLRQSRILTDVSICAGAREIPCHRNVLASSSPYFRAMFCSSFREKSEAKVQLKGIDPPTLDQIVSYVYTGEAHIATDNVLPVMEAASMLQFPKLFEACSSYLQSQLAPSNCLGMIRLSEILSCETLKKKAREVALTSFPEVAASADLKELCALELRDYLGDDGLCGEEEKVFEALMVWIKHDLQARKRYMQELFKQVRLQYIHPAFFHHFIANDALLQSSPACQIILETAKRQMFSLCGTTVPDCKLLLHVPPRNSYQDFLILLGGRKDSQQTTRDVLLYSKQTGQWQSLAKLPTRLYKASAITLHRSIYVLGGMAVSSGRSLVSHNVYIFSLKLNQWRLGEPMLVARYSHRSTAHKNFIFSIGGIGEGQELMGSMERYDSICNVWESMASMPVGVLHPAVAVKDQRLYLFGGEDIMQNPVRLIQVYHISRNSWFKMETRMIKNVCAPAVVLGERIVIVGGYTRRILAYDPQSNKFVKCADMKDRRMHHGATVMGNKLYVTGGRRLTTDCNIEDSASFDCYDPETDTWTSQGQLPHKLFDHACLTLQCIPRTSGLP

SEQ ID NO: 42894 - protein, 720 aa, Homo sapiens
  Payload ID: 8728
  Gene Symbol: KLHL4
  Gene Name: kelch-like family member 4
  Uniprot ID: Q9C0H6
  ENSP ID: ENSP00000362206
MSVSGKKEFDVKQILRLRWRWFSHPFQGSTNTGSCLQQEGYEHRGTPVQGRLKSHSRDRNGLKKSNSPVHHNILAPVPGPAPAHQRAVQNLQQHNLIVHFQANEDTPKSVPEKNLFKEACEKRAQDLEMMADDNIEDSTARLDTQHSEDMNATRSEEQFHVINHAEQTLRKMENYLKEKQLCDVLLIAGHLRIPAHRLVLSAVSDYFAAMFTNDVLEAKQEEVRMEGVDPNALNSLVQYAYTGVLQLKEDTIESLLAAACLLQLTQVIDVCSNFLIKQLHPSNCLGIRSFGDAQGCTELLNVAHKYTMEHFIEVIKNQEFLLLPANEISKLLCSDDINVPDEETIFHALMQWVGHDVQNRQGELGMLLSYIRLPLLPPQLLADLETSSMFTGDLECQKLLMEAMKYHLLPERRSMMQSPRTKPRKSTVGALYAVGGMDAMKGTTTIEKYDLRTNSWLHIGTMNGRRLQFGVAVIDNKLYVVGGRDGLKTLNTVECFNPVGKIWTVMPPMSTHRHGLGVATLEGPMYAVGGHDGWSYLNTVERWDPEGRQWNYVASMSTPRSTVGVVALNNKLYAIGGRDGSSCLKSMEYFDPHTNKWSLCAPMSKRRGGVGVATYNGFLYVVGGHDAPASNHCSRLSDCVERYDPKGDSWSTVAPLSVPRDAVAVCPLGDKLYVVGGYDGHTYLNTVESYDAQRNEWKESMQELLQNFYTTQKLKETLGH

SEQ ID NO: 42895 - protein, 718 aa, Homo sapiens
  Payload ID: 8728
  Gene Symbol: KLHL4
  Gene Name: kelch-like family member 4
  Uniprot ID: Q9C0H6
  ENSP ID: ENSP00000362211
MSVSGKKEFDVKQILRLRWRWFSHPFQGSTNTGSCLQQEGYEHRGTPVQGRLKSHSRDRNGLKKSNSPVHHNILAPVPGPAPAHQRAVQNLQQHNLIVHFQANEDTPKSVPEKNLFKEACEKRAQDLEMMADDNIEDSTARLDTQHSEDMNATRSEEQFHVINHAEQTLRKMENYLKEKQLCDVLLIAGHLRIPAHRLVLSAVSDYFAAMFTNDVLEAKQEEVRMEGVDPNALNSLVQYAYTGVLQLKEDTIESLLAAACLLQLTQVIDVCSNFLIKQLHPSNCLGIRSFGDAQGCTELLNVAHKYTMEHFIEVIKNQEFLLLPANEISKLLCSDDINVPDEETIFHALMQWVGHDVQNRQGELGMLLSYIRLPLLPPQLLADLETSSMFTGDLECQKLLMEAMKYHLLPERRSMMQSPRTKPRKSTVGALYAVGGMDAMKGTTTIEKYDLRTNSWLHIGTMNGRRLQFGVAVIDNKLYVVGGRDGLKTLNTVECFNPVGKIWTVMPPMSTHRHGLGVATLEGPMYAVGGHDGWSYLNTVERWDPEGRQWNYVASMSTPRSTVGVVALNNKLYAIGGRDGSSCLKSMEYFDPHTNKWSLCAPMSKRRGGVGVATYNGFLYVVGGHDAPASNHCSRLSDCVERYDPKGDSWSTVAPLSVPRDAVAVCPLGDKLYVVGGYDGHTYLNTVESYDAQRNEWKEEVPVNIGRAGACVVVVKLP

SEQ ID NO: 42896 - protein, 621 aa, Homo sapiens
  Payload ID: 8729
  Gene Symbol: KLHL40
  Gene Name: kelch-like family member 40
  Uniprot ID: Q2TBA0
  ENSP ID: ENSP00000287777
MALGLEQAEEQRLYQQTLLQDGLKDMLDHGKFLDCVVRAGEREFPCHRLVLAACSPYFRARFLAEPERAGELHLEEVSPDVVAQVLHYLYTSEIALDEASVQDLFAAAHRFQIPSIFTICVSFLQKRLCLSNCLAVFRLGLLLDCARLAVAARDFICAHFTLVARDADFLGLSADELIAIISSDGLNVEKEEAVFEAVMRWAGSGDAEAQAERQRALPTVFESVRCRLLPRAFLESRVERHPLVRAQPELLRKVQMVKDAHEGRITTLRKKKKGKDGAGAKEADKGTSKAKAEEDEEAERILPGILNDTLRFGMFLQDLIFMISEEGAVAYDPAANECYCASLSNQVPKNHVSLVTKENQVFVAGGLFYNEDNKEDPMSAYFLQFDHLDSEWLGMPPLPSPRCLFGLGEALNSIYVVGGREIKDGERCLDSVMCYDRLSFKWGESDPLPYVVYGHTVLSHMDLVYVIGGKGSDRKCLNKMCVYDPKKFEWKELAPMQTARSLFGATVHDGRIIVAAGVTDTGLTSSAEVYSITDNKWAPFEAFPQERSSLSLVSLVGTLYAIGGFATLETESGELVPTELNDIWRYNEEEKKWEGVLREIAYAAGATFLPVRLNVLCLTKM

SEQ ID NO: 42897 - protein, 606 aa, Homo sapiens
  Payload ID: 8730
  Gene Symbol: KLHL41
  Gene Name: kelch-like family member 41
  Uniprot ID: O60662
  ENSP ID: ENSP00000284669
MDSQRELAEELRLYQSTLLQDGLKDLLDEKKFIDCTLKAGDKSLPCHRLILSACSPYFREYFLSEIDEAKKKEVVLDNVDPAILDLIIKYLYSASIDLNDGNVQDIFALASRFQIPSVFTVCVSYLQKRLAPGNCLAILRLGLLLDCPRLAISAREFVSDRFVQICKEEDFMQLSPQELISVISNDSLNVEKEEAVFEAVMKWVRTDKENRVKNLSEVFDCIRFRLMTEKYFKDHVEKDDIIKSNPDLQKKIKVLKDAFAGKLPEPSKNAAKTGAGEVNGDVGDEDLLPGYLNDIPRHGMFVKDLILLVNDTAAVAYDPTENECYLTALAEQIPRNHSSIVTQQNQIYVVGGLYVDEENKDQPLQSYFFQLDSIASEWVGLPPLPSARCLFGLGEVDDKIYVVAGKDLQTEASLDSVLCYDPVAAKWNEVKKLPIKVYGHNVISHKGMIYCLGGKTDDKKCTNRVFIFNPKKGDWKDLAPMKIPRSMFGVAVHKGKIVIAGGVTEDGLSASVEAFDLTTNKWDVMTEFPQERSSISLVSLAGSLYAIGGFAMIQLESKEFAPTEVNDIWKYEDDKKEWAGMLKEIRYASGASCLATRLNLFKLSKL

SEQ ID NO: 42898 - protein, 505 aa, Homo sapiens
  Payload ID: 8731
  Gene Symbol: KLHL42
  Gene Name: kelch-like family member 42
  Uniprot ID: Q9P2K6
  ENSP ID: ENSP00000370671
MSAEEMVQIRLEDRCYPVSKRKLIEQSDYFRALYRSGMREALSQEAGGPEVQQLRGLSAPGLRLVLDFINAGGAREGWLLGPRGEKGGGVDEDEEMDEVSLLSELVEAASFLQVTSLLQLLLSQVRLNNCLEMYRLAQVYGLPDLQEACLRFMVVHFHEVLCKPQFHLLGSPPQAPGDVSLKQRLREARMTGTPVLVALGDFLGGPLAPHPYQGEPPSMLRYEEMTERWFPLANNLPPDLVNVRGYGSAILDNYLFIVGGYRITSQEISAAHSYNPSTNEWLQVASMNQKRSNFKLVAVNSKLYAIGGQAVSNVECYNPEQDAWNFVAPLPNPLAEFSACECKGKIYVIGGYTTRDRNMNILQYCPSSDMWTLFETCDVHIRKQQMVSVEETIYIVGGCLHELGPNRRSSQSEDMLTVQSYNTVTRQWLYLKENTSKSGLNLTCALHNDGIYIMSRDVTLSTSLEHRVFLKYNIFSDSWEAFRRFPAFGHNLLVSSLYLPNKAET

SEQ ID NO: 42899 - protein, 179 aa, Homo sapiens
  Payload ID: 8731
  Gene Symbol: KLHL42
  Gene Name: kelch-like family member 42
  ENSP ID: ENSP00000443934
  MOD_RES (1)..(1): Any amino acid
XSLKQRLREARMTGTPVLVALGDFLGGPLAPHPYQGEPPSMLRYEEMTERWFPLANNLPPDLVNVRGYGSAILDNYLFIVGGYRITSQEISAAHSYNPSTNEWLQVASMNQKRSNFKLVAVNSKLYAIGGQAVSNVECYNPEQDAWNFVAPLPNPLAEFSACECKGKIYVIGGYTTRGK

SEQ ID NO: 42900 - protein, 369 aa, Homo sapiens
  Payload ID: 8731
  Gene Symbol: KLHL42
  Gene Name: kelch-like family member 42
  ENSP ID: ENSP00000444748
MSAEEMVQIRLEDRCYPVSKRKLIEQSDYFRALYRSGMREALSQEAGGPEVQQLRGLSAPGLRLVLDFINAGGAREGWLLGPRGEKGGGVDEDEEMDEVSLLSELVEAASFLQVTSLLQLLLSQVRLNNCLEMYRLAQVYGLPDLQEACLRFMVVHFHEVLCKPQFHLLGSPPQAPGDVSLKQRLREARMTGTPVLVALGDFLGGPLAPHPYQGEPPSMLRYEEMTERWFPLANNLPPDLVNVRGYGSAILDNYLFIVGGYRITSQEISAAHSYNPSTNEWLQVASMNQKRSNFKLVAVNSKLYAIGGQAVSNVECYNPEQDAWNFVAPLPNPLAEFSACECKGKIYVIGGYTTRDSLWRSCVATCHVS

SEQ ID NO: 42901 - protein, 709 aa, Homo sapiens
  Payload ID: 8732
  Gene Symbol: KLHL5
  Gene Name: kelch-like family member 5
  Uniprot ID: Q96PQ7
  ENSP ID: ENSP00000261425
MSGSRKEFDVKQILKIRWRWFGHQASSPNSTVDSQQGEFWNRGQTGANGGRKFLDPCSLQLPLASIGYRRSSQLDFQNSPSWPMASTSEVPAFEFTAEDCGGAHWLDRPEVDDGTSEEENESDSSSCRTSNSSQTLSSCHTMEPCTSDEFFQALNHAEQTFKKMENYLRHKQLCDVILVAGDRRIPAHRLVLSSVSDYFAAMFTNDVREARQEEIKMEGVEPNSLWSLIQYAYTGRLELKEDNIECLLSTACLLQLSQVVEACCKFLMKQLHPSNCLGIRSFADAQGCTDLHKVAHNYTMEHFMEVIRNQEFVLLPASEIAKLLASDDMNIPNEETILNALLTWVRHDLEQRRKDLSKLLAYIRLPLLAPQFLADMENNVLFRDDIECQKLIMEAMKYHLLPERRPMLQSPRTKPRKSTVGTLFAVGGMDSTKGATSIEKYDLRTNMWTPVANMNGRRLQFGVAVLDDKLYVVGGRDGLKTLNTVECYNPKTKTWSVMPPMSTHRHGLGVAVLEGPMYAVGGHDGWSYLNTVERWDPQARQWNFVATMSTPRSTVGVAVLSGKLYAVGGRDGSSCLKSVECFDPHTNKWTLCAQMSKRRGGVGVTTWNGLLYAIGGHDAPASNLTSRLSDCVERYDPKTDMWTAVASMSISRDAVGVCLLGDKLYAVGGYDGQAYLNTVEAYDPQTNEWTQVAPLCLGRAGACVVTVKL

SEQ ID NO: 42902 - protein, 694 aa, Homo sapiens
  Payload ID: 8732
  Gene Symbol: KLHL5
  Gene Name: kelch-like family member 5
  Uniprot ID: Q96PQ7
  ENSP ID: ENSP00000261426
MNVIYFPLHIFVVYSRAYTSLVLVGCTNLCAVLFARCLDDHLVSLRMSGSRKEFDVKQILKIRWRWFGHQASSPNSTVDSQQGEFWNRGQTGANGGRKFLDPCSLQLPLASIGYRRSSQLDFQNSPSWPMASTSEVPAFEFTAEDCGGAHWLDRPEVDDGTSEEENESDSSSCRLVLSSVSDYFAAMFTNDVREARQEEIKMEGVEPNSLWSLIQYAYTGRLELKEDNIECLLSTACLLQLSQVVEACCKFLMKQLHPSNCLGIRSFADAQGCTDLHKVAHNYTMEHFMEVIRNQEFVLLPASEIAKLLASDDMNIPNEETILNALLTWVRHDLEQRRKDLSKLLAYIRLPLLAPQFLADMENNVLFRDDIECQKLIMEAMKYHLLPERRPMLQSPRTKPRKSTVGTLFAVGGMDSTKGATSIEKYDLRTNMWTPVANMNGRRLQFGVAVLDDKLYVVGGRDGLKTLNTVECYNPKTKTWSVMPPMSTHRHGLGVAVLEGPMYAVGGHDGWSYLNTVERWDPQARQWNFVATMSTPRSTVGVAVLSGKLYAVGGRDGSSCLKSVECFDPHTNKWTLCAQMSKRRGGVGVTTWNGLLYAIGGHDAPASNLTSRLSDCVERYDPKTDMWTAVASMSISRDAVGVCLLGDKLYAVGGYDGQAYLNTVEAYDPQTNEWTQVAPLCLGRAGACVVTVKL

SEQ ID NO: 42903 - protein, 757 aa, Homo sapiens
  Payload ID: 8732
  Gene Symbol: KLHL5
  Gene Name: kelch-like family member 5
  Uniprot ID: Q96PQ7
  ENSP ID: ENSP00000371355
MNVIYFPLHIFVVYSRAYTSLVLVGCTNLCAVLFARCLDDHLVSLRMSGSRKEFDVKQILKIRWRWFGHQASSPNSTVDSQQGEFWNRGQTGANGGRKFLDPCSLQLPLASIGYRRSSQLDFQNSPSWPMASTSEVPAFEFTAEDCGGAHWLDRPEVDDGTSEEENESDSSSCRTSNSSQTLSSCHTMEPCTSDEFFQALNHAEQTFKKMENYLRHKQLCDVILVAGDRRIPAHRLVLSSVSDYFAAMFTNDVREARQEEIKMEGVEPNSLWSLIQYAYTGRLELKEDNIECLLSTACLLQLSQVVEACCKFLMKQLHPSNCLGIRSFADAQGCTDLHKVAHNYTMEHFMEVIRNQEFVLLPASEIAKLLASDDMNIPNEETILNALLTWVRHDLEQRRKDLSKLLAYIRLPLLAPQFLADMENNVLFRDDIECQKLIMEAMKYHLLPERRPMLQSPRTKPRKSTVGTLFAVGGMDSTKGATSIEKYDLRTNMWTPVANMNGRRLQFGVAVLDDKLYVVGGRDGLKTLNTVECYNPKTKTWSVMPPMSTHRHGLGVAVLEGPMYAVGGHDGWSYLNTVERWDPQARQWNFVATMSTPRSTVGVAVLSGKLYAVGGRDGSSCLKSVECFDPHTNKWTLCAQMSKRRGGVGVTTWNGLLYAIGGHDAPASNLTSRLSDCVERYDPKTDMWTAVASMSISRDAVGVCLLGDKLYAVGGYDGQAYLNTVEAYDPQTNEWTQVWHSCFIITLTLFLLKQFLW

SEQ ID NO: 42904 - protein, 568 aa, Homo sapiens
  Payload ID: 8732
  Gene Symbol: KLHL5
  Gene Name: kelch-like family member 5
  Uniprot ID: Q96PQ7
  ENSP ID: ENSP00000423080
MEPCTSDEFFQALNHAEQTFKKMENYLRHKQLCDVILVAGDRRIPAHRLVLSSVSDYFAAMFTNDVREARQEEIKMEGVEPNSLWSLIQYAYTGRLELKEDNIECLLSTACLLQLSQVVEACCKFLMKQLHPSNCLGIRSFADAQGCTDLHKVAHNYTMEHFMEVIRNQEFVLLPASEIAKLLASDDMNIPNEETILNALLTWVRHDLEQRRKDLSKLLAYIRLPLLAPQFLADMENNVLFRDDIECQKLIMEAMKYHLLPERRPMLQSPRTKPRKSTVGTLFAVGGMDSTKGATSIEKYDLRTNMWTPVANMNGRRLQFGVAVLDDKLYVVGGRDGLKTLNTVECYNPKTKTWSVMPPMSTHRHGLGVAVLEGPMYAVGGHDGWSYLNTVERWDPQARQWNFVATMSTPRSTVGVAVLSGKLYAVGGRDGSSCLKSVECFDPHTNKWTLCAQMSKRRGGVGVTTWNGLLYAIGGHDAPASNLTSRLSDCVERYDPKTDMWTAVASMSISRDAVGVCLLGDKLYAVGGYDGQAYLNTVEAYDPQTNEWTQVAPLCLGRAGACVVTVKL

SEQ ID NO: 42905 - protein, 755 aa, Homo sapiens
  Payload ID: 8732
  Gene Symbol: KLHL5
  Gene Name: kelch-like family member 5
  Uniprot ID: Q96PQ7
  ENSP ID: ENSP00000423897
MNVIYFPLHIFVVYSRAYTSLVLVGCTNLCAVLFARCLDDHLVSLRMSGSRKEFDVKQILKIRWRWFGHQASSPNSTVDSQQGEFWNRGQTGANGGRKFLDPCSLQLPLASIGYRRSSQLDFQNSPSWPMASTSEVPAFEFTAEDCGGAHWLDRPEVDDGTSEEENESDSSSCRTSNSSQTLSSCHTMEPCTSDEFFQALNHAEQTFKKMENYLRHKQLCDVILVAGDRRIPAHRLVLSSVSDYFAAMFTNDVREARQEEIKMEGVEPNSLWSLIQYAYTGRLELKEDNIECLLSTACLLQLSQVVEACCKFLMKQLHPSNCLGIRSFADAQGCTDLHKVAHNYTMEHFMEVIRNQEFVLLPASEIAKLLASDDMNIPNEETILNALLTWVRHDLEQRRKDLSKLLAYIRLPLLAPQFLADMENNVLFRDDIECQKLIMEAMKYHLLPERRPMLQSPRTKPRKSTVGTLFAVGGMDSTKGATSIEKYDLRTNMWTPVANMNGRRLQFGVAVLDDKLYVVGGRDGLKTLNTVECYNPKTKTWSVMPPMSTHRHGLGVAVLEGPMYAVGGHDGWSYLNTVERWDPQARQWNFVATMSTPRSTVGVAVLSGKLYAVGGRDGSSCLKSVECFDPHTNKWTLCAQMSKRRGGVGVTTWNGLLYAIGGHDAPASNLTSRLSDCVERYDPKTDMWTAVASMSISRDAVGVCLLGDKLYAVGGYDGQAYLNTVEAYDPQTNEWTQVAPLCLGRAGACVVTVKL

SEQ ID NO: 42906 - protein, 282 aa, Homo sapiens
  Payload ID: 8732
  Gene Symbol: KLHL5
  Gene Name: kelch-like family member 5
  ENSP ID: ENSP00000425512
  MOD_RES (1)..(1): Any amino acid
XRTNMWTPVANMNGRRLQFGVAVLDDKLYVVGGRDGLKTLNTVECYNPKTKTWSVMPPMSTHRHGLGVAVLEGPMYAVGGHDGWSYLNTVERWDPQARQWNFVATMSTPRSTVGVAVLSGKLYAVGGRDGSSCLKSVECFDPHTNKWTLCAQMSKRRGGVGVTTWNGLLYAIGGHDAPASNLTSRLSDCVERYDPKTDMWTAVASMSISRDAVGVCLLGDKLYAVGGYDGQAYLNTVEAYDPQTNEWTQVFSHTFEDSKDHLVAIKQTIWRQNSLSEEFRSH

SEQ ID NO: 42907 - protein, 36 aa, Homo sapiens
  Payload ID: 8732
  Gene Symbol: KLHL5
  Gene Name: kelch-like family member 5
  ENSP ID: ENSP00000426949
  MOD_RES (1)..(1): Any amino acid
XAEDCGGAHWLDRPEVDDGTSEEENESDSSSCSSPD

SEQ ID NO: 42908 - protein, 621 aa, Homo sapiens
  Payload ID: 8733
  Gene Symbol: KLHL6
  Gene Name: kelch-like family member 6
  Uniprot ID: Q8WZ60
  ENSP ID: ENSP00000341342
MLMAGQRGAWTMGDVVEKSLEGPLAPSTDEPSQKTGDLVEILNGEKVKFDDAGLSLILQNGLETLRMENALTDVILCVDIQEFSCHRVVLAAASNYFRAMFCNDLKEKYEKRIIIKGVDAETMHTLLDYTYTSKALITKQNVQRVLEAANLFQFLRMVDACASFLTEALNPENCVGILRLADTHSLDSLKKQVQSYIIQNFVQILNSEEFLDLPVDTLHHILKSDDLYVTEEAQVFETVMSWVRHKPSERLCLLPYVLENVRLPLLDPWYFVETVEADPLIRQCPEVFPLLQEARMYHLSGNEIISERTKPRMHEFQSEVFMIIGGCTKDERFVAEVTCLDPLRRSRLEVAKLPLTEHELESENKKWVEFACVTLKNEVYISGGKETQHDVWKYNSSINKWIQIEYLNIGRWRHKMVVLGGKVYVIGGFDGLQRINNVETYDPFHNCWSEAAPLLVHVSSFAATSHKKKLYVIGGGPNGKLATDKTQCYDPSTNKWSLKAAMPVEAKCINAVSFRDRIYVVGGAMRALYAYSPLEDSWCLVTQLSHERASCGIAPCNNRLYITGGRDEKNEVIATVLCWDPEAQKLTEECVLPRGVSHHGSVTIRKSYTHIRRIVPGAVSV

SEQ ID NO: 42909 - protein, 610 aa, Homo sapiens
  Payload ID: 8733
  Gene Symbol: KLHL6
  Gene Name: kelch-like family member 6
  ENSP ID: ENSP00000433734
MGDVVEKSLEGPLAPSTDEPSQKTGDLVEILNGEKVKFDDAGLSLILQNGLETLRMENALTDVILCVDIQEFSCHRVVLAAASNYFRAMFCNDLKEKYEKRIIIKGVDAETMHTLLDYTYTSKALITKQNVQRVLEAANLFQFLRMVDACASFLTEALNPENCVGILRLADTHSLDSLKKQVQSYIIQNFVQILNSEEFLDLPVDTLHHILKSDDLYVTEEAQVFETVMSWVRHKPSERLCLLPYVLENVRLPLLDPWYFVETVEADPLIRQCPEVFPLLQEARMYHLSGNEIISERTKPRMHEFQSEVFMIIGGCTKDERFVAEVTCLDPLRRSRLEVAKLPLTEHELESENKKWVEFACVTLKNEVYISGGKETQHDVWKYNSSINKWIQIEYLNIGRWRHKMVVLGGKVYVIGGFDGLQRINNVETYDPFHNCWSEAAPLLVHVSSFAATSHKKKLYVIGGGPNGKLATDKTQCYDPSTNKWSLKAAMPVEAKCINAVSFRDRIYVVGGAMRALYAYSPLEDSWCLVTQLSHERASCGIAPCNNRLYITGGRDEKNEVIATVLCWDPEAQKLTEECVLPRGVSHHGSVTIRKSYTHIRRIVPGAVSV

SEQ ID NO: 42910 - protein, 166 aa, Homo sapiens
  Payload ID: 8734
  Gene Symbol: KLHL7
  Gene Name: kelch-like family member 7
  Uniprot ID: Q8IXQ5
  ENSP ID: ENSP00000323270
MAASGVEKSSKKKTEKKLAAREEAKLLAGFMGVMNNMRKQKTLCDVILMVQERKIPAHRVVLAAASHFFNLMFTTNMLESKSFEVELKDAEPDIIEQLVEFAYTARISVNSNNVQSLLDAANQYQIEPVKKMCVDFLKEQVDASNCLGEAEKVDQSLPECGMLFTV

SEQ ID NO: 42911 - protein, 586 aa, Homo sapiens
  Payload ID: 8734
  Gene Symbol: KLHL7
  Gene Name: kelch-like family member 7
  Uniprot ID: Q8IXQ5
  ENSP ID: ENSP00000343273
MAASGVEKSSKKKTEKKLAAREEAKLLAGFMGVMNNMRKQKTLCDVILMVQERKIPAHRVVLAAASHFFNLMFTTNMLESKSFEVELKDAEPDIIEQLVEFAYTARISVNSNNVQSLLDAANQYQIEPVKKMCVDFLKEQVDASNCLGISVLAECLDCPELKATADDFIHQHFTEVYKTDEFLQLDVKRVTHLLNQDTLTVRAEDQVYDAAVRWLKYDEPNRQPFMVDILAKVRFPLISKNFLSKTVQAEPLIQDNPECLKMVISGMRYHLLSPEDREELVDGTRPRRKKHDYRIALFGGSQPQSCRYFNPKDYSWTDIRCPFEKRRDAACVFWDNVVYILGGSQLFPIKRMDCYNVVKDSWYSKLGPPTPRDSLAACAAEGKIYTSGGSEVGNSALYLFECYDTRTESWHTKPSMLTQRCSHGMVEANGLIYVCGGSLGNNVSGRVLNSCEVYDPATETWTELCPMIEARKNHGLVFVKDKIFAVGGQNGLGGLDNVEYYDIKLNEWKMVSPMPWKGVTVKCAAVGSIVYVLAGFQGVGRLGHILEYNTETDKWVANSKVRAFPVTSCLICVVDTCGANEETLET

SEQ ID NO: 42912 - protein, 538 aa, Homo sapiens
  Payload ID: 8734
  Gene Symbol: KLHL7
  Gene Name: kelch-like family member 7
  Uniprot ID: Q8IXQ5
  ENSP ID: ENSP00000386263
MVQERKIPAHRVVLAAASHFFNLMFTTNMLESKSFEVELKDAEPDIIEQLVEFAYTARISVNSNNVQSLLDAANQYQIEPVKKMCVDFLKEQVDASNCLGISVLAECLDCPELKATADDFIHQHFTEVYKTDEFLQLDVKRVTHLLNQDTLTVRAEDQVYDAAVRWLKYDEPNRQPFMVDILAKVRFPLISKNFLSKTVQAEPLIQDNPECLKMVISGMRYHLLSPEDREELVDGTRPRRKKHDYRIALFGGSQPQSCRYFNPKDYSWTDIRCPFEKRRDAACVFWDNVVYILGGSQLFPIKRMDCYNVVKDSWYSKLGPPTPRDSLAACAAEGKIYTSGGSEVGNSALYLFECYDTRTESWHTKPSMLTQRCSHGMVEANGLIYVCGGSLGNNVSGRVLNSCEVYDPATETWTELCPMIEARKNHGLVFVKDKIFAVGGQNGLGGLDNVEYYDIKLNEWKMVSPMPWKGVTVKCAAVGSIVYVLAGFQGVGRLGHILEYNTETDKWVANSKVRAFPVTSCLICVVDTCGANEETLET

SEQ ID NO: 42913 - protein, 144 aa, Homo sapiens
  Payload ID: 8734
  Gene Symbol: KLHL7
  Gene Name: kelch-like family member 7
  Uniprot ID: Q8IXQ5
  ENSP ID: ENSP00000386999
MLGGTDCRTFLTSHINLKKTLCDVILMVQERKIPAHRVVLAAASHFFNLMFTTNMLESKSFEVELKDAEPDIIEQLVEFAYTARISVNSNNVQSLLDAANQYQIEPVKKMCVDFLKEQVDASNCLGEAEKVDQSLPECGMLFTV

SEQ ID NO: 42914 - protein, 93 aa, Homo sapiens
  Payload ID: 8734
  Gene Symbol: KLHL7
  Gene Name: kelch-like family member 7
  ENSP ID: ENSP00000404181
VRFPLISKNFLSKTVQAEPLIQDNPECLKMVISGMRYHLLSPEDREELVDGTRPRRKKHDYRIALFGGSQPQSCRYFNPKLKRDAYSSTRAWK

SEQ ID NO: 42915 - protein, 40 aa, Homo sapiens
  Payload ID: 8734
  Gene Symbol: KLHL7
  Gene Name: kelch-like family member 7
  ENSP ID: ENSP00000430351
MAASGVEKSSKKKTEKKLAAREEAKLLAGFMGVMNNMRKQ

SEQ ID NO: 42916 - protein, 620 aa, Homo sapiens
  Payload ID: 8735
  Gene Symbol: KLHL8
  Gene Name: kelch-like family member 8
  Uniprot ID: Q9P2G9
  ENSP ID: ENSP00000273963
MASDSMSSKQARNHITKGKRQQQHQQIKNRSSISDGDGEDSFIFEANEAWKDFHGSLLRFYENGELCDVTLKVGSKLISCHKLVLACVIPYFRAMFLSEMAEAKQTLIEIRDFDGDAIEDLVKFVYSSRLTLTVDNVQPLLYAACILQVELVARACCEYMKLHFHPSNCLAVRAFAESHNRIDLMDMADQYACDHFTEVVECEDFVSVSPQHLHKLLSSSDLNIENEKQVYNAAIKWLLANPQHHSKWLDETLAQVRLPLLPVDFLMGVVAKEQIVKQNLKCRDLLDEARNYHLHLSSRAVPDFEYSIRTTPRKHTAGVLFCVGGRGGSGDPFRSIECYSINKNSWFFGPEMNSRRRHVGVISVEGKVYAVGGHDGNEHLGSMEMFDPLTNKWMMKASMNTKRRGIALASLGGPIYAIGGLDDNTCFNDVERYDIESDQWSTVAPMNTPRGGVGSVALVNHVYAVGGNDGMASLSSVERYDPHLDKWIEVKEMGQRRAGNGVSKLHGCLYVVGGFDDNSPLSSVERYDPRSNKWDYVAALTTPRGGVGIATVMGKIFAVGGHNGNAYLNTVEAFDPVLNRWELVGSVSHCRAGAGVAVCSCLTSQIRDVGHGSNNVVDCM

SEQ ID NO: 42917 - protein, 437 aa, Homo sapiens
  Payload ID: 8735
  Gene Symbol: KLHL8
  Gene Name: kelch-like family member 8
  ENSP ID: ENSP00000408854
MASDSMSSKQARNHITKGKRQQQHQQIKNRSSISDGDGEDSFIFEANEAWKDFHGSLLRFYENGELCDVTLKVRLPLLPVDFLMGVVAKEQIVKQNLKCRDLLDEARNYHLHLSSRAVPDFEYSIRTTPRKHTAGVLFCVGGRGGSGDPFRSIECYSINKNSWFFGPEMNSRRRHVGVISVEGKVYAVGGHDGNEHLGSMEMFDPLTNKWMMKASMNTKRRGIALASLGGPIYAIGGLDDNTCFNDVERYDIESDQWSTVAPMNTPRGGVGSVALVNHVYAVGGNDGMASLSSVERYDPHLDKWIEVKEMGQRRAGNGVSKLHGCLYVVGGFDDNSPLSSVERYDPRSNKWDYVAALTTPRGGVGIATVMGKIFAVGGHNGNAYLNTVEAFDPVLNRWELVGSVSHCRAGAGVAVCSCLTSQIRDVGHGSNNVVDCM

SEQ ID NO: 42918 - protein, 620 aa, Homo sapiens; identical to SEQ ID NO: 42916
  Payload ID: 8735
  Gene Symbol: KLHL8
  Gene Name: kelch-like family member 8
  Uniprot ID: Q9P2G9
  ENSP ID: ENSP00000424131

SEQ ID NO: 42919 - protein, 77 aa, Homo sapiens
  Payload ID: 8735
  Gene Symbol: KLHL8
  Gene Name: kelch-like family member 8
  ENSP ID: ENSP00000426361
MASDSMSSKQARNHITKGKRQQQHQQIKNRSSISDGDGEDSFIFEANEAWKDFHGSLLRFYENGELCDVTLKVCCFV

SEQ ID NO: 42920 - protein, 544 aa, Homo sapiens
  Payload ID: 8735
  Gene Symbol: KLHL8
  Gene Name: kelch-like family member 8
  Uniprot ID: Q9P2G9
  ENSP ID: ENSP00000426451
MASDSMSSKQARNHITKGKRQQQHQQIKNRSSISDGDGEDSFIFEANEAWKDFHGSLLRFYENGELCDVTLKVELVARACCEYMKLHFHPSNCLAVRAFAESHNRIDLMDMADQYACDHFTEVVECEDFVSVSPQHLHKLLSSSDLNIENEKQVYNAAIKWLLANPQHHSKWLDETLAQVRLPLLPVDFLMGVVAKEQIVKQNLKCRDLLDEARNYHLHLSSRAVPDFEYSIRTTPRKHTAGVLFCVGGRGGSGDPFRSIECYSINKNSWFFGPEMNSRRRHVGVISVEGKVYAVGGHDGNEHLGSMEMFDPLTNKWMMKASMNTKRRGIALASLGGPIYAIGGLDDNTCFNDVERYDIESDQWSTVAPMNTPRGGVGSVALVNHVYAVGGNDGMASLSSVERYDPHLDKWIEVKEMGQRRAGNGVSKLHGCLYVVGGFDDNSPLSSVERYDPRSNKWDYVAALTTPRGGVGIATVMGKIFAVGGHNGNAYLNTVEAFDPVLNRWELVGSVSHCRAGAGVAVCSCLTSQIRDVGHGSNNVVDCM

SEQ ID NO: 42921 - protein, 617 aa, Homo sapiens
  Payload ID: 8736
  Gene Symbol: KLHL9
  Gene Name: kelch-like family member 9
  Uniprot ID: Q9P2J3
  ENSP ID: ENSP00000351933
MKVSLGNGEMGVSAHLQPCKAGTTRFFTSNTHSSVVLQGFDQLRIEGLLCDVTLVPGDGDEIFPVHRAMMASASDYFKAMFTGGMKEQDLMCIKLHGVNKVGLKKIIDFIYTAKLSLNMDNLQDTLEAASFLQILPVLDFCKVFLISGVSLDNCVEVGRIANTYNLIEVDKYVNNFILKNFPALLSTGEFLKLPFERLAFVLSSNSLKHCTELELFKAACRWLRLEDPRMDYAAKLMKNIRFPLMTPQDLINYVQTVDFMRTDNTCVNLLLEASNYQMMPYMQPVMQSDRTAIRSDSTHLVTLGGVLRQQLVVSKELRMYDERAQEWRSLAPMDAPRYQHGIAVIGNFLYVVGGQSNYDTKGKTAVDTVFRFDPRYNKWMQVASLNEKRTFFHLSALKGHLYAVGGRSAAGELATVECYNPRMNEWSYVAKMSEPHYGHAGTVYGGLMYISGGITHDTFQNELMCFDPDTDKWMQKAPMTTVRGLHCMCTVGDKLYVIGGNHFRGTSDYDDVLSCEYYSPTLDQWTPIAAMLRGQSDVGVAVFENKIYVVGGYSWNNRCMVEIVQKYDPEKDEWHKVFDLPESLGGIRACTLTVFPPEENPGSPSRESPLSAPSDHS

SEQ ID NO: 42922 - protein, 732 aa, Homo sapiens
  Payload ID: 8737
  Gene Symbol: KEL
  Gene Name: Kell blood group, metallo-endopeptidase
  Uniprot ID: P23276
  ENSP ID: ENSP00000347409
MEGGDQSEEEPRERSQAGGMGTLWSQESTPEERLPVEGSRPWAVARRVLTAILILGLLLCFSVLLFYNFQNCGPRPCETSVCLDLRDHYLASGNTSVAPCTDFFSFACGRAKETNNSFQELATKNKNRLRRILEVQNSWHPGSGEEKAFQFYNSCMDTLAIEAAGTGPLRQVIEELGGWRISGKWTSLNFNRTLRLLMSQYGHFPFFRAYLGPHPASPHTPVIQIDQPEFDVPLKQDQEQKIYAQIFREYLTYLNQLGTLLGGDPSKVQEHSSLSISITSRLFQFLRPLEQRRAQGKLFQMVTIDQLKEMAPAIDWLSCLQATFTPMSLSPSQSLVVHDVEYLKNMSQLVEEMLLKQRDFLQSHMILGLVVTLSPALDSQFQEARRKLSQKLRELTEQPPMPARPRWMKCVEETGTFFEPTLAALFVREAFGPSTRSAAMKLFTAIRDALITRLRNLPWMNEETQNMAQDKVAQLQVEMGASEWALKPELARQEYNDIQLGSSFLQSVLSCVRSLRARIVQSFLQPHPQHRWKVSPWDVNAYYSVSDHVVVFPAGLLQPPFFHPGYPRAVNFGAAGSIMAHELLHIFYQLLLPGGCLACDNHALQEAHLCLKRHYAAFPLPSRTSFNDSLTFLENAADVGGLAIALQAYSKRLLRHHGETVLPSLDLSPQQIFFRSYAQVMCRKPSPQDSHDTHSPPHLRVHGPLSSTPAFARYFRCARGALLNPSSRCQLW

SEQ ID NO: 42923 - protein, 186 aa, Homo sapiens
  Payload ID: 8737
  Gene Symbol: KEL
  Gene Name: Kell blood group, metallo-endopeptidase
  ENSP ID: ENSP00000418886
  MOD_RES (1)..(1): Any amino acid
XQKSCPHWRGGNEGGDQSEEEPRERSQAGGMGTLWSQESTPEERLPVEGSRPWAVARRVLTAILILGLLLCFSVLLFYNFQNCGPRPCETSVCLDLRDHYLASGNTSVAPCTDFFSFACGRAKETNNSFQELATKNKNRLRRILEVQNSWHPGSGEEKAFQFYNSCMDTLAIEAAGTGPLRQVIEE

SEQ ID NO: 42924 - protein, 184 aa, Homo sapiens
  Payload ID: 8737
  Gene Symbol: KEL
  Gene Name: Kell blood group, metallo-endopeptidase
  ENSP ID: ENSP00000419889
MEGGDQSEEEPRERSQAGGMGTLWSQESTPEERLPVEGSRPWAVARRVLTAILILGLLLCFSVLLFYNFQNCGPRPCETSVCLDLRDHYLASGNTSVAPCTDFFSFACGRAKETNNSFQELATKNKNRLRRILEVQNSWHPGSGEEKAFQFYNSCMDTLAIEAAGTGPLRQVIEEIFREYLTYL

SEQ ID NO: 42925 - protein, 204 aa, Homo sapiens
  Payload ID: 8737
  Gene Symbol: KEL
  Gene Name: Kell blood group, metallo-endopeptidase
  ENSP ID: ENSP00000420011
MGTLWSQESTPEERLPVEGSRPWAVARRVLTAILILGLLLCFSVLLFYNFQNCGPRPCETSVCLDLRDHYLASGNTSVAPCTDFFSFACGRAKETNNSFQELATKNKNRLRRILEVQNSWHPGSGEEKAFQFYNSCMDTLAIEAAGTGPLRQVIEELGGWRISGKWTSLNFNRTLRLLMSQYGHFPFFRAYLGPHPASPHTPVI

SEQ ID NO: 42926 - protein, 732 aa, Homo sapiens; identical to SEQ ID NO: 42922
  Payload ID: 8737
  Gene Symbol: KEL
  Gene Name: Kell blood group, metallo-endopeptidase
  Uniprot ID: P23276
  ENSP ID: ENSP00000477793

SEQ ID NO: 42927 - protein, 186 aa, Homo sapiens; identical to SEQ ID NO: 42923
  Payload ID: 8737
  Gene Symbol: KEL
  Gene Name: Kell blood group, metallo-endopeptidase
  ENSP ID: ENSP00000488333
  MOD_RES (1)..(1): Any amino acid

SEQ ID NO: 42928 - protein, 204 aa, Homo sapiens; identical to SEQ ID NO: 42925
  Payload ID: 8737
  Gene Symbol: KEL
  Gene Name: Kell blood group, metallo-endopeptidase
  ENSP ID: ENSP00000488564

SEQ ID NO: 42929 - protein, 184 aa, Homo sapiens; identical to SEQ ID NO: 42924
  Payload ID: 8737
  Gene Symbol: KEL
  Gene Name: Kell blood group, metallo-endopeptidase
  ENSP ID: ENSP00000488896

SEQ ID NO: 42930 - protein, 644 aa, Homo sapiens
  Payload ID: 8738
  Gene Symbol: KRT1
  Gene Name: keratin 1, type II
  Uniprot ID: P04264
  ENSP ID: ENSP00000252244
MSRQFSSRSGYRSGGGFSSGSAGIINYQRRTTSSSTRRSGGGGGRFSSCGGGGGSFGAGGGFGSRSLVNLGGSKSISISVARGGGRGSGFGGGYGGGGFGGGGFGGGGFGGGGIGGGGFGGFGSGGGGFGGGGFGGGGYGGGYGPVCPPGGIQEVTINQSLLQPLNVEIDPEIQKVKSREREQIKSLNNQFASFIDKVRFLEQQNQVLQTKWELLQQVDTSTRTHNLEPYFESFINNLRRRVDQLKSDQSRLDSELKNMQDMVEDYRNKYEDEINKRTNAENEFVTIKKDVDGAYMTKVDLQAKLDNLQQEIDFLTALYQAELSQMQTQISETNVILSMDNNRSLDLDSIIAEVKAQYEDIAQKSKAEAESLYQSKYEELQITAGRHGDSVRNSKIEISELNRVIQRLRSEIDNVKKQISNLQQSISDAEQRGENALKDAKNKLNDLEDALQQAKEDLARLLRDYQELMNTKLALDLEIATYRTLLEGEESRMSGECAPNVSVSVSTSHTTISGGGSRGGGGGGYGSGGSSYGSGGGSYGSGGGGGGGRGSYGSGGSSYGSGGGSYGSGGGGGGHGSYGSGSSSGGYRGGSGGGGGGSSGGRGSGGGSSGGSIGGRGSSSGGVKSSGGSSSVKFVSTTYSGVTR

SEQ ID NO: 42931 - protein, 584 aa, Homo sapiens
  Payload ID: 8739
  Gene Symbol: KRT10
  Gene Name: keratin 10, type I
  Uniprot ID: P13645
  ENSP ID: ENSP00000269576
MSVRYSSSKHYSSSRSGGGGGGGGCGGGGGVSSLRISSSKGSLGGGFSSGGFSGGSFSRGSSGGGCFGGSSGGYGGLGGFGGGSFRGSYGSSSFGGSYGGIFGGGSFGGGSFGGGSFGGGGFGGGGFGGGFGGGFGGDGGLLSGNEKVTMQNLNDRLASYLDKVRALEESNYELEGKIKEWYEKHGNSHQGEPRDYSKYYKTIDDLKNQILNLTTDNANILLQIDNARLAADDFRLKYENEVALRQSVEADINGLRRVLDELTLTKADLEMQIESLTEELAYLKKNHEEEMKDLRNVSTGDVNVEMNAAPGVDLTQLLNNMRSQYEQLAEQNRKDAEAWFNEKSKELTTEIDNNIEQISSYKSEITELRRNVQALEIELQSQLALKQSLEASLAETEGRYCVQLSQIQAQISALEEQLQQIRAETECQNTEYQQLLDIKIRLENEIQTYRSLLEGEGSSGGGGRGGGSFGGGYGGGSSGGGSSGGGHGGGHGGSSGGGYGGGSSGGGSSGGGYGGGSSSGGHGGSSSGGYGGGSSGGGGGGYGGGSSGGGSSSGGGYGGGSSSGGHKSSSSGSVGESSSKGPRY

SEQ ID NO: 42932 - protein, 494 aa, Homo sapiens
  Payload ID: 8740
  Gene Symbol: KRT12
  Gene Name: keratin 12, type I
  Uniprot ID: Q99456
  ENSP ID: ENSP00000251643
MDLSNNTMSLSVRTPGLSRRLSSQSVIGRPRGMSASSVGSGYGGSAFGFGASCGGGFSAASMFGSSSGFGGGSGSSMAGGLGAGYGRALGGGSFGGLGMGFGGSPGGGSLGILSGNDGGLLSGSEKETMQNLNDRLASYLDKVRALEEANTELENKIREWYETRGTGTADASQSDYSKYYPLIEDLRNKIISASIGNAQLLLQIDNARLAAEDFRMKYENELALRQGVEADINGLRRVLDELTLTRTDLEMQIESLNEELAYMKKNHEDELQSFRVGGPGEVSVEMDAAPGVDLTRLLNDMRAQYETIAEQNRKDAEAWFIEKSGELRKEISTNTEQLQSSKSEVTDLRRAFQNLEIELQSQLAMKKSLEDSLAEAEGDYCAQLSQVQQLISNLEAQLLQVRADAERQNVDHQRLLNVKARLELEIETYRRLLDGEAQGDGLEESLFVTDSKSQAQSTDSSKDPTKTRKIKTVVQEMVNGEVVSSQVQEIEELM

SEQ ID NO: 42933 - protein, 494 aa, Homo sapiens; identical to SEQ ID NO: 42932
  Payload ID: 8740
  Gene Symbol: KRT12
  Gene Name: keratin 12, type I
  Uniprot ID: Q99456
  ENSP ID: ENSP00000459559

SEQ ID NO: 42934 - protein, 458 aa, Homo sapiens
  Payload ID: 8741
  Gene Symbol: KRT13
  Gene Name: keratin 13, type I
  Uniprot ID: P13646
  ENSP ID: ENSP00000246635
MSLRLQSSSASYGGGFGGGSCQLGGGRGVSTCSTRFVSGGSAGGYGGGVSCGFGGGAGSGFGGGYGGGLGGGYGGGLGGGFGGGFAGGFVDFGACDGGLLTGNEKITMQNLNDRLASYLEKVRALEEANADLEVKIRDWHLKQSPASPERDYSPYYKTIEELRDKILTATIENNRVILEIDNARLAADDFRLKYENELALRQSVEADINGLRRVLDELTLSKTDLEMQIESLNEELAYMKKNHEEEMKEFSNQVVGQVNVEMDATPGIDLTRVLAEMREQYEAMAERNRRDAEEWFHTKSAELNKEVSTNTAMIQTSKTEITELRRTLQGLEIELQSQLSMKAGLENTVAETECRYALQLQQIQGLISSIEAQLSELRSEMECQNQEYKMLLDIKTRLEQEIATYRSLLEGQDAKMIGFPSSAGSVSPRSTSVTTTSSASVTTTSNASGRRTSDVRRP

SEQ ID NO: 42935 - protein, 420 aa, Homo sapiens
  Payload ID: 8741
  Gene Symbol: KRT13
  Gene Name: keratin 13, type I
  Uniprot ID: P13646
  ENSP ID: ENSP00000336604
MSLRLQSSSASYGGGFGGGSCQLGGGRGVSTCSTRFVSGGSAGGYGGGVSCGFGGGAGSGFGGGYGGGLGGGYGGGLGGGFGGGFAGGFVDFGACDGGLLTGNEKITMQNLNDRLASYLEKVRALEEANADLEVKIRDWHLKQSPASPERDYSPYYKTIEELRDKILTATIENNRVILEIDNARLAADDFRLKYENELALRQSVEADINGLRRVLDELTLSKTDLEMQIESLNEELAYMKKNHEEEMKEFSNQVVGQVNVEMDATPGIDLTRVLAEMREQYEAMAERNRRDAEEWFHTKSAELNKEVSTNTAMIQTSKTEITELRRTLQGLEIELQSQLSMKAGLENTVAETECRYALQLQQIQGLISSIEAQLSELRSEMECQNQEYKMLLDIKTRLEQEIATYRSLLEGQDAKKRQPP

SEQ ID NO: 42936 - protein, 165 aa, Homo sapiens
  Payload ID: 8741
  Gene Symbol: KRT13
  Gene Name: keratin 13, type I
  ENSP ID: ENSP00000466465
MQNLNDRLASYLEKVRALEEANADLEVKIRDWHLKQSPASPERDYSPYYKTIEELRDKILTATIENNRVILEIDNARLAADDFRLKYENELALRQSVEADINGLRRVLDELTLSKTDLEMQIESLNEELAYMKKNHEEEMKEFSNQVVGQVNVEMDATPGIDLTR

SEQ ID NO: 42937 - protein, 63 aa, Homo sapiens
  Payload ID: 8741
  Gene Symbol: KRT13
  Gene Name: keratin 13, type I
  ENSP ID: ENSP00000466525
MSLRLQSSSASYGGGFGGGSCQLGGGRGVSTCSTRSPCRTSTTAWLPTWRRCAPWRRPTLTWR

SEQ ID NO: 42938 - protein, 162 aa, Homo sapiens
  Payload ID: 8741
  Gene Symbol: KRT13
  Gene Name: keratin 13, type I
  ENSP ID: ENSP00000467833
MSLRLQSSSASYGGGFGGGSCQLGGGRGVSTCSTRFVSGGSAGGYGGGVSCGFGGGAGSGFGGGYGGGLGGGYGGGLGGGFGGGFAGGFVDFGACDGGLLTGNEKITMQNLNDRLASYLEKVRALEEANADLEMQIESLNEELAYMKKNHEEEMKEFSNQVV

SEQ ID NO: 42939 - protein, 415 aa, Homo sapiens
  Payload ID: 8741
  Gene Symbol: KRT13
  Gene Name: keratin 13, type I
  ENSP ID: ENSP00000468221
MSLRLQSSSASYGGGFGGGSCQLGGGRGVSTCSTRFVSGGSAGGYGGGVSCGFGGGAGSGFGGGYGGGLGGGYGGGLGGGFGGGFAGGFVDFGACDGGLLTGNEKITMQNLNDRLASYLEKVRALEEANADLEVKIRDWHLKQSPASPERDYSPYYKTIEELRDKILTATIENNRVILEIDNARLAADDFRLKYENELALRQSVEADINGLRRVLDELTLSKTDLEMQIESLNEELAYMKKNHEEEMKEFSNQVVGQVNVEMDATPGIDLTRVLAEMREQYEAMAERNRRDAEEWFHTKSAELNKEVSTNTAMIQTSKTEITELRRTLQGLEIELQSQLSMKAGLENTVAETECRYALQLQQIQGLISSIEAQLSELRSEMECQNQEYKMLLDIKTRLEQEIATYRSLLEGQDAK

SEQ ID NO: 42940 - protein, 472 aa, Homo sapiens
  Payload ID: 8742
  Gene Symbol: KRT14
  Gene Name: keratin 14, type I
  Uniprot ID: P02533
  ENSP ID: ENSP00000167586
MTTCSRQFTSSSSMKGSCGIGGGIGGGSSRISSVLAGGSCRAPSTYGGGLSVSSSRFSSGGACGLGGGYGGGFSSSSSSFGSGFGGGYGGGLGAGLGGGFGGGFAGGDGLLVGSEKVTMQNLNDRLASYLDKVRALEEANADLEVKIRDWYQRQRPAEIKDYSPYFKTIEDLRNKILTATVDNANVLLQIDNARLAADDFRTKYETELNLRMSVEADINGLRRVLDELTLARADLEMQIESLKEELAYLKKNHEEEMNALRGQVGGDVNVEMDAAPGVDLSRILNEMRDQYEKMAEKNRKDAEEWFFTKTEELNREVATNSELVQSGKSEISELRRTMQNLEIELQSQLSMKASLENSLEETKGRYCMQLAQIQEMIGSVEEQLAQLRCEMEQQNQEYKILLDVKTRLEQEIATYRRLLEGEDAHLSSSQFSSGSQSSRDVTSSSRQIRTKVMDVHDGKVVSTHEQVLRTKN

SEQ ID NO: 42941 - protein, 456 aa, Homo sapiens
  Payload ID: 8743
  Gene Symbol: KRT15
  Gene Name: keratin 15, type I
  Uniprot ID: P19012
  ENSP ID: ENSP00000254043
MTTTFLQTSSSTFGGGSTRGGSLLAGGGGFGGGSLSGGGGSRSISASSARFVSSGSGGGYGGGMRVCGFGGGAGSVFGGGFGGGVGGGFGGGFGGGDGGLLSGNEKITMQNLNDRLASYLDKVRALEEANADLEVKIHDWYQKQTPTSPECDYSQYFKTIEELRDKIMATTIDNSRVILEIDNARLAADDFRLKYENELALRQGVEADINGLRRVLDELTLARTDLEMQIEGLNEELAYLKKNHEEEMKEFSSQLAGQVNVEMDAAPGVDLTRVLAEMREQYEAMAEKNRRDVEAWFFSKTEELNKEVASNTEMIQTSKTEITDLRRTMQELEIELQSQLSMKAGLENSLAETECRYATQLQQIQGLIGGLEAQLSELRCEMEAQNQEYKMLLDIKTRLEQEIATYRSLLEGQDAKMAGIAIREASSGGGGSSSNFHINVEESVDGQVVSSHKREI

SEQ ID NO: 42942 - protein, 291 aa, Homo sapiens
  Payload ID: 8743
  Gene Symbol: KRT15
  Gene Name: keratin 15, type I
  ENSP ID: ENSP00000377544
MTGTRSRPQPAQNATTANTSRPLKSSGTRYENELALRQGVEADINGLRRVLDELTLARTDLEMQIEGLNEELAYLKKNHEEEMKEFSSQLAGQVNVEMDAAPGVDLTRVLAEMREQYEAMAEKNRRDVEAWFFSKTEELNKEVASNTEMIQTSKTEITDLRRTMQELEIELQSQLSMKAGLENSLAETECRYATQLQQIQGLIGGLEAQLSELRCEMEAQNQEYKMLLDIKTRLEQEIATYRSLLEGQDAKMAGIAIREASSGGGGSSSNFHINVEESVDGQVVSSHKREI

SEQ ID NO: 42943 - protein, 456 aa, Homo sapiens; identical to SEQ ID NO: 42941
  Payload ID: 8743
  Gene Symbol: KRT15
  Gene Name: keratin 15, type I
  Uniprot ID: P19012
  ENSP ID: ENSP00000377546

SEQ ID NO: 42944 - protein, 220 aa, Homo sapiens
  Payload ID: 8743
  Gene Symbol: KRT15
  Gene Name: keratin 15, type I
  ENSP ID: ENSP00000409282
MTGTRSRPQPAQNATTANTSRPLKSSGTRYENELALRQGVEADINGLRRVLDELTLARTDLEMQIEGLNEELAYLKKNHEEEMKEFSSQLAGQVNVEMDAAPGVDLTRVLAEMREQYEAMAEKNRRDVEAWFFSKTEELNKEVASNTEMIQTSKTEITDLRRTMQELEIELQSQLSMKAGLENSLAETECRYATQLQQIQGLIGGLEAQLSELRCEMEAQ

SEQ ID NO: 42945 - protein, 81 aa, Homo sapiens
  Payload ID: 8743
  Gene Symbol: KRT15
  Gene Name: keratin 15, type I
  ENSP ID: ENSP00000466687
MTGTRSRPQPAQNATTANTSRPLKSSGTRSWPPPSTTPGSSWRSTMPGWLRTTSGSSMRMSWPCARALRLTSTACAESWMS

SEQ ID NO: 42946 - protein, 49 aa, Homo sapiens
  Payload ID: 8743
  Gene Symbol: KRT15
  Gene Name: keratin 15, type I
  ENSP ID: ENSP00000467875
MTGTRSRPQPAQNATTANTSRPLKSSGTRLLLAGMFCRSMAVSKVCRRQ

SEQ ID NO: 42947 - protein, 473 aa, Homo sapiens
  Payload ID: 8744
  Gene Symbol: KRT16
  Gene Name: keratin 16, type I
  Uniprot ID: P08779
  ENSP ID: ENSP00000301653
MTTCSRQFTSSSSMKGSCGIGGGIGGGSSRISSVLAGGSCRAPSTYGGGLSVSSRFSSGGACGLGGGYGGGFSSSSSFGSGFGGGYGGGLGAGFGGGLGAGFGGGFAGGDGLLVGSEKVTMQNLNDRLASYLDKVRALEEANADLEVKIRDWYQRQRPSEIKDYSPYFKTIEDLRNKIIAATIENAQPILQIDNARLAADDFRTKYEHELALRQTVEADVNGLRRVLDELTLARTDLEMQIEGLKEELAYLRKNHEEEMLALRGQTGGDVNVEMDAAPGVDLSRILNEMRDQYEQMAEKNRRDAETWFLSKTEELNKEVASNSELVQSSRSEVTELRRVLQGLEIELQSQLSMKASLENSLEETKGRYCMQLSQIQGLIGSVEEQLAQLRCEMEQQSQEYQILLDVKTRLEQEIATYRRLLEGEDAHLSSQQASGQSYSSREVFTSSSSSSSRQTRPILKEQSSSSFSQGQSS

SEQ ID NO: 42948 - protein, 48 aa, Homo sapiens
  Payload ID: 8744
  Gene Symbol: KRT16
  Gene Name: keratin 16, type I
  ENSP ID: ENSP00000467105
MTTCSRQFTSSSSMKGSCGIGGGIGGGSSRISSVLAGGSCRAPSTYGG

SEQ ID NO: 42949 - protein, 162 aa, Homo sapiens
  Payload ID: 8744
  Gene Symbol: KRT16
  Gene Name: keratin 16, type I
  ENSP ID: ENSP00000467124
MQIEGLKEELAYLRKNHEEEMLALRGQTGGDVNVEMDAAPGVDLSRILNEMRDQYEQMAEKNRRDAETWFLSKTEELNKEVASNSELVQSSRSEVTELRRVLQGLEIELQSQLSMKASLENSLEETKGRYCMQLSQIQGLIGSVEEQLAQLRCEMEQQSQEY

SEQ ID NO: 42950 - protein, 432 aa, Homo sapiens
  Payload ID: 8745
  Gene Symbol: KRT17
  Gene Name: keratin 17, type I
  Uniprot ID: Q04695
  ENSP ID: ENSP00000308452
MTTSIRQFTSSSSIKGSSGLGGGSSRTSCRLSGGLGAGSCRLGSAGGLGSTLGGSSYSSCYSFGSGGGYGSSFGGVDGLLAGGEKATMQNLNDRLASYLDKVRALEEANTELEVKIRDWYQRQAPGPARDYSQYYRTIEELQNKILTATVDNANILLQIDNARLAADDFRTKFETEQALRLSVEADINGLRRVLDELTLARADLEMQIENLKEELAYLKKNHEEEMNALRGQVGGEINVEMDAAPGVDLSRILNEMRDQYEKMAEKNRKDAEDWFFSKTEELNREVATNSELVQSGKSEISELRRTMQALEIELQSQLSMKASLEGNLAETENRYCVQLSQIQGLIGSVEEQLAQLRCEMEQQNQEYKILLDVKTRLEQEIATYRRLLEGEDAHLTQYKKEPVTTRQVRTIVEEVQDGKVISSREQVHQTTR

SEQ ID NO: 42951 - protein, 349 aa, Homo sapiens
  Payload ID: 8745
  Gene Symbol: KRT17
  Gene Name: keratin 17, type I
  ENSP ID: ENSP00000441751
MAAALGVLMGCWLEVRRPPCRTSMANTELEVKIRDWYQRQAPGPARDYSQYYRTIEELQNKILTATVDNANILLQIDNARLAADDFRTKFETEQALRLSVEADINGLRRVLDELTLARADLEMQIENLKEELAYLKKNHEEEMNALRGQVGGEINVEMDAAPGVDLSRILNEMRDQYEKMAEKNRKDAEDWFFSKTEELNREVATNSELVQSGKSEISELRRTMQALEIELQSQLSMKASLEGNLAETENRYCVQLSQIQGLIGSVEEQLAQLRCEMEQQNQEYKILLDVKTRLEQEIATYRRLLEGEDAHLTQYKKEPVTTRQVRTIVEEVQDGKVISSREQVHQTTR

SEQ ID NO: 42952 - protein, 49 aa, Homo sapiens
  Payload ID: 8745
  Gene Symbol: KRT17
  Gene Name: keratin 17, type I
  ENSP ID: ENSP00000466166
MQIENLKEELAYLKKNHEEMNALRGQVGGEINVEMDAAPGVDLSRILNE

SEQ ID NO: 42953 - protein, 231 aa, Homo sapiens
  Payload ID: 8745
  Gene Symbol: KRT17
  Gene Name: keratin 17, type I
  ENSP ID: ENSP00000467418
GSSGLGGGSSRTSCRLSGGLGAGSCRLGSAGGLGSTLGGSSYSSCYSFGSGGGYGSSFGGVDGLLAGGEKATMQNLNDRLASYLDKVRALEEANTELEVKIRDWYQRQAPGPARDYSQYYRTIEELQNKILTATVDNANILLQIDNARLAADDFRTKVLDELTLARADLEMQIENLKEELAYLKKNHEEEMNALRGQVGGEINVEMDAAPGVDLSRILNEMRDQYEKMAEK

SEQ ID NO: 42954 - protein, 95 aa, Homo sapiens
  Payload ID: 8745
  Gene Symbol: KRT17
  Gene Name: keratin 17, type I
  ENSP ID: ENSP00000468672
MQIENLKEELAYLKKNHEEEMNALRGQVGGEINVEMDAAPGVDLSRILNEMRDQYEKMAEKNRKDAEDWFFSKTEELNREVATNSELVQSGKSEI

SEQ ID NO: 42955 - protein, 430 aa, Homo sapiens
  Payload ID: 8746
  Gene Symbol: KRT18
  Gene Name: keratin 18, type I
  Uniprot ID: P05783
  ENSP ID: ENSP00000373487
MSFTTRSTFSTNYRSLGSVQAPSYGARPVSSAASVYAGAGGSGSRISVSRSTSFRGGMGSGGLATGIAGGLAGMGGIQNEKETMQSLNDRLASYLDRVRSLETENRRLESKIREHLEKKGPQVRDWSHYFKIIEDLRAQIFANTVDNARIVLQIDNARLAADDFRVKYETELAMRQSVENDIHGLRKVIDDTNITRLQLETEIEALKEELLFMKKNHEEEVKGLQAQIASSGLTVEVDAPKSQDLAKIMADIRAQYDELARKNREELDKYWSQQIEESTTVVTTQSAEVGAAETTLTELRRTVQSLEIDLDSMRNLKASLENSLREVEARYALQMEQLNGILLHLESELAQTRAEGQRQAQEYEALLNIKVKLEAEIATYRRLLEDGEDFNLGDALDSSNSMQTIQKTTTRRIVDGKVVSETNDTKVLRH

SEQ ID NO: 42956 - protein, 430 aa, Homo sapiens; identical to SEQ ID NO: 42955
  Payload ID: 8746
  Gene Symbol: KRT18
  Gene Name: keratin 18, type I
  Uniprot ID: P05783
  ENSP ID: ENSP00000373489

SEQ ID NO: 42957 - protein, 391 aa, Homo sapiens
  Payload ID: 8746
  Gene Symbol: KRT18
  Gene Name: keratin 18, type I
  ENSP ID: ENSP00000447278
MSFTTRSTFSTNYRSLGSVQAPSYGARPVSSAASVYAGAGGSGSRISVSRSTSFRGGMGSGGLATGIAGGLAGMGGIQNEKETMQSLNDRLASYLDRVRSLETENRRLESKIREHLEKKGPQVRDWSHYFKIIEDLRAQIFANTVDNARIVLQIDNARLAADDFRVKYETELAMRQSVENDIHGLRKVIDDTNITRLQLETEIEALKEELLFMKKNHEEEVKGLQAQIASSGLTVEVDAPKSQDLAKIMADIRAQYDELARKNREELDKYWSQQIEESTTVVTTQSAEVGAAETTLTELRRTVQSLEIDLDSMRNLKASLENSLREVEARYALQMEQLNGILLHLESELAQTRAEGQRQAQEYEALLNIKVKLEAEIATYRRLLEDGEDFK

SEQ ID NO: 42958 - protein, 400 aa, Homo sapiens
  Payload ID: 8747
  Gene Symbol: KRT19
  Gene Name: keratin 19, type I
  Uniprot ID: P08727
  ENSP ID: ENSP00000355124
MTSYSYRQSSATSSFGGLGGGSVRFGPGVAFRAPSIHGGSGGRGVSVSSARFVSSSSSGAYGGGYGGVLTASDGLLAGNEKLTMQNLNDRLASYLDKVRALEAANGELEVKIRDWYQKQGPGPSRDYSHYYTTIQDLRDKILGATIENSRIVLQIDNARLAADDFRTKFETEQALRMSVEADINGLRRVLDELTLARTDLEMQIEGLKEELAYLKKNHEEEISTLRGQVGGQVSVEVDSAPGTDLAKILSDMRSQYEVMAEQNRKDAEAWFTSRTEELNREVAGHTEQLQMSRSEVTDLRRTLQGLEIELQSQLSMKAALEDTLAETEARFGAQLAHIQALISGIEAQLGDVRADSERQNQEYQRLMDIKSRLEQEIATYRSLLEGQEDHYNNLSASKVL

SEQ ID NO: 42959 - protein, 196 aa, Homo sapiens
  Payload ID: 8747
  Gene Symbol: KRT19
  Gene Name: keratin 19, type I
  ENSP ID: ENSP00000408759
MTSYSYRQSSATSSFGGLGGGSVRFGPGVAFRAPSIHGGSGGRGVSVSSARFVSSSSSGAYGGGYGGVLTASDGLLAGNEKLTMQNLNDRLASYLDKVRALEAANGELEILGATIENSRIVLQIDNARLAADDFRTKFETEQALRMSVEADINGLRRVLDELTLARTDLEMQIEGLKEELAYLKKNHEEEISTLRG

SEQ ID NO: 42960 - protein, 181 aa, Homo sapiens
  Payload ID: 8747
  Gene Symbol: KRT19
  Gene Name: keratin 19, type I
  ENSP ID: ENSP00000466625
MSVEADINGLRRVLDELTLARTDLEMQIEGLKEELAYLKKNHEEEISTLRGQVGGQVSVEVDSAPGTDLAKILSDMRSQYEVMAEQNRKDAEAWFTSRTEELNREVAGHTEQLQMSRSEVTDLRRTLQGLEIELQSQLSMKAALEDTLAETEARFGAQLAHIQALISGIEAQLGDVRADSE

SEQ ID NO: 42961 - protein, 639 aa, Homo sapiens
  Payload ID: 8748
  Gene Symbol: KRT2
  Gene Name: keratin 2, type II
  Uniprot ID: P35908
  ENSP ID: ENSP00000310861
MSCQISCKSRGRGGGGGGFRGFSSGSAVVSGGSRRSTSSFSCLSRHGGGGGGFGGGGFGSRSLVGLGGTKSISISVAGGGGGFGAAGGFGGRGGGFGGGSSFGGGSGFSGGGFGGGGFGGGRFGGFGGPGGVGGLGGPGGFGPGGYPGGIHEVSVNQSLLQPLNVKVDPEIQNVKAQEREQIKTLNNKFASFIDKVRFLEQQNQVLQTKWELLQQMNVGTRPINLEPIFQGYIDSLKRYLDGLTAERTSQNSELNNMQDLVEDYKKKYEDEINKRTAAENDFVTLKKDVDNAYMIKVELQSKVDLLNQEIEFLKVLYDAEISQIHQSVTDTNVILSMDNSRNLDLDSIIAEVKAQYEEIAQRSKEEAEALYHSKYEELQVTVGRHGDSLKEIKIEISELNRVIQRLQGEIAHVKKQCKNVQDAIADAEQRGEHALKDARNKLNDLEEALQQAKEDLARLLRDYQELMNVKLALDVEIATYRKLLEGEECRMSGDLSSNVTVSVTSSTISSNVASKAAFGGSGGRGSSSGGGYSSGSSSYGSGGRQSGSRGGSGGGGSISGGGYGSGGGSGGRYGSGGGSKGGSISGGGYGSGGGKHSSGGGSRGGSSSGGGYGSGGGGSSSVKGSSGEAFGSSVTFSFR

SEQ ID NO: 42962 - protein, 424 aa, Homo sapiens
  Payload ID: 8749
  Gene Symbol: KRT20
  Gene Name: keratin 20, type I
  Uniprot ID: P35900
  ENSP ID: ENSP00000167588
MDFSRRSFHRSLSSSLQAPVVSTVGMQRLGTTPSVYGGAGGRGIRISNSRHTVNYGSDLTGGGDLFVGNEKMAMQNLNDRLASYLEKVRTLEQSNSKLEVQIKQWYETNAPRAGRDYSAYYRQIEELRSQIKDAQLQNARCVLQIDNAKLAAEDFRLKYETERGIRLTVEADLQGLNKVFDDLTLHKTDLEIQIEELNKDLALLKKEHQEEVDGLHKHLGNTVNVEVDAAPGLNLGVIMNEMRQKYEVMAQKNLQEAKEQFERQTAVLQQQVTVNTEELKGTEVQLTELRRTSQSLEIELQSHLSMKESLEHTLEETKARYSSQLANLQSLLSSLEAQLMQIRSNMERQNNEYHILLDIKTRLEQEIATYRRLLEGEDVKTTEYQLSTLEERDIKKTRKIKTVVQEVVDGKVVSSEVKEVEENI

SEQ ID NO: 42963 - protein, 424 aa, Homo sapiens; identical to SEQ ID NO: 42962
  Payload ID: 8749
  Gene Symbol: KRT20
  Gene Name: keratin 20, type I
  Uniprot ID: P35900
  ENSP ID: ENSP00000460501

SEQ ID NO: 42964 - protein, 58 aa, Homo sapiens
  Payload ID: 8750
  Gene Symbol: KRT222
  Gene Name: keratin 222, type II
  ENSP ID: ENSP00000377613
MELSQLLNEIRANYEKILTRNQIETVLSTRIQVMISYRQAPSRIRRQSMSTQFLSRPL

SEQ ID NO: 42965 - protein, 295 aa, Homo sapiens
  Payload ID: 8750
  Gene Symbol: KRT222
  Gene Name: keratin 222, type II
  Uniprot ID: Q8N1A0
  ENSP ID: ENSP00000377616
MELSQLLNEIRANYEKILTRNQIETVLSTRIQLEEDISKKMDKDEEALKAAQAELKEARRQWHHLQVEIESLHAVERGLENSLHASEQHYQMQLQDLETVIEGLEKELQEVRRGIEKQLQEHEMLLNTKMRLEQEIATYRHLLEKEEIRYYGCIQGGKKDKKPTTSRVGFVLPSAIINEISFTTKVPQKYENENVETVTKQAILNGSIVKESTEAHGTIQTEKVDEVIKEWEGSFFKDNPRLRKKSVSLRFDLHLAATDEGCLETKQDNLPDIEVRLIMRRSCSIPSIKPPSTAN

SEQ ID NO: 42966 - protein, 58 aa, Homo sapiens; identical to SEQ ID NO: 42964
  Payload ID: 8750
  Gene Symbol: KRT222
  Gene Name: keratin 222, type II
  ENSP ID: ENSP00000463865

SEQ ID NO: 42967 - protein, 58 aa, Homo sapiens; identical to SEQ ID NO: 42964
  Payload ID: 8750
  Gene Symbol: KRT222
  Gene Name: keratin 222, type II
  ENSP ID: ENSP00000464647

SEQ ID NO: 42968 - protein, 422 aa, Homo sapiens
  Payload ID: 8751
  Gene Symbol: KRT23
  Gene Name: keratin 23, type I
  Uniprot ID: Q9C075
  ENSP ID: ENSP00000209718
MNSGHSFSQTPSASFHGAGGGWGRPRSFPRAPTVHGGAGGARISLSFTTRSCPPPGGSWGSGRSSPLLGGNGKATMQNLNDRLASYLEKVRALEEANMKLESRILKWHQQRDPGSKKDYSQYEENITHLQEQIVDGKMTNAQIILLIDNARMAVDDFNLKYENEHSFKKDLEIEVEGLRRTLDNLTIVTTDLEQEVEGMRKELILMKKHHEQEMEKHHVPSDFNVNVKVDTGPREDLIKVLEDMRQEYELIIKKKHRDLDTWYKEQSAAMSQEAASPATVQSRQGDIHELKRTFQALEIDLQTQYSTKSALENMLSETQSRYSCKLQDMQEIISHYEEELTQLRHELERQNNEYQVLLGIKTHLEKEITTYRRLLEGESEGTREESKSSMKVSATPKIKAITQETINGRLVLCQVNEIQKHA

SEQ ID NO: 42969 - protein, 285 aa, Homo sapiens
  Payload ID: 8751
  Gene Symbol: KRT23
  Gene Name: keratin 23, type I
  Uniprot ID: Q9C075
  ENSP ID: ENSP00000414056
MTNAQIILLIDNARMAVDDFNLKYENEHSFKKDLEIEVEGLRRTLDNLTIVTTDLEQEVEGMRKELILMKKHHEQEMEKHHVPSDFNVNVKVDTGPREDLIKVLEDMRQEYELIIKKKHRDLDTWYKEQSAAMSQEAASPATVQSRQGDIHELKRTFQALEIDLQTQYSTKSALENMLSETQSRYSCKLQDMQEIISHYEEELTQLRHELERQNNEYQVLLGIKTHLEKEITTYRRLLEGESEGTREESKSSMKVSATPKIKAITQETINGRLVLCQVNEIQKHA

SEQ ID NO: 42970 - protein, 422 aa, Homo sapiens; identical to SEQ ID NO: 42968
  Payload ID: 8751
  Gene Symbol: KRT23
  Gene Name: keratin 23, type I
  Uniprot ID: Q9C075
  ENSP ID: ENSP00000459021

SEQ ID NO: 42971 - protein, 285 aa, Homo sapiens; identical to SEQ ID NO: 42969
  Payload ID: 8751
  Gene Symbol: KRT23
  Gene Name: keratin 23, type I
  Uniprot ID: Q9C075
  ENSP ID: ENSP00000460637

SEQ ID NO: 42972 - protein, 37 aa, Homo sapiens
  Payload ID: 8751
  Gene Symbol: KRT23
  Gene Name: keratin 23, type I
  ENSP ID: ENSP00000462335
MTNAQIILLIDNARMAVDDFNLKKWRSIMCQVTSMSM

SEQ ID NO: 42973 - protein, 149 aa, Homo sapiens
  Payload ID: 8751
  Gene Symbol: KRT23
  Gene Name: keratin 23, type I
  ENSP ID: ENSP00000462422
GKATMQNLNDRLASYLEKVRALEEANMKLESRILKWHQQRDPGSKKDYSQYEENITHLQEQIVDGKMTNAQIILLIDNARMAVDDFNLKYENEHSFKKDLEIEVEGLRRTLDNLTIVTTDLEQEVEGMRKELILMKKHHEQVQLPRNTC

SEQ ID NO: 42974 - protein, 37 aa, Homo sapiens; identical to SEQ ID NO: 42972
  Payload ID: 8751
  Gene Symbol: KRT23
  Gene Name: keratin 23, type I
  ENSP ID: ENSP00000462542

SEQ ID NO: 42975 - protein, 37 aa, Homo sapiens; identical to SEQ ID NO: 42972
  Payload ID: 8751
  Gene Symbol: KRT23
  Gene Name: keratin 23, type I
  ENSP ID: ENSP00000463052

SEQ ID NO: 42976 - protein, 149 aa, Homo sapiens; identical to SEQ ID NO: 42973
  Payload ID: 8751
  Gene Symbol: KRT23
  Gene Name: keratin 23, type I
  ENSP ID: ENSP00000464051

SEQ ID NO: 42977 - protein, 37 aa, Homo sapiens; identical to SEQ ID NO: 42972
  Payload ID: 8751
  Gene Symbol: KRT23
  Gene Name: keratin 23, type I
  ENSP ID: ENSP00000464548

SEQ ID NO: 42978 - protein, 52 aa, Homo sapiens
  Payload ID: 8751
  Gene Symbol: KRT23
  Gene Name: keratin 23, type I
  ENSP ID: ENSP00000467393
MNSGHSFSQTPSASFHGAGGGWGRPRSFPRAPTVHGGAGGARISLSFTTRSC

SEQ ID NO: 42979 - protein, 52 aa, Homo sapiens; identical to SEQ ID NO: 42978
  Payload ID: 8751
  Gene Symbol: KRT23
  Gene Name: keratin 23, type I
  ENSP ID: ENSP00000468798

SEQ ID NO: 42980 - protein, 525 aa, Homo sapiens
  Payload ID: 8752
  Gene Symbol: KRT24
  Gene Name: keratin 24, type I
  Uniprot ID: Q2M2I5
  ENSP ID: ENSP00000264651
MSCSSRASSSRAGGSSSARVSAGGSSFSSGSRCGLGGSSAQGFRGGASSCSLSGGSSGAFGGSFGGGFGSCSVGGGFGGASGSGTGFGGGSSFGGVSGFGRGSGFCGSSRFSSGATGGFYSYGGGMGGGVGDGGLFSGGEKQTMQNLNDRLANYLDKVRALEEANTDLENKIKEWYDKYGPGSGDGGSGRDYSKYYSIIEDLRNQIIAATVENAGIILHIDNARLAADDFRLKYENELCLRQSVEADINGLRKVLDDLTMTRSDLEMQIESFTEELAYLRKNHEEEMKNMQGSSGGEVTVEMNAAPGTDLTKLLNDMRAQYEELAEQNRREAEERFNKQSASLQAQISTDAGAATSAKNEITELKRTLQALEIELQSQLAMKSSLEGTLADTEAGYVAQLSEIQTQISALEEEICQIWGETKCQNAEYKQLLDIKTRLEVEIETYRRLLDGEGGGSSFAEFGGRNSGSVNMGSRDLVSGDSRSGSCSGQGRDSSKTRVTKTIVEELVDGKVVSSQVSSISEVKVK

SEQ ID NO: 42981 - protein, 450 aa, Homo sapiens
  Payload ID: 8753
  Gene Symbol: KRT25
  Gene Name: keratin 25, type I
  Uniprot ID: Q7Z3Z0
  ENSP ID: ENSP00000310573
MSLRLSSASRRSCPRPTTGSLRLYGGGTSFGTGNSCGISGIGSGFSSAFGGSSSGGNTGGGNPCAGFTVNERGLLSGNEKVTMQNLNDRLASYLDSVHALEEANADLEQKIKGWYEKFGPGSCRGLDHDYSRYFPIIDDLKNQIIASTTSNANAVLQIDNARLTADDFRLKYENELALHQSVEADVNGLRRVLDEITLCRTDLEIQYETLSEEMTYLKKNHKEEMQVLQCAAGGNVNVEMNAAPGVDLTVLLNNMRAEYEALAEQNRRDAEAWFNEKSASLQQQISEDVGATTSARNELTEMKRTLQTLEIELQSLLATKHSLECSLTETESNYCAQLAQIQAQIGALEEQLHQVRTETEGQKLEYEQLLDIKLHLEKEIETYCLLIGGDDGACKSGGYKSKDYGSGNVGSQVKDPAKAIVVKKVLEEVDQRSKILTTRLHSLEEKSQSN

SEQ ID NO: 42982 - protein, 468 aa, Homo sapiens
  Payload ID: 8754
  Gene Symbol: KRT26
  Gene Name: keratin 26, type I
  Uniprot ID: Q7Z3Y9
  ENSP ID: ENSP00000334798
MSFRLSGGSRRICSRTGSGRLSGGGTGFVAGNVCVGSGARSSFSCTLEGISSGGSFCNSGGGLGSGACAGFLGNEHSLLSGNEKVTMQNLNDRLASYLDHVHALEEANADLEQKIKGWYEKCEPGSSREHDHDYSRYFSVIEDLKRQIISATICNASIVLQNDNARLTADDFRLKYENELALHHSVEADTSGLRRVLDELTLCTTDLEIQCETLSEELTYLKKSHEEEMEVLQYTAGGNVNVEMNATPGVDLTVLLNNMRAEYEDLAEQNRKDAEAWFNERSATLQQQISDHEGAATAARNELTELKRNLQTLEIELQSLMAVKHSYECSLAETEGNYCNQLQQIQDQIGVMEEQLQQIRTETEGQKLEYEQLLDVKIFLEKEIDIYCNLLDGEERKSKSTCYKSKGYRPVNSGNQAKDSTEETIVKTVVEELDQIGNLLSLRVHSVEEKSSKISNITVEQRVPSKAP

SEQ ID NO: 42983 - protein, 459 aa, Homo sapiens
  Payload ID: 8755
  Gene Symbol: KRT27
  Gene Name: keratin 27, type I
  Uniprot ID: Q7Z3Y8
  ENSP ID: ENSP00000301656
MSVRFSSTSRRLGSCGGTGSVRLSSGGAGFGAGNTCGVPGIGSGFSCAFGGSSSAGGYGGGLGGGSASCAAFTGNEHGLLSGNEKVTMQNLNDRLASYLENVRALEEANADLEQKIKGWYEKFGPGSCRGLDHDYSRYFPIIDELKNQIISATTSNAHVVLQNDNARLTADDFRLKFENELALHQSVEADINGLRRVLDELTLCRTDLEIQLETLSEELAYLKKNHEEEMKALQCAAGGNVNVEMNAAPGVDLTVLLNNMRAEYEALAEQNRRDAEAWFNEKSASLQQQISDDAGATTSARNELIEMKRTLQTLEIELQSLLATKHSLECSLTETESNYCAQLAQIQAQIGALEEQLHQVRTETEGQKLEYEQLLDIKVHLEKEIETYCLLIDGEDGSCSKSKGYGGPGNQTKDSSKTTIVKTVVEEIDPRGKVLSSRVHTVEEKSTKVNNKNEQRVSS

SEQ ID NO: 42984 - protein, 464 aa, Homo sapiens
  Payload ID: 8756
  Gene Symbol: KRT28
  Gene Name: keratin 28, type I
  Uniprot ID: Q7Z3Y7
  ENSP ID: ENSP00000305263
MSLQFSNGSRHVCLRSGAGSVRPLNGGAGFAGSSACGGSVAGSEFSCALGGGLGSVPGGSHAGGALGNAACIGFAGSEGGLLSGNEKVTMQNLNDRLASYLDNVRALEEANAELERKIKGWYEKYGPGSCRGLDHDYSRYHLTIEDLKNKIISSTTTNANVILQIDNARLAADDFRLKYENELTLHQNVEADINGLRRVLDELTLCRTDQELQYESLSEEMTYLKKNHEEEMKALQCAAGGNVNVEMNAAPGVDLAVLLNNMRAEYEALAEQNRKDAEAWFNEKSASLQQQISHDSGAATFARSQLTEMRRTLQTLEIQLQSLMATKHSLECSLTETESNYCTQLAQIQAQIGALEEQLHQVRTETEGQKLEYEHLLDVKVHLEKEIETYCRLIDGDGNSCSKSKGFGSGSPGNSSKDLSKTTLVKTVVEELDQRGKVLSSRIHSIEEKTSKMTNGKTEQRVPF

SEQ ID NO: 42985 - protein, 628 aa, Homo sapiens
  Payload ID: 8757
  Gene Symbol: KRT3
  Gene Name: keratin 3, type II
  Uniprot ID: P12035
  ENSP ID: ENSP00000413479
MSRQASKTSGGGSQGFSGRSAVVSGSSRMSCVAHSGGAGGGAYGFRSGAGGFGSRSLYNLGGNKSISISVAAGGSRAGGFGGGRSSCAFAGGYGGGFGSGYGGGFGGGFGGGRGMGGGFGGAGGFGGAGGFGGAGGFGGPGGFGGSGGFGGPGSLGSPGGFGPGGFPGGIQEVTINQSLLQPLNVEIDPQIGQVKAQEREQIKTLNNKFASFIDKVRFLEQQNKVLETKWNLLQQQGTSSISGTNNLEPLFENHINYLRSYLDNILGERGRLDSELKNMEDLVEDFKKKYEDEINKRTAAENEFVTLKKDVDSAYMNKVELQAKVDALIDEIDFLRTLYDAELSQMQSHISDTSVVLSMDNNRSLDLDSIIAEVRAQYEDIAQRSKAEAEALYQTKLGELQTTAGRHGDDLRNTKSEIIELNRMIQRLRAEIEGVKKQNANLQTAIAEAEQHGEMALKDANAKLQELQAALQQAKDDLARLLRDYQELMNVKLALDVEIATYRKLLEGEEYRMSGECPSAVSISVVSSSTTSASAGGYGGGYGGGMGGGLGGGFSAGGGSGSGFGRGGGGGIGGGFGGGSSGFSGGSGFGSISGARYGVSGGGFSSASNRGGSIKFSQSSQSSQRYSR

SEQ ID NO: 42986 - protein, 416 aa, Homo sapiens [sequence omitted]

SEQ ID NO: 42987 - protein, 416 aa, Homo sapiens [sequence omitted]

SEQ ID NO: 42988 - protein, 448 aa, Homo sapiens
  Payload ID: 8759
  Gene Symbol: KRT32
  Gene Name: keratin 32, type I
  Uniprot ID: Q14532
  ENSP ID: ENSP00000225899
MTSSCCVTNNLQASLKSCPRPASVCSSGVNCRPELCLGYVCQPMACLPSVCLPTTFRPASCLSKTYLSSSCQAASGISGSMGPGSWYSEGAFNGNEKETMQFLNDRLASYLTRVRQLEQENAELESRIQEASHSQVLTMTPDYQSHFRTIEELQQKILCTKAENARMVVNIDNAKLAADDFRAKYEAELAMRQLVEADINGLRRILDDLTLCKADLEAQVESLKEELMCLKKNHEEEVGSLRCQLGDRLNIEVDAAPPVDLTRVLEEMRCQYEAMVEANRRDVEEWFNMQMEELNQQVATSSEQLQNYQSDIIDLRRTVNTLEIELQAQHSLRDSLENTLTESEARYSSQLAQMQCMITNVEAQLAEIRADLERQNQEYQVLLDVRARLEGEINTYRSLLENEDCKLPCNPCSTPSCTTCVPSPCVPRTVCVPRTVGMPCSPCPQGRY

SEQ ID NO: 42989 - protein, 404 aa, Homo sapiens
  Payload ID: 8760
  Gene Symbol: KRT33A
  Gene Name: keratin 33A, type I
  Uniprot ID: O76009
  ENSP ID: ENSP00000007735
MSYSCGLPSLSCRTSCSSRPCVPPSCHGCTLPGACNIPANVSNCNWFCEGSFNGSEKETMQFLNDRLASYLEKVRQLERDNAELENLIRERSQQQEPLVCASYQSYFKTIEELQQKILCSKSENARLVVQIDNAKLASDDFRTKYETELSLRQLVESDINGLRRILDELTLCRSDLEAQVESLKEELLCLKQNHEQEVNTLRCQLGDRLNVEVDAAPTVDLNQVLNETRSQYEALVETNRREVEQWFATQTEELNKQVVSSSEQLQSYQAEIIELRRTVNALEIELQAQHNLRDSLENTLTESEARYSSQLSQVQRLITNVESQLAEIRSDLERQNQEYQVLLDVRARLECEINTYRSLLESEDCKLPSNPCATTNACDKSTGPCISNPCGLRARCGPCNTFGY

SEQ ID NO: 42990 - protein, 404 aa, Homo sapiens; identical to SEQ ID NO: 42989
  Payload ID: 8760
  Gene Symbol: KRT33A
  Gene Name: keratin 33A, type I
  Uniprot ID: O76009
  ENSP ID: ENSP00000461221

SEQ ID NO: 42991 - protein, 404 aa, Homo sapiens
  Payload ID: 8761
  Gene Symbol: KRT33B
  Gene Name: keratin 33B, type I
  Uniprot ID: Q14525
  ENSP ID: ENSP00000251646
MPYNFCLPSLSCRTSCSSRPCVPPSCHGYTLPGACNIPANVSNCNWFCEGSFNGSEKETMQFLNDRLASYLEKVRQLERDNAELENLIRERSQQQEPLLCPSYQSYFKTIEELQQKILCSKSENARLVVQIDNAKLAADDFRTKYQTEQSLRQLVESDINSLRRILDELTLCRSDLEAQMESLKEELLSLKQNHEQEVNTLRCQLGDRLNVEVDAAPAVDLNQVLNETRNQYEALVETNRREVEQWFATQTEELNKQVVSSSEQLQSYQAEIIELRRTVNALEIELQAQHNLRYSLENTLTESEARYSSQLSQVQSLITNVESQLAEIRSDLERQNQEYQVLLDVRARLECEINTYRSLLESEDCKLPSNPCATTNACEKPIGSCVTNPCGPRSRCGPCNTFGY

SEQ ID NO: 42992 - protein, 404 aa, Homo sapiens; identical to SEQ ID NO: 42991
  Payload ID: 8761
  Gene Symbol: KRT33B
  Gene Name: keratin 33B, type I
  Uniprot ID: Q14525
  ENSP ID: ENSP00000459509

SEQ ID NO: 42993 - protein, 436 aa, Homo sapiens
  Payload ID: 8762
  Gene Symbol: KRT34
  Gene Name: keratin 34, type I
  Uniprot ID: O76011
  ENSP ID: ENSP00000377570
MLYAKPPPTINGIKGLQRKERLKPAHIHLQQLTCFSITCSSTMSYSCCLPSLGCRTSCSSRPCVPPSCHGYTLPGACNIPANVSNCNWFCEGSFNGSEKETMQFLNDRLASYLEKVRQLERDNAELEKLIQERSQQQEPLLCPSYQSYFKTIEELQQKILCAKAENARLVVNIDNAKLASDDFRSKYQTEQSLRLLVESDINSIRRILDELTLCKSDLESQVESLREELICLKKNHEEEVNTLRSQLGDRLNVEVDTAPTVDLNQVLNETRSQYEALVEINRREVEQWFATQTEELNKQVVSSSEQLQSCQAEIIELRRTVNALEIELQAQHNLRDSLENTLTESEAHYSSQLSQVQSLITNVESQLAEIRCDLERQNQEYQVLLDVRARLECEINTYRSLLESEDCKLPCNPCATTNASGNSCGPCGTSQKGCCN

SEQ ID NO: 42994 - protein, 436 aa, Homo sapiens
  Payload ID: 8762
  Gene Symbol: KRT34
  Gene Name: keratin 34, type I
  ENSP ID: ENSP00000458934
MLYAKPPPTINGIKGLQRKERLKPAHIHLQQLTCFSITCSSTMSYSCCLPSLGCRTSCSSRPCVPPSCHGYTLPGACNIPANVSNCNWFCEGSFNGSEKETMQFLNDRLASYLEKVRQLERDNAELEKLIQERSQQQEPLLCPSYQSYFKTIEELQQKILCAKAENARLVVNIDNAKLASDDFRSKYQTEQSLRLLVESDINSIRRILDELTLCKSDLESQVESLREELICLKKNHEEEVNTLRSQLGDRLNVEVDTAPTVDLNQVLNETRSQYEALVETNRREVEQWFATQTEELNKQVVSSSEQLQSCQAEIIELRRTVNALEIELQAQHNLRDSLENTLTESEARYSSQLSQVQSLITNVESQLAEIRCDLERQNQEYQVLLDVRARLECEINTYRSLLESEDCKLPCNPCATTNASGNSCGPCGTSQKGCCN

SEQ ID NO: 42995 - protein, 425 aa, Homo sapiens
  Payload ID: 8763
  Gene Symbol: KRT35
  Gene Name: keratin 35, type I
  ENSP ID: ENSP00000246639
MYSSSSCKLPSLSPVARSFSACSVGLGRSSYRATSCLPALCLPAGGFATSYSGGGGWFGEGILTGNEKETMQSLNDRLAGYLEKVRQLEQENASLESRIREWCEQQVPYMCPDYQSYFRTIEELQKKTLCSKAENARLVVEIDNAKLAADDFRTKYETEVSLRQLVESDINGLRRILDDLTLCKSDLEAQVESLKEELLCLKKNHEEEVNSLRCQLGDRLNVEVDAAPPVDLNRVLEEMRCQYETLVENNRRDAEDWLDTQSEELNQQVVSSSEQLQSCQAEIIELRRTVNALEIELQAQHSMRDALESTLAETEARYSSQLAQMQCMITNVEAQLAEIRADLERQNQEYQVLLDVRARLECEINTYRGLLESEDSKLPCNPCAPDYSPSKSCLPCLPAASCGPSAARTNCSPRPICVPCPGGRF

SEQ ID NO: 42996 - protein, 455 aa, Homo sapiens
  Payload ID: 8763
  Gene Symbol: KRT35
  Gene Name: keratin 35, type I
  Uniprot ID: Q92764
  ENSP ID: ENSP00000377558
MASKCLKAGFSSGSLKSPGGASGGSTRVSAMYSSSSCKLPSLSPVARSFSACSVGLGRSSYRATSCLPALCLPAGGFATSYSGGGGWFGEGILTGNEKETMQSLNDRLAGYLEKVRQLEQENASLESRIREWCEQQVPYMCPDYQSYFRTIEELQKKTLCSKAENARLVVEIDNAKLAADDFRTKYETEVSLRQLVESDINGLRRILDDLTLCKSDLEAQVESLKEELLCLKKNHEEEVNSLRCQLGDRLNVEVDAAPPVDLNRVLEEMRCQYETLVENNRRDAEDWLDTQSEELNQQVVSSSEQLQSCQAEIIELRRTVNALEIELQAQHSMRDALESTLAETEARYSSQLAQMQCMITNVEAQLAEIRADLERQNQEYQVLLDVRARLECEINTYRGLLESEDSKLPCNPCAPDYSPSKSCLPCLPAASCGPSAARTNCSPRPICVPCPGGRF

SEQ ID NO: 42997 - protein, 467 aa, Homo sapiens
  Payload ID: 8764
  Gene Symbol: KRT36
  Gene Name: keratin 36, type I
  Uniprot ID: O76013
  ENSP ID: ENSP00000329165
MATQTCTPTFSTGSIKGLCGTAGGISRVSSIRSVGSCRVPSLAGAAGYISSARSGLSGLGSCLPGSYLSSECHTSGFVGSGGWFCEGSFNGSEKETMQFLNDRLANYLEKVRQLERENAELESRIQEWYEFQIPYICPDYQSYFKTIEDFQQKILLTKSENARLVLQIDNAKLAADDFRTKYETELSLRQLVEADINGLRRILDELTLCKADLEAQVESLKEELMCLKKNHEEEVSVLRCQLGDRLNVEVDAAPPVDLNKILEDMRCQYEALVENNRRDVEAWFNTQTEELNQQVVSSSEQLQCCQTEIIELRRTVNALEIELQAQHSMRNSLESTLAETEARYSSQLAQMQCLISNVEAQLSEIRCDLERQNQEYQVLLDVKARLEGEIATYRHLLEGEDCKLPPQPCATACKPVIRVPSVPPVPCVPSVPCTPAPQVGTQIRTITEEIRDGKVISSREHVQSRPL

SEQ ID NO: 42998 - protein, 417 aa, Homo sapiens
  Payload ID: 8764
  Gene Symbol: KRT36
  Gene Name: keratin 36, type I
  Uniprot ID: O76013
  ENSP ID: ENSP00000377555
MLRSGLSGLGSCLPGSYLSSECHTSGFVGSGGWFCEGSFNGSEKETMQFLNDRLANYLEKVRQLERENAELESRIQEWYEFQIPYICPDYQSYFKTIEDFQQKILLTKSENARLVLQIDNAKLAADDFRTKYETELSLRQLVEADINGLRRILDELTLCKADLEAQVESLKEELMCLKKNHEEEVSVLRCQLGDRLNVEVDAAPPVDLNKILEDMRCQYEALVENNRRDVEAWFNTQTEELNQQVVSSSEQLQCCQTEIIELRRTVNALEIELQAQHSMRNSLESTLAETEARYSSQLAQMQCLISNVEAQLSEIRCDLERQNQEYQVLLDVKARLEGEIATYRHLLEGEDCKLPPQPCATACKPVIRVPSVPPVPCVPSVPCTPAPQVGTQIRTITEEIRDGKVISSREHVQSRPL

SEQ ID NO: 42999 - protein, 449 aa, Homo sapiens
  Payload ID: 8765
  Gene Symbol: KRT37
  Gene Name: keratin 37, type I
  Uniprot ID: O76014
  ENSP ID: ENSP00000225550
MTSFYSTSSCPLGCTMAPGARNVFVSPIDVGCQPVAEANAASMCLLANVAHANRVRVGSTPLGRPSLCLPPTSHTACPLPGTCHIPGNIGICGAYGKNTLNGHEKETMKFLNDRLANYLEKVRQLEQENAELETTLLERSKCHESTVCPDYQSYFRTIEELQQKILCSKAENARLIVQIDNAKLAADDFRIKLESERSLHQLVEADKCGTQKLLDDATLAKADLEAQQESLKEEQLSLKSNHEQEVKILRSQLGEKFRIELDIEPTIDLNRVLGEMRAQYEAMVETNHQDVEQWFQAQSEGISLQAMSCSEELQCCQSEILELRCTVNALEVERQAQHTLKDCLQNSLCEAEDRYGTELAQMQSLISNLEEQLSEIRADLERQNQEYQVLLDVKARLENEIATYRNLLESEDCKLPCNPCSTPASCTSCPSCGPVTGGSPSGHGASMGR

SEQ ID NO: 43000 - protein, 449 aa, Homo sapiens; identical to SEQ ID NO: 42999
  Payload ID: 8765
  Gene Symbol: KRT37
  Gene Name: keratin 37, type I
  Uniprot ID: O76014
  ENSP ID: ENSP00000458693

SEQ ID NO: 43001 - protein, 456 aa, Homo sapiens
  Payload ID: 8766
  Gene Symbol: KRT38
  Gene Name: keratin 38, type I
  Uniprot ID: O76015
  ENSP ID: ENSP00000246646
MTSSYSSSSCPLGCTMAPGARNVSVSPIDIGCQPGAEANIAPMCLLANVAHANRVRVGSTPLGRPSLCLPPTCHTACPLPGTCHIPGNIGICGAYGENTLNGHEKETMQFLNDRLANYLEKVRQLEQENAELEATLLERSKCHESTVCPDYQSYFHTIEELQQKILCSKAENARLIVQIDNAKLAADDFRIKLESERSLRQLVEADKCGTQKLLDDATLAKADLEAQQESLKEEQLSLKSNHEQEVKILRSQLGEKLRIELDIEPTIDLNRVLGEMRAQYEAMLETNRQDVEQWFQAQSEGISLQDMSCSEELQCCQSEILELRCTVNALEVERQAQHTLKDCLQNSLCEAEDRFGTELAQMQSLISNVEEQLSEIRADLERQNQEYQVLLDVKTRLENEIATYRNLLESEDCKLPCNPCSTSPSCVTAPCAPRPSCGPCTTCGPTCGASTTGSRF

SEQ ID NO: 43002 - protein, 491 aa, Homo sapiens
  Payload ID: 8767
  Gene Symbol: KRT39
  Gene Name: keratin 39, type I
  Uniprot ID: Q6A163
  ENSP ID: ENSP00000347823
MDTKGCTTTNSPSTPCQNCSRITNVSTISSNNGCHPGGLTVNNCQPAGHVLRIPWDQGCQPTPRFCRKPIYLMNNFNARFSLDDCSWYGEGINSNEKETMQILNERLANYLQKVRMLERENAELESKIQEESNKELPVLCPDYLSYYTTIEELQQKILCTKAENSRLVSQIDNTKLTADDLRAKYEAEVSLRQLVESDANGLKQILNVLTLGKADLEAQVQSLKEELLCLKNNHKEEINSLQCQLGERLDIEVTAAPSADLNQVLQEMRCQYEPIMETNRKDVEQWFNTQIEELNQQVVTSSQQQQCCQKEIIELRRSVNTLEVELQAQHRMRDSQECILTETEARYTALLTQIQSLIDNLEAQLAEIRCALERQNQEYEILLDVKSRLECEITTYRSLLESSDGKRPCYPRATKCEPSPWTSCKSGAIESTAPACTSSSPCSLKEHCSACGPLSRILVKICTITKEIKDGKVISSYEHVQPCFIIRPAKV

SEQ ID NO: 43003 - protein, 491 aa, Homo sapiens; identical to SEQ ID NO: 43002
  Payload ID: 8767
  Gene Symbol: KRT39
  Gene Name: keratin 39, type I
  Uniprot ID: Q6A163
  ENSP ID: ENSP00000459016

SEQ ID NO: 43004 - protein, 184 aa, Homo sapiens
  Payload ID: 8767
  Gene Symbol: KRT39
  Gene Name: keratin 39, type I
  ENSP ID: ENSP00000463609
MDTKGCTTTNSPSTPCQNCSRITNVSTISSNNGCHPGGLTVNNCQPAGHVLRIPWDQGCQPTPRFCRKPIYLMNNFNARFSLDDCSWYGEGINSNEKETMQILNERLANYLQKVRMLERENAELESKIQEESNKELPVLCPDYLSYYTTIEELQQKILCTKAENSRLVSQIDNTKLTADDLRAK

SEQ ID NO: 43005 - protein, 184 aa, Homo sapiens; identical to SEQ ID NO: 43004
  Payload ID: 8767
  Gene Symbol: KRT39
  Gene Name: keratin 39, type I
  ENSP ID: ENSP00000464180

SEQ ID NO: 43006 - protein, 86 aa, Homo sapiens
  Payload ID: 8768
  Gene Symbol: KRT4
  Gene Name: keratin 4, type II
  ENSP ID: ENSP00000447320
MIARQQCVRGGPRGFSCGSAIVGGGKRGAFSSVSMSGGAGRCSSGGFGSRSLYNLRGNKSISMSVAGSRQGGHHQPELAHPPPRGD

SEQ ID NO: 43007 - protein, 520 aa, Homo sapiens
  Payload ID: 8768
  Gene Symbol: KRT4
  Gene Name: keratin 4, type II
  Uniprot ID: P19013
  ENSP ID: ENSP00000448220
MIARQQCVRGGPRGFSCGSAIVGGGKRGAFSSVSMSGGAGRCSSGGFGSRSLYNLRGNKSISMSVAGSRQGACFGGAGGFGTGGFGGGFGGSFSGKGGPGFPVCPAGGIQEVTINQSLLTPLHVEIDPEIQKVRTEEREQIKLLNNKFASFIDKVQFLEQQNKVLETKWNLLQQQTTTTSSKNLEPLFETYLSVLRKQLDTLGNDKGRLQSELKTMQDSVEDFKTKYEEEINKRTAAENDFVVLKKDVDAAYLNKVELEAKVDSLNDEINFLKVLYDAELSQMQTHVSDTSVVLSMDNNRNLDLDSIIAEVRAQYEEIAQRSKAEAEALYQTKVQQLQISVDQHGDNLKNTKSEIAELNRMIQRLRAEIENIKKQCQTLQVSVADAEQRGENALKDAHSKRVELEAALQQAKEELARMLREYQELMSVKLALDIEIATYRKLLEGEEYRMSGECQSAVSISVVSGSTSTGGISGGLGSGSGFGLSSGFGSGSGSGFGFGGSVSGSSSSKIISTTTLNKRR

SEQ ID NO: 43008 - protein, 78 aa, Homo sapiens
  Payload ID: 8768
  Gene Symbol: KRT4
  Gene Name: keratin 4, type II
  ENSP ID: ENSP00000449755
MIARQQCVRGGPRGFSCGSAIVGGGKRGAFSSVSMSGGAGRCSSGGFGSRSLYNLRGNKSISMSVAGSRQGAVLRATE

SEQ ID NO: 43009 - protein, 431 aa, Homo sapiens
  Payload ID: 8769
  Gene Symbol: KRT40
  Gene Name: keratin 40, type I
  Uniprot ID: Q6A162
  ENSP ID: ENSP00000366984
MTSDCSSTHCSPESCGTASGCAPASSCSVETACLPGTCATSRCQTPSFLSRSRGLTGCLLPCYFTGSCNSPCLVGNCAWCEDGVFTSNEKETMQFLNDRLASYLEKVRSLEETNAELESRIQEQCEQDIPMVCPDYQRYFNTIEDLQQKILCTKAENSRLAVQLDNCKLATDDFKSKYESELSLRQLLEADISSLHGILEELTLCKSDLEAHVESLKEDLLCLKKNHEEEVNLLREQLGDRLSVELDTAPTLDLNRVLDEMRCQCETVLANNRREAEEWLAVQTEELNQQQLSSAEQLQGCQMEILELKRTASALEIELQAQQSLTESLECTVAETEAQYSSQLAQIQCLIDNLENQLAEIRCDLERQNQEYQVLLDVKARLEGEINTYWGLLDSEDSRLSCSPCSTTCTSSNTCEPCSAYVICTVENCCL

SEQ ID NO: 43010 - protein, 431 aa, Homo sapiens; identical to SEQ ID NO: 43009
  Payload ID: 8769
  Gene Symbol: KRT40
  Gene Name: keratin 40, type I
  Uniprot ID: Q6A162
  ENSP ID: ENSP00000381500

SEQ ID NO: 43011 - protein, 236 aa, Homo sapiens
  Payload ID: 8769
  Gene Symbol: KRT40
  Gene Name: keratin 40, type I
  ENSP ID: ENSP00000434458
MTSDCSSTHCSPESCGTASGCAPASSCSVETACLPGTCATSRCQTPSFLSRSRGLTGCLLPCYFTGSCNSPCLVGNCAWCEDGVFTSNEKETMQFLNDRLASYLEKVRSLEETNAELESRIQEQCEQDIPMVCPDYQRYFNTIEDLQQKILCTKAENSRLAVQLDNCKLATDDFKSKYESELSLRQLLEADISSLHGILEELTLCKSDLEAHVESLKEDLLCLKKNHEETKKLRPF

SEQ ID NO: 43012 - protein, 236 aa, Homo sapiens; identical to SEQ ID NO: 43011
  Payload ID: 8769
  Gene Symbol: KRT40
  Gene Name: keratin 40, type I
  ENSP ID: ENSP00000458481

SEQ ID NO: 43013 - protein, 431 aa, Homo sapiens; identical to SEQ ID NO: 43009
  Payload ID: 8769
  Gene Symbol: KRT40
  Gene Name: keratin 40, type I
  Uniprot ID: Q6A162
  ENSP ID: ENSP00000459621

SEQ ID NO: 43014 - protein, 431 aa, Homo sapiens; identical to SEQ ID NO: 43009
  Payload ID: 8769
  Gene Symbol: KRT40
  Gene Name: keratin 40, type I
  Uniprot ID: Q6A162
  ENSP ID: ENSP00000479080

SEQ ID NO: 43015 - protein, 590 aa, Homo sapiens
  Payload ID: 8770
  Gene Symbol: KRT5
  Gene Name: keratin 5, type II
  Uniprot ID: P13647
  ENSP ID: ENSP00000252242
MSRQSSVSFRSGGSRSFSTASAITPSVSRTSFTSVSRSGGGGGGGFGRVSLAGACGVGGYGSRSLYNLGGSKRISISTSGGSFRNRFGAGAGGGYGFGGGAGSGFGFGGGAGGGFGLGGGAGFGGGFGGPGFPVCPPGGIQEVTVNQSLLTPLNLQIDPSIQRVRTEEREQIKTLNNKFASFIDKVRFLEQQNKVLDTKWTLLQEQGTKTVRQNLEPLFEQYINNLRRQLDSIVGERGRLDSELRNMQDLVEDFKNKYEDEINKRTTAENEFVMLKKDVDAAYMNKVELEAKVDALMDEINFMKMFFDAELSQMQTHVSDTSVVLSMDNNRNLDLDSIIAEVKAQYEEIANRSRTEAESWYQTKYEELQQTAGRHGDDLRNTKHEISEMNRMIQRLRAEIDNVKKQCANLQNAIADAEQRGELALKDARNKLAELEEALQKAKQDMARLLREYQELMNTKLALDVEIATYRKLLEGEECRLSGEGVGPVNISVVTSSVSSGYGSGSGYGGGLGGGLGGGLGGGLAGGSSGSYYSSSSGGVGLGGGLSVGGSGFSASSGRGLGVGFGSGGGSSSSVKFVSTTSSSRKSFKS

SEQ ID NO: 43016 - protein, 178 aa, Homo sapiens
  Payload ID: 8770
  Gene Symbol: KRT5
  Gene Name: keratin 5, type II
  ENSP ID: ENSP00000447209
MSRQSSVSFRSGGSRGFGGPGFPVCPPGGIQEVTVNQSLLTPLNLQIDPSIQRVRTEEREQIKTLNNKFASFIDKVRFLEQQNKVLDTKWTLLQEQGTKTVRQNLEPLFEQYINNLRRQLDSIVGERGRLDSELRNMQDLVEDFKNKYEDEINKRTTAENEFVMLKKDVDAAYMNKVE

SEQ ID NO: 43017 - protein, 147 aa, Homo sapiens
  Payload ID: 8770
  Gene Symbol: KRT5
  Gene Name: keratin 5, type II
  ENSP ID: ENSP00000448041
MSRQSSVSFRSGGSRSFSTASAITPSVSRTSFTSVSRSGGGGGGGFGRVSLAGACGVGGYGFGGGAGSGFGFGGGAGGGFGLGGGAGFGGGFGGPGFPVCPPGGIQEVTVNQSLLTPLNLQIDPSIQRVRTEEREQIKTLNNKFASF

SEQ ID NO: 43018 - protein, 201 aa, Homo sapiens
  Payload ID: 8770
  Gene Symbol: KRT5
  Gene Name: keratin 5, type II
  ENSP ID: ENSP00000448767
  MOD_RES (1)..(1): Any amino acid
XDALMDEINFMKMFFDAELSQMQTHVSDTSVVLSMDNNRNLDLDSIIAEVKAQYEEIANRSRTEAESWYQTKYEELQQTAGRHGDDLRNTKHEISEMNRMIQRLRAEIDNVKKQCANLQNAIADAEQRGELALKDARNKLAELEEALQKAKQDMARLLREYQELMNTKLALDVEIATYRKLLEGEECRLSGEGVGPVNICK

SEQ ID NO: 43019 - protein, 132 aa, Homo sapiens
  Payload ID: 8770
  Gene Symbol: KRT5
  Gene Name: keratin 5, type II
  ENSP ID: ENSP00000449651
MSRQSSVSFRSGGSRSFSTASAITPSVSRTSFTSVSRSGGGGGGGFGRVSLAGACGVGGYGSRSLYNLGGSKRISISTSGGSFRNRFGAGAGGGYGFGGGAGSGFGFGGGAGGGFGLGGGAGFGGGFGGPGF

SEQ ID NO: 43020 - protein, 196 aa, Homo sapiens
  Payload ID: 8770
  Gene Symbol: KRT5
  Gene Name: keratin 5, type II
  ENSP ID: ENSP00000449783
  MOD_RES (1)..(1): Any amino acid
XDPAAGAGHQDCEAEPGAVVRAVHQQPQEAAGQHRGGTGPPGLRAEKHAGPGGRLQEQPLKAQKRTLEKLTRYEDEINKRTTAENEFVMLKKDVDAAYMNKVELEAKVDALMDEINFMKMFFDAELSQMQTHVSDTSVVLSMDNNRNLDLDSIIAEVKAQYEEIANRSRTEAESWYQTKYEELQQTAGRHGDDLRN

SEQ ID NO: 43021 - protein, 564 aa, Homo sapiens
  Payload ID: 8771
  Gene Symbol: KRT6A
  Gene Name: keratin 6A, type II
  Uniprot ID: P02538
  ENSP ID: ENSP00000369317
MASTSTTIRSHSSSRRGFSANSARLPGVSRSGFSSVSVSRSRGSGGLGGACGGAGFGSRSLYGLGGSKRISIGGGSCAISGGYGSRAGGSYGFGGAGSGFGFGGGAGIGFGLGGGAGLAGGFGGPGFPVCPPGGIQEVTVNQSLLTPLNLQIDPTIQRVRAEEREQIKTLNNKFASFIDKVRFLEQQNKVLETKWTLLQEQGTKTVRQNLEPLFEQYINNLRRQLDSIVGERGRLDSELRGMQDLVEDFKNKYEDEINKRTAAENEFVTLKKDVDAAYMNKVELQAKADTLTDEINFLRALYDAELSQMQTHISDTSVVLSMDNNRNLDLDSIIAEVKAQYEEIAQRSRAEAESWYQTKYEELQVTAGRHGDDLRNTKQEIAEINRMIQRLRSEIDHVKKQCANLQAAIADAEQRGEMALKDAKNKLEGLEDALQKAKQDLARLLKEYQELMNVKLALDVEIATYRKLLEGEECRLNGEGVGQVNISVVQSTVSSGYGGASGVGSGLGLGGGSSYSYGSGLGVGGGFSSSSGRAIGGGLSSVGGGSSTIKYTTTSSSSRKSYKH

SEQ ID NO: 43022 - protein, 564 aa, Homo sapiens
  Payload ID: 8772
  Gene Symbol: KRT6B
  Gene Name: keratin 6B, type II
  Uniprot ID: P04259
  ENSP ID: ENSP00000252252
MASTSTTIRSHSSSRRGFSANSARLPGVSRSGFSSISVSRSRGSGGLGGACGGAGFGSRSLYGLGGSKRISIGGGSCAISGGYGSRAGGSYGFGGAGSGFGFGGGAGIGFGLGGGAGLAGGFGGPGFPVCPPGGIQEVTVNQSLLTPLNLQIDPAIQRVRAEEREQIKTLNNKFASFIDKVRFLEQQNKVLDTKWTLLQEQGTKTVRQNLEPLFEQYINNLRRQLDNIVGERGRLDSELRNMQDLVEDLKNKYEDEINKRTAAENEFVTLKKDVDAAYMNKVELQAKADTLTDEINFLRALYDAELSQMQTHISDTSVVLSMDNNRNLDLDSIIAEVKAQYEEIAQRSRAEAESWYQTKYEELQITAGRHGDDLRNTKQEIAEINRMIQRLRSEIDHVKKQCANLQAAIADAEQRGEMALKDAKNKLEGLEDALQKAKQDLARLLKEYQELMNVKLALDVEIATYRKLLEGEECRLNGEGVGQVNISVVQSTVSSGYGGASGVGSGLGLGGGSSYSYGSGLGVGGGFSSSSGRATGGGLSSVGGGSSTIKYTTTSSSSRKSYKH

SEQ ID NO: 43023 - protein, 564 aa, Homo sapiens
  Payload ID: 8773
  Gene Symbol: KRT6C
  Gene Name: keratin 6C, type II
  Uniprot ID: P48668
  ENSP ID: ENSP00000252250
MASTSTTIRSHSSSRRGFSANSARLPGVSRSGFSSISVSRSRGSGGLGGACGGAGFGSRSLYGLGGSKRISIGGGSCAISGGYGSRAGGSYGFGGAGSGFGFGGGAGIGFGLGGGAGLAGGFGGPGFPVCPPGGIQEVTVNQSLLTPLNLQIDPAIQRVRAEEREQIKTLNNKFASFIDKVRFLEQQNKVLDTKWTLLQEQGTKTVRQNLEPLFEQYINNLRRQLDSIVGERGRLDSELRNMQDLVEDLKNKYEDEINKRTAAENEFVTLKKDVDAAYMNKVELQAKADTLTDEINFLRALYDAELSQMQTHISDTSVVLSMDNNRNLDLDSIIAEVKAQYEEIAQRSRAEAESWYQTKYEELQVTAGRHGDDLRNTKQEIAEINRMIQRLRSEIDHVKKQCASLQAAIADAEQRGEMALKDAKNKLEGLEDALQKAKQDLARLLKEYQELMNVKLALDVEIATYRKLLEGEECRLNGEGVGQVNVSVVQSTISSGYGGASGVGSGLGLGGGSSYSYGSGLGIGGGFSSSSGRAIGGGLSSVGGGSSTIKYTTTSSSSRKSYKH

SEQ ID NO: 43024 - protein, 469 aa, Homo sapiens
  Payload ID: 8774
  Gene Symbol: KRT7
  Gene Name: keratin 7, type II
  Uniprot ID: P08729
  ENSP ID: ENSP00000329243
MSIHFSSPVFTSRSAAFSGRGAQVRLSSARPGGLGSSSLYGLGASRPRVAVRSAYGGPVGAGIREVTINQSLLAPLRLDADPSLQRVRQEESEQIKTLNNKFASFIDKVRFLEQQNKLLETKWTLLQEQKSAKSSRLPDIFEAQIAGLRGQLEALQVDGGRLEAELRSMQDVVEDFKNKYEDEINHRTAAENEFVVLKKDVDAAYMSKVELEAKVDALNDEINFLRTLNETELTELQSQISDTSVVLSMDNSRSLDLDGIIAEVKAQYEEMAKCSRAEAEAWYQTKFETLQAQAGKHGDDLRNTRNEISEMNRAIQRLQAEIDNIKNQRAKLEAAIAEAEERGELALKDARAKQEELEAALQRGKQDMARQLREYQELMSVKLALDIEIATYRKLLEGEESRLAGDGVGAVNISVMNSTGGSSSGGGIGLTLGGTMGSNALSFSSSAGPGLLKAYSIRTASASRRSARD

SEQ ID NO: 43025 - protein, 523 aa, Homo sapiens
  Payload ID: 8775
  Gene Symbol: KRT71
  Gene Name: keratin 71, type II
  Uniprot ID: Q3SY84
  ENSP ID: ENSP00000267119
MSRQFTCKSGAAAKGGFSGCSAVLSGGSSSSFRAGSKGLSGGFGSRSLYSLGGVRSLNVASGSGKSGGYGFGRGRASGFAGSMFGSVALGPVCPTVCPPGGIHQVTVNESLLAPLNVELDPEIQKVRAQEREQIKALNNKFASFIDKVRFLEQQNQVLETKWELLQQLDLNNCKNNLEPILEGYISNLRKQLETLSGDRVRLDSELRNVRDVVEDYKKRYEEEINKRTAAENEFVLLKKDVDAAYANKVELQAKVESMDQEIKFFRCLFEAEITQIQSHISDMSVILSMDNNRNLDLDSIIDEVRTQYEEIALKSKAEAEALYQTKFQELQLAAGRHGDDLKNTKNEISELTRLIQRIRSEIENVKKQASNLETAIADAEQRGDNALKDARAKLDELEGALHQAKEELARMLREYQELMSLKLALDMEIATYRKLLESEECRMSGEFPSPVSISIISSTSGGSVYGFRPSMVSGGYVANSSNCISGVCSVRGGEGRSRGSANDYKDTLGKGSSLSAPSKKTSR

SEQ ID NO: 43026 - protein, 511 aa, Homo sapiens
  Payload ID: 8776
  Gene Symbol: KRT72
  Gene Name: keratin 72, type II
  Uniprot ID: Q14CN4
  ENSP ID: ENSP00000293745
MSRQLTHFPRGERLGFSGCSAVLSGGIGSSSASFRARVKGSASFGSKSLSCLGGSRSLALSAAARRGGGRLGGFVGTAFGSAGLGPKCPSVCPPGGIPQVTVNKSLLAPLNVEMDPEIQRVRAQEREQIKALNNKFASFIDKVRFLEQQNQVLETKWNLLQQLDLNNCRKNLEPIYEGYISNLQKQLEMLSGDGVRLDSELRNMQDLVEDYKKRYEVEINRRTAAENEFVVLKKDVDAAYMNKVELQAKVDSLTDEIKFFKCLYEGEITQIQSHISDTSIVLSMDNNRDLDLDSIIAEVRAQYEEIALKSKAEAETLYQTKIQELQVTAGQHGDDLKLTKAEISELNRLIQRIRSEIGNVKKQCADLETAIADAEQRGDCALKDARAKLDELEGALHQAKEELARMLREYQELVSLKLALDMEIATYRKLLESEECRMSGEYPNSVSISVISSTNAGAGGAGFSMGFGASSSYSYKTAAADVKTKGSCGSELKDPLAKTSGSSCATKKASR

SEQ ID NO: 43027 - protein, 469 aa, Homo sapiens
  Payload ID: 8776
  Gene Symbol: KRT72
  Gene Name: keratin 72, type II
  Uniprot ID: Q14CN4
  ENSP ID: ENSP00000346269
MSRQLTHFPRGERLGFSGCSAVLSGGIGSSSASFRARVKGSASFGSKSLSCLGGSRSLALSAAARRGGGRLGGFVGTAFGSAGLGPKCPSVCPPGGIPQVTVNKSLLAPLNVEMDPEIQRVRAQEREQIKALNNKFASFIDKVRFLEQQNQVLETKWNLLQQLDLNNCRKNLEPIYEGYISNLQKQLEMLSGDGVRLDSELRNMQDLVEDYKKRYEVEINRRTAAENEFVVLKKDVDAAYMNKVELQAKVDSLTDEIKFFKCLYEGEITQIQSHISDTSIVLSMDNNRDLDLDSIIAEVRAQYEEIALKSKAEAETLYQTKCADLETAIADAEQRGDCALKDARAKLDELEGALHQAKEELARMLREYQELVSLKLALDMEIATYRKLLESEECRMSGEYPNSVSISVISSTNAGAGGAGFSMGFGASSSYSYKTAAADVKTKGSCGSELKDPLAKTSGSSCATKKASR

SEQ ID NO: 43028 - protein, 511 aa, Homo sapiens; identical to SEQ ID NO: 43026
  Payload ID: 8776
  Gene Symbol: KRT72
  Gene Name: keratin 72, type II
  Uniprot ID: Q14CN4
  ENSP ID: ENSP00000441160

SEQ ID NO: 43029 - protein, 143 aa, Homo sapiens
  Payload ID: 8776
  Gene Symbol: KRT72
  Gene Name: keratin 72, type II
  ENSP ID: ENSP00000446881
  MOD_RES (1)..(1): Any amino acid
XFPRGERLGFSGCSAVLSGGIGSSSASFRARVKGSASFGSKSLSCLGGSRSLALSAAARRGGGRLGGFVGTAFGSAGLGPKCPSVCPPGGIPQVTVNKSLLAPLNVEMDPEIQRVRAQEREQIKALNNKFASFIDKKTPAFIA

SEQ ID NO: 43030 - protein, 192 aa, Homo sapiens
  Payload ID: 8776
  Gene Symbol: KRT72
  Gene Name: keratin 72, type II
  ENSP ID: ENSP00000449324
  MOD_RES (1)..(1): Any amino acid
XLQRLLRGPLWRDRQQLRLIPGPGQGLGLLWQQEPLLPWGQPKPGAQRCCTAGRRPPGRLRGHRLRQRRAGAQVSLRVPTRGHPSGHRQQEPPGPAQRGDGPRDPEGARPGAGADQGAKQQVRLLHRQDRVLFLVLEIQVRFLEQQNQVLETKWNLLQQLDLNNCRKNLEPIYEGYISNLQKQLEMLSGDGV

SEQ ID NO: 43031 - protein, 540 aa, Homo sapiens
  Payload ID: 8777
  Gene Symbol: KRT73
  Gene Name: keratin 73, type II
  Uniprot ID: Q86Y46
  ENSP ID: ENSP00000307014
MSRQFTYKSGAAAKGGFSGCSAVLSGGSSSSYRAGGKGLSGGFSSRSLYSLGGARSISFNVASGSGWAGGYGFGRGRASGFAGSMFGSVALGSVCPSLCPPGGIHQVTINKSLLAPLNVELDPEIQKVRAQEREQIKVLNNKFASFIDKVRFLEQQNQVLETKWELLQQLDLNNCKNNLEPILEGYISNLRKQLETLSGDRVRLDSELRSVREVVEDYKKRYEEEINKRTTAENEFVVLKKDVDAAYTSKVELQAKVDALDGEIKFFKCLYEGETAQIQSHISDTSIILSMDNNRNLDLDSIIAEVRAQYEEIARKSKAEAEALYQTKFQELQLAAGRHGDDLKHTKNEISELTRLIQRLRSEIESVKKQCANLETAIADAEQRGDCALKDARAKLDELEGALQQAKEELARMLREYQELLSVKLSLDIEIATYRKLLEGEECRMSGEYTNSVSISVINSSMAGMAGTGAGFGFSNAGTYGYWPSSVSGGYSMLPGGCVTGSGNCSPRGEARTRLGSASEFRDSQGKTLALSSPTKKTMR

SEQ ID NO: 43032 - protein, 285 aa, Homo sapiens
  Payload ID: 8777
  Gene Symbol: KRT73
  Gene Name: keratin 73, type II
  ENSP ID: ENSP00000449081
EEINKRTTAENEFVVLKKETAQIQSHISDTSIILSMDNNRNLDLDSIIAEVRAQYEEIARKSKAEAEALYQTKFQELQLAAGRHGDDLKHTKNEISELTRLIQRLRSEIESVKKQCANLETAIADAEQRGDCALKDARAKLDELEGALQQAKEELARMLREYQELLSVKLSLDIEIATYRKLLEGEECRMSGEYTNSVSISVINSSMAGMAGTGAGFGFSNAGTYGYWPSSVSGGYSMLPGGCVTGSGNCSPRGEARTRLGSASEFRDSQGKTLALSSPTKKTMR

SEQ ID NO: 43033 - protein, 529 aa, Homo sapiens
  Payload ID: 8778
  Gene Symbol: KRT74
  Gene Name: keratin 74, type II
  Uniprot ID: Q7RTS7
  ENSP ID: ENSP00000307240
MSRQLNIKSSGDKGNFSVHSAVVPRKAVGSLASYCAAGRGAGAGFGSRSLYSLGGNRRISFNVAGGGVRAGGYGFRPGSGYGGGRASGFAGSMFGSVALGPACLSVCPPGGIHQVTVNKSLLAPLNVELDPEIQKVRAQEREQIKVLNDKFASFIDKVRFLEQQNQVLETKWELLQQLDLNNCKKNLEPILEGYISNLRKQLETLSGDRVRLDSELRSMRDLVEDYKKRYEVEINRRTTAENEFVVLKKDADAAYAVKVELQAKVDSLDKEIKFLKCLYDAEIAQIQTHASETSVILSMDNNRDLDLDSIIAEVRMHYEEIALKSKAEAEALYQTKIQELQLAASRHGDDLKHTRSEMVELNRLIQRIRCEIGNVKKQRASLETAIADAEQRGDNALKDAQAKLDELEGALHQAKEELARMLREYQELMSLKLALDMEIATYRKLLEGEECRMSGENPSSVSISVISSSSYSYHHPSSAGVDLGASAVAGSSGSTQSGQTKTTEARGGDLKDTQGKSTPASIPARKATR

SEQ ID NO: 43034 - protein, 543 aa, Homo sapiens
  Payload ID: 8778
  Gene Symbol: KRT74
  Gene Name: keratin 74, type II
  ENSP ID: ENSP00000447447
MSRQLNIKSSGDKGNFSVHSAVVPRKAVGSLASYCAAGRGAGAGFGSRSLYSLGGNRRISFNVAGGGVRAGGYGFRPGSGYGGGRASGFAGSMFGSVALGPACLSVCPPGGIHQVTVNKSLLAPLNVELDPEIQKVRAQEREQIKVLNDKFASFIDKVRFLEQQNQVLETKWELLQQLDLNNCKKNLEPILEGYISNLRKQLETLSGDRVRLDSELRSMRDLVEDYKKRYEVEINRRTTAENEFVVLKKDADAAYAVKVELQAKVDSLDKEIKFLKCLYDAEIAQIQTHASETSVILSMDNNRDLDLDSIIAEVRMHYEEIALKSKAEAEALYQTKIQELQLAASRHGDDLKHTRSEMVELNRLIQRIRCEIGNVKKQIFSVSNEPAPCPLWRASLETAIADAEQRGDNALKDAQAKLDELEGALHQAKEELARMLREYQELMSLKLALDMEIATYRKLLEGEECRMSGENPSSVSISVISSSSYSYHHPSSAGVDLGASAVAGSSGSTQSGQTKTTEARGGDLKDTQGKSTPASIPARKATR

SEQ ID NO: 43035 - protein, 551 aa, Homo sapiens
  Payload ID: 8779
  Gene Symbol: KRT75
  Gene Name: keratin 75, type II
  Uniprot ID: O95678
  ENSP ID: ENSP00000252245
MSRQSSITFQSGSRRGFSTTSAITPAAGRSRFSSVSVARSAAGSGGLGRISSAGASFGSRSLYNLGGAKRVSINGCGSSCRSGFGGRASNRFGVNSGFGYGGGVGGGFSGPSFPVCPPGGIQEVTVNQSLLTPLHLQIDPTIQRVRAEEREQIKTLNNKFASFIDKVRFLEQQNKVLETKWALLQEQGSRTVRQNLEPLFDSYTSELRRQLESITTERGRLEAELRNMQDVVEDFKVRYEDEINKRTAAENEFVALKKDVDAAYMNKVELEAKVKSLPEEINFIHSVFDAELSQLQTQVGDTSVVLSMDNNRNLDLDSIIAEVKAQYEDIANRSRAEAESWYQTKYEELQVTAGRHGDDLRNTKQEISEMNRMIQRLRAEIDSVKKQCSSLQTAIADAEQRGELALKDARAKLVDLEEALQKAKQDMARLLREYQELMNIKLALDVEIATYRKLLEGEECRLSGEGVSPVNISVVTSTLSSGYGSGSSIGGGNLGLGGGSGYSFTTSGGHSLGAGLGGSGFSATSNRGLGGSGSSVKFVSTTSSSQKSYTH

SEQ ID NO: 43036 - protein, 638 aa, Homo sapiens
  Payload ID: 8780
  Gene Symbol: KRT76
  Gene Name: keratin 76, type II
  Uniprot ID: Q01546
  ENSP ID: ENSP00000330101
MNRQVCKKSFSGRSQGFSGRSAVVSGSSRMSCVARSGGAGGGACGFRSGAGSFGSRSLYNLGSNKSISISVAAGSSRAGGFGGGRSSCGFAGGYGGGFGGSYGGGFGGGRGVGSGFGGAGGFGGAGGFGGPGVFGGPGSFGGPGGFGPGGFPGGIQEVIVNQSLLQPLNVEIDPQIGQVKAQEREQIKTLNNKFASFIDKVRFLEQQNKVLETKWELLQQQTTGSGPSSLEPCFESYISFLCKQLDSLLGERGNLEGELKSMQDLVEDFKKKYEDEINKRTAAENEFVGLKKDVDAAFMNKVELQAKVDSLTDEVSFLRTLYEMELSQMQSHASDTSVVLSMDNNRCLDLGSIIAEVRAQYEEIAQRSKSEAEALYQTKLGELQTTAGRHGDDLRNTKSEIMELNRMIQRLRAEIENVKKQNANLQTAIAEAEQRGEMALKDANAKLQDLQTALQKAKDDLARLLRDYQELMNVKLALDVEIATYRKLLEGEECRMSGECQSAVCISVVSNVTSTSGSSGSSRGVFGGVSGSGSGGYKGGSSSSSSSGYGVSGGSGSGYGGVSSGSTGGRGSSGSYQSSSSGSRLGGAGSISVSHSGMGSSSGSIQTSGGSGYKSGGGGSTSIRFSQTTSSSQHSSTK

SEQ ID NO: 43037 - protein, 578 aa, Homo sapiens
  Payload ID: 8781
  Gene Symbol: KRT77
  Gene Name: keratin 77, type II
  Uniprot ID: Q7Z794
  ENSP ID: ENSP00000342710
MSHQFSSQSAFSSMSRRVYSTSSSAGSGGGSPAVGSVCYARGRCGGGGYGIHGRGFGSRSLYNLGGSRSISINLMGRSTSGFCQGGGVGGFGGGRGFGVGSTGAGGFGGGGFGGAGFGTSNFGLGGFGPYCPPGGIQEVTINQSLLEPLHLEVDPEIQRIKTQEREQIMVLNNKFASFIDKVRFLEQQNQVLQTKWELLQQVNTSTGTNNLEPLLENYIGDLRRQVDLLSAEQMRQNAEVRSMQDVVEDYKSKYEDEINKRTGSENDFVVLKKDVDAAYVSKVDLESRVDTLTGEVNFLKYLFLTELSQVQTHISDTNVILSMDNNRSLDLDSIIDAVRTQYELIAQRSKDEAEALYQTKYQELQITAGRHGDDLKNSKMEIAELNRTVQRLQAEISNVKKQIEQMQSLISDAEERGEQALQDAWQKLQDLEEALQQSKEELARLLRDYQAMLGVKLSLDVEIATYRQLLEGEESRMSGELQSHVSISVQNSQVSVNGGAGGGGSYGSGGYGGGSGGGYGGGRSYRGGGARGRSGGGYGSGCGGGGGSYGGSGRSGRGSSRVQIIQTSTNTSHRRILE

SEQ ID NO: 43038 - protein, 248 aa, Homo sapiens
  Payload ID: 8781
  Gene Symbol: KRT77
  Gene Name: keratin 77, type II
  ENSP ID: ENSP00000448207
MSHQFSSQSAFSSMSRRVYSTSSSAGSGGGSPAVGSVCYARGRCGGGGYGIHGRGFGSRSLYNLGGSRSISINLMGRSTSGFCQGGGVGGFGGGRGFGVGSTGAGGFGGGGFGGAGFGTSNFGLGGFGPYCPPGGIQEVTINQSLLEPLHLEVDPEIQRIKTQEREQIMVLNNKFASFIDKRKEPWGHQCLRCSETPFPYVGMDKLSVEGAIPGAAEPGATNKMGVAAAGEHLNWNQQPGAPLGELHR

SEQ ID NO: 43039 - protein, 520 aa, Homo sapiens
  Payload ID: 8782
  Gene Symbol: KRT78
  Gene Name: keratin 78, type II
  Uniprot ID: Q8N1N4
  ENSP ID: ENSP00000306261
MSLSPCRAQRGFSARSACSARSRGRSRGGFSSRGGFSSRSLNSFGGCLEGSRGSTWGSGGRLGVRFGEWSGGPGLSLCPPGGIQEVTINQNLLTPLKIEIDPQFQVVRTQETQEIRTLNNQFASFIDKVRFLEQQNKVLETKWHLLQQQGLSGSQQGLEPVFEACLDQLRKQLEQLQGERGALDAELKACRDQEEEYKSKYEEEAHRRATLENDFVVLKKDVDGVFLSKMELEGKLEALREYLYFLKHLNEEELGQLQTQASDTSVVLSMDNNRYLDFSSIITEVRARYEEIARSSKAEAEALYQTKYQELQVSAQLHGDRMQETKVQISQLHQEIQRLQSQTENLKKQNASLQAAITDAEQRGELALKDAQAKVDELEAALRMAKQNLARLLCEYQELTSTKLSLDVEIATYRRLLEGEECRMSGECTSQVTISSVGGSAVMSGGVGGGLGSTCGLGSGKGSPGSCCTSIVTGGSNIILGSGKDPVLDSCSVSGSSAGSSCHTILKKTVESSLKTSITY

SEQ ID NO: 43040 - protein, 410 aa, Homo sapiens
  Payload ID: 8782
  Gene Symbol: KRT78
  Gene Name: keratin 78, type II
  Uniprot ID: Q8N1N4
  ENSP ID: ENSP00000352479
MEGHEASPAQVGQGDRGKVRFLEQQNKVLETKWHLLQQQGLSGSQQGLEPVFEACLDQLRKQLEQLQGERGALDAELKACRDQEEEYKSKYEEEAHRRATLENDFVVLKKDVDGVFLSKMELEGKLEALREYLYFLKHLNEEELGQLQTQASDTSVVLSMDNNRYLDFSSIITEVRARYEEIARSSKAEAEALYQTKYQELQVSAQLHGDRMQETKVQISQLHQEIQRLQSQTENLKKQNASLQAAITDAEQRGELALKDAQAKVDELEAALRMAKQNLARLLCEYQELTSTKLSLDVEIATYRRLLEGEECRMSGECTSQVTISSVGGSAVMSGGVGGGLGSTCGLGSGKGSPGSCCTSIVTGGSNIILGSGKDPVLDSCSVSGSSAGSSCHTILKKTVESSLKTSITY

SEQ ID NO: 43041 - protein, 41 aa, Homo sapiens
  Payload ID: 8782
  Gene Symbol: KRT78
  Gene Name: keratin 78, type II
  ENSP ID: ENSP00000448562
  MOD_RES (1)..(1): Any amino acid
XDVEIATYRRLLEGEECSLGGRQRCHVWRSWWRLGEHLWTR

SEQ ID NO: 43042 - protein, 535 aa, Homo sapiens
  Payload ID: 8783
  Gene Symbol: KRT79
  Gene Name: keratin 79, type II
  Uniprot ID: Q5XKE5
  ENSP ID: ENSP00000328358
MRSSVSRQTYSTKGGFSSNSASGGSGSQARTSFSSVTVSRSSGSGGGAHCGPGTGGFGSRSLYNLGGHKSISVSVAGGALLGRALGGFGFGSRAFMGQGAGRQTFGPACPPGGIQEVTVNQSLLTPLHVEIDPEIQRVRTQEREQIKTLNNKFASFIDKVRFLEQQNKVLETKWALLQEQGQNLGVTRNNLEPLFEAYLGSMRSTLDRLQSERGRLDSELRNVQDLVEDFKNKYEDEINKHTAAENEFVVLKKDVDAAYMGRMDLHGKVGTLTQEIDFLQQLYEMELSQVQTHVSNTNVVLSMDNNRNLDLDSIIAEVKAQYELIAQRSRAEAEAWYQTKYEELQVTAGKHGDNLRDTKNEIAELTRTIQRLQGEADAAKKQCQQLQTAIAEAEQRGELALKDAQKKLGDLDVALHQAKEDLTRLLRDYQELMNVKLALDVEIATYRKLLESEESRMSGECPSAVSISVTGNSTTVCGGGAASFGGGISLGGSGGATKGGFSTNVGYSTVKGGPVSAGTSILRKTTTVKTSSQRY

SEQ ID NO: 43043 - protein, 119 aa, Homo sapiens
  Payload ID: 8783
  Gene Symbol: KRT79
  Gene Name: keratin 79, type II
  ENSP ID: ENSP00000449159
LHQAKEDLTRLLRDYQELMNVKLALDVEIATYRKLLESEESRMSGECPSAVSICEYLLPTSCSTPGQAPELCSVYATCTCPKACSPPFEPLETGSEGPSSGLLYPFPIALLLDFVLIPH

SEQ ID NO: 43044 - protein, 483 aa, Homo sapiens
  Payload ID: 8784
  Gene Symbol: KRT8
  Gene Name: keratin 8, type II
  Uniprot ID: P05787
  ENSP ID: ENSP00000293308
MSIRVTQKSYKVSTSGPRAFSSRSYTSGPGSRISSSSFSRVGSSNFRGGLGGGYGGASGMGGITAVTVNQSLLSPLVLEVDPNIQAVRTQEKEQIKTLNNKFASFIDKVRFLEQQNKMLETKWSLLQQQKTARSNMDNMFESYINNLRRQLETLGQEKLKLEAELGNMQGLVEDFKNKYEDEINKRTEMENEFVLIKKDVDEAYMNKVELESRLEGLTDEINFLRQLYEEEIRELQSQISDTSVVLSMDNSRSLDMDSIIAEVKAQYEDIANRSRAEAESMYQIKYEELQSLAGKHGDDLRRTKTEISEMNRNISRLQAEIEGLKGQRASLEAAIADAEQRGELAIKDANAKLSELEAALQRAKQDMARQLREYQELMNVKLALDIEIATYRKLLEGEESRLESGMQNMSIHTKTTSGYAGGLSSAYGGLTSPGLSYSLGSSFGSGAGSSSFSRTSSSRAVVVKKIETRDGKLVSESSDVLPK

SEQ ID NO: 43045 - protein, 289 aa, Homo sapiens
  Payload ID: 8784
  Gene Symbol: KRT8
  Gene Name: keratin 8, type II
  ENSP ID: ENSP00000447040
MEIQCSRILLSSLRFSVSRLLTLSRISAWFGPPASTPASTMSIRVTQKSYKVSTSGPRAFSSRSYTSGPGSRISSSSFSRVGSSNFRGGLGGGYGGASGMGGITAVTVNQSLLSPLVLEVDPNIQAVRTQEKEQIKTLNNKFASFIDKVRFLEQQNKMLETKWSLLQQQKTARSNMDNMFESYINNLRRQLETLGQEKLKLEAELGNMQGLVEDFKNKYEDEINKRTEMENEFVLIKKDVDEAYMNKVELESRLEGLTDEINFLRQLYEEEIRELQSQISDTSVVLSMD

SEQ ID NO: 43046 - protein, 483 aa, Homo sapiens; identical to SEQ ID NO: 43044
  Payload ID: 8784
  Gene Symbol: KRT8
  Gene Name: keratin 8, type II
  Uniprot ID: P05787
  ENSP ID: ENSP00000447402

SEQ ID NO: 43047 - protein, 483 aa, Homo sapiens; identical to SEQ ID NO: 43044
  Payload ID: 8784
  Gene Symbol: KRT8
  Gene Name: keratin 8, type II
  Uniprot ID: P05787
  ENSP ID: ENSP00000447566

SEQ ID NO: 43048 - protein, 273 aa, Homo sapiens
  Payload ID: 8784
  Gene Symbol: KRT8
  Gene Name: keratin 8, type II
  ENSP ID: ENSP00000447881
MSIRVTQKSYKVSTSGPRAFSSRSYTSGPGSRISSSSFSRVGSSNFRGGLGGGYGGASGMGGITAVTVNQSLLSPLVLEVDPNIQAVRTQEKEQIKTLNNKFASFIDKVRFLEQQNKMLETKWSLLQQQKTARSNMDNMFESYINNLRRQLETLGQEKLKLEAELGNMQGLVEDFKNKYEDEINKRTEMENEFVLIKKDVDEAYMNKVELESRLEGLTDEINFLRQLYEEEIRELQSQISDTSVVLSMDNSRSLDMDSIIAEVKAQYEDIANR

SEQ ID NO: 43049 - protein, 35 aa, Homo sapiens
  Payload ID: 8784
  Gene Symbol: KRT8
  Gene Name: keratin 8, type II
  ENSP ID: ENSP00000449010
  MOD_RES (1)..(1): Any amino acid
XLETLGQEKLKLEAELGNMQGLVEDFKNKMWMKLT

SEQ ID NO: 43050 - protein, 511 aa, Homo sapiens
  Payload ID: 8784
  Gene Symbol: KRT8
  Gene Name: keratin 8, type II
  Uniprot ID: P05787
  ENSP ID: ENSP00000449404
MNGVSWSQDLQEGISAWFGPPASTPASTMSIRVTQKSYKVSTSGPRAFSSRSYTSGPGSRISSSSFSRVGSSNFRGGLGGGYGGASGMGGITAVTVNQSLLSPLVLEVDPNIQAVRTQEKEQIKTLNNKFASFIDKVRFLEQQNKMLETKWSLLQQQKTARSNMDNMFESYINNLRRQLETLGQEKLKLEAELGNMQGLVEDFKNKYEDEINKRTEMENEFVLIKKDVDEAYMNKVELESRLEGLTDEINFLRQLYEEEIRELQSQISDTSVVLSMDNSRSLDMDSIIAEVKAQYEDIANRSRAEAESMYQIKYEELQSLAGKHGDDLRRTKTEISEMNRNISRLQAEIEGLKGQRASLEAAIADAEQRGELAIKDANAKLSELEAALQRAKQDMARQLREYQELMNVKLALDIEIATYRKLLEGEESRLESGMQNMSIHTKTTSGYAGGLSSAYGGLTSPGLSYSLGSSFGSGAGSSSFSRTSSSRAVVVKKIETRDGKLVSESSDVLPK

SEQ ID NO: 43051 - protein, 180 aa, Homo sapiens
  Payload ID: 8784
  Gene Symbol: KRT8
  Gene Name: keratin 8, type II
  ENSP ID: ENSP00000450228
MGKKLYICPPSRWSPPSLGQGYVTCPSPQGDLAVICWSSEFSFIQSPHHTLQYLPENPAPAIRISAWFGPPASTPASTMSIRVTQKSYKVSTSGPRAFSSRSYTSGPGSRISSSSFSRVGSSNFRGGLGGGYGGASGMGGITAVTVNQSLLSPLVLEVDPNIQAVRTQEKEQIKTLNNKF

SEQ ID NO: 43052 - protein, 113 aa, Homo sapiens
  Payload ID: 8784
  Gene Symbol: KRT8
  Gene Name: keratin 8, type II
  ENSP ID: ENSP00000450340
MLETKWSLLQQQKTARSNMDNMFESYINNLRRQLETLGQEKLKLEAELGNMQGLVEDFKNKYEDEINKRTEMENEFVLIKKDVDEAYMNKVELESRLEGLTDEINFLRQLYEE

SEQ ID NO: 43053 - protein, 32 aa, Homo sapiens
  Payload ID: 8784
  Gene Symbol: KRT8
  Gene Name: keratin 8, type II
  ENSP ID: ENSP00000489174
MEIQCSRILLSSLRFSVSRLLTLSRWRRCWRV

SEQ ID NO: 43054 - protein, 422 aa, Homo sapiens
  Payload ID: 8785
  Gene Symbol: KRT80
  Gene Name: keratin 80, type II
  Uniprot ID: Q6KB66
  ENSP ID: ENSP00000369361
MACRSCVVGFSSLSSCEVTPVGSPRPGTSGWDSCRAPGPGFSSRSLTGCWSAGTISKVTVNPGLLVPLDVKLDPAVQQLKNQEKEEMKALNDKFASLIGKVQALEQRNQLLETRWSFLQGQDSAIFDLGHLYEEYQGRLQEELRKVSQERGQLEANLLQVLEKVEEFRIRYEDEISKRTDMEFTFVQLKKDLDAECLHRTELETKLKSLESFVELMKTIYEQELKDLAAQVKDVSVTVGMDSRCHIDLSGIVEEVKAQYDAVAARSLEEAEAYSRSQLEEQAARSAEYGSSLQSSRSEIADLNVRIQKLRSQILSVKSHCLKLEENIKTAEEQGELAFQDAKTKLAQLEAALQQAKQDMARQLRKYQELMNVKLALDIEIATYRKLVEGEEGRMDSPSATVVSAVQSRCKTAPSLPYPLCSL

SEQ ID NO: 43055 - protein, 452 aa, Homo sapiens
  Payload ID: 8785
  Gene Symbol: KRT80
  Gene Name: keratin 80, type II
  Uniprot ID: Q6KB66
  ENSP ID: ENSP00000378292
MACRSCVVGFSSLSSCEVTPVGSPRPGTSGWDSCRAPGPGFSSRSLTGCWSAGTISKVTVNPGLLVPLDVKLDPAVQQLKNQEKEEMKALNDKFASLIGKVQALEQRNQLLETRWSFLQGQDSAIFDLGHLYEEYQGRLQEELRKVSQERGQLEANLLQVLEKVEEFRIRYEDEISKRTDMEFTFVQLKKDLDAECLHRTELETKLKSLESFVELMKTIYEQELKDLAAQVKDVSVTVGMDSRCHIDLSGIVEEVKAQYDAVAARSLEEAEAYSRSQLEEQAARSAEYGSSLQSSRSEIADLNVRIQKLRSQILSVKSHCLKLEENIKTAEEQGELAFQDAKTKLAQLEAALQQAKQDMARQLRKYQELMNVKLALDIEIATYRKLVEGEEGRMDSPSATVVSAVQSRCKTAASRSGLSKAPSRKKKGSKGPVIKITEMSEKYFSQESEVSE

SEQ ID NO: 43056 - protein, 505 aa, Homo sapiens
  Payload ID: 8786
  Gene Symbol: KRT81
  Gene Name: keratin 81, type II
  Uniprot ID: Q14533
  ENSP ID: ENSP00000369349
MTCGSGFGGRAFSCISACGPRPGRCCITAAPYRGISCYRGLTGGFGSHSVCGGFRAGSCGRSFGYRSGGVCGPSPPCITTVSVNESLLTPLNLEIDPNAQCVKQEEKEQIKSLNSRFAAFIDKVRFLEQQNKLLETKLQFYQNRECCQSNLEPLFEGYIETLRREAECVEADSGRLASELNHVQEVLEGYKKKYEEEVSLRATAENEFVALKKDVDCAYLRKSDLEANVEALIQEIDFLRRLYEEEILILQSHISDTSVVVKLDNSRDLNMDCIIAEIKAQYDDIVTRSRAEAESWYRSKCEEMKATVIRHGETLRRTKEEINELNRMIQRLTAEVENAKCQNSKLEAAVAQSEQQGEAALSDARCKLAELEGALQKAKQDMACLIREYQEVMNSKLGLDIEIATYRRLLEGEEQRLCEGIGAVNVCVSSSRGGVVCGDLCVSGSRPVTGSVCSAPCNGNVAVSTGLCAPCGQLNTTCGGGSCGVGSCGISSLGVGSCGSSCRKC

SEQ ID NO: 43057 - protein, 484 aa, Homo sapiens
  Payload ID: 8786
  Gene Symbol: KRT81
  Gene Name: keratin 81, type II
  ENSP ID: ENSP00000483796
MTCGSGFGGRAFSCISACGPRPGRCCITAAPYRGISCYRGLTGGFGSHSVCGGFRAGSCGRSFGYRSGGVCGPSPPCITTVSVNESLLTPLNLEIDPNAQCVKQEEKEQIKSLNSRFAAFIDKVRFLEQQNKLLETKLQFYQNRECCQSNLEPLFEGYIETLRREAECVEADSGRLASELNHVQEVLEGYKKKYEEEVSLRATAENEFVALKKDVDCAYLRKSDLEANVEALIQEIDFLRRLYEEEILILQSHISDTSVVVKLDNSRDLNMDCIIAEIKAQYDDIVTRSRAEAESWYRSKCEEMKATVIRHGETLRRTKEEINELNRMIQRLTAEVENAKCQNSKLEAAVAQSEQQGEAALSDARCKLAELEGALQKAKQDMACLIREYQEVMNSKLGLDIEIATYRRLLEGEEQRLCEGIGAVNVCVSSSRGGVVCGDLCVSGSRPVTGSVCSAPCNGNVAVSTGLCAPCGQVGSCGSSCRKC

SEQ ID NO: 43058 - protein, 513 aa, Homo sapiens
  Payload ID: 8787
  Gene Symbol: KRT82
  Gene Name: keratin 82, type II
  Uniprot ID: Q9NSB4
  ENSP ID: ENSP00000257974
MSYHSFQPGSRCGSQSFSSYSAVMPRMVTHYAVSKGPCRPGGGRGLRALGCLGSRSLCNVGFGRPRVASRCGGTLPGFGYRLGATCGPSACITPVTINESLLVPLALEIDPTVQRVKRDEKEQIKCLNNRFASFINKVRFLEQKNKLLETKWNFMQQQRCCQTNIEPIFEGYISALRRQLDCVSGDRVRLESELCSLQAALEGYKKKYEEELSLRPCVENEFVALKKDVDTAFLMKADLETNAEALVQEIDFLKSLYEEEICLLQSQISETSVIVKMDNSRELDVDGIIAEIKAQYDDIASRSKAEAEAWYQCRYEELRVTAGNHCDNLRNRKNEILEMNKLIQRLQQETENVKAQRCKLEGAIAEAEQQGEAALNDAKCKLAGLEEALQKAKQDMACLLKEYQEVMNSKLGLDIEIATYRRLLEGEEHRLCEGIGPVNISVSSSKGAFLYEPCGVSTPVLSTGVLRSNGGCSIVGTGELYVPCEPQGLLSCGSGRKSSMTLGAGGSSPSHKH

SEQ ID NO: 43059 - protein, 493 aa, Homo sapiens
  Payload ID: 8788
  Gene Symbol: KRT83
  Gene Name: keratin 83, type II
  Uniprot ID: P78385
  ENSP ID: ENSP00000293670
MTCGFNSIGCGFRPGNFSCVSACGPRPSRCCITAAPYRGISCYRGLTGGFGSHSVCGGFRAGSCGRSFGYRSGGVCGPSPPCITTVSVNESLLTPLNLEIDPNAQCVKQEEKEQIKSLNSRFAAFIDKVRFLEQQNKLLETKLQFYQNRECCQSNLEPLFAGYIETLRREAECVEADSGRLASELNHVQEVLEGYKKKYEEEVALRATAENEFVALKKDVDCAYLRKSDLEANVEALIQEIDFLRRLYEEEIRILQSHISDTSVVVKLDNSRDLNMDCIVAEIKAQYDDIATRSRAEAESWYRSKCEEMKATVIRHGETLRRTKEEINELNRMIQRLTAEVENAKCQNSKLEAAVAQSEQQGEAALSDARCKLAELEGALQKAKQDMACLIREYQEVMNSKLGLDIEIATYRRLLEGEEQRLCEGVEAVNVCVSSSRGGVVCGDLCVSGSRPVTGSVCSAPCNGNLVVSTGLCKPCGQLNTTCGGGSCGQGRH

SEQ ID NO: 43060 - protein, 600 aa, Homo sapiens
  Payload ID: 8789
  Gene Symbol: KRT84
  Gene Name: keratin 84, type II
  Uniprot ID: Q9NSB2
  ENSP ID: ENSP00000257951
MSCRSYRVSSGHRVGNFSSCSAMTPQNLNRFRANSVSCWSGPGFRGLGSFGSRSVITFGSYSPRIAAVGSRPIHCGVRFGAGCGMGFGDGRGVGLGPRADSCVGLGFGAGSGIGYGFGGPGFGYRVGGVGVPAAPSITAVTVNKSLLTPLNLEIDPNAQRVKKDEKEQIKTLNNKFASFIDKVRFLEQQNKLLETKWSFLQEQKCIRSNLEPLFESYITNLRRQLEVLVSDQARLQAERNHLQDVLEGFKKKYEEEVVCRANAENEFVALKKDVDAAFMNKSDLEANVDTLTQEIDFLKTLYMEEIQLLQSHISETSVIVKMDNSRDLNLDGIIAEVKAQYEEVARRSRADAEAWYQTKYEEMQVTAGQHCDNLRNIRNEINELTRLIQRLKAEIEHAKAQRAKLEAAVAEAEQQGEATLSDAKCKLADLECALQQAKQDMARQLCEYQELMNAKLGLDIEIATYRRLLEGEESRLCEGVGPVNISVSSSRGGLVCGPEPLVAGSTLSRGGVTFSGSSSVCATSGVLASCGPSLGGARVAPATGDLLSTGTRSGSMLISEACVPSVPCPLPTQGGFSSCSGGRSSSVRFVSTTTSCRTKY

SEQ ID NO: 43061 - protein, 507 aa, Homo sapiens
  Payload ID: 8790
  Gene Symbol: KRT85
  Gene Name: keratin 85, type II
  Uniprot ID: P78386
  ENSP ID: ENSP00000257901
MSCRSYRISSGCGVTRNFSSCSAVAPKTGNRCCISAAPYRGVSCYRGLTGFGSRSLCNLGSCGPRIAVGGFRAGSCGRSFGYRSGGVCGPSPPCITTVSVNESLLTPLNLEIDPNAQCVKQEEKEQIKSLNSRFAAFIDKVRFLEQQNKLLETKWQFYQNQRCCESNLEPLFSGYIETLRREAECVEADSGRLASELNHVQEVLEGYKKKYEEEVALRATAENEFVVLKKDVDCAYLRKSDLEANVEALVEESSFLRRLYEEEIRVLQAHISDTSVIVKMDNSRDLNMDCIIAEIKAQYDDVASRSRAEAESWYRSKCEEMKATVIRHGETLRRTKEEINELNRMIQRLTAEIENAKCQRAKLEAAVAEAEQQGEAALSDARCKLAELEGALQKAKQDMACLLKEYQEVMNSKLGLDIEIATYRRLLEGEEHRLCEGVGSVNVCVSSSRGGVSCGGLSYSTTPGRQITSGPSAIGGSITVVAPDSCAPCQPRSSSFSCGSSRSVRFA

SEQ ID NO: 43062 - protein, 295 aa, Homo sapiens
  Payload ID: 8790
  Gene Symbol: KRT85
  Gene Name: keratin 85, type II
  ENSP ID: ENSP00000440240
MVFKVQFLSSRPSLSHTQDVDCAYLRKSDLEANVEALVEESSFLRRLYEEEIRVLQAHISDTSVIVKMDNSRDLNMDCIIAEIKAQYDDVASRSRAEAESWYRSKCEEMKATVIRHGETLRRTKEEINELNRMIQRLTAEIENAKCQRAKLEAAVAEAEQQGEAALSDARCKLAELEGALQKAKQDMACLLKEYQEVMNSKLGLDIEIATYRRLLEGEEHRLCEGVGSVNVCVSSSRGGVSCGGLSYSTTPGRQITSGPSAIGGSITVVAPDSCAPCQPRSSSFSCGSSRSVRFA

SEQ ID NO: 43063 - protein, 486 aa, Homo sapiens
  Payload ID: 8791
  Gene Symbol: KRT86
  Gene Name: keratin 86, type II
  Uniprot ID: O43790
  ENSP ID: ENSP00000293525
MTCGSYCGGRAFSCISACGPRPGRCCITAAPYRGISCYRGLTGGFGSHSVCGGFRAGSCGRSFGYRSGGVCGPSPPCITTVSVNESLLTPLNLEIDPNAQCVKQEEKEQIKSLNSRFAAFIDKVRFLEQQNKLLETKLQFYQNRECCQSNLEPLFEGYIETLRREAECVEADSGRLASELNHVQEVLEGYKKKYEEEVSLRATAENEFVALKKDVDCAYLRKSDLEANVEALIQEIDFLRRLYEEEIRVLQSHISDTSVVVKLDNSRDLNMDCIIAEIKAQYDDIVTRSRAEAESWYRSKCEEMKATVIRHGETLRRTKEEINELNRMIQRLTAEVENAKCQNSKLEAAVAQSEQQGEAALSDARCKLAELEGALQKAKQDMACLIREYQEVMNSKLGLDIEIATYRRLLEGEEQRLCEGVGSVNVCVSSSRGGVVCGDLCASTTAPVVSTRVSSVPSNSNVVVGTTNACAPSARVGVCGGSCKRC

SEQ ID NO: 43064 - protein, 486 aa, Homo sapiens; identical to SEQ ID NO: 43063
  Payload ID: 8791
  Gene Symbol: KRT86
  Gene Name: keratin 86, type II
  Uniprot ID: O43790
  ENSP ID: ENSP00000444533

SEQ ID NO: 43065 - protein, 143 aa, Homo sapiens
  Payload ID: 8791
  Gene Symbol: KRT86
  Gene Name: keratin 86, type II
  ENSP ID: ENSP00000452237
MTCGSYCGGRAFSCISACGPRPGRCCITAAPYRGISCYRGLTGGFGSHSVCGGFRAGSCGRSFGYRSGGVCGPSPPCITTVSVNESLLTPLNLEIDPNAQCVKQEEKEQIKSLNSRFAAFIDKVRFLEQQNKLLETKLQFYQN

SEQ ID NO: 43066 - protein, 623 aa, Homo sapiens
  Payload ID: 8792
  Gene Symbol: KRT9
  Gene Name: keratin 9, type I
  Uniprot ID: P35527
  ENSP ID: ENSP00000246662
MSCRQFSSSYLSRSGGGGGGGLGSGGSIRSSYSRFSSSGGGGGGGRFSSSSGYGGGSSRVCGRGGGGSFGYSYGGGSGGGFSASSLGGGFGGGSRGFGGASGGGYSSSGGFGGGFGGGSGGGFGGGYGSGFGGFGGFGGGAGGGDGGILTANEKSTMQELNSRLASYLDKVQALEEANNDLENKIQDWYDKKGPAAIQKNYSPYYNTIDDLKDQIVDLTVGNNKTLLDIDNTRMTLDDFRIKFEMEQNLRQGVDADINGLRQVLDNLTMEKSDLEMQYETLQEELMALKKNHKEEMSQLTGQNSGDVNVEINVAPGKDLTKTLNDMRQEYEQLIAKNRKDIENQYETQITQIEHEVSSSGQEVQSSAKEVTQLRHGVQELEIELQSQLSKKAALEKSLEDTKNRYCGQLQMIQEQISNLEAQITDVRQEIECQNQEYSLLLSIKMRLEKEIETYHNLLEGGQEDFESSGAGKIGLGGRGGSGGSYGRGSRGGSGGSYGGGGSGGGYGGGSGSRGGSGGSYGGGSGSGGGSGGGYGGGSGGGHSGGSGGGHSGGSGGNYGGGSGSGGGSGGGYGGGSGSRGGSGGSHGGGSGFGGESGGSYGGGEEASGSGGGYGGGSGKSSHS

SEQ ID NO: 43067 - protein, 390 aa, Homo sapiens
  Payload ID: 8792
  Gene Symbol: KRT9
  Gene Name: keratin 9, type I
  ENSP ID: ENSP00000467932
MTLDDFRIKFEMEQNLRQGVDADINGLRQVLDNLTMEKSDLEMQYETLQEELMALKKNHKEEMSQLTGQNSGDVNVEINVAPGKDLTKTLNDMRQEYEQLIAKNRKDIENQYETQITQIEHEVSSSGQEVQSSAKEVTQLRHGVQELEIELQSQLSKKAALEKSLEDTKNRYCGQLQMIQEQISNLEAQITDVRQEIECQNQEYSLLLSIKMRLEKEIETYHNLLEGGQEDFESSGAGKIGLGGRGGSGGSYGRGSRGGSGGSYGGGGSGGGYGGGSGSRGGSGGSYGGGSGSGGGSGGGYGGGSGGGHSGGSGGGHSGGSGGNYGGGSGSGGGSGGGYGGGSGSRGGSGGSHGGGSGFGGESGGSYGGGEEASGSGGGYGGGSGKSSHS

SEQ ID NO: 43068 - protein, 282 aa, Homo sapiens
  Payload ID: 8793
  Gene Symbol: KRTAP10-1
  Gene Name: keratin associated protein 10-1
  Uniprot ID: P60331
  ENSP ID: ENSP00000383226
MAASTMSVCSSACSDSWQVDACPESCCEPHCCALSCCAPAPCLTLVCTPVSRVSSPCCQAACEPSPCQSGCTSSCTPSCCQQSSCQPACCTSSPCQQACCVPVCCKPVCCLPTCSKDSSSCCQQSSCQPTCCASSSSQQSCCVPVCCKPVCYVPTCSEDSSSCCQQSSCHPACCTSSPCQQACCVPVRCKPVCCKPICCVPVCSGASTSCCQQSSCQPACCTTSCCRPSSSVSLLCRPVCRPACCMPVSSCCAPASSCQASCCRPASCVSLLCRPACSRPAC

SEQ ID NO: 43069 - protein, 251 aa, Homo sapiens
  Payload ID: 8794
  Gene Symbol: KRTAP10-10
  Gene Name: keratin associated protein 10-10
  Uniprot ID: P60014
  ENSP ID: ENSP00000369438
MAASTMSICSSACTDSWRVVDCPESCCEPCCCAPAPSLTLVCTPVSCVSSPCCQTACEPSACQSGYTSSCTTPCYQQSSCQPDCCTSSPCQQACCVPVCCVPVCCVPVCNKPVCFVPTCSESSPSCCQQSSCQPTCCTSSPCQQACCVPVCSKSVCYVPVCSGASTSCCQQSSCQPACCTASCCRPSSSVSLLCHPVCKSTCCVPVPSCGASASSCQPSCCRTASCVSLLCRPVCSRPACYSLCSGQKSSC

SEQ ID NO: 43070 - protein, 298 aa, Homo sapiens
  Payload ID: 8795
  Gene Symbol: KRTAP10-11
  Gene Name: keratin associated protein 10-11
  Uniprot ID: P60412
  ENSP ID: ENSP00000334197
MAASTMSVCSSAYSDSWQVDDCPESCCEPPCSAPSCCAPAPSLSLVCTPVSCVSSPCCQAACEPSACQSGCTSSCTPSCCQQSSCQPACCTSSPCQQACCVPVCCKTVCCKPVCCVPVCCGAASSCCRQSSCQPACCASSSCQPACCVPVCCKPVCCVSTCSEDSSSCCQQSSCQPACCTSSSYQQACCVPVCCKTVYCKPICCVPVCSRASSSRCQQPSCQPACCTTSCCRPSSSVSLLCHPVCRSTCCVPVSSCCAPTSSCQSSCCRPASCVSLLCRPASSRLACYSLCSGKKSSC

SEQ ID NO: 43071 - protein, 245 aa, Homo sapiens
  Payload ID: 8796
  Gene Symbol: KRTAP10-12
  Gene Name: keratin associated protein 10-12
  Uniprot ID: P60413
  ENSP ID: ENSP00000383216
MSVCSSDLSYGSRVCLPGSCDSCSDSWQVDDCPESCCEPPCCAPAPCLSLVCTPVSRVSSPCCRVTCEPSPCQSGCTSSCTPSCCQQSSCQPACCTSSPCQQACCVPVCCKTVCCKPVCCMPVCCGPSSSCCQQSSCQPACCISSPCQQSCCVPVCCKPICCVPVCSGASSLCCQQSSCQPACCTTSCCRPSSSVSLLCRPVCRPARRVPVPSCCVPTSSCQPSCGRLASCGSLLCRPTCSRLAC

SEQ ID NO: 43072 - protein, 94 aa, Homo sapiens
  Payload ID: 8796
  Gene Symbol: KRTAP10-12
  Gene Name: keratin associated protein 10-12
  ENSP ID: ENSP00000482575
CTSSCTPSCCQQSSCQPACCTSSPCQQACCVPVCCKTVCCKPSSCQPACCISSPCQQSCCVPVCCKPICCVPPACCTTSCCRPSSSVSLLCRPV

SEQ ID NO: 43073 - protein, 255 aa, Homo sapiens
  Payload ID: 8797
  Gene Symbol: KRTAP10-2
  Gene Name: keratin associated protein 10-2
  Uniprot ID: P60368
  ENSP ID: ENSP00000375479
MAASTMSICSSACTNSWQVDDCPESCCELPCGTPSCCAPAPCLTLVCTPVSCVSSPCCQAACEPSACQSGCTSSCTPSCCQQSSCQPACCTSSPCQQACCVPVCCKPVCCVPVCCGASSCCQQSSCQPACCASSSCQQSCRVPVCCKAVCCVPTCSESSSSCCQQSSCQPACCTSSPCQQSCCVSVCCKPVCCKSICCVPVCSGASSPCCQQSSCQPACCTSSCCRPSSSVSLLCRPVCSRPASCSFSSGQKSSC

SEQ ID NO: 43074 - protein, 221 aa, Homo sapiens
  Payload ID: 8798
  Gene Symbol: KRTAP10-3
  Gene Name: keratin associated protein 10-3
  Uniprot ID: P60369
  ENSP ID: ENSP00000375478
MATSTMSVCSSAYSDSWQVDACPESCCEPPCCATSCCAPAPCLTLVCTPVSCVSSPCCQAACEPSPCQSGCTSSCTPSCCQQSSCQPACCTSSPCQQACCVPVCCKPVCCVPVCCKPVCCKPICCVPVCSGASSSCCQQSSRQPACCTTSCCRPSSSVSLLCRPVCRSTCCVPIPSCCAPASTCQPSCCRPASCVSLLCRPTCSRLSSACCGLSSGQKSSC

SEQ ID NO: 43075 - protein, 401 aa, Homo sapiens
  Payload ID: 8799
  Gene Symbol: KRTAP10-4
  Gene Name: keratin associated protein 10-4
  Uniprot ID: P60372
  ENSP ID: ENSP00000383225
MSVCSSDLSYSSRVCLPGSCDSCSDSWQVDDCPESCCEPPCCAPSCCAPAPCLSLVCTPVSRVSSPCCPVTCEPSPCQSGCTSSCTPSCCQQSSCQLACCASSPCQQACCVPVCCKTVCCKPVCCVPVCCGDSSCCQQSSCQSACCTSSPCQQACCVPICCKPVCSGISSSCCQQSSCVSCVSSPCCQAVCEPSPCQSGCISSCTPSCCQQSSCQPACCTSSSCQQACCVPVCCKTVCCKPVCSEDSSSCCQQSSCQPACCTSSPCQQACCVPVCCKPVCCKPVCSVPICSGASSLCCQQSSCQPACCTSSQSQQGCCVPVCCKPVSCVPVCSGASSSCCQQSSCQPACCTTSCCRPSSSVSLLCRPVCRPACCVPVPSCCAPTSSCQPSCCRPASCVSLL

SEQ ID NO: 43076 - protein, 271 aa, Homo sapiens
  Payload ID: 8800
  Gene Symbol: KRTAP10-5
  Gene Name: keratin associated protein 10-5
  Uniprot ID: P60370
  ENSP ID: ENSP00000383223
MAACTMSVCSSACSDSWRVDDCPESCCEPPCGTAPCLTLVCTPVSCVSSPCCQAACEPSPCQSGCTSSCTPSCCQPACCASSPCQQACCVPVCCKPVCCLPTCSKDSSSCCQQSSCQPTCCASSSCQQSCCVPVCCKPVCCVPTCSEDSSSCCQHSSCQPTCCTSSPCQQSCYVPVCCKPVCCKPICCVPVCSGASTSCCQQSSCQPACCTTSCCRPSSSVSLLCRPICRPACCLPISSCCAPASSYQASCCRPASCVSLLCRPACSPLAC

SEQ ID NO: 43077 - protein, 365 aa, Homo sapiens
  Payload ID: 8801
  Gene Symbol: KRTAP10-6
  Gene Name: keratin associated protein 10-6
  Uniprot ID: P60371
  ENSP ID: ENSP00000383219
MAASTMSVCSSDLSYGSRVCLPGSCDSCSDSWQVDDCPESCCEPPCCAPAPCLSLVCTPVSRVSSPCCPVTCEPSPCQSGCTSSCTPSCCQQSSCQLACCASSPCQQACCVPVCCKTVCCKPVCCVSVCCGDSSCCQQSSCQSACCTSSPCQQACCVPVCCKPVCSGISSSCCQQSSCVSCVSSPCCQAVCEPSPCQSGCTSSCTPSCCQQSSCQPTCCTSSPCQQACCVPVCCVPVCCVPTCSEDSSSCCQQSSCQPACCTSSPCQHACCVPVCSGASTSCCQQSSCQPACCTASCCRSSSSVSLLCHPVCKSTCCVPVPSCGASASSCQPSCCRTASCVSLLCRPMCSRPACYSLCSGQKSSC

SEQ ID NO: 43078 - protein, 244 aa, Homo sapiens
  Payload ID: 8801
  Gene Symbol: KRTAP10-6
  Gene Name: keratin associated protein 10-6
  ENSP ID: ENSP00000484068
MSVCSSDLSYGSRVCLPGSCDSCSDSWQVDDCPESCCEPPCCAPAPCLSLVCTPVSRVSSPCCPVTCEPSPCQSGCTSSCTPSCCQQSSCQLACCASSPCQQACCVPVCCKTVCCKPVCCVSVCCGDSSCCQQSSCQSACCTSSPCQQACCVPVCCKPICCVPVCSGASTSCCQQSSCQPACCTTSCCRPSSSVSLLCRPICRPACCLPISSCCAPASSYQASCCRPASCVSLLCRPACSPLAC

SEQ ID NO: 43079 - protein, 370 aa, Homo sapiens
  Payload ID: 8802
  Gene Symbol: KRTAP10-7
  Gene Name: keratin associated protein 10-7
  Uniprot ID: P60409
  ENSP ID: ENSP00000476821
MAASTMSVCSSDLSYGSRVCLPGSCDSCSDSWQVDDCPESCCEPPCCAPAPCLSLVCTPVSYVSSPCCRVTCEPSPCQSGCTSSCTPSCCQQSSCQLACCASSPCQQACCVPVCCKTVCCKPVYCVPVCSGDSSCCQQSSCQSACCTSSPCQQACCVPICCKPVCSGISSSCCQQSSCVSCVSSPCCQAVCEPSPCQSGCISSCTPSCCQQSSCKPACCTSSPCQQACCVPVCCKPVCCVPTCSDDSGSCCQPACCTSSQSQQGCCVPVCCKPVCCVPVCSGASTSCCQQSSCQPACCTTSCCRPSSSVSLLCRPVCRPACCVPVPSCCAPTSSCQASCCRPASCVSLLCRPACSRPACCGPTSTQKSSC

SEQ ID NO: 43080 - protein, 245 aa, Homo sapiens
  Payload ID: 8802
  Gene Symbol: KRTAP10-7
  Gene Name: keratin associated protein 10-7
  ENSP ID: ENSP00000481165
MSVCSSDLSYGSRVCLPGSCDSCSDSWQVDDCPESCCEPPCCAPAPCLSLVCTPVSYVSSPCCRVTCEPSPCQSGCTSSCTPSCCQQSSCQLACCASSPCQQACCVPVCCKTVCCKPVCCVPVCSGASTSCCQQSSCQSACCTFSPCQQACCVPICCKPICCVPVCSGASSLCCQKSSCQPACCTTSCCRPSSSVSLLCRPVCRPACCVPVPSCCVPASSCQPSCCHPASCLSFLCRPACSRLAC

SEQ ID NO: 43081 - protein, 259 aa, Homo sapiens
  Payload ID: 8803
  Gene Symbol: KRTAP10-8
  Gene Name: keratin associated protein 10-8
  Uniprot ID: P60410
  ENSP ID: ENSP00000335565
MADACCTRTYVIAASTMSVCSSDVGHVSRVSSPSTCTGSSWQVDNCQESCCEPRSCASSCCTPSCCAPAPCLALVCAPVSCEPSPCQSGCTDSCTPSCCQQSSCQPACCTSSPCQQACCVPVCCKSNCCKPVCCVSICSGASSPCCQQSSCQSACCTFSPCQQACCVPICCKPICCVPVCSGASSLCCQKSSCQPACCTTSCCRPSSSVSLLCRPVCRPACCVPVPSCCVPASSCQPSCCHPASCLSFLCRPACSRLAC

SEQ ID NO: 43082 - protein, 292 aa, Homo sapiens
  Payload ID: 8804
  Gene Symbol: KRTAP10-9
  Gene Name: keratin associated protein 10-9
  Uniprot ID: P60411
  ENSP ID: ENSP00000381009
MAASTMSIRSSAYSDSWQVDDCPESCCEPPCCATSCCAPAPCLTLVCTPVSRVSSPCCQVTCEPSPCQSGCTSSCTPSCCQQSSCQPAYCTSSPCQQACCVPVCCKPVCCVPVCCGASSCCQQSSYQPACCASSSCQPACCVPVCCKPVCCAPTCSEDSYSCCQQSSCQPACCTSSPCQQSYCVPVCCKPVCCKPICCVPVCSGASSLCCQQSGCQPACCTTSCCRPSSSVSLLCRPVCRPACCVPVSSCCAPTSSRQPSYCRQASCVSLLCRPVCSRPACYSFSSGQKSSC

SEQ ID NO: 43083 - protein, 192 aa, Homo sapiens [sequence omitted]

SEQ ID NO: 43084 - protein, 177 aa, Homo sapiens
  Payload ID: 8805
  Gene Symbol: KRTAP1-1
  Gene Name: keratin associated protein 1-1
  Uniprot ID: Q07627
  ENSP ID: ENSP00000305975
MACCQTSFCGFPSCSTSGTCGSSCCQPSCCETSSCQPRCCETSCCQPSCCQTSFCGFPSFSTGGTCDSSCCQPSCCETSCCQPSCYQTSSCGTGCGIGGGIGYGQEGSSGAVSTRIRWCRPDCRVEGTCLPPCCVVSCTPPSCCQLHHAEASCCRPSYCGQSCCRPVCCCYCSEPTC

SEQ ID NO: 43085 - protein, 177 aa, Homo sapiens; identical to SEQ ID NO: 43084
  Payload ID: 8805
  Gene Symbol: KRTAP1-1
  Gene Name: keratin associated protein 1-1
  Uniprot ID: Q07627
  ENSP ID: ENSP00000460787

SEQ ID NO: 43086 - protein, 163 aa, Homo sapiens
  Payload ID: 8806
  Gene Symbol: KRTAP11-1
  Gene Name: keratin associated protein 11-1
  Uniprot ID: Q8IUC1
  ENSP ID: ENSP00000330720
MSFNCSTRNCSSRPIGGRCIVPVAQVTTTSTTDADCLGGICLPSSFQTGSWLLDHCQETCCEPTACQPTCYRRTSCVSNPCQVTCSRQTTCISNPCSTTYSRPLTFVSSGCQPLGGISSVCQPVGGISTVCQPVGGVSTVCQPACGVSRTYQQSCVSSCRRTC

SEQ ID NO: 43087 - protein, 96 aa, Homo sapiens
  Payload ID: 8807
  Gene Symbol: KRTAP12-1
  Gene Name: keratin associated protein 12-1
  Uniprot ID: P59990
  ENSP ID: ENSP00000375475
MCHTSCSSGCQPACCAPSPCQASCYIPVGCQSSVCVPVSFKPAVCVPVRCQSSVCVPVSCRPVVYAAPSCQSSGCCQPSCTSVLCRPISCSTPSCC

SEQ ID NO: 43088 - protein, 146 aa, Homo sapiens
  Payload ID: 8808
  Gene Symbol: KRTAP12-2
  Gene Name: keratin associated protein 12-2
  Uniprot ID: P59991
  ENSP ID: ENSP00000354001
MCHTSCSSGCQPACCAPSPCQPACCVPSSCQASCCVPVGCQSSVCVPVSFKPAVCLPVSCQSSVCVPMSFKSAVCVPVSCQSSVCVPVSCRPIVCAAPSCQSSLCVPVSCRPVVYAAPSCQSSGCCQPSCTSVLCRPISYSISSCC

SEQ ID NO: 43089 - protein, 96 aa, Homo sapiens
  Payload ID: 8809
  Gene Symbol: KRTAP12-3
  Gene Name: keratin associated protein 12-3
  Uniprot ID: P60328
  ENSP ID: ENSP00000381005
MCHTSCSPACQPTCCIHSPCQASCYVPVSCQSSVCMPVSCTRIVCVAPSCQPSVCVPVSCRPIIYVTPSCQSSGCCQPPCTTALCRPISCSTPSCC

SEQ ID NO: 43090 - protein, 146 aa, Homo sapiens
  Payload ID: 8809
  Gene Symbol: KRTAP12-3
  Gene Name: keratin associated protein 12-3
  ENSP ID: ENSP00000479723
CQSGCTSSCTPSCCQQSSCQPACCTSSPCQQACCVPVCCKTVCCKPSSCQPACCASSSCQPACCVPVCCKPASCYVPVSCQSSVCMPVSCTRIVCVAPSCQPSVCVPVSCRPIIYVTPSCQSSGCCQPPCTTALCRPISCSTPSCC

SEQ ID NO: 43091 - protein, 112 aa, Homo sapiens
  Payload ID: 8810
  Gene Symbol: KRTAP12-4
  Gene Name: keratin associated protein 12-4
  Uniprot ID: P60329
  ENSP ID: ENSP00000375476
MCHTSHSSGCPMACPGSPCCVPSTCYPPEGYGTSCCCSAPCVALLCRPLCGVSTCCQPACCVPSPCQVACCVPVSCKPVLCVASFCPTSGCCQPFCPTLVYRPVTWSTPTGC

SEQ ID NO: 43092 - protein, 167 aa, Homo sapiens
  Payload ID: 8811
  Gene Symbol: KRTAP1-3
  Gene Name: keratin associated protein 1-3
  Uniprot ID: Q8IUG1
  ENSP ID: ENSP00000344420
MTCCQTSFCGYPSCSTSGTCGSSCCQPSCCETSCCQPSCCQTSFCGFPSFSTSGTCSSSCCQPSCCETSCCQPSCCQTSSCGTGCGIGGGIGYGQEGSSGAVSTRIRWCRPDCRVEGTCLPPCCVVSCTPPTCCQLHHAEASCCRPSYCGQSCCRPVCCCYSCEPTC

SEQ ID NO: 43093 - protein, 167 aa, Homo sapiens; identical to SEQ ID NO: 43092
  Payload ID: 8811
  Gene Symbol: KRTAP1-3
  Gene Name: keratin associated protein 1-3
  Uniprot ID: Q8IUG1
  ENSP ID: ENSP00000461303

SEQ ID NO: 43094 - protein, 172 aa, Homo sapiens
  Payload ID: 8812
  Gene Symbol: KRTAP13-1
  Gene Name: keratin associated protein 13-1
  Uniprot ID: Q8IUC0
  ENSP ID: ENSP00000347635
MSYNCCSGNFSSRSCGGYLHYPASSCGFSYPSNQVYSTDLCSPSTCQLGSSLYRGCQQTCWEPTSCQTSYVESSPCQTSCYRPRTSLLCSPCQTTYSGSLGFGSSSCRSLGYGSRSCYSVGCGSSGFRSLGYGGCGFPSLGYGVGFCRPTYLASRSCQSSCYRPTCGSGFYY

SEQ ID NO: 43095 - protein, 175 aa, Homo sapiens
  Payload ID: 8813
  Gene Symbol: KRTAP13-2
  Gene Name: keratin associated protein 13-2
  Uniprot ID: Q52LG2
  ENSP ID: ENSP00000382777
MSYNCCSGNFSSRSCGDYLRYPASSRGFSYPSNLVYSTDLCSPSTCQLGSSLYRGCQEICWEPTSCQTSYVESSPCQTSCYRPRTSLLCSPCKTTYSGSLGFGSSSCRSLGYGSRSCYSVGCGSSGVRSLGYGSCGFPSLGYGSGFCRPTYLASRSCQSPCYRPAYGSTFCRSTC

SEQ ID NO: 43096 - protein, 161 aa, Homo sapiens
  Payload ID: 8813
  Gene Symbol: KRTAP13-2
  Gene Name: keratin associated protein 13-2
  ENSP ID: ENSP00000477629
MSYNCCSRNFSSCSHGGYLHYPGSSYPSNLVYSTDLCSPSTCQLGSSLYRGCQEICWEPTSCQTSCYRPRSSVLCSPCQSTYSESLGFGSSSCRSLGYGSRSCYSVGRGSSGVRSLGYGGCGFPSLGYGSGFCHPTYVLFRTFQSSCYRPTCGSGFYRSTC

SEQ ID NO: 43097 - protein, 172 aa, Homo sapiens
  Payload ID: 8814
  Gene Symbol: KRTAP13-3
  Gene Name: keratin associated protein 13-3
  Uniprot ID: Q3SY46
  ENSP ID: ENSP00000375109
MSYNCCSRNFSSCSHGGYLHYPGSSCGSSYPSNLVYSTDLCSPSTCQLGSSLYRGCQETCWRPNSCQTLCVESSPCHTSCYYPRTHMLCNSCLTMHVGSRGFGSNSCCSLSCGSRSCSSLGCGSNGFRYLNYRIHTSPSQSYRSRFCHPIYFPPRRWFHSSCYQPFCRSGFY

SEQ ID NO: 43098 - protein, 160 aa, Homo sapiens
  Payload ID: 8815
  Gene Symbol: KRTAP13-4
  Gene Name: keratin associated protein 13-4
  Uniprot ID: Q3LI77
  ENSP ID: ENSP00000334834
MSYNCCSRNFSSRSFGGYLYYPGSYPSSLVYSTALCSPSTCQLRSSLYRDCQKTCWEPASCQKSCYRPRTSILCCPCQTTCSGSLGFRSSSCRSQGYGSRCCYSLGNGSSGFRFLKYGGCGFPSLSYGSRFCYPNYLASGAWQSSCYRPICGSRFYQFTC

SEQ ID NO: 43099 - protein, 121 aa, Homo sapiens
  Payload ID: 8816
  Gene Symbol: KRTAP1-4
  Gene Name: keratin associated protein 1-4
  Uniprot ID: P0C5Y4
  ENSP ID: ENSP00000366976
MASCSTSGTCGSSCCQPSCCETSCCQPSCCQTSSCGTGCGIGGGIGYGQEGSGGSVSTRIRWCHPDCHVEGTCLPPCYLVSCTPPSCCQLHHAEASCCRPSYCGQSCCRPACCCHCCEPTC

SEQ ID NO: 43100 - protein, 121 aa, Homo sapiens; identical to SEQ ID NO: 43099
  Payload ID: 8816
  Gene Symbol: KRTAP1-4
  Gene Name: keratin associated protein 1-4
  Uniprot ID: P0C5Y4
  ENSP ID: ENSP00000458243

SEQ ID NO: 43101 - protein, 174 aa, Homo sapiens
  Payload ID: 8817
  Gene Symbol: KRTAP1-5
  Gene Name: keratin associated protein 1-5
  Uniprot ID: Q9BYS1
  ENSP ID: ENSP00000355302
MTCCQTSFCGYPSFSISGTCGSSCCQPSCCETSCCQPRSCQTSFCGFPSFSTSGTCSSSCCQPSCCETSCCQPSCCETSCCQPSCCQISSCGTGCGIGGGISYGQEGSSGAVSTRIRWCRPDSRVEGTYLPPCCVVSCTPPSCCQLHHAQASCCRPSYCGQSCCRPVCCCEPTC

SEQ ID NO: 43102 - protein, 174 aa, Homo sapiens; identical to SEQ ID NO: 43101
  Payload ID: 8817
  Gene Symbol: KRTAP1-5
  Gene Name: keratin associated protein 1-5
  Uniprot ID: Q9BYS1
  ENSP ID: ENSP00000461651

SEQ ID NO: 43103 - protein, 137 aa, Homo sapiens
  Payload ID: 8818
  Gene Symbol: KRTAP15-1
  Gene Name: keratin associated protein 15-1
  Uniprot ID: Q3LI76
  ENSP ID: ENSP00000334866
MSYNCSSGNFSSCCFGSYLRYPVSTYNLFYPSNAIYSPNTCQLGSSLYNGCQETYCEPTSCQTSCTLARSYQTSCYCPKNSIFCSPRQTNYIRSLGCGNTGLGSLGCGSTGFQSLDCGSSFYHPTTFSSRNFQATCY

SEQ ID NO: 43104 - protein, 517 aa, Homo sapiens
  Payload ID: 8819
  Gene Symbol: KRTAP16-1
  Gene Name: keratin associated protein 16-1
  Uniprot ID: A8MUX0
  ENSP ID: ENSP00000375147
MSGSCSSRKCFSVPATSLCSTEVSCGGPICLPSSCQSQTWQLVTCQDSCGSSSCGPQCRQPSCPVSSCAQPLCCDPVICEPSCSVSSGCQPVCCEATTCEPSCSVSNCYQPVCFEATICEPSCSVSNCCQPVCFEATVCEPSCSVSSCAQPVCCEPAICEPSCSVSSCCQPVGSEATSCQPVLCVPTSCQPVLCKSSCCQPVVCEPSCCSAVCTLPSSCQPVVCEPSCCQPVCPTPTCSVTSSCQAVCCDPSPCEPSCSESSICQPATCVALVCEPVCLRPVCCVQSSCEPPSVPSTCQEPSCCVSSICQPICSEPSPCSPAVCVSSPCQPTCYVVKRCPSVCPEPVSCPSTSCRPLSCSPGSSASAICRPTCPRTFYIPSSSKRPCSATISYRPVSRPICRPICSGLLTYRQPYMTSISYRPACYRPCYSILRRPACVTSYSCRPVYFRPSCTESDSCKRDCKKSTSSQLDCVDTTPCKVDVSEEAPCQPTEAKPISPTTREAAAAQPAASKPANC

SEQ ID NO: 43105 - protein, 517 aa, Homo sapiens; identical to SEQ ID NO: 43104
  Payload ID: 8819
  Gene Symbol: KRTAP16-1
  Gene Name: keratin associated protein 16-1
  Uniprot ID: A8MUX0
  ENSP ID: ENSP00000460805

SEQ ID NO: 43106 - protein, 105 aa, Homo sapiens
  Payload ID: 8820
  Gene Symbol: KRTAP17-1
  Gene Name: keratin associated protein 17-1
  Uniprot ID: Q9BYP8
  ENSP ID: ENSP00000333993
MGCCPGDCFTCCTQEQNCCEECCCQPGCCGCCGSCCGCGGSGCGGSGCGGSCCGSSCCGSGCGGCGGCGGCGGGCCGSSCCGSSCCGSGCCGPVCCQPTPICDTK

SEQ ID NO: 43107 - protein, 105 aa, Homo sapiens; identical to SEQ ID NO: 43106
  Payload ID: 8820
  Gene Symbol: KRTAP17-1
  Gene Name: keratin associated protein 17-1
  Uniprot ID: Q9BYP8
  ENSP ID: ENSP00000460320

SEQ ID NO: 43108 - protein, 90 aa, Homo sapiens
  Payload ID: 8821
  Gene Symbol: KRTAP19-1
  Gene Name: keratin associated protein 19-1
  Uniprot ID: Q8IUB9
  ENSP ID: ENSP00000375108
MSHYGSYYGGLGYSCGGFGGLGYGYGCGCGSFCRRGSGCGYGGYGYGSGFGSYGYGSGFGGYGYGSGFGGYGYGCCRPSYNGGYGFSGFY

SEQ ID NO: 43109 - protein, 52 aa, Homo sapiens
  Payload ID: 8822
  Gene Symbol: KRTAP19-2
  Gene Name: keratin associated protein 19-2
  Uniprot ID: Q3LHN2
  ENSP ID: ENSP00000335660
MCYGYGCGCGSFCRLGYGCGYEGCRYGCGHRGCGDGCCCPSCYRRYRFTGFY

SEQ ID NO: 43110 - protein, 81 aa, Homo sapiens
  Payload ID: 8823
  Gene Symbol: KRTAP19-3
  Gene Name: keratin associated protein 19-3
  Uniprot ID: Q7Z4W3
  ENSP ID: ENSP00000386376
MSYYGSYYGGLGYGCGGFGGLGYGYGCGCGSFRRLGSGCGYGGYGYGSGFGGYGYGSGFGGYGYGCYRPSYYGGYGFSGFY

SEQ ID NO: 43111 - protein, 72 aa, Homo sapiens
  Payload ID: 8823
  Gene Symbol: KRTAP19-3
  Gene Name: keratin associated protein 19-3
  ENSP ID: ENSP00000484197
MSYYGSYYGGLGYGCGGFGGLGYGYGCGCGSFRRLGSGCGYGGYGYGSGFGGYGYGCCRPSYNGGYGFSGFY

SEQ ID NO: 43112 - protein, 84 aa, Homo sapiens
  Payload ID: 8824
  Gene Symbol: KRTAP19-4
  Gene Name: keratin associated protein 19-4
  Uniprot ID: Q3LI73
  ENSP ID: ENSP00000335567
MSYYGSYYRGLGYGCGGFGGLGYGYGCGCGSFRRLGYGCGFGGNGYGYCRPSCYGGYGFSILLKSYPEDTISEVIRRSFNLTKY

SEQ ID NO: 43113 - protein, 72 aa, Homo sapiens
  Payload ID: 8825
  Gene Symbol: KRTAP19-5
  Gene Name: keratin associated protein 19-5
  Uniprot ID: Q3LI72
  ENSP ID: ENSP00000334985
MNYYGNYYGGLGYGYGGFDDLGYGYGCGCGSFRRLGYGGGYGGYGYGSGFGGYGYRSCRPSCYGGYGFSGFY

SEQ ID NO: 43114 - protein, 58 aa, Homo sapiens
  Payload ID: 8826
  Gene Symbol: KRTAP19-6
  Gene Name: keratin associated protein 19-6
  Uniprot ID: Q3LI70
  ENSP ID: ENSP00000375107
MRYYGSYYRGLGYGCGGFGGLGYGCGCGGYRYGSGYGGYRYGCCRPSCREGYGFSGFY

SEQ ID NO: 43115 - protein, 63 aa, Homo sapiens
  Payload ID: 8827
  Gene Symbol: KRTAP19-7
  Gene Name: keratin associated protein 19-7
  Uniprot ID: Q3SYF9
  ENSP ID: ENSP00000334696
MSYSGSYYGGLGYGCGGFGGLGYGYSCGCGSFRRLGYGCGYGGYRYSCCHPSCYGGYWSSGFY

SEQ ID NO: 43116 - protein, 72 aa, Homo sapiens
  Payload ID: 8827
  Gene Symbol: KRTAP19-7
  Gene Name: keratin associated protein 19-7
  ENSP ID: ENSP00000484007
MSYSGSYYGGLGYGCGGFGGLGYGYSCGCGSFRRLGYGCGYGGYRYGSGYGGYRYGCCRPSCREGYGFSGFY

SEQ ID NO: 43117 - protein, 63 aa, Homo sapiens
  Payload ID: 8828
  Gene Symbol: KRTAP19-8
  Gene Name: keratin associated protein 19-8
  Uniprot ID: Q3LI54
  ENSP ID: ENSP00000372272
MSYYRSYYGGLGYGYGGFGGWGYGYGCGYGSFRRLGYGCGYGGYGFSCCRPLYYGGYGFSAFY

SEQ ID NO: 43118 - protein, 56 aa, Homo sapiens
  Payload ID: 8829
  Gene Symbol: KRTAP20-1
  Gene Name: keratin associated protein 20-1
  Uniprot ID: Q3LI63
  ENSP ID: ENSP00000335503
MIYYSNYYGGYGYGGLGCGYGCGYRGYGCGYGGYGGYGNGYYCPSCYGRYWSYGFY

SEQ ID NO: 43119 - protein, 65 aa, Homo sapiens
  Payload ID: 8830
  Gene Symbol: KRTAP20-2
  Gene Name: keratin associated protein 20-2
  Uniprot ID: Q3LI61
  ENSP ID: ENSP00000330746
MCYYSNYYGGLRYGYGVLGGGYGCGCGYGHGYGGLGCGYGRGYGGYGYGCCRPSCYGRYWSCGFY

SEQ ID NO: 43120 - protein, 44 aa, Homo sapiens
  Payload ID: 8831
  Gene Symbol: KRTAP20-3
  Gene Name: keratin associated protein 20-3
  Uniprot ID: Q3LI60
  ENSP ID: ENSP00000372276
MSYYGNYYGGLGYGYDCKYSYTSGFGAFRILDCGYRCGCGGVWI

SEQ ID NO: 43121 - protein, 44 aa, Homo sapiens
  Payload ID: 8832
  Gene Symbol: KRTAP20-4
  Gene Name: keratin associated protein 20-4
  Uniprot ID: Q3LI62
  ENSP ID: ENSP00000372278
MSYYSHLSGGLGCGLAVAVTMGRTVAVAEYGRCRHGCHSSYSAR

SEQ ID NO: 43122 - protein, 128 aa, Homo sapiens
  Payload ID: 8833
  Gene Symbol: KRTAP2-1
  Gene Name: keratin associated protein 2-1
  Uniprot ID: Q9BYU5
  ENSP ID: ENSP00000375238
MTGSCCGSTFSSLSYGGGCCQPCCCRDPCCCRPVTCQTTVCRPVTCVPRCTRPICEPCRRPVCCDPCSLQEGCCRPITCCPSSCTAVVCRPCCWATTCCQPVSVQSPCCRPPCGQPTPCSTTCRTSSC

SEQ ID NO: 43123 - protein, 124 aa, Homo sapiens
  Payload ID: 8833
  Gene Symbol: KRTAP2-1
  Gene Name: keratin associated protein 2-1
  ENSP ID: ENSP00000446373
MTGSCCGSTFSSLSYGGGCCQPCCCRDPCCCRPVTCQTTVCRPVTCVPRCTRPICEPCRRPVCCDPCSLQEGCCRPITCCPSSCTAVVCRPCCWATTCCQPPVSVQSPCGQPTPCSTTCRTSSC

SEQ ID NO: 43124 - protein, 128 aa, Homo sapiens; identical to SEQ ID NO: 43122
  Payload ID: 8833
  Gene Symbol: KRTAP2-1
  Gene Name: keratin associated protein 2-1
  Uniprot ID: Q9BYU5
  ENSP ID: ENSP00000458444

SEQ ID NO: 43125 - protein, 124 aa, Homo sapiens; identical to SEQ ID NO: 43123
  Payload ID: 8833
  Gene Symbol: KRTAP2-1
  Gene Name: keratin associated protein 2-1
  ENSP ID: ENSP00000484076

SEQ ID NO: 43126 - protein, 79 aa, Homo sapiens
  Payload ID: 8834
  Gene Symbol: KRTAP21-1
  Gene Name: keratin associated protein 21-1
  Uniprot ID: Q3LI58
  ENSP ID: ENSP00000335566
MCCNYYGNSCGYGSGCGCGYGSGSGCGCGYGTGYGCGYGCGFGSHYGCGYGTGYGCGYGSGSGYCGYRPFCFRRCYSSC

SEQ ID NO: 43127 - protein, 83 aa, Homo sapiens
  Payload ID: 8835
  Gene Symbol: KRTAP21-2
  Gene Name: keratin associated protein 21-2
  Uniprot ID: Q3LI59
  ENSP ID: ENSP00000334287
MCCNYYRNCCGGCGYGSGWSSGCGYGCGYGCGYGSGCRYGSGYGTGCGYGCGYGSGCGYGCGYSSSCCGYRPLCYRRCYSSCY

SEQ ID NO: 43128 - protein, 58 aa, Homo sapiens
  Payload ID: 8836
  Gene Symbol: KRTAP21-3
  Gene Name: keratin associated protein 21-3
  Uniprot ID: Q3LHN1
  ENSP ID: ENSP00000404517
MYFNYKSVCGSCGFGSCYGCGYGCIHSTHCGCNGYYGCYENKYSVIDDLIFFASKKCH

SEQ ID NO: 43129 - protein, 123 aa, Homo sapiens
  Payload ID: 8837
  Gene Symbol: KRTAP2-2
  Gene Name: keratin associated protein 2-2
  Uniprot ID: Q9BYT5
  ENSP ID: ENSP00000381494
MTGSCCGSTFSSLSYGGGCCQPCCCRDPCCCRPVTCQTTVCRPVTCVPRCTRPICEPCRRPVCCDPCSLQEGCCRPITCCPSSCTAVVCRPCCWATTCCQPVSVQSPCGQPTPCSTTCRTSSC

SEQ ID NO: 43130 - protein, 129 aa, Homo sapiens
  Payload ID: 8837
  Gene Symbol: KRTAP2-2
  Gene Name: keratin associated protein 2-2
  ENSP ID: ENSP00000437407
MTGSCCGSTFSSLSYGGGCCQPCCCRDPCCCRPVTCQTTVCRPVTCVPRCTRPICEPCRRPVCCDPCSLQEGCCRPITCCPSSCTAVVCRPCCWATTCCQPVSVQSPCGQPSPCGQPTPCSTTCRTSSC

SEQ ID NO: 43131 - protein, 128 aa, Homo sapiens; identical to SEQ ID NO: 43122
  Payload ID: 8837
  Gene Symbol: KRTAP2-2
  Gene Name: keratin associated protein 2-2
  ENSP ID: ENSP00000461385

SEQ ID NO: 43132 - protein, 123 aa, Homo sapiens; identical to SEQ ID NO: 43129
  Payload ID: 8837
  Gene Symbol: KRTAP2-2
  Gene Name: keratin associated protein 2-2
  ENSP ID: ENSP00000481658

SEQ ID NO: 43133 - protein, 48 aa, Homo sapiens
  Payload ID: 8838
  Gene Symbol: KRTAP22-1
  Gene Name: keratin associated protein 22-1
  Uniprot ID: Q3MIV0
  ENSP ID: ENSP00000333887
MSFDNNYHGGQGYAKGGLGCSYGCGLSGYGYACYCPWCYERSWFSGCF

SEQ ID NO: 43134 - protein, 45 aa, Homo sapiens
  Payload ID: 8839
  Gene Symbol: KRTAP22-2
  Gene Name: keratin associated protein 22-2
  Uniprot ID: Q3LI68
  ENSP ID: ENSP00000372281
MCYYHNYYGSLDYGCSYGSEYGNSGYACNFPCSYGRFLLAPRKKF

SEQ ID NO: 43135 - protein, 128 aa, Homo sapiens
  Payload ID: 8840
  Gene Symbol: KRTAP2-3
  Gene Name: keratin associated protein 2-3
  Uniprot ID: P0C7H8
  ENSP ID: ENSP00000375237
MTGSCCGSTLSSLSYGGGCCQPCCCRDPCCCRPVTCQTTVCRPVTCVPRCTRPICEPCRRPVCCDPCSLQEGCCRPITCCPSSCTAVVCRPCCWATTCCQPVSVQSPCCRPPCGQPTPCSTTCRTSSC

SEQ ID NO: 43136 - protein, 128 aa, Homo sapiens; identical to SEQ ID NO: 43135
  Payload ID: 8840
  Gene Symbol: KRTAP2-3
  Gene Name: keratin associated protein 2-3
  Uniprot ID: P0C7H8
  ENSP ID: ENSP00000459261

SEQ ID NO: 43137 - protein, 65 aa, Homo sapiens
  Payload ID: 8841
  Gene Symbol: KRTAP23-1
  Gene Name: keratin associated protein 23-1
  Uniprot ID: A1A580
  ENSP ID: ENSP00000346536
MSYNCCCGNFSSHSCEGYLCYSGYSRGGSSYPSNLVYSTEPLISQHLPAGFLSLQGLSGDLLGNP

SEQ ID NO: 43138 - protein, 128 aa, Homo sapiens; identical to SEQ ID NO: 43135
  Payload ID: 8842
  Gene Symbol: KRTAP2-4
  Gene Name: keratin associated protein 2-4
  Uniprot ID: Q9BYR9
  ENSP ID: ENSP00000377583

SEQ ID NO: 43139 - protein, 128 aa, Homo sapiens; identical to SEQ ID NO: 43135
  Payload ID: 8842
  Gene Symbol: KRTAP2-4
  Gene Name: keratin associated protein 2-4
  Uniprot ID: Q9BYR9
  ENSP ID: ENSP00000458927

SEQ ID NO: 43140 - protein, 254 aa, Homo sapiens
  Payload ID: 8843
  Gene Symbol: KRTAP24-1
  Gene Name: keratin associated protein 24-1
  Uniprot ID: Q3LI83
  ENSP ID: ENSP00000339238
MPAGSMSTTGYPGVCSTTSYRTHCYIPVTSSVTLSSSDLSPTFGHCLPSSYQGNLWLLDYCQESYGEAPTCKSPSCEPKTCSTTGCDPSNSSVPCNSPSAGQVFSVCETTNVSPSPSCSPSTQTNGYVCNCHIPTRNASKACQTLRNGSNCFGQLNCLSKSFQTLNHCRLSTLGYKSYQNPCFIPSYVSPLCYISNSCQPQSYLVRNYHYSSYRPTSCRPLSYLSRSFRSLSYIPSTFPPLRYLCSGSRPLKCY

SEQ ID NO: 43141 - protein, 102 aa, Homo sapiens
  Payload ID: 8844
  Gene Symbol: KRTAP25-1
  Gene Name: keratin associated protein 25-1
  Uniprot ID: Q3LHN0
  ENSP ID: ENSP00000398619
MHNRSQGFFFSSCHPQNHVSYGCQSPSFIFCRCQSLNFVSRTCYPLSYFSYGNQTIGSISNSFRSLNYVSHSFQPISFMHSSFQPACSDFVGWQSPFLRRTC

SEQ ID NO: 43142 - protein, 210 aa, Homo sapiens
  Payload ID: 8845
  Gene Symbol: KRTAP26-1
  Gene Name: keratin associated protein 26-1
  Uniprot ID: Q6PEX3
  ENSP ID: ENSP00000353742
MSCPNYCSGNSNSGSLRTSRHIPLTSIDLCPTSVSCGDVLYLPTSSQDHTWVTDNCQETCGEPTSCQPVHCETGNLETSCGSSTAYYVPRPCQGSSFLPASFFSSSCLPVSCRPQRYVSSGCRPLRPLLNSYQPIGDCVPNAYRPQFCLSKSCQPQNLLTSGCQPSSCLAYRPQSLHVVSSSLRPLGPLFSGCQPLTHVFSTCRPSCSGL

SEQ ID NO: 43143 - protein, 207 aa, Homo sapiens
  Payload ID: 8846
  Gene Symbol: KRTAP27-1
  Gene Name: keratin associated protein 27-1
  Uniprot ID: Q3LI81
  ENSP ID: ENSP00000372286
MPHSHCHSLRSFHNAPPLSAITHGTNPITFEDRLCLPSSFHSRTCFLDNFQETCNETTSCQMTNCEQDLFTDDSCVQSNCFPGVVQTTYSNSRPCERTACQSESSSAGLACVSQPCQSESTQQMGFVAQSCQPASLKGNSCPPKTSKSKNFETLERASSQCQCQSQNPESSSCRPLVNVAPEPQLLESSPGVEPTCCVTGGSQLPSK

SEQ ID NO: 43144 - protein, 341 aa, Homo sapiens
  Payload ID: 8847
  Gene Symbol: KRTAP29-1
  Gene Name: keratin associated protein 29-1
  Uniprot ID: A8MX34
  ENSP ID: ENSP00000375148
MADGCCPGNTTAIPAVPTITTYPVKGGFRHALCLPSSCHSRMWQLVTCQESCQPSIGAPSGCDPASCQPTRLPATSCVGFVCQPMCSHAACYQSGTGQSPCLVSSCQPSCSESTCCQEKCCDASPCQQSSCQESVCMSGSCQAACGQSVCCDAGSCQPSCSEVTSCPETSCLPTICTASPCQPTWCQGSSCQPVSGEGQPCKSTYYQPICYIFKPCQSALYMPVPCQPSTCVFSSCNTTCCVPSHCQPPHCQLVPSTCFIYQPVANCQAPCSTKNCCKPASCDTVISGQPTCDGPPSYNQSGCKSACCVTGLGTSPSSGSNCLPTSCQPSCESSFCKATLC

SEQ ID NO: 43145 - protein, 341 aa, Homo sapiens; identical to SEQ ID NO: 43144
  Payload ID: 8847
  Gene Symbol: KRTAP29-1
  Gene Name: keratin associated protein 29-1
  Uniprot ID: A8MX34
  ENSP ID: ENSP00000459109

SEQ ID NO: 43146 - protein, 341 aa, Homo sapiens; identical to SEQ ID NO: 43144
  Payload ID: 8847
  Gene Symbol: KRTAP29-1
  Gene Name: keratin associated protein 29-1
  Uniprot ID: A8MX34
  ENSP ID: ENSP00000461202

SEQ ID NO: 43147 - protein, 98 aa, Homo sapiens
  Payload ID: 8848
  Gene Symbol: KRTAP3-1
  Gene Name: keratin associated protein 3-1
  Uniprot ID: Q9BYR8
  ENSP ID: ENSP00000375430
MYCCALRSCSVPTGPATTFCSFDKSCRCGVCLPSTCPHEISLLQPICCDTCPPPCCKPDTYVPTCWLLNNCHPTPGLSGINLTTYVQPGCESPCEPRC

SEQ ID NO: 43148 - protein, 98 aa, Homo sapiens; identical to SEQ ID NO: 43147
  Payload ID: 8848
  Gene Symbol: KRTAP3-1
  Gene Name: keratin associated protein 3-1
  Uniprot ID: Q9BYR8
  ENSP ID: ENSP00000459883

SEQ ID NO: 43149 - protein, 98 aa, Homo sapiens
  Payload ID: 8849
  Gene Symbol: KRTAP3-2
  Gene Name: keratin associated protein 3-2
  Uniprot ID: Q9BYR7
  ENSP ID: ENSP00000375429
MDCCASRSCSVPTGPATTICSSDKSCRCGVCLPSTCPHTVWLLEPICCDNCPPPCHIPQPCVPTCFLLNSCQPTPGLETLNLTTFTQPCCEPCLPRGC

SEQ ID NO: 43150 - protein, 98 aa, Homo sapiens; identical to SEQ ID NO: 43149
  Payload ID: 8849
  Gene Symbol: KRTAP3-2
  Gene Name: keratin associated protein 3-2
  Uniprot ID: Q9BYR7
  ENSP ID: ENSP00000459215

SEQ ID NO: 43151 - protein, 98 aa, Homo sapiens
  Payload ID: 8850
  Gene Symbol: KRTAP3-3
  Gene Name: keratin associated protein 3-3
  Uniprot ID: Q9BYR6
  ENSP ID: ENSP00000375428
MDCCASRGCSVPTGPATTICSSDKSCRCGVCLPSTCPHTVWLLEPTCCDNCPPPCHIPQPCVPTCFLLNSCQPTPGLETLNLTTFTQPCCEPCLPRGC

SEQ ID NO: 43152 - protein, 98 aa, Homo sapiens; identical to SEQ ID NO: 43151
  Payload ID: 8850
  Gene Symbol: KRTAP3-3
  Gene Name: keratin associated protein 3-3
  Uniprot ID: Q9BYR6
  ENSP ID: ENSP00000458618

SEQ ID NO: 43153 - protein, 146 aa, Homo sapiens
  Payload ID: 8851
  Gene Symbol: KRTAP4-1
  Gene Name: keratin associated protein 4-1
  Uniprot ID: Q9BYQ7
  ENSP ID: ENSP00000381489
MVNSCCGSVCSDQGCDQGLCQETCCRPSCCQTTCCCPSCVVSSCCRPSCSQTTCCQTTCCRPSCCHPVCCQTTCRPSCGVSSCCRPLCCQTTCHPSCGMSSCCRPLCCQTTCRPSCGVSSCCRPLCCQTTCCRATCCRPSCCGSSC

SEQ ID NO: 43154 - protein, 127 aa, Homo sapiens
  Payload ID: 8851
  Gene Symbol: KRTAP4-1
  Gene Name: keratin associated protein 4-1
  ENSP ID: ENSP00000481610
MVNSCCGSVCSDQGCDQGLCQETCCRPSCCQTTCCCPSCVVSSCCRPSCSQTTCCQTTCCRPSCCHPVCCQTTCRPSCGVSSCCRPLCCQTTCRPSCGVSSCCRPLCCQTTCCRATCCRPSCCGSSC

SEQ ID NO: 43155 - protein, 195 aa, Homo sapiens
  Payload ID: 8852
  Gene Symbol: KRTAP4-11
  Gene Name: keratin associated protein 4-11
  Uniprot ID: Q9BYQ6
  ENSP ID: ENSP00000375232
MVNSCCGSVCSHQGCGRDLCQETCCRPSCCETTCCRTTYCRPSCCVSSCCRPQCCQSVCCQPTCCRPRCCISSCCRPSCCVSSCCKPQCCQSMCCQPTCCRPRCCISSCCRPSCCVSSCCRPQCCQSVCCQPTCCHPSCSISSCCRPSCCESSCCRPCCCLRPVCGRVSCHTTCYRPTCVISSCPRPLCCASSCC

SEQ ID NO: 43156 - protein, 195 aa, Homo sapiens
  Payload ID: 8852
  Gene Symbol: KRTAP4-11
  Gene Name: keratin associated protein 4-11
  Uniprot ID: Q9BYQ6
  ENSP ID: ENSP00000460506
MVNSCCGSVCSHQGCGQDLCQETCCRPSCCETTCCRTTYCRPSCCVSSCCRPQCCQSVCCQPTCCRPRCCISSCCRPSCCVSSCCKPQCCQSMCCQPTCCRPRCCISSCCRPSCCVSSCCRPQCCQSVCCQPTCCHPSCSISSCCRPSCCESSCCRPCCCLRPVCGGVSCHTTCYRPTCVISSCPRPLCCASSCC

SEQ ID NO: 43157 - protein, 210 aa, Homo sapiens
  Payload ID: 8852
  Gene Symbol: KRTAP4-11
  Gene Name: keratin associated protein 4-11
  ENSP ID: ENSP00000479909
MVNSCCGSVCSDQGCGPVCCQPTCCRPSCCQTTCCRTTCCRPSCCVSSCCRPQCCQSVCCQPTCCRPSCCQTTCCRPRCCISSCCRPSCCVSSCCKPQCCQSMCCQPTCCRPRCCISSCCRPSCCVSSCCRPQCCQSVCCQPTCCHPSCSISSCCRPSCCESSCCRPCCCRPCCCVRPVCGRVSCHTTCYRPTCVISTCPRPVCCASSCC

SEQ ID NO: 43158 - protein, 201 aa, Homo sapiens
  Payload ID: 8853
  Gene Symbol: KRTAP4-12
  Gene Name: keratin associated protein 4-12
  Uniprot ID: Q9BQ66
  ENSP ID: ENSP00000377582
MVNSCCGSVCSDQGCGLENCCRPSCCQTTCCRTTCCRPSCCVSSCCRPQCCQSVCCQPTCCRPSCCQTTCCRTTCCRPSCCVSSCCRPQCCQSVCCQPTCCRPSCCQTTCCRTTCCRPSCCVSSCCRPQCCQSVCCQPTCCRPSCCISSSCCPSCCESSCCRPCCCLRPVCGRVSCHTTCYRPTCVISTCPRPLCCASSCC

SEQ ID NO: 43159 - protein, 201 aa, Homo sapiens; identical to SEQ ID NO: 43158
  Payload ID: 8853
  Gene Symbol: KRTAP4-12
  Gene Name: keratin associated protein 4-12
  Uniprot ID: Q9BQ66
  ENSP ID: ENSP00000458979

SEQ ID NO: 43160 - protein, 235 aa, Homo sapiens
  Payload ID: 8854
  Gene Symbol: KRTAP4-16P
  Gene Name: keratin associated protein 4-16, pseudogene
  ENSP ID: ENSP00000411198
MCSSKMPCSPSASSLCAASPPNCCHPSCCQTTCCRTTSCSHSCSVSSCCRPQCCHSVCCQPTCCRPSCCQTTCCRTTCCHPSCCVSSCCRPQCCHSVCFQPTCCHPSCCISSSCCPSCCESSCCCPCCCLRPVCGRVSCHVTCYHPTCVISTCPHPLCCASPPLPLPFPSPPVPLPFFLSLALPSPPRPSPPLLSPVLIPSPSPSPSLPSLSPPLPSPPLPSPHFPSVNPKSMLQ

SEQ ID NO: 43161 - protein, 235 aa, Homo sapiens; identical to SEQ ID NO: 43160
  Payload ID: 8854
  Gene Symbol: KRTAP4-16P
  Gene Name: keratin associated protein 4-16, pseudogene
  ENSP ID: ENSP00000461664

SEQ ID NO: 43162 - protein, 136 aa, Homo sapiens
  Payload ID: 8855
  Gene Symbol: KRTAP4-2
  Gene Name: keratin associated protein 4-2
  Uniprot ID: Q9BYR5
  ENSP ID: ENSP00000366955
MVNSCCGSVCSDQGCGLENCCRPSCCQTTCCRTTCCRPSCCVSSCCRPQCCQSVCCQPTCCSPSCCQTTCCRTTCCRPSCCVSSCFRPQCCQSVYCQPTCCRPSCGQTTCCRTTCYRPSCCVSTCCRPTCSSGSCC

SEQ ID NO: 43163 - protein, 195 aa, Homo sapiens
  Payload ID: 8856
  Gene Symbol: KRTAP4-3
  Gene Name: keratin associated protein 4-3
  Uniprot ID: Q9BYR4
  ENSP ID: ENSP00000375151
MVSSCCGSVCSDQSCGQGLGQESCCRPSCCQTTCCRTTCCRPSCCISSCCRPSCCISSCCKPSCCRTTCCRPSCCISSCCRPSCCISSCCKPSCCRTTCCRPSCCISSCCRPSCCISSCCKPSCCQTTCCRPSCCISSCYRPQCCQPSCCRPACCISSCCHPSCCVSSCRCPFSCPTTCCRTTCFHPICCGSSCC

SEQ ID NO: 43164 - protein, 166 aa, Homo sapiens
  Payload ID: 8857
  Gene Symbol: KRTAP4-4
  Gene Name: keratin associated protein 4-4
  Uniprot ID: Q9BYR3
  ENSP ID: ENSP00000375076
MVNSCCGSVCSDQGCGLENCCRPSYCQTTCCRTTCCRPSCCVSSCCRPQCCQTTCCRTTCCHPSCCVSSCCRPQCCQSVCCQPTCCRPQCCQTTCCRTTCCRPSCCRPQCCQSVCCQPTCCCPSYCVSSCCRPQCCQTTCCRTTCCRPSCCVSRCYRPHCGQSLCC

SEQ ID NO: 43165 - protein, 181 aa, Homo sapiens
  Payload ID: 8858
  Gene Symbol: KRTAP4-5
  Gene Name: keratin associated protein 4-5
  Uniprot ID: Q9BYR2
  ENSP ID: ENSP00000340546
MVSSCCGSVSSEQSCGLENCCRPSCCQTTCCRTTCCRPSCCKPQCCQSVCYQPTCCHPSCCISSCCRPYCCESSCCRPCCCQTTCCRTTCCRTTCCCPSCCVSSCCRPQCCQSVCCQPTCCRPSCCISSCCHPSCCESSCCRPCCCVRPVCGRVSCHTTCYRPTCVISTCPRPLCCASSCC

SEQ ID NO: 43166 - protein, 205 aa, Homo sapiens
  Payload ID: 8859
  Gene Symbol: KRTAP4-6
  Gene Name: keratin associated protein 4-6
  Uniprot ID: Q9BYQ5
  ENSP ID: ENSP00000328270
MVSSCCGSVCSDQGCGLETCCRPSCCQTTCCRTTCCRPSCCVSSCCRPQCCQSVCCQPTCCRPSCCPSCCQTTCCRTTCCRPSCCVSSCCRPQCCQSVCCQPTCCRPSCSISSCCRPSCCVSRCCRSQCCQSVCCQPTCCRPSCCISSCCRPSCCESSCCRPCCCRPCCCLRPVCGRVSCHTTCYRPTCVISTCPRPLCCASSCC

SEQ ID NO: 43167 - protein, 155 aa, Homo sapiens
  Payload ID: 8860
  Gene Symbol: KRTAP4-7
  Gene Name: keratin associated protein 4-7
  Uniprot ID: Q9BYR0
  ENSP ID: ENSP00000375236
MVSSCCGSVCSDQGCSQDLCQETCCRPSCCQTTCCRTTCYRPSCCVSSCCRPQCCQSVCCQPTCCRPTCCETTCCHPRCCISSCCRPSCCMSSCCKPQCCQSVCCQPTCCRPSCCRPCCCLRPVCGRVSCHTTCYRPTCVISTCPRPLCCASSCC

SEQ ID NO: 43168 - protein, 140 aa, Homo sapiens
  Payload ID: 8860
  Gene Symbol: KRTAP4-7
  Gene Name: keratin associated protein 4-7
  ENSP ID: ENSP00000480672
MVSSCCGSVCSDQGCSQDLCQETCCRPSCCQTTCCRTTCYRPSCCVSSCCRPQCCQSVCCQPTCCRPTCCETTCCHPRCCISSCCRPSCCMSSCCKPQCCQSVCCQPTCCRPSCCRPCCCRPTCVISTCPRPLCCASSCC

SEQ ID NO: 43169 - protein, 205 aa, Homo sapiens
  Payload ID: 8860
  Gene Symbol: KRTAP4-7
  Gene Name: keratin associated protein 4-7
  ENSP ID: ENSP00000482443
MVSSCCGSVCSDQGCSQDLCQETCCRPSCCQTTCCRTTCYRPSCCVSSCCRPQCCQSVCCQPTCCRPTCCETTCCHPRCCISSCCRPSCCMSSCCKPQCCQSVCCQPTCCRPSCCISSCCRPSCCVSSCCKPQCCQSVCCQPNCCRPSCSISSCCRPSCCESSCCRPCCCVRPVCGRVSCHTTCYRPTCVISSCPRPLCCASSCC

SEQ ID NO: 43170 - protein, 155 aa, Homo sapiens
  Payload ID: 8861
  Gene Symbol: KRTAP4-8
  Gene Name: keratin associated protein 4-8
  ENSP ID: ENSP00000325023
MVNSCCGSVCSDQGCGQDLCQETCCCPSCCQTTCCRTTCYRPSYSVSCCCRPQCCQSVCCQPTCCRPSCCVPTCCHPSCCISSCCRPSCCVSSCCKPQCCQSVCCQPNCCRPSCCRPCCCLRPVCGRVSCHTTCYRPACVISTCPRPVCCASSCC

SEQ ID NO: 43171 - protein, 185 aa, Homo sapiens
  Payload ID: 8861
  Gene Symbol: KRTAP4-8
  Gene Name: keratin associated protein 4-8
  Uniprot ID: Q9BYQ9
  ENSP ID: ENSP00000328444
MVNSCCGSVCSDQGCGQDLCQETCCCPSCCQTTCCRTTCYRPSYSVSCCCRPQCCQSVCCQPTCCRPSCCVSSCCKPQCCQSVCCQPTCCHPSCCISSCCRPSCCVSSCCKPQCCQSVCCQPNCCRPSCSISSCCRPSCCESSCCRPCCCLRPVCGRVSCHTTCYRPACVISTCPRPVCCASSCC

SEQ ID NO: 43172 - protein, 195 aa, Homo sapiens
  Payload ID: 8861
  Gene Symbol: KRTAP4-8
  Gene Name: keratin associated protein 4-8
  ENSP ID: ENSP00000461030
MVNSCCGSVCSDQGCGQDLCQETCCCPSCCQTTCCRTTCYRPSYSVSCCCRPQCCQSVCCQPTCCRPRCCISSCCRPSCCVSSCCKPQCCQSVCCQPTCCHPSCCISSCCRPSCCVSSCCKPQCCQSVCCQPTCCHPSCSISSCCRPSCCESSCCRPCCCVRPVCGRVSCHTTCYRPTCVISTCPRPVCCASSCC

SEQ ID NO: 43173 - protein, 185 aa, Homo sapiens
  Payload ID: 8861
  Gene Symbol: KRTAP4-8
  Gene Name: keratin associated protein 4-8
  ENSP ID: ENSP00000484022
MVNSCCGSVCSDQGCGQDLCQETCCCPSCCQTTCCRTTCYRPSYSVSCCCRPQCCQSVCCQPTCCRPSCCVSSCCKPQCCQSVCCQPTCCHPSCCISSCCRPSCCVSSCCKPQCCQSVCCQPTCCHPSCSISSCCRPSCCESSCCRPCCCVRPVCGRVSCHTTCYRPTCVISTCPRPVCCASSCC

SEQ ID NO: 43174 - protein, 210 aa, Homo sapiens
  Payload ID: 8862
  Gene Symbol: KRTAP4-9
  Gene Name: keratin associated protein 4-9
  Uniprot ID: Q9BYQ8
  ENSP ID: ENSP00000375234
MVSSCCGSVCSDQGCGQDLCQETCCRPSCCETTCCRTTCCRPSCCVSSCCRPQCCQSVCCQPTCSRPSCCQTTCCRTTCYRPSCCVSSCCRPQCCQPACCQPTCCRPSCCETTCCHPRCCISSCCRPSCCVSSCCKPQCCQSVCCQPNCCRPSCSISSCCRPSCCESSCCRPCCCVRPVCGRVSCHTTCYRPTCVISSCPRPLCCASSCC

SEQ ID NO: 43175 - protein, 210 aa, Homo sapiens
  Payload ID: 8862
  Gene Symbol: KRTAP4-9
  Gene Name: keratin associated protein 4-9
  ENSP ID: ENSP00000461444
MVSSCCGSVCSDQGCGQDLCQETCCRPSCCETTCCRTTCCRPSCCVSSCCRPQCCQSVCCQPTCSRPSCCQTTCCRTTCYRPSCCVSSCCRPQCCQPVCCQPTCCRPSCCETTCCHPRCCISSCCRPSCCVSSCCKPQCCQSVCCQPNCCRPSCSISSCCRPSCCESSCCRPCCCVRPVCGRVSCHTTCYRPTCVISSCPRPLCCASSCC

SEQ ID NO: 43176 - protein, 185 aa, Homo sapiens
  Payload ID: 8862
  Gene Symbol: KRTAP4-9
  Gene Name: keratin associated protein 4-9
  ENSP ID: ENSP00000483635
MVSSCCGSVCSDQGCGQDLCQETCCRPSCCETTCCRTTCCRPSCCVSSCCRPQCCQSVCCQPTCYRPSCCVSSCCRPQCCQPACCQPTCCRPRCCISSCCRPSCCVSSCCKPQCCQSVCCQPNCCRPSCSISSCCRPSCCESSCCRPCCCVRPVCGRVSCHTTCYRPTCVISSCPRPLCCASSCC

SEQ ID NO: 43177 - protein, 278 aa, Homo sapiens
  Payload ID: 8863
  Gene Symbol: KRTAP5-1
  Gene Name: keratin associated protein 5-1
  Uniprot ID: Q6L8H4
  ENSP ID: ENSP00000371606
MGCCGCSGGCGSSCGGCGSGCGGCGSGCGGCGSGCGGSGSSCCVPVCCCKPVCCRVPTCSCSSCGKGGCGSSGGSKGGCGSCGGCKGGCGSCGGSKGGCGSCGGSKGGCGSCGGSKGGCGSGCGGCGSSCCVPVCCCKPMCCCVPACSCSSCGKGGCGSCGCSKGACGSCGGSKGGCGSCGGCKGGCGSCGGSKGGCGSGCGGCGSGCGVPVCCCSCSSCGSCAGSKGGCGSSCSQCSCCKPCCCSSGCGSSCCQSSCCKPCCSQSSCCVPVCCQCKI

SEQ ID NO: 43178 - protein, 278 aa, Homo sapiens; identical to SEQ ID NO: 43177
  Payload ID: 8863
  Gene Symbol: KRTAP5-1
  Gene Name: keratin associated protein 5-1
  Uniprot ID: Q6L8H4
  ENSP ID: ENSP00000481419

SEQ ID NO: 43179 - protein, 278 aa, Homo sapiens; identical to SEQ ID NO: 43177
  Payload ID: 8863
  Gene Symbol: KRTAP5-1
  Gene Name: keratin associated protein 5-1
  Uniprot ID: Q6L8H4
  ENSP ID: ENSP00000486084

SEQ ID NO: 43180 - protein, 167 aa, Homo sapiens
  Payload ID: 8864
  Gene Symbol: KRTAP5-10
  Gene Name: keratin associated protein 5-10
  ENSP ID: ENSP00000365719
MGCCGCSGGCGSGCGGCGSGCGGCGSGCGGYGSGCGGCGSSCCVPVCCCKPVCCCVPACSCSSCGSCGGSKGGCGSCGGSKGGCGSCGCSQCNCCKPCCCSSGCGSCCQSSCCNPCCCQSSCCVPVCCQSSCCKPCCCQSSCCVSSCCRSCCSKSSCCVPICCQYKI

SEQ ID NO: 43181 - protein, 202 aa, Homo sapiens
  Payload ID: 8864
  Gene Symbol: KRTAP5-10
  Gene Name: keratin associated protein 5-10
  Uniprot ID: Q6L8G5
  ENSP ID: ENSP00000381542
MGCCGCSGGCGSGCGGCGSGCGGCGSGCGGYGSGCGGCGSSCCVPVCCCKPVCCCVPACSCSSCGSCGGSKGDCGSCGGSKGGCGSCGGSKGGCGSCGGSKGGCGSCGGSKGGCGSCGGSKGGCGSCGGSKGGCGSCGCSQCNCCKPCCCSSGCGSCCQSSCCNPCCCQSSCCVPVCCQSSCCKPCCCQSSCCVPVCCQCKI

SEQ ID NO: 43182 - protein, 156 aa, Homo sapiens
  Payload ID: 8865
  Gene Symbol: KRTAP5-11
  Gene Name: keratin associated protein 5-11
  Uniprot ID: Q6L8G4
  ENSP ID: ENSP00000381541
MGCCGCSGGCGSGCGGCGSGSGGCGSGCGGCGSSCCVPICCCKPVCCCVPACSCSSCGSCGGSKGGCGSCGSSKGGCGSCGCSQSNCCKPCCSSSGCGSFCCQSSCSKPCCCQSSCCQSSCCKPCCCQSSCCQSSCFKPCCCQSSCCVPVCCQCKI

SEQ ID NO: 43183 - protein, 176 aa, Homo sapiens
  Payload ID: 8865
  Gene Symbol: KRTAP5-11
  Gene Name: keratin associated protein 5-11
  ENSP ID: ENSP00000478101
MGCCGCSGGCGSGCGGCGSGSGGCGSGCGGCGSSCCVPICCCKPVCCCVPACSCSSCGSCGGSKGGCGSCGSSKGGCGSCGCSQSNCCKPCCSSSGCGSFCCQSSCSKPCCCQSSCCQSSCCKPCCCQSSCCQSSCFKPCCCQSSCCVPVCCHSSCCKPCCSQSSCCVPICCQYKI

SEQ ID NO: 43184 - protein, 185 aa, Homo sapiens
  Payload ID: 8865
  Gene Symbol: KRTAP5-11
  Gene Name: keratin associated protein 5-11
  ENSP ID: ENSP00000481216
MGCCGCSGGCGSGCGGCGSGSGGCGSGCGGCGSSCCVPICCCKPVCCCVPACSCSSCGSCGGSKGGCGSCGSSKGGCGSCGCSQSNCCKPCCSSSGCGSFCCQSSCSKPCCCQSSCCQSSCCKPCCCQSSCCQSSCFKPCCCQSSCCKLCCCSSGCGSTCSQSSCCKPCCSQSSCCVPICCQYKI

SEQ ID NO: 43185 - protein, 177 aa, Homo sapiens
  Payload ID: 8866
  Gene Symbol: KRTAP5-2
  Gene Name: keratin associated protein 5-2
  Uniprot ID: Q701N4
  ENSP ID: ENSP00000400041
MGCCGCSRGCGSGCGGCGSSCGGCGSGCGGCGSGRGGCGSGCGGCSSSCGGCGSRCYVPVCCCKPVCSWVPACSCTSCGSCGGSKGGCGSCGGSKGGCGSCGGSKGGCGSCGCSQSSCCKPCCCSSGCGSSCCQSSCCKPCCCQSSCCVPVCCQSSCCKPCCCQSNCCVPVCCQCKI

SEQ ID NO: 43186 - protein, 177 aa, Homo sapiens; identical to SEQ ID NO: 43185
  Payload ID: 8866
  Gene Symbol: KRTAP5-2
  Gene Name: keratin associated protein 5-2
  Uniprot ID: Q701N4
  ENSP ID: ENSP00000484511

SEQ ID NO: 43187 - protein, 177 aa, Homo sapiens; identical to SEQ ID NO: 43185
  Payload ID: 8866
  Gene Symbol: KRTAP5-2
  Gene Name: keratin associated protein 5-2
  Uniprot ID: Q701N4
  ENSP ID: ENSP00000487099

SEQ ID NO: 43188 - protein, 238 aa, Homo sapiens
  Payload ID: 8867
  Gene Symbol: KRTAP5-3
  Gene Name: keratin associated protein 5-3
  Uniprot ID: Q6L8H2
  ENSP ID: ENSP00000382592
MGCSGCSGGCGSSCGGCGSSCGGCGSGYGGCGSGCCVPVCCCKPVCCCVPACSCSSCGSCGGSKGVCGSCGGCKGGCGSCGGSKGGCGSSCCVPVCCSSSCGSCGGSKGVCGFRGGSKGGCGSCGCSQCSCYKPCCCSSGCGSSCCQSSCCKPSCSQSSCCKPCCSQSSCCKPCCCSSGCGSSCCQSSCCKPCCSQSSCCKPCCCSSGCGSSCCQSSCCKPCSSQSSCCVPICCQCKI

SEQ ID NO: 43189 - protein, 238 aa, Homo sapiens; identical to SEQ ID NO: 43188
  Payload ID: 8867
  Gene Symbol: KRTAP5-3
  Gene Name: keratin associated protein 5-3
  Uniprot ID: Q6L8H2
  ENSP ID: ENSP00000478585

SEQ ID NO: 43190 - protein, 169 aa, Homo sapiens
  Payload ID: 8867
  Gene Symbol: KRTAP5-3
  Gene Name: keratin associated protein 5-3
  ENSP ID: ENSP00000484325
MGCSGCSGGCGSSCGGCGSSCGGCGSGYGGCGSGCCVPVCCCKPVCCCVPACSCSSCGKGGCGSCGGSKGGCGSCGCSQCSCCKPCCCSSGCGSSCCQSSCCKPCCSQSSCCKPCCCSSGCGSSCCQSSCCKPCCCSSGCGSSCCQSSCCKPCCSQSSCCVPVCCQCKI

SEQ ID NO: 43191 - protein, 238 aa, Homo sapiens; identical to SEQ ID NO: 43188
  Payload ID: 8867
  Gene Symbol: KRTAP5-3
  Gene Name: keratin associated protein 5-3
  Uniprot ID: Q6L8H2
  ENSP ID: ENSP00000487561

SEQ ID NO: 43192 - protein, 228 aa, Homo sapiens
  Payload ID: 8868
  Gene Symbol: KRTAP5-4
  Gene Name: keratin associated protein 5-4
  ENSP ID: ENSP00000382590
MGCCGCSGGCGSGCGGCGSGCGGCGSGCGGCGSGCGGCGSGCGGCGSSCCVPICCCKPVCCCVPACSCSSCGSCGGSKGGYGSCGGSKGGCVSCGGSKGGCGSCGGSKGGCGSCGGSKGGCGSCGGSKGGCGSCGCSQCSCCKPCCFSSGCGSSCCQSSCCKPCCSSSGCGSSCCQSSCCKPYCCQSSCCKPCCSSSGCGSSCCQSSCCNPCCSQSSCCVPVCCQCKI

SEQ ID NO: 43193 - protein, 219 aa, Homo sapiens
  Payload ID: 8868
  Gene Symbol: KRTAP5-4
  Gene Name: keratin associated protein 5-4
  ENSP ID: ENSP00000478428
MGCCGCSGGCGSGCGGCGSGCGGCGSGCGGCGSGCGGCGSGCGGCGSSCCVPICCCKPVCCCVPACSCSSCGSCGGSKGGYGSCGGSKGGCVSCGGSKGGCGSCGGSKGGCGSCGGSKGGCGSCGGSKGGCGSCGCSQCSCCKPCCFSSGCGSSCCQSSCCKPSCCQSSCCKPYCCQSSCCKPCCSSSGCGSSCCQSSCCNPCCSQSSCCVPVCCQCKI

SEQ ID NO: 43194 - protein, 219 aa, Homo sapiens; identical to SEQ ID NO: 43193
  Payload ID: 8868
  Gene Symbol: KRTAP5-4
  Gene Name: keratin associated protein 5-4
  ENSP ID: ENSP00000480265

SEQ ID NO: 43195 - protein, 187 aa, Homo sapiens
  Payload ID: 8868
  Gene Symbol: KRTAP5-4
  Gene Name: keratin associated protein 5-4
  ENSP ID: ENSP00000481071
MGCCGCSGGCGSGCGGCGSGCGGCGSGCCVPICCCKPVCCCVPACSCSSCGSCGGSKGGCGSCGGSKGGCGSCGGSKGGCGSCGCSQCSCCKPCCCSSGCGSSCCQSSCCKPCCSQSSCCKPCCCSSGCGSSCCQSSCCKPCCSQSSCCKPCCCSSGCGSSCCQSSCCKPCSSQSSCCVPICCQCKI

SEQ ID NO: 43196 - protein, 165 aa, Homo sapiens
  Payload ID: 8868
  Gene Symbol: KRTAP5-4
  Gene Name: keratin associated protein 5-4
  ENSP ID: ENSP00000484814
MGCCGCSGGCGSGCGGCGSGCGGCGSGCGGCGSSCCVPICCCKPVCCCVPACSCSSCGSCGGSKGGCGSCGGSKGGCGSCGGSKGGCGSCGCSQCSCCKPCCCSSGCGSSCCQSSCCKPCCCQSSCCKPCCSSSGCGSSCCQSSCCNPCCSQSSCCVPVCCQCKI

SEQ ID NO: 43197 - protein, 288 aa, Homo sapiens
  Payload ID: 8868
  Gene Symbol: KRTAP5-4
  Gene Name: keratin associated protein 5-4
  Uniprot ID: Q6L8H1
  ENSP ID: ENSP00000486225
MGCCGCSGGCGSGCGGCGSGCGGCGSGCGGCGSGCGGCGSGCGGCGSSCCVPICCCKPVCCCVPACSCSSCGSCGGSKGGYGSCGGSKGGCVSCGGSKGGCGSCGGSKGGCGSCGGSKGGCGSCGGSKGGCVSCGGSKGGCGSCGGSKGGCVSCGGSKGGCGSCGGSKGGCGSCGGSKGGCGSCGGSKGGCGSCGCSQCSCCKPCCCSSGCGSSCCQSSCCKPCCSSSGCGSSCCQSSCCKPYCCQSSCCKPCCSSSGCGSSCCQSSCCNPCCSQSSCCVPVCCQCKI

SEQ ID NO: 43198 - protein, 228 aa, Homo sapiens; identical to SEQ ID NO: 43192
  Payload ID: 8868
  Gene Symbol: KRTAP5-4
  Gene Name: keratin associated protein 5-4
  ENSP ID: ENSP00000486418

SEQ ID NO: 43199 - protein, 237 aa, Homo sapiens
  Payload ID: 8869
  Gene Symbol: KRTAP5-5
  Gene Name: keratin associated protein 5-5
  Uniprot ID: Q701N2
  ENSP ID: ENSP00000382584
MGCCGCSGGCGSGCGGRGSGCGGCGSGCGGCGSGCGGCGSGCGGCGGCGSGCAGCGGCGSGCCVPVCCCKPMCCCVPACSCSSCGKGGCGSCGGSKRGCVSCGVSKGACGSCGGSKGGCGSCGGSKGGCGSCGGSKGGCGSCGGSKGGCGSYGCSQSSCCKPCCCSSGCGSSCCQSSCCKPYCCQSSCCKPYCCQSSCCKPCSCFSGCGSSCCQSSCYKPCCCQSSCCVPVCCQCKI

SEQ ID NO: 43200 - protein, 185 aa, Homo sapiens
  Payload ID: 8869
  Gene Symbol: KRTAP5-5
  Gene Name: keratin associated protein 5-5
  ENSP ID: ENSP00000480306
GGCGSGCGGRGSGCGGCGSGCGGCGSGCGGCGSGCGGCGGCGSGCSCSCSSCGKGGCGSCGGSKRGCVSCGVSKGACGSCGGSKGGCGSCGGSKGGCGSCGGSKGGCGSYGCSQCSCCKPCCCSSGCGSSCCQSSCCKPYCCQSSCCKPCSCFSGCGSSCCQSSCYKPCCCQSSCCVPVCCQCKI

SEQ ID NO: 43201 - protein, 237 aa, Homo sapiens; identical to SEQ ID NO: 43199
  Payload ID: 8869
  Gene Symbol: KRTAP5-5
  Gene Name: keratin associated protein 5-5
  Uniprot ID: Q701N2
  ENSP ID: ENSP00000481348

SEQ ID NO: 43202 - protein, 221 aa, Homo sapiens
  Payload ID: 8869
  Gene Symbol: KRTAP5-5
  Gene Name: keratin associated protein 5-5
  ENSP ID: ENSP00000487288
MGCCGCSGGCGSGCGGLGSGCGGCGSGCGGRGSGCGGCGSGCGGCGSGCGGCGSGCGGCGGCGSGCCVPVCCCKPMCCCVPACSCSSCGKGGCGSCGGSKRGCVSCGVSKGACGSCGGSKGGCGSCGGSKGGCGSCGGSKGGCGSYGCSQCSCCKPCCCSSGCGSSCCQSSCCKPYCCQSSCCKPCSCFSGCGSSCCQSSCYKPCCCQSSCCVPVCCQCKI

SEQ ID NO: 43203 - protein, 129 aa, Homo sapiens
  Payload ID: 8870
  Gene Symbol: KRTAP5-6
  Gene Name: keratin associated protein 5-6
  Uniprot ID: Q6L8G9
  ENSP ID: ENSP00000371595
MGCCGCSGGCGSGCGGCGSGCGGCGSSCCVPICCCKPVCCCVPACSCTSCGSCGGSKGCCGSCGGSKGGCGSCGGSKGGCGSCGCSQCSCCKPCYCSSGCGSSCCQSSCCKPCCSQASCCVPICCQCKI

SEQ ID NO: 43204 - protein, 129 aa, Homo sapiens; identical to SEQ ID NO: 43203
  Payload ID: 8870
  Gene Symbol: KRTAP5-6
  Gene Name: keratin associated protein 5-6
  Uniprot ID: Q6L8G9
  ENSP ID: ENSP00000479098

SEQ ID NO: 43205 - protein, 165 aa, Homo sapiens
  Payload ID: 8871
  Gene Symbol: KRTAP5-7
  Gene Name: keratin associated protein 5-7
  Uniprot ID: Q6L8G8
  ENSP ID: ENSP00000417330
MGCCGCSEGCGSGCGGCGSGCGGCGSGCGGCGSSCCVPVCCCKPVCCCVPACSCSSCGSCGGSKGGCGSCGGSKGGCGSCGGSKGGCGSCGCSQCSCYKPCCCSSGCGSSCCQSSCCKPCCCQSSCCKPCCCSSGCGSSCCQSSCCNPCCSQSSCCVPVCCQCKI

SEQ ID NO: 43206 - protein, 187 aa, Homo sapiens
  Payload ID: 8872
  Gene Symbol: KRTAP5-8
  Gene Name: keratin associated protein 5-8
  Uniprot ID: O75690
  ENSP ID: ENSP00000420723
MGCCGCSGGCGSGCGGCGSGCGGCGSSCCVPICCCKPVCCCVPACSCSSCGSCGGSKGGRGSCGGSKGDCGSCGGSKGGCGSCGCSQCSCYKPCCCSSGCGSSCCQSSCCKPCCSQSSCCKPCSCSSGCGSSCCQSSCCKPCCSQSSCCKPCCCSSGCGSSCCQSSCCKPCCSQSSCCVPICCQCKI

SEQ ID NO: 43207 - protein, 169 aa, Homo sapiens
  Payload ID: 8873
  Gene Symbol: KRTAP5-9
  Gene Name: keratin associated protein 5-9
  Uniprot ID: P26371
  ENSP ID: ENSP00000431443
MGCCGCSGGCGSSCGGCDSSCGSCGSGCRGCGPSCCAPVYCCKPVCCCVPACSCSSCGKRGCGSCGGSKGGCGSCGCSQCSCCKPCCCSSGCGSSCCQCSCCKPYCSQCSCCKPCCSSSGRGSSCCQSSCCKPCCSSSGCGSSCCQSSCCKPCCSQSRCCVPVCYQCKI

SEQ ID NO: 43208 - protein, 71 aa, Homo sapiens
  Payload ID: 8874
  Gene Symbol: KRTAP6-1
  Gene Name: keratin associated protein 6-1
  Uniprot ID: Q3LI64
  ENSP ID: ENSP00000332690
MCGSYYGNYYGTPGYGFCGYGGLGYGYGGLGCGYGSCCGCGFRRLGCGYGYGSRSLCGYGYGCGSGSGYYY

SEQ ID NO: 43209 - protein, 62 aa, Homo sapiens
  Payload ID: 8875
  Gene Symbol: KRTAP6-2
  Gene Name: keratin associated protein 6-2
  Uniprot ID: Q3LI66
  ENSP ID: ENSP00000334560
MCGSYYGNYYGDHGYGCCGYEGLGYGYGSLRCGYSSCCGYGHGYGSRFFCGCGYGCGSGYYY

SEQ ID NO: 43210 - protein, 110 aa, Homo sapiens
  Payload ID: 8876
  Gene Symbol: KRTAP6-3
  Gene Name: keratin associated protein 6-3
  Uniprot ID: Q3LI67
  ENSP ID: ENSP00000375482
MTSTTNTMCGSYYRNYNGGHGYGCCGYGGLGCGYGGCGYGCCGYGGLGFGYGGLDCGYGGLGCGYGSFCGCGYRGLDCGYGCGYGYVSHSFCGCGYRCGSGYGSSFGYYY

SEQ ID NO: 43211 - protein, 87 aa, Homo sapiens
  Payload ID: 8877
  Gene Symbol: KRTAP7-1
  Gene Name: keratin associated protein 7-1 (gene/pseudogene)
  Uniprot ID: Q8IUC3
  ENSP ID: ENSP00000479656
MTRYFCCGSYFPGYPIYGTNFHGTFRATPLNCVVPLGSPLNYGCGCNGYSSLGYSFGGSNINNLGGCYGGSFYRPWGSGSGFGYSTY

SEQ ID NO: 43212 - protein, 63 aa, Homo sapiens
  Payload ID: 8878
  Gene Symbol: KRTAP8-1
  Gene Name: keratin associated protein 8-1
  Uniprot ID: Q8IUC2
  ENSP ID: ENSP00000332805
MLCDNFPGAVFPGCYWGSYGYPLGYSVGCGYGSTYSPVGYGFGYGYNGCGAFGYRRYSPFALY

SEQ ID NO: 43213 - protein, 250 aa, Homo sapiens
  Payload ID: 8879
  Gene Symbol: KRTAP9-1
  Gene Name: keratin associated protein 9-1
  Uniprot ID: A8MXZ3
  ENSP ID: ENSP00000381488
MTHCCSPCCQPTCCRTTCCRTTCWKPTTVTTCSSTPCCQPSCCVPSCCQPCCHPTCCQNTCCRTTCCQPTCVASCCQPSCCSTPCCQPTCCGSSCCGQTSCGSSCCQPICGSSCCQPCCHPTCYQTICFRTTCCQPTCCQPTCCRNTSCQPTCCGSSCCQPCCHPTCCQTICRSTCCQPSCVTRCCSTPCCQPTCGGSSCCSQTCNESSYCLPCCRPTCCQTTCYRTTCCRPSCCCSPCCVSSCCQPSCC

SEQ ID NO: 43214 - protein, 116 aa, Homo sapiens [sequence omitted]

SEQ ID NO: 43215 - protein, 123 aa, Homo sapiens
  Payload ID: 8879
  Gene Symbol: KRTAP9-1
  Gene Name: keratin associated protein 9-1
  ENSP ID: ENSP00000488996
CCQPTCCRTTCCRPSCCVPSCCQPCCHPTCCQNTCCRTTCCQPTCVASCCQPSCCSTPCCQPTCCGSSCCGQTSCGSSCCQPICGSSCCQPCCHPTTCCQPTCCQPTCCRNTSCQPTCCGSSC

SEQ ID NO: 43216 - protein, 110 aa, Homo sapiens
  Payload ID: 8879
  Gene Symbol: KRTAP9-1
  Gene Name: keratin associated protein 9-1
  ENSP ID: ENSP00000489312
CQPTCCRTTCCRTTCWKPTTPSCCVPSCCQPCCHPTCCQNTCCRTTCCQPTCVASCCQPSCCSTPCCQPTCCGQTCNESSYCLPCCRPTCCQTTCYRTTCCRPSCCCSPC

SEQ ID NO: 43217 - protein, 174 aa, Homo sapiens
  Payload ID: 8880
  Gene Symbol: KRTAP9-2
  Gene Name: keratin associated protein 9-2
  Uniprot ID: Q9BYQ4
  ENSP ID: ENSP00000366950
MTHCCSPCCQPTCCRTTCCRTTCWKPTTVTTCSSTPCCQPACCVSSCCQPCCRPTCCQNTCCRTTCCQPTCVTSCCQPSCCSTPCCQPTCCGSSCCGQTSCGSSCGQSSSCAPVYCRRTCYYPTTVCLPGCLNQSCGSNCCQPCCRPACCETTCCRTTCFQPTCVSSCCQPSCC

SEQ ID NO: 43218 - protein, 174 aa, Homo sapiens [sequence omitted]

SEQ ID NO: 43219 - protein, 174 aa, Homo sapiens
  Payload ID: 8880
  Gene Symbol: KRTAP9-2
  Gene Name: keratin associated protein 9-2
  ENSP ID: ENSP00000458595
MTHCCSPCCQPTCCRTTCCRTTCWKPTTVTTCSSTPCCQPACCVSSCCQPCCRPTCCQNTCCRTTCCQPTCVTSCCQPSCCSTTCCQPTCCGSSCCGQTSCGSSCGQSSSCAPVYCRRTCYYPTTVCLPGCLNQSCGSNCCQPCCRPACCETTCCRTTCFQPTCVSSCCQPSCC

SEQ ID NO: 43220 - protein, 154 aa, Homo sapiens
  Payload ID: 8880
  Gene Symbol: KRTAP9-2
  Gene Name: keratin associated protein 9-2
  ENSP ID: ENSP00000480860
MTHCCSPCCQPTCCRTTCCRTTCWKPTTVTTCSSTSCCQPACCVSSCCQPCCRPTSCQNTCCQPICVTSCCQPSCCSTPCCQPTCCGSSCGQSSSCAPVYCRRTCYHPTTVCLPGCLNQSCGSSCCQPCCRPACCETTCFQPTCVYSCCQPSCC

SEQ ID NO: 43221 - protein, 159 aa, Homo sapiens
  Payload ID: 8881
  Gene Symbol: KRTAP9-3
  Gene Name: keratin associated protein 9-3
  Uniprot ID: Q9BYQ3
  ENSP ID: ENSP00000392189
MTHCCSPCCQPTCCRTTCWQPTTVTTCSSTPCCQPSCCVSSCCQPCCHPTCCQNTCCRTTCCQPICVTSCCQPSCCSTPCCQPTCCGSSCGQSSSCAPVYCRRTCYHPTSVCLPGCLNQSCGSNCCQPCCRPACCETTCCRTTCFQPTCVYSCCQPSCC

SEQ ID NO: 43222 - protein, 159 aa, Homo sapiens; identical to SEQ ID NO: 43221
  Payload ID: 8881
  Gene Symbol: KRTAP9-3
  Gene Name: keratin associated protein 9-3
  Uniprot ID: Q9BYQ3
  ENSP ID: ENSP00000458819

SEQ ID NO: 43223 - protein, 154 aa, Homo sapiens
  Payload ID: 8882
  Gene Symbol: KRTAP9-4
  Gene Name: keratin associated protein 9-4
  Uniprot ID: Q9BYQ2
  ENSP ID: ENSP00000334922
MTHCCSPCCQPTCCRTTCCRTTCWKPTTVTTCSSTPCCQPSCCVSSCCQPCCRPTCCQNTCCQPTCVTSCCQPSCCSTPCCQPTCCGSSCDQSSSCAPVYCRRTCYYPTTVCLPGCLNQSCGSNCCQPCCRPACCETTCFQPTCVSSCCQPFCC

SEQ ID NO: 43224 - protein, 154 aa, Homo sapiens
  Payload ID: 8882
  Gene Symbol: KRTAP9-4
  Gene Name: keratin associated protein 9-4
  Uniprot ID: Q9BYQ2
  ENSP ID: ENSP00000461584
MTHCCSPCCQPTCCRTTCCRTTCWKPTTVTTCSSTPCCQPSCCVSSCCQPCCRPTCCQNTCCQPTCVTSCCQPSCCSTPCCQPTCCGSSCDQSSSCAPVYCRRTCYYPTTVCLPGCLNQSCGSNCCQPCCRPACCETTCFQPTCVYSCCQPFCC

SEQ ID NO: 43225 - protein, 154 aa, Homo sapiens; identical to SEQ ID NO: 43223
  Payload ID: 8882
  Gene Symbol: KRTAP9-4
  Gene Name: keratin associated protein 9-4
  Uniprot ID: Q9BYQ2
  ENSP ID: ENSP00000461634

SEQ ID NO: 43226 - protein, 160 aa, Homo sapiens
  Payload ID: 8883
  Gene Symbol: KRTAP9-6
  Gene Name: keratin associated protein 9-6
  Uniprot ID: A8MVA2
  ENSP ID: ENSP00000375150
MTHCCSPGCQPTCCRTTCCRTTCWQPTIVTTCSSTPCCQPSCCVSSCCQPYCHPTCCQNTCCRTTCCQPTCVTSCCQPSCCSTPCYQPICCGSSCCGQTSCGSSCGQSSSCAPVYCRRTCYHPTTVCLPGCLNQSCGSSCCQPCYCPACCVSSCCQHSCC

SEQ ID NO: 43227 - protein, 174 aa, Homo sapiens
  Payload ID: 8883
  Gene Symbol: KRTAP9-6
  Gene Name: keratin associated protein 9-6
  ENSP ID: ENSP00000460240
MTHCCSPGCQPTCCRTTCCRTTCWQPTIVTTCSSTPCCQPSCCVSSCCQPCCHPTCCQNTCCRTTCCQPTCVTSCYQPSCCSTPCCQPICCGSSCCGQTSCGSSCCQPSSCAPIYCRRTCYHPTSVYLPGCLNQSCGSSCCQPCCRPACCETTCCRTTCFQPTCVTSCCQPACC

SEQ ID NO: 43228 - protein, 160 aa, Homo sapiens; identical to SEQ ID NO: 43226
  Payload ID: 8883
  Gene Symbol: KRTAP9-6
  Gene Name: keratin associated protein 9-6
  Uniprot ID: A8MVA2
  ENSP ID: ENSP00000460691

SEQ ID NO: 43229 - protein, 169 aa, Homo sapiens
  Payload ID: 8884
  Gene Symbol: KRTAP9-7
  Gene Name: keratin associated protein 9-7
  Uniprot ID: A8MTY7
  ENSP ID: ENSP00000375149
MTHCCSPCCQPTCCRTTCWKPTTVTTCSSTPCCQPSCCVSSCCQPCCHPTCCQNTCCRTTCCQPTCVTSCCQPSCCSTPCCQPICCGSSCCGQTSCGSSCCQPSSCAPIYCRRTCYHPTSVYLPGCLNQSCGSSCCQPCCRPACCETTCCRTTCFQPTCVTSCCQPACC

SEQ ID NO: 43230 - protein, 169 aa, Homo sapiens; identical to SEQ ID NO: 43229
  Payload ID: 8884
  Gene Symbol: KRTAP9-7
  Gene Name: keratin associated protein 9-7
  Uniprot ID: A8MTY7
  ENSP ID: ENSP00000460369

SEQ ID NO: 43231 - protein, 159 aa, Homo sapiens
  Payload ID: 8885
  Gene Symbol: KRTAP9-8
  Gene Name: keratin associated protein 9-8
  Uniprot ID: Q9BYQ0
  ENSP ID: ENSP00000254072
MTHCCSPCCQPTCCRTTCWKPTTVTTCSSTPCCQPSCCVSSCCQPCCRPTCCQNTCCQPICVTSCCQPSCCSTPCCQPTCCGQTSCGSSCGQSSSCAPVYCRRTCYHPTTVCLPGCLNQSCGSNCCQPCCRPACCETTCCRTTCFQPTCVSSCCQPSCC

SEQ ID NO: 43232 - protein, 164 aa, Homo sapiens
  Payload ID: 8885
  Gene Symbol: KRTAP9-8
  Gene Name: keratin associated protein 9-8
  ENSP ID: ENSP00000477735
MTHCCSPCCQPTCCRTTCCRTTCWKPTTVTTCSSTPCCQPSCCVSSCCQPCCRPTCCQNTCCQPICVTSCCQPSCCSTPCCQPTCCGQTSCGSSCGQSSSCAPVYCRRTCYHPTTVCLPGCLNQSCGSNCCQPCCRPACCETTCCRTTCFQPTCVSSCCQPSCC

SEQ ID NO: 43233 - protein, 169 aa, Homo sapiens
  Payload ID: 8886
  Gene Symbol: KRTAP9-9
  Gene Name: keratin associated protein 9-9
  Uniprot ID: Q9BYP9
  ENSP ID: ENSP00000377576
MTHCCSPCCQPTCCRTTCWKPTTVTTCSSTPCCQPSCCVSSCCQPCCRPACCQNTCCRTTCCQPTCLTSCCQPSCCSTTCCQPICCGSSCCGQTSCGSSCGQSSSCAPVYCRRTCYYPTTVCLPGCLNQSCGSSCCQPCCRPACCETTCCRTTCFQPTCVSSCCQPSCC

SEQ ID NO: 43234 - protein, 169 aa, Homo sapiens; identical to SEQ ID NO: 43233
  Payload ID: 8886
  Gene Symbol: KRTAP9-9
  Gene Name: keratin associated protein 9-9
  Uniprot ID: Q9BYP9
  ENSP ID: ENSP00000460586

SEQ ID NO: 43235 - protein, 174 aa, Homo sapiens
  Payload ID: 8886
  Gene Symbol: KRTAP9-9
  Gene Name: keratin associated protein 9-9
  ENSP ID: ENSP00000464818
MTHCCSPCCQPTCCRTTCCRTTCWKPTTVTTCSSTPCCQPSCCVSSCCQPCCRPACCQNTCCRTTCCQPTCLTSCCQPSCCSTTCCQPICCGSSCCGQTSCGSSCGQSSSCAPVYCRRTCYYPTTVCLPGCLNQSCGSSCCQPCCRPACCETTCCRTTCFQPTCVSSCCQPSCC

SEQ ID NO: 43236 - protein, 154 aa, Homo sapiens
  Payload ID: 8886
  Gene Symbol: KRTAP9-9
  Gene Name: keratin associated protein 9-9
  Uniprot ID: Q9BYP9
  ENSP ID: ENSP00000478038
MTHCCSPCCQPTCCRTTCCRTTCWKPTTVTTCSSTPCCQPSCCVSSCCQPCCRPACCQNTCCRTTCCQPTCLSSCCGQTSCGSSCGQSSSCAPVYCRRTCYYPTTVCLPGCLNQSCGSSCCQPCCRPACCETTCCRTTCFQPTCVSSCCQPSCC

SEQ ID NO: 43237 - protein, 154 aa, Homo sapiens; identical to SEQ ID NO: 43236
  Payload ID: 8886
  Gene Symbol: KRTAP9-9
  Gene Name: keratin associated protein 9-9
  ENSP ID: ENSP00000480115

SEQ ID NO: 43238 - protein, 174 aa, Homo sapiens
  Payload ID: 8886
  Gene Symbol: KRTAP9-9
  Gene Name: keratin associated protein 9-9
  ENSP ID: ENSP00000481491
MTHCCSPCCQPTCCRTTCCRTTCWKPTTVTTCSSTPCCQPSCCVSSCCQPCCRPTCCQNTCCRTTCCQPTCLTSCCQPSCCSTTCCQPICCGSSCCGQTSCGSSCGQSSSCAPVYCRRTCYYPTTVCLPGCLNQSCGSSCCQPCCRPACCETTCCRTTCFQPTCVSSCCQPSCC

SEQ ID NO: 43239 - protein, 169 aa, Homo sapiens; identical to SEQ ID NO: 43233
  Payload ID: 8886
  Gene Symbol: KRTAP9-9
  Gene Name: keratin associated protein 9-9
  ENSP ID: ENSP00000484048

SEQ ID NO: 43240 - protein, 159 aa, Homo sapiens
  Payload ID: 8886
  Gene Symbol: KRTAP9-9
  Gene Name: keratin associated protein 9-9
  ENSP ID: ENSP00000484247
MTHCCSPCCQPTCCRTTCWKPTTVTTCSSTPCCQPSCCVSSCCQPCCRPACCQNTCFQPTCVSSCCQPSCCSTPCCQSSCCGQTSCGSSCGQSSSCAPVYCRRTCYHPTTVCLPGCLNQSCGSSCCQPCCRPACCETTCCRTTCFQPTSVISCCQPSCC

SEQ ID NO: 43241 - protein, 154 aa, Homo sapiens; identical to SEQ ID NO: 43236
  Payload ID: 8886
  Gene Symbol: KRTAP9-9
  Gene Name: keratin associated protein 9-9
  Uniprot ID: Q9BYP9
  ENSP ID: ENSP00000484433

SEQ ID NO: 43242 - protein, 295 aa, Homo sapiens; identical to SEQ ID NO: 42965
  Payload ID: 8887
  Gene Symbol: RP5-1028K7.3
  Gene Name: Keratin-like protein KRT222
  ENSP ID: ENSP00000463483

SEQ ID NO: 43243 - protein, 162 aa, Homo sapiens
  Payload ID: 8888
  Gene Symbol: KRTCAP2
  Gene Name: keratinocyte associated protein 2
  Uniprot ID: Q8N6L1
  ENSP ID: ENSP00000295682
MRIANRTRFSSPFLARGAGWTHGRGMMVVGTGTSLALSSLLSLLLFAGMQMYSRQLASTEWLTIQGGLLGSGLFVFSLTAFNNLENLVFGKGFQAKIFPEILLCLLLALFASGLIHRVCVTTCFIFSMVGLYYINKISSTLYQAAAPVLTPAKVTGKSKKRN

SEQ ID NO: 43244 - protein, 240 aa, Homo sapiens
  Payload ID: 8889
  Gene Symbol: KRTCAP3
  Gene Name: keratinocyte associated protein 3
  Uniprot ID: Q53RY4
  ENSP ID: ENSP00000288873
MRRCSLCAFDAARGPRRLMRVGLALILVGHVNLLLGAVLHGTVLRHVANPRGAVTPEYTVANVISVGSGLLSVSVGLVALLASRNLLRPPLHWVLLALALVNLLLSVACSLGLLLAVSLTVANGGRRLIADCHPGLLDPLVPLDEGPGHTDCPFDPTRIYDTALALWIPSLLMSAGEAALSGYCCVAALTLRGVGPCRKDGLQGQLEEMTELESPKCKRQENEQLLDQNQEIRASQRSWV

SEQ ID NO: 43245 - protein, 222 aa, Homo sapiens
  Payload ID: 8889
  Gene Symbol: KRTCAP3
  Gene Name: keratinocyte associated protein 3
  Uniprot ID: Q53RY4
  ENSP ID: ENSP00000384689
MRVGLALILVGHVNLLLGAVLHGTVLRHVANPRGAVTPEYTVANVISVGSGLLSVSVGLVALLASRNLLRPPLHWVLLALALVNLLLSVACSLGLLLAVSLTVANGGRRLIADCHPGLLDPLVPLDEGPGHTDCPFDPTRIYDTALALWIPSLLMSAGEAALSGYCCVAALTLRGVGPCRKDGLQGQLEEMTELESPKCKRQENEQLLDQNQEIRASQRSWV

SEQ ID NO: 43246 - protein, 62 aa, Homo sapiens
  Payload ID: 8889
  Gene Symbol: KRTCAP3
  Gene Name: keratinocyte associated protein 3
  ENSP ID: ENSP00000388115
ALSGYCCVAALTLRGVGPCRKDGLQGQLEEMTELESPKCKRQENEQLLDQNQEIRASQRSWV

SEQ ID NO: 43247 - protein, 68 aa, Homo sapiens
  Payload ID: 8889
  Gene Symbol: KRTCAP3
  Gene Name: keratinocyte associated protein 3
  ENSP ID: ENSP00000389860
MRRCSLCAFERFRGTCGPPGVQEPSSPSTALGPAGTSSGEPALVRCLLPGPPSCCVTHCGQRWPPPYC

SEQ ID NO: 43248 - protein, 240 aa, Homo sapiens; identical to SEQ ID NO: 43244
  Payload ID: 8889
  Gene Symbol: KRTCAP3
  Gene Name: keratinocyte associated protein 3
  Uniprot ID: Q53RY4
  ENSP ID: ENSP00000442400

SEQ ID NO: 43249 - protein, 398 aa, Homo sapiens
  Payload ID: 8890
  Gene Symbol: KDF1
  Gene Name: keratinocyte differentiation factor 1
  Uniprot ID: Q8NAX2
  ENSP ID: ENSP00000319179
MPRPGHPRPASGPPRLGPWERPTELCLETYDKPPQPPPSRRTRRPDPKDPGHHGPESITFISGSAEPALESPTCCLLWRPWVWEWCRAAFCFRRCRDCLQRCGACVRGCSPCLSTEDSTEGTAEANWAKEHNGVPPSPDRAPPSRRDGQRLKSTMGSSFSYPDVKLKGIPVYPYPRATSPAPDADSCCKEPLADPPPMRHSLPSTFASSPRGSEEYYSFHESDLDLPEMGSGSMSSREIDVLIFKKLTELFSVHQIDELAKCTSDTVFLEKTSKISDLISSITQDYHLDEQDAEGRLVRGIIRISTRKSRARPQTSEGRSTRAAAPTAAAPDSGHETMVGSGLSQDELTVQISQETTADAIARKLRPYGAPGYPASHDSSFQGTDTDSSGAPLLQVYC

SEQ ID NO: 43250 - protein, 207 aa, Homo sapiens
  Payload ID: 8890
  Gene Symbol: KDF1
  Gene Name: keratinocyte differentiation factor 1
  ENSP ID: ENSP00000481107
MPRPGHPRPASGPPRLGPWERPTELCLETYDKPPQPPPSRRTRRPDPKDPGHHGPESITFISGSAEPALESPTCLLRTPLRGLLKPTGPRSTMECPPALIVHPPAGGMASGSSQPWAAASATPMLSSKASLCIPTRGPPPQPLMRTPAARSHWPIPHPCDTACPAPLPVVLVAPRSTILSMSRTWTCRRWAVAPCRAEKLMCSSSRS

SEQ ID NO: 43251 - protein, 99 aa, Homo sapiens
  Payload ID: 8891
  Gene Symbol: KRTDAP
  Gene Name: keratinocyte differentiation-associated protein
  Uniprot ID: P60985
  ENSP ID: ENSP00000339251
MKIPVLPAVVLLSLLVLHSAQGATLGGPEEESTIENYASRPEAFNTPFLNIDKLRSAFKADEFLNWHALFESIKRKLPFLNWDAFPKLKGLRSATPDAQ

SEQ ID NO: 43252 - protein, 85 aa, Homo sapiens
  Payload ID: 8891
  Gene Symbol: KRTDAP
  Gene Name: keratinocyte differentiation-associated protein
  Uniprot ID: P60985
  ENSP ID: ENSP00000470713
MKIPVLPAVVLLSLLVLHSAQGATLGGPEEESTIENYASRPEAFKADEFLNWHALFESIKRKLPFLNWDAFPKLKGLRSATPDAQ

SEQ ID NO: 43253 - protein, 579 aa, Homo sapiens
  Payload ID: 8892
  Gene Symbol: KPRP
  Gene Name: keratinocyte proline-rich protein
  Uniprot ID: Q5T749
  ENSP ID: ENSP00000475216
MCDQQQIQCRLPLQQCCVKGPSFCSSQSPFAQSQVVVQAPCEMQIVDCPASCPVQVCQVSDQAPCQSQTTQVKCQSKTKQVKGQAQCQSKTTQVKGQAASQSQTSSVQSQAPCQSEVSYVQCEASQPVQTCFVECAPVCYTETCYVECPVQNYVPCPAPQPVQMYRGRPAVCQPQGRFSTQCQYQGSYSSCGPQFQSRATCNNYTPQFQLRPSYSSCFPQYRSRTSFSPCVPQCQTQGSYGSFTEQHRSRSTSRCLPPPRRLQLFPRSCSPPRRFEPCSSSYLPLRPSEGFPNYCTPPRRSEPIYNSRCPRRPISSCSQRRGPKCRIEISSPCCPRQVPPQRCPVEIPPIRRRSQSCGPQPSWGASCPELRPHVEPRPLPSFCPPRRLDQCPESPLQRCPPPAPRPRLRPEPCISLEPRPRPLPRQLSEPCLYPEPLPALRPTPRPVPLPRPGQCEIPEPRPCLQPCEHPEPCPRPEPIPLPAPCPSPEPCRETWRSPSPCWGPNPVPYPGDLGCHESSPHRLDTEAPYCGPSSYNQGQESGAGCGPGDVFPERRGQDGHGDQGNAFAGVKGEAKSAYF

SEQ ID NO: 43254 - protein, 352 aa, Homo sapiens
  Payload ID: 8893
  Gene Symbol: KERA
  Gene Name: keratocan
  Uniprot ID: O60938
  ENSP ID: ENSP00000266719
MAGTICFIMWVLFITDTVWSRSVRQVYEVHDSDDWTIHDFECPMECFCPPSFPTALYCENRGLKEIPAIPSRIWYLYLQNNLIETIPEKPFENATQLRWINLNKNKITNYGIEKGALSQLKKLLFLFLEDNELEEVPSPLPRSLEQLQLARNKVSRIPQGTFSNLENLTLLDLQNNKLVDNAFQRDTFKGLKNLMQLNMAKNALRNMPPRLPANTMQLFLDNNSIEGIPENYFNVIPKVAFLRLNHNKLSDEGLPSRGFDVSSILDLQLSHNQLTKVPRISAHLQHLHLDHNKIKSVNVSVICPSPSMLPAERDSFSYGPHLRYLRLDGNEIKPPIPMALMTCFRLLQAVII

SEQ ID NO: 43255 - protein, 298 aa, Homo sapiens
  Payload ID: 8894
  Gene Symbol: KHK
  Gene Name: ketohexokinase (fructokinase)
  Uniprot ID: P50053
  ENSP ID: ENSP00000260598
MEEKQILCVGLVVLDVISLVDKYPKEDSEIRCLSQRWQRGGNASNSCTVLSLLGAPCAFMGSMAPGHVADFLVADFRRRGVDVSQVAWQSKGDTPSSCCIINNSNGNRTIVLHDTSLPDVSATDFEKVDLTQFKWIHIEGRNASEQVKMLQRIDAHNTRQPPEQKIRVSVEVEKPREELFQLFGYGDVVFVSKDVAKHLGFQSAEEALRGLYGRVRKGAVLVCAWAEEGADALGPDGKLLHSDAFPPPRVVDTLGAGDTFNASVIFSLSQGRSVQEALRFGCQVAGKKCGLQGFDGIV

SEQ ID NO: 43256 - protein, 298 aa, Homo sapiens
  Payload ID: 8894
  Gene Symbol: KHK
  Gene Name: ketohexokinase (fructokinase)
  Uniprot ID: P50053
  ENSP ID: ENSP00000260599
MEEKQILCVGLVVLDVISLVDKYPKEDSEIRCLSQRWQRGGNASNSCTVLSLLGAPCAFMGSMAPGHVADFVLDDLRRYSVDLRYTVFQTTGSVPIATVIINEASGSRTILYYDRSLPDVSATDFEKVDLTQFKWIHIEGRNASEQVKMLQRIDAHNTRQPPEQKIRVSVEVEKPREELFQLFGYGDVVFVSKDVAKHLGFQSAEEALRGLYGRVRKGAVLVCAWAEEGADALGPDGKLLHSDAFPPPRVVDTLGAGDTFNASVIFSLSQGRSVQEALRFGCQVAGKKCGLQGFDGIV

SEQ ID NO: 43257 - protein, 279 aa, Homo sapiens
  Payload ID: 8894
  Gene Symbol: KHK
  Gene Name: ketohexokinase (fructokinase)
  ENSP ID: ENSP00000404741
MEEKQILCVGLVVLDVISLVDKYPKEDSEIRCLSQRWQRGGNASNSCTVLSLLGAPCAFMGSMAPGHVADFVLDDLRRYSVDLRYTVFQTTGSVPIATVIINEASGSRTILYYDSFLVADFRRRGVDVSQVAWQSKGDTPSSCCIINNSNGNRTIVLHDTSLPDVSATDFEKVDLTQFKWIHIEGRNASEQVKMLQRIDAHNTRQPPEQKIRVSVEVEKPREELFQLFGYGDVVFVSKDVAKHLGFQSAEEALRGLYGRVRKGAVLVCAWAEEGADALG

SEQ ID NO: 43258 - protein, 678 aa, Homo sapiens
  Payload ID: 8895
  Gene Symbol: KHNYN
  Gene Name: KH and NYN domain containing
  Uniprot ID: O15037
  ENSP ID: ENSP00000251343
MPTWGARPASPDRFAVSAEAENKVREQQPHVERIFSVGVSVLPKDCPDNPHIWLQLEGPKENASRAKEYLKGLCSPELQDEIHYPPKLHCIFLGAQGFFLDCLAWSTSAHLVPRAPGSLMISGLTEAFVMAQSRVEELAERLSWDFTPGPSSGASQCTGVLRDFSALLQSPGDAHREALLQLPLAVQEELLSLVQEASSGQGPGALASWEGRSSALLGAQCQGVRAPPSDGRESLDTGSMGPGDCRGARGDTYAVEKEGGKQGGPREMDWGWKELPGEEAWEREVALRPQSVGGGARESAPLKGKALGKEEIALGGGGFCVHREPPGAHGSCHRAAQSRGASLLQRLHNGNASPPRVPSPPPAPEPPWHCGDRGDCGDRGDVGDRGDKQQGMARGRGPQWKRGARGGNLVTGTQRFKEALQDPFTLCLANVPGQPDLRHIVIDGSNVAMVHGLQHYFSSRGIAIAVQYFWDRGHRDITVFVPQWRFSKDAKVRESHFLQKLYSLSLLSLTPSRVMDGKRISSYDDRFMVKLAEETDGIIVSNDQFRDLAEESEKWMAIIRERLLPFTFVGNLFMVPDDPLGRNGPTLDEFLKKPARTQGSSKAQHPSRGFAEHGKQQQGREEEKGSGGIRKTRETERLRRQLLEVFWGQDHKVDFILQREPYCRDINQLSEALLSLNF

SEQ ID NO: 43259 - protein, 678 aa, Homo sapiens; identical to SEQ ID NO: 43258
  Payload ID: 8895
  Gene Symbol: KHNYN
  Gene Name: KH and NYN domain containing
  Uniprot ID: O15037
  ENSP ID: ENSP00000450799

SEQ ID NO: 43260 - protein, 134 aa, Homo sapiens
  Payload ID: 8895
  Gene Symbol: KHNYN
  Gene Name: KH and NYN domain containing
  ENSP ID: ENSP00000451004
MPTWGARPASPDRFAVSAEAENKVREQQPHVERIFSVGVSVLPKDCPDNPHIWLQLEGPKENASRAKEYLKGLCSPELQDEIHYPPKLHCIFLGAQGFFLDCLAWSTSAHLVPRAPGSLMISGLTEAFVMAQSR

SEQ ID NO: 43261 - protein, 678 aa, Homo sapiens; identical to SEQ ID NO: 43258
  Payload ID: 8895
  Gene Symbol: KHNYN
  Gene Name: KH and NYN domain containing
  Uniprot ID: O15037
  ENSP ID: ENSP00000451106

SEQ ID NO: 43262 - protein, 123 aa, Homo sapiens
  Payload ID: 8895
  Gene Symbol: KHNYN
  Gene Name: KH and NYN domain containing
  ENSP ID: ENSP00000451227
MAIIRERLLPFTFVGNLFMVPDDPLGRNGPTLDEFLKKPARTQGSSKAQHPSRGFAEHGKQQQGREEEKGSGGIRKTRETERLRRQLLEVFWGQDHKVDFILQREPYCRDINQLSEALLSLNF

SEQ ID NO: 43263 - protein, 217 aa, Homo sapiens
  Payload ID: 8896
  Gene Symbol: KHDC3L
  Gene Name: KH domain containing 3-like, subcortical maternal complex member
  Uniprot ID: Q587J8
  ENSP ID: ENSP00000359392
MDAPRRFPTLVQLMQPKAMPVEVLGHLPKRFSWFHSEFLKNPKVVRLEVWLVEKIFGRGGERIPHVQGMSQILIHVNRLDPNGEAEILVFGRPSYQEDTIKMIMNLADYHRQLQAKGSGKALAQDVATQKAETQRSSIEVREAGTQRSVEVREAGTQRSVEVQEVGTQGSPVEVQEAGTQQSLQAANKSGTQRSPEAASKAVTQRFREDARDPVTRL

SEQ ID NO: 43264 - protein, 443 aa, Homo sapiens
  Payload ID: 8897
  Gene Symbol: KHDRBS1
  Gene Name: KH domain containing, RNA binding, signal transduction associated 1
  Uniprot ID: Q07666
  ENSP ID: ENSP00000313829
MQRRDDPAARMSRSSGRSGSMDPSGAHPSVRQTPSRQPPLPHRSRGGGGGSRGGARASPATQPPPLLPPSATGPDATVGGPAPTPLLPPSATASVKMEPENKYLPELMAEKDSLDPSFTHAMQLLTAEIEKIQKGDSKKDDEENYLDLFSHKNMKLKERVLIPVKQYPKFNFVGKILGPQGNTIKRLQEETGAKISVLGKGSMRDKAKEEELRKGGDPKYAHLNMDLHVFIEVFGPPCEAYALMAHAMEEVKKFLVPDMMDDICQEQFLELSYLNGVPEPSRGRGVPVRGRGAAPPPPPVPRGRGVGPPRGALVRGTPVRGAITRGATVTRGVPPPPTVRGAPAPRARTAGIQRIPLPPPPAPETYEEYGYDDTYAEQSYEGYEGYYSQSQGDSEYYDYGHGEVQDSYEAYGQDDWNGTRPSLKAPPARPVKGAYREHPYGRY

SEQ ID NO: 43265 - protein, 404 aa, Homo sapiens
  Payload ID: 8897
  Gene Symbol: KHDRBS1
  Gene Name: KH domain containing, RNA binding, signal transduction associated 1
  Uniprot ID: Q07666
  ENSP ID: ENSP00000417731
MQRRDDPAARMSRSSGRSGSMDPSGAHPSVRQTPSRQPPLPHRSRGGGGGSRGGARASPATQPPPLLPPSATGPDATVGGPAPTPLLPPSATASVKMEPENKYLPELMAEKDSLDPSFTHAMQLLTAEIEKIQKGDSKKDDEENYLDLFSHKNMKLKERVLIPVKQYPKEEELRKGGDPKYAHLNMDLHVFIEVFGPPCEAYALMAHAMEEVKKFLVPDMMDDICQEQFLELSYLNGVPEPSRGRGVPVRGRGAAPPPPPVPRGRGVGPPRGALVRGTPVRGAITRGATVTRGVPPPPTVRGAPAPRARTAGIQRIPLPPPPAPETYEEYGYDDTYAEQSYEGYEGYYSQSQGDSEYYDYGHGEVQDSYEAYGQDDWNGTRPSLKAPPARPVKGAYREHPYGRY

SEQ ID NO: 43266 - protein, 349 aa, Homo sapiens
  Payload ID: 8898
  Gene Symbol: KHDRBS2
  Gene Name: KH domain containing, RNA binding, signal transduction associated 2
  Uniprot ID: Q5VWX1
  ENSP ID: ENSP00000281156
MEEEKYLPELMAEKDSLDPSFVHASRLLAEEIEKFQGSDGKKEDEEKKYLDVISNKNIKLSERVLIPVKQYPKFNFVGKLLGPRGNSLKRLQEETGAKMSILGKGSMRDKAKEEELRKSGEAKYAHLSDELHVLIEVFAPPGEAYSRMSHALEEIKKFLVPDYNDEIRQEQLRELSYLNGSEDSGRGRGIRGRGIRIAPTAPSRGRGGAIPPPPPPGRGVLTPRGSTVTRGALPVPPVARGVPTPRARGAPTVPGYRAPPPPAHEAYEEYGYDDGYGGEYDDQTYETYDNSYATQTQSVPEYYDYGHGVSEDAYDSYAPEEWATTRSSLKAPPQRSARGGYREHPYGRY

SEQ ID NO: 43267 - protein, 346 aa, Homo sapiens
  Payload ID: 8899
  Gene Symbol: KHDRBS3
  Gene Name: KH domain containing, RNA binding, signal transduction associated 3
  Uniprot ID: O75525
  ENSP ID: ENSP00000348108
MEEKYLPELMAEKDSLDPSFTHALRLVNQEIEKFQKGEGKDEEKYIDVVINKNMKLGQKVLIPVKQFPKFNFVGKLLGPRGNSLKRLQEETLTKMSILGKGSMRDKAKEEELRKSGEAKYFHLNDDLHVLIEVFAPPAEAYARMGHALEEIKKFLIPDYNDEIRQAQLQELTYLNGGSENADVPVVRGKPTLRTRGVPAPAITRGRGGVTARPVGVVVPRGTPTPRGVLSTRGPVSRGRGLLTPRARGVPPTGYRPPPPPPTQETYGEYDYDDGYGTAYDEQSYDSYDNSYSTPAQSGADYYDYGHGLSEETYDSYGQEEWTNSRHKAPSARTAKGVYRDQPYGRY

SEQ ID NO: 43268 - protein, 195 aa, Homo sapiens
  Payload ID: 8899
  Gene Symbol: KHDRBS3
  Gene Name: KH domain containing, RNA binding, signal transduction associated 3
  ENSP ID: ENSP00000427841
  MOD_RES (1)..(1): Any amino acid
XLQEETLTKMSILGKGSMRDKAKEEELRKSGEAKYFHLNDDLHVLIEVFAPPAEAYARMGHALEEIKKFLIPDYNDEIRQAQLQELTYLNGGSENADVPVVRGKPTLRTRGVPAPAITRGRGGVTARPVGVVVPRGTPTPRGVLSTRGPVSRGRGLLTPRARGVPPTGYRPPPPPPTQETYGEYGKKSGLTQDTR

SEQ ID NO: 43269 - protein, 196 aa, Homo sapiens
  Payload ID: 8899
  Gene Symbol: KHDRBS3
  Gene Name: KH domain containing, RNA binding, signal transduction associated 3
  ENSP ID: ENSP00000427851
  MOD_RES (1)..(1): Any amino acid
XLGPRGNSLKRLQEETLTKMSILGKGSMRDKAKEEELRKSGEAKYFHLNDDLHVLIEVFAPPAEAYARMGHALEEIKKFLIPDYNDEIRQAQLQELTYLNGGSENADVPVVRGKPTLRTRGVPAPAITRGRGGVTARPVGVVVPRGTPTPRGVLSTRGPVSRGRGLLTPRARGVPPTGYRPPPPPPTQETYGEYWC

SEQ ID NO: 43270 - protein, 119 aa, Homo sapiens
  Payload ID: 8899
  Gene Symbol: KHDRBS3
  Gene Name: KH domain containing, RNA binding, signal transduction associated 3
  ENSP ID: ENSP00000428607
MHEIEKFQKGEGKDEEKYIDVVINKNMKLGQKVLIPVKQFPKDYDDGYGTAYDEQSYDSYDNSYSTPAQSGADYYDYGHGLSEETYDSYGQEEWTNSRHKAPSARTAKGVYRDQPYGRY

SEQ ID NO: 43271 - protein, 59 aa, Homo sapiens
  Payload ID: 8899
  Gene Symbol: KHDRBS3
  Gene Name: KH domain containing, RNA binding, signal transduction associated 3
  ENSP ID: ENSP00000428643
  MOD_RES (1)..(1): Any amino acid
XNSYSTPAQSGADYYDYGHGLSEETYDSYGQEEWTNSRHKAPSARTAKGVYRDQPYGRY

SEQ ID NO: 43272 - protein, 160 aa, Homo sapiens
  Payload ID: 8899
  Gene Symbol: KHDRBS3
  Gene Name: KH domain containing, RNA binding, signal transduction associated 3
  ENSP ID: ENSP00000430284
MHEIEKFQKGEGKDEEKYIDVVINKNMKLGQKVLIPVKQFPKFNFVGKLLGPRGNSLKRLQEETLTKMSILGKGSMRDKAKEEELRKSGEAKYFHLNDDLHVLIEVFAPPAEAYARMGHALEEIKKFLIPDYNDEIRQAQLQELTYLNGGSENADVPVVR

SEQ ID NO: 43273 - protein, 265 aa, Homo sapiens
  Payload ID: 8899
  Gene Symbol: KHDRBS3
  Gene Name: KH domain containing, RNA binding, signal transduction associated 3
  ENSP ID: ENSP00000431022
MEIEKFQKGEGKDEEKYIDVVINKNMKLGQKVLIPVKQFPKFNFVGKLLGPRGNSLKRLQEETLTKMSILGKGSMRDKAKEEELRKSGEAKYFHLNDDLHVLIEVFAPPAEAYARMGHALEEIKKFLIPDYNDEIRQAQLQELTYLNGGSENADVPVVRGKPTLRTRGVPAPAITRGRGGVTARPVGVVVPRGTPTPRGVLSTRGPVSRGRGLLTPRARGVPPTGYRPPPPPPTQETYGEYDYDDGYGTAYDEQSYDSYDNSYST

SEQ ID NO: 43274 - protein, 164 aa, Homo sapiens
  Payload ID: 8900
  Gene Symbol: KHDC1
  Gene Name: KH homology domain containing 1
  Uniprot ID: Q4VXA5
  ENSP ID: ENSP00000257765
MDMGTSALSKKPWWTLPQNFHAPMVFHMEEDQEELIFGHGDTYLRCIEVHSHTLIQLESWFTATGQTRVTVVGPHRARQWLLHMFCCVGSQDSYHHARGLEMLERVRSQPLTNDDLVTSISVPPYTGDLSLAPRISGTVCLSVPQPSPYQVIGCSGFHLSSLYP

SEQ ID NO: 43275 - protein, 237 aa, Homo sapiens
  Payload ID: 8900
  Gene Symbol: KHDC1
  Gene Name: KH homology domain containing 1
  Uniprot ID: Q4VXA5
  ENSP ID: ENSP00000359411
MLSAFQRLFRVLFVIETVSEYGVLIFIYGWPFLQTLAMLLIGTVSFHLWIRRNRERNSRSGKTRCRSKRSEQSMDMGTSALSKKPWWTLPQNFHAPMVFHMEEDQEELIFGHGDTYLRCIEVHSHTLIQLESWFTATGQTRVTVVGPHRARQWLLHMFCCVGSQDSYHHARGLEMLERVRSQPLTNDDLVTSISVPPYTGDLSLAPRISGTVCLSVPQPSPYQVIGCSGFHLSSLYP

SEQ ID NO: 43276 - protein, 98 aa, Homo sapiens
  Payload ID: 8900
  Gene Symbol: KHDC1
  Gene Name: KH homology domain containing 1
  ENSP ID: ENSP00000406966
MDMGTSALSKKPWWTLPQNFHAPMVFHMEEDQEELIFGHGDTYLRCIEVHSHTLIQLESWFTATGQTRVTVVGPHRARQWLLHMFCCVGSQDSYHHAR

SEQ ID NO: 43277 - protein, 164 aa, Homo sapiens; identical to SEQ ID NO: 43274
  Payload ID: 8900
  Gene Symbol: KHDC1
  Gene Name: KH homology domain containing 1
  Uniprot ID: Q4VXA5
  ENSP ID: ENSP00000479158

SEQ ID NO: 43278 - protein, 128 aa, Homo sapiens
  Payload ID: 8900
  Gene Symbol: KHDC1
  Gene Name: KH homology domain containing 1
  ENSP ID: ENSP00000481490
MDMGTSALSKKPWWTLPQNFHAPMVFHMEEDQEELIFGHGDTYLRCIEVHSHTLIQLESWFTATGQTRVTVVGPHRARQWLLHMFCCVGSQDSYHHARGLEMLERVRSQPLTNDDLVTSISVPPYTGD

SEQ ID NO: 43279 - protein, 128 aa, Homo sapiens
  Payload ID: 8901
  Gene Symbol: KHDC1L
  Gene Name: KH homology domain containing 1-like
  Uniprot ID: Q5JSQ8
  ENSP ID: ENSP00000359415
MAVGTSALSKEPWWTLPENFHSPMVFHMEEDQEELIFGLDDTYLRCIELHSHTLIQLERCFTATGQTRVTVVGPPMAKQWLLLMFHCVGSQDSKCHARGLKMLERVRSQPLTNDDLVTSVSLPPYTGD

SEQ ID NO: 43280 - protein, 711 aa, Homo sapiens
  Payload ID: 8902
  Gene Symbol: KHSRP
  Gene Name: KH-type splicing regulatory protein
  Uniprot ID: Q92945
  ENSP ID: ENSP00000381216
MSDYSTGGPPPGPPPPAGGGGGAGGAGGGPPPGPPGAGDRGGGGPGGGGPGGGSAGGPSQPPGGGGPGIRKDAFADAVQRARQIAAKIGGDAATTVNNSTPDFGFGGQKRQLEDGDQPESKKLASQGDSISSQLGPIHPPPRTSMTEEYRVPDGMVGLIIGRGGEQINKIQQDSGCKVQISPDSGGLPERSVSLTGAPESVQKAKMMLDDIVSRGRGGPPGQFHDNANGGQNGTVQEIMIPAGKAGLVIGKGGETIKQLQERAGVKMILIQDGSQNTNVDKPLRIIGDPYKVQQACEMVMDILRERDQGGFGDRNEYGSRIGGGIDVPVPRHSVGVVIGRSGEMIKKIQNDAGVRIQFKQDDGTGPEKIAHIMGPPDRCEHAARIINDLLQSLRSGPPGPPGGPGMPPGGRGRGRGQGNWGPPGGEMTFSIPTHKCGLVIGRGGENVKAINQQTGAFVEISRQLPPNGDPNFKLFIIRGSPQQIDHAKQLIEEKIEGPLCPVGPGPGGPGPAGPMGPFNPGPFNQGPPGAPPHAGGPPPHQYPPQGWGNTYPQWQPPAPHDPSKAAAAAADPNAAWAAYYSHYYQQPPGPVPGPAPAPAAPPAQGEPPQPPPTGQSDYTKAWEEYYKKIGQQPQQPGAPPQQDYTKAWEEYYKKQAQVATGGGPGAPPGSQPDYSAAWAEYYRQQAAYYGQTPGPGGPQPPPTQQGQQQAQ

SEQ ID NO: 43281 - protein, 116 aa, Homo sapiens
  Payload ID: 8902
  Gene Symbol: KHSRP
  Gene Name: KH-type splicing regulatory protein
  ENSP ID: ENSP00000469431
MTEEYRVPDGMVGLIIGRGGEQINKIQQDSGCKVQISPDSGGLPERSVSLTGAPESVQKAKMMLDDIVSRGRGGPPGQFHDNANGGQNGTVQEIMIPAGKAGLVIGKGGETIKQLQ

SEQ ID NO: 43282 - protein, 114 aa, Homo sapiens
  Payload ID: 8902
  Gene Symbol: KHSRP
  Gene Name: KH-type splicing regulatory protein
  ENSP ID: ENSP00000469804
  MOD_RES (1)..(1): Any amino acid
XAAYYSHYYQQPPGPVPGPAPAPAAPPAQGEPPQPPPTGQSDYTKAWEEYYKKIGQQPQQPGAPPQQDYTKAWEEYYKKQAPSSLPPALAQLPRPRPSPLPGLVCCLFICSRGD

SEQ ID NO: 43283 - protein, 169 aa, Homo sapiens
  Payload ID: 8902
  Gene Symbol: KHSRP
  Gene Name: KH-type splicing regulatory protein
  ENSP ID: ENSP00000469830
MTEEYRVPDGMVGLIIGRGGEQINKIQQDSGCKVQISPDSGGLPERSVSLTGAPESVQKAKMMLDDIVSRGRGGPPGQFHDNANGGQNGTVQEIMIPAGKAGLVIGKGGETIKQLQERAGVKMILIQDGSQNTNVDKPLRIIGDPYKVQQACEMVMDILRERDQGGFGD

SEQ ID NO: 43284 - protein, 176 aa, Homo sapiens
  Payload ID: 8902
  Gene Symbol: KHSRP
  Gene Name: KH-type splicing regulatory protein
  ENSP ID: ENSP00000471146
  MOD_RES (1)..(1): Any amino acid
XNAAWAAYYSHYYQQPPGPVPGPAPAPAAPPAQGEPPQPPPTGQSDYTKAWEEYYKKIGQQPQQPGAPPQQDYTKAWEEYYKKQAQVATGGGPGAPPGSQPDYSAAWAEYYRQQAAYYGQTPGPGGPQPPPTQQGQQQASGNCHPPPPPFSFQPPATVHPALVGSAGNPFPCGVCP

SEQ ID NO: 43285 - protein, 279 aa, Homo sapiens
  Payload ID: 8902
  Gene Symbol: KHSRP
  Gene Name: KH-type splicing regulatory protein
  ENSP ID: ENSP00000471262
  MOD_RES (1)..(1): Any amino acid
XSQPPGGGGPGIRKDAFADAVQRARQIAAKIGGDAATTVNNSTPDFGFGGQKRQLEDGDQPESKKLASQGDSISSQLGPIHPPPRTSMTEEYRVPDGMVGLNSGGLPERSVSLTGAPESVQKAKMMLDDIVSRGRGGPPGQFHDNANGGQNGTVQEIMIPAGKAGLVIGKGGETIKQLQERAGVKMILIQDGSQNTNVDKPLRIIGDPYKVQQACEMVMDILRERDQGGFGDRNEYGSRIGGGIDVPVPRHSVGVVIGRSGEMIKKIQNDAGVRIQFKQ

SEQ ID NO: 43286 - protein, 79 aa, Homo sapiens
  Payload ID: 8902
  Gene Symbol: KHSRP
  Gene Name: KH-type splicing regulatory protein
  ENSP ID: ENSP00000472328
  MOD_RES (1)..(1): Any amino acid
XQQPGAPPQQDYTKAWEEYYKKQAQVATGGGPGAPPGSQPDYSAAWAEYYRQQAAYYGQTPGPGGPQPPPTQQGQQQPS

SEQ ID NO: 43287 - protein, 143 aa, Homo sapiens
  Payload ID: 8902
  Gene Symbol: KHSRP
  Gene Name: KH-type splicing regulatory protein
  ENSP ID: ENSP00000472347
YSHYYQQPPGPVPGPAPAPAAPPAQGQQPQQPGAPPQQDYTKAWEEYYKKQAQVATGGGPGAPPGSQPDYSAAWAEYYRQQAAYYGQTPGPGGPQPPPTQQGQQQASGNCHPPPPPFSFQPPATVHPALVGSAGNPFPCGVCP

SEQ ID NO: 43288 - protein, 269 aa, Homo sapiens
  Payload ID: 8902
  Gene Symbol: KHSRP
  Gene Name: KH-type splicing regulatory protein
  ENSP ID: ENSP00000473254
  MOD_RES (1)..(1): Any amino acid
XNWGPPGGEMTFSIPTHKCGLVIGRGGENVKAINQQTGAFVEISRQLPPNGDPNFKLFIIRGSPQQIDHAKQLIEEKIEGPLCPVGPGPGGPGPAGPMGPFNPGPFNQGPPGAPPHAGGPPPHQYPPQGWGNTYPQWQPPAPHDPSKAAAAAADPNAAWAAYYSHYYQQPPGPVPGPAPAPAAPPAQGQQPQQPGAPPQQDYTKAWEEYYKKQAQVATGGGPGAPPGSQPDYSAAWAEYYRQQAAYYGQTPGPGGPQPPPTQQGQQQAQ

SEQ ID NO: 43289 - protein, 711 aa, Homo sapiens
  Payload ID: 8902
  Gene Symbol: KHSRP
  Gene Name: KH-type splicing regulatory protein
  ENSP ID: ENSP00000478033
MSDYSTGGPPPGPPPPAGGGGGAGGAGGGPPPGPPGAGDRGGGGPGGGGPGGGSAGGPSQPPGGGGPGIRKDAFADAVQRARQIAAKIGGDAATTVNNSTPDFGFGGQKRQLEDGDQPESKKLASQGDSISSQLGPIHPPPRTSMTEEYRVPDGMVGLIIGRGGEQINKIQQDSGCKVQISPDSGGLPERSVSLTGAPESVQKAKMMLDDIVSRGRGGPPGQFHDNANGGQNGTVQEIMIPAGKAGLVIGKGGETIKQLQERAGVKMILIQDGSQNTNVDKPLRIIGDPYKVQQACEMVMDILRERDQGGFGDRNEYGSRIGGGIDVPVPRHSVGVVIGRSGEMIKKIQNDAGVRIQFKQDDGTGPEKIAHIMGPPDRCEHAARIINDLLQSLRSGPPGPPGGPGMPPGGRGRGRGQGNWGPPGGEMTFSIPTHKCGLVIGRGGENVKAINQQTGAFVEISRQLPPNGDPNFKLFIIRGSPQQIDHAKQLIEEKIEGPLCPVGPGPGGPGPAGPMGPFNPGPFNQGPPGAPPHAGGPPPHQYPPQGWGNTYPQWQPPAPHDPSKAAAAAADPNAAWAAYYSHYYQQPPGPVPGPAPAPAAPPAQGEPPQPPPTGQSDYTKAWEEYYKKIGQQPQQPGAPPQQDYTKAWEEYYKKQAQVATGGGPGAPPGSQDPFPQQPSPLLPPALAQLPRPRPSPLPGLVCCLFICSRGD

SEQ ID NO: 43290 - protein, 99 aa, Homo sapiens
  Payload ID: 8903
  Gene Symbol: KIAA0040
  Gene Name: KIAA0040
  ENSP ID: ENSP00000462172
MERISAFFSSIWDTILTKHQEGIYNTICLGVLLGLPLLVIITLLFICCHCCWSPPGKRGQQPEKNKKKKKKKKKKDEEDLWISAQPKLLQMEKRPSLPV

SEQ ID NO: 43291 - protein, 99 aa, Homo sapiens; identical to SEQ ID NO: 43290
  Payload ID: 8903
  Gene Symbol: KIAA0040
  Gene Name: KIAA0040
  ENSP ID: ENSP00000463734

SEQ ID NO: 43292 - protein, 99 aa, Homo sapiens; identical to SEQ ID NO: 43290
  Payload ID: 8903
  Gene Symbol: KIAA0040
  Gene Name: KIAA0040
  ENSP ID: ENSP00000464040

SEQ ID NO: 43293 - protein, 153 aa, Homo sapiens
  Payload ID: 8903
  Gene Symbol: KIAA0040
  Gene Name: KIAA0040
  Uniprot ID: Q15053
  ENSP ID: ENSP00000478803
MHYVHVHRVTTQPRNKPQTKCPSGGQSQGPRGQFLDTVLAAMCPIAMLLTADPGMPPTCLWHTPHAKHKEHLSIHLNMVPKCVHMHVTHTHTNSGSRYVGKYILLIKWSLAMYFVQGSTLSTVTKMSHGKALPDSDTYIQFPNQQGPHTPSIP

SEQ ID NO: 43294 - protein, 2235 aa, Homo sapiens
  Payload ID: 8904
  Gene Symbol: KIAA0100
  Gene Name: KIAA0100
  Uniprot ID: Q14667
  ENSP ID: ENSP00000436773
MPLFFSALLVLLLVALSALFLGRWLVVRLATKWCQRKLQAELKIGSFRFFWIQNVSLKFQQHQQTVEIDNLWISSKLLSHDLPHYVALCFGEVRIRTDLQKVSDLSAPFSQSAGVDQKELSFSPSLLKIFCQLFSIHVDAINIMVLKVDTSESLWHIQISRSRFLLDSDGKRLICEVSLCKINSKVLKSGQLEDTCLVELSLALDLCLKVGISSRHLTAITVDVWTLHAELHEGLFQSQLLCQGPSLASKPVPCSEVTENLVEPTLPGLFLLQQLPDQVKVKMENTSVVLSMNSQKRHLTWTLKLLQFLYHRDEDQLPLRSFTANSDMAQMSTELLLEDGLLLSQSRQRIVCLNSLKASVQVTTIDLSASLVLNTCIIHYRHQEFSHWLHLLALETQGSSSPVLKQRKKRTFPQILAPIIFSTSISNVNISIQLGDTPPFALGFNSISLDYQHLRPQSIHQRGVLTVDHLCWRVGSDSHIQRAPHPPNMHVWGEALVLDSFTLQGSYNQPLGLSSTQSDTLFLDCTIRGLQVEASDTCAQCLSRILSLMGPQSGKSAVSRHSSFGESVSLLWKVDLKVEDMNLFTLSALVGASEVRLDTLTILGSAETSTVGIQGLVLALVKSVTEKMQPCCKAPDIPTPVLSLSMLSITYHSSIRSLEVQCGAGLTLLWSPPDHMYLYQHVLATLQCRDLLRATVFPETVPSLALETSGTTSELEGRAPEPLPPKRLLNLTLEVSTAKLTAFVAEDKFITLAAESVSLSRHGGSLQAYCPELAAGFDGNSIFNFKEVEVQLLPELEEMILHRNPFPALQTLRNRVWLLSFGSVSVEFPYQYDFSRTLDEAVGVQKWLKGLHQGTRAWASPSPVPLPPDLLLKVEHFSWVFLDDVFEVKLHDNYELMKDESKESAKRLQLLDAKVAALRKQHGELLPARKIEELYASLERKNIEIYIQRSRRLYGNTPMRRALLTWSLAGLELVALADASFHGPEHVVEQVQELDPGSPFPPEGLDLVIQWCRMLKCNVKSFLVRIRDYPRYLFEIRDWRLMGRLVGTEQSGQPCSRRRQILHLGLPWGNVAVERNMPPLKFYHDFHSEIFQYTVVWGPCWDPAWTLIGQCVDLLTKPSADPSPPLPWWDKSRLLFHGDWHMDIEQANLHQLATEDPYNTTENMHWEWSHLSFHWKPGQFVFKGDLDINVRTASKYDDCCFLHLPDLCMTLDLQWLCHGNPHDHHSVTLRAPEFLPEVPLGQLHDSYRAFRSENLNLSIKMDLTRHSGTISQPRILLYSSTLRWMQNFWATWTSVTRPICRGKLFNNLKPSKKKLGQHYKQLSYTALFPQLQVHYWASFAQQRGIQIECSQGHVFTRGTQRLIPQAGTVMRRLISDWSVTQMVSDLSQVTVHLMASPTEENADHCLDPLVTKTHLLSLSSLTYQRHSNRTAEEELSARDGDPTFHTHQLHLVDLRISWTTTNRDIAFGLYDGYKKAAVLKRNLSTEALKGLKIDPQMPAKKPKRGVPTSASAPPRVNTPSFSGQPDKGSSGGAYMLQKLIEETDRFVVFTEEESGMSDQLCGIAACQTDDIYNRNCLIELVNCQMVLRGAETEGCVIVSAAKAQLLQCQHHPAWYGDTLKQKTSWTCLLDGMQYFATTESSPTEQDGRQLWLEVKNIEEHRQRSLDSVQELMESGQAVGGMVTTTTDWNQPAEAQQAQQVQRIISRCNCRMYYISYSHDIDPELATQIKPPEVLENQEKEDLLKKQEGAVDTFTLIHHELEISTNPAQYAMILDIVNNLLLHVEPKRKEHSEKKQRVRFQLEISSNPEEQRSSILHLQEAVRQHVAQIRQLEKQMYSIMKSLQDDSKNENLLDLNQKLQLQLNQEKANLQLESEELNILIRCFKDFQLQRANKMELRKQQEDVSVVRRTEFYFAQARWRLTEEDGQLGIAELELQRFLYSKVNKSDDTAEHLLELGWFTMNNLLPNAVYKVVLRPQSSCQSGRQLALRLFSKVRPPVGGISVKEHFEVNVVPLTIQLTHQFFHRMMGFFFPGRSVEDDEVGDEEDKSKLVTTGIPVVKPRQLIATDDAVPLGPGKGVAQGLTRSSGVRRSFRKSPEHPVDDIDKMKERAAMNNSFIYIKIPQVPLCVSYKGEKNSVDWGDLNLVLPCLEYHNNTWTWLDFAMAVKRDSRKALVAQVIKEKLRLKSATGSEVRGKLETKSDLNMQQQEEEEKARLLIGLSVGDKNPGKKSIFGRRK

SEQ ID NO: 43295 - protein, 2092 aa, Homo sapiens
  Payload ID: 8904
  Gene Symbol: KIAA0100
  Gene Name: KIAA0100
  ENSP ID: ENSP00000446443
MVLKVDTSESLWHIQISRSRFLLDSDGKRLICEVSLCKINSKVLKSGQLEDTCLVELSLALDLCLKVGISSRHLTAITVDVWTLHAELHEGLFQSQLLCQGPSLASKPVPCSEVTENLVEPTLPGLFLLQQLPDQVKVKMENTSVVLSMNSQKRHLTWTLKLLQFLYHRDEDQLPLRSFTANSDMAQMSTELLLEDGLLLSQSRQRIVCLNSLKASVQVTTIDLSASLVLNTCIIHYRHQEFSHWLHLLALETQGSSSPVLKQRKKRTFPQILAPIIFSTSISNVNISIQLGDTPPFALGFNSISLDYQHLRPQSIHQRGVLTVDHLCWRVGSDSHIQRAPHPPNMHVWGEALVLDSFTLQGSYNQPLGLSSTQSDTLFLDCTIRGLQVEASDTCAQCLSRILSLMGPQSGKSAVSRHSSFGESVSLLWKVDLKVEDMNLFTLSALVGASEVRLDTLTILGSAETSTVGIQGLVLALVKSVTEKMQPCCKAPDIPTPVLSLSMLSITYHSSIRSLEVQCGAGLTLLWSPPDHMYLYQHVLATLQCRDLLRATVFPETVPSLALETSGTTSELEGRAPEPLPPKRLLNLTLEVSTAKLTAFVAEDKFITLAAESVSLSRHGGSLQAYCPELAAGFDGNSIFNFKEVEVQLLPELEEMILHRNPFPALQTLRNRVWLLSFGSVSVEFPYQYDFSRTLDEAVGVQKWLKGLHQGTRAWASPSPVPLPPDLLLKVEHFSWVFLDDVFEVKLHDNYELMKDESKESAKRLQLLDAKVAALRKQHGELLPARKIEELYASLERKNIEIYIQRSRRLYGNTPMRRALLTWSLAGLELVALADASFHGPEHVVEQVQELDPGSPFPPEGLDLVIQWCRMLKCNVKSFLVRIRDYPRYLFEIRDWRLMGRLVGTEQSGQPCSRRRQILHLGLPWGNVAVERNMPPLKFYHDFHSEIFQYTVVWGPCWDPAWTLIGQCVDLLTKPSADPSPPLPWWDKSRLLFHGDWHMDIEQANLHQLATEDPYNTTENMHWEWSHLSFHWKPGQFVFKGDLDINVRTASKYDDCCFLHLPDLCMTLDLQWLCHGNPHDHHSVTLRAPEFLPEVPLGQLHDSYRAFRSENLNLSIKMDLTRHSGTISQPRILLYSSTLRWMQNFWATWTSVTRPICRGKLFNNLKPSKKKLGQHYKQLSYTALFPQLQVHYWASFAQQRGIQIECSQGHVFTRGTQRLIPQAGTVMRRLISDWSVTQMVSDLSQVTVHLMASPTEENADHCLDPLVTKTHLLSLSSLTYQRHSNRTAEEELSARDGDPTFHTHQLHLVDLRISWTTTNRDIAFGLYDGYKKAAVLKRNLSTEALKGLKIDPQMPAKKPKRGVPTSASAPPRVNTPSFSGQPDKGSSGGAYMLQKLIEETDRFVVFTEEESGMSDQLCGIAACQTDDIYNRNCLIELVNCQMVLRGAETEGCVIVSAAKAQLLQCQHHPAWYGDTLKQKTSWTCLLDGMQYFATTESSPTEQDGRQLWLEVKNIEEHRQRSLDSVQELMESGQAVGGMVTTTTDWNQPAEAQQAQQVQRIISRCNCRMYYISYSHDIDPELATQIKPPEVLENQEKEDLLKKQEGAVDTFTLIHHELEISTNPAQYAMILDIVNNLLLHVEPKRKEHSEKKQRVRFQLEISSNPEEQRSSILHLQEAVRQHVAQIRQLEKQMYSIMKSLQDDSKNENLLDLNQKLQLQLNQEKANLQLESEELNILIRCFKDFQLQRANKMELRKQQEDVSVVRRTEFYFAQARWRLTEEDGQLGIAELELQRFLYSKVNKSDDTAEHLLELGWFTMNNLLPNAVYKVVLRPQSSCQSGRQLALRLFSKVRPPVGGISVKEHFEVNVVPLTIQLTHQFFHRMMGFFFPGRSVEDDEVGDEEDKSKLVTTGIPVVKPRQLIATDDAVPLGPGKGVAQGLTRSSGVRRSFRKSPEHPVDDIDKMKERAAMNNSFIYIKIPQVPLCVSYKGEKNSVDWGDLNLVLPCLEYHNNTWTWLDFAMAVKRDSRKALVAQVIKEKLRLKSATGSEVRGKLETKSDLNMQQQEEEEKARLLIGLSVGDKNPGKKSIFGRRK

SEQ ID NO: 43296 - protein, 86 aa, Homo sapiens
  Payload ID: 8904
  Gene Symbol: KIAA0100
  Gene Name: KIAA0100
  ENSP ID: ENSP00000463618
MPLFFSALLVLLLVALSALFLGRWLVVRLATKWCQRKLQAELKIGSFRFFWIQNVSLKFQQHQQTVTLCGIVLWRSAYQNGPTESF

SEQ ID NO: 43297 - protein, 21 aa, Homo sapiens
  Payload ID: 8904
  Gene Symbol: KIAA0100
  Gene Name: KIAA0100
  ENSP ID: ENSP00000466636
  MOD_RES (1)..(1): Any amino acid
XQGPSLASKPVPCSAARPGQG

SEQ ID NO: 43298 - protein, 2092 aa, Homo sapiens
  Payload ID: 8904
  Gene Symbol: KIAA0100
  Gene Name: KIAA0100
  ENSP ID: ENSP00000467716
MVLKVDTSESLWHIQISRSRFLLDSDGKRLICEVSLCKINSKVLKSGQLEDTCLVELSLALDLCLKVGISSRHLTAITVDVWTLHAELHEGLFQSQLLCQGPSLASKPVPCSEVTENLVEPTLPGLFLLQQLPDQVKVKMENTSVVLSMNSQKRHLTWTLKLLQFLYHRDEDQLPLRSFTANSDMAQMSTELLLEDGLLLSQSRQRIVCLNSLKASVQVTTIDLSASLVLNTCIIHYRHQEFSHWLHLLALETQGSSSPVLKQRKKRTFPQILAPIIFSTSISNVNISIQLGDTPPFALGFNSISLDYQHLRPQSIHQRGVLTVDHLCWRVGSDSHIQRAPHPPNMHVWGEALVLDSFTLQGSYNQPLGLSSTQSDTLFLDCTIRGLQVEASDTCAQCLSRILSLMGPQSGKSAVSRHSSFGESVSLLWKVDLKVEDMNLFTLSALVGASEVRLDTLTILGSAETSTVGIQGLVLALVKSVTEKMQPCCKAPDIPTPVLSLSMLSITYHSSIRSLEVQCGAGLTLLWSPPDHMYLYQHVLATLQCRDLLRATVFPETVPSLALETSGTTSELEGRAPEPLPPKRLLNLTLEVSTAKLTAFVAEDKFITLAAESVSLSRHGGSLQAYCPELAAGFDGNSIFNFKEVEVQLLPELEEMILHRNPFPALQTLRNRVWLLSFGSVSVEFPYQYDFSRTLDEAVGVQKWLKGLHQGTRAWASPSPVPLPPDLLLKVEHFSWVFLDDVFEVKLHDNYELMKDESKESAKRLQLLDAKVAALRKQHGELLPARKIEELYASLERKNIEIYIQRSRRLYGNTPMRRALLTWSLAGLELVALADASFHGPEHVVEQVQELDPGSPFPPEGLDLVIQWCRMLKCNVKSFLVRIRDYPRYLFEIRDWRLMGRLVGTEQSGQPCSRRRQILHLGLPWGNVAVERNMPPLKFYHDFHSEIFQYTVVWGPCWDPAWTLIGQCVDLLTKPSADPSPPLPWWDKSRLLFHGDWHMDIEQANLHQLATEDPYNTTENMHWEWSHLSFHWKPGQFVFKGDLDINVRTASKYDDCCFLHLPDLCMTLDLQWLCHGNPHDHHSVTLRAPEFLPEVPLGQLHDSYRAFRSENLNLSIKMDLTRHSGTISQPRILLYSSTLRWMQNFWATWTSVTRPICRGKLFNNLKPSKKKLGQHYKQLSYTALFPQLQVHYWASFAQQRGIQIECSQGHVFTRGTQRLIPQAGTVMRRLISDWSVTQMVSDLSQVTVHLMASPTEENADHCLDPLVTKTHLLSLSSLTYQRHSNRTAEEELSARDGDPTFHTHQLHLVDLRISWTTTNRDIAFGLYDGYKKAAVLKRNLSTEALKGLKIDPQMPAKKPKRGVPTSASAPPRVNTPSFSGQPDKGSSGGAYMLQKLIEETDRFVVFTEEESGMSDQLCGIAACQTDDIYNRNCLIELVNCQMVLRGAETEGCVIVSAAKAQLLQCQHHPAWYGDTLKQKTSWTCLLDGMQYFATTESSPTEQDGRQLWLEVKNIEEHRQRSLDSVQELMESGQAVGGMVTTTTDWNQPAEAQQAQQVQRIISRCNCRMYYISYSHDIDPELATQIKPPEVLENQEKEDLLKKQEGAVDTFTLIHHELEISTNPAQYAMILDIVNNLLLHVEPKRKEHSEKKQRVRFQLEISSNPEEQRSSILHLQEAVRQHVAQIRQLEKQMYSIMKSLQDDSKNENLLDLNQKLQLQLNQEKANLQLESEELNILIRCFKDFQLQRANKMELRKQQEDVSVVRRTEFYFAQARWRLTEEDGQLGIAELELQRFLYSKVNKSDDTAEHLLELGWFTMNNLLPNAVYKAILRPQSSCQSGRQLALRLFSKVRPPVGGISVKEHFEVNVVPLTIQLTHQFFHRMMGFFFPGRSVEDDEVGDEEDKSKLVTTGIPVVKPRQLIATDDAVPLGPGKGVAQGLTRSSGVRRSFRKSPEHPVDDIDKMKERAAMNNSFIYIKIPQVPLCVSYKGEKNSVDWGDLNLVLPCLEYHNNTWTWLDFAMAVKRDSRKALVAQVIKEKLRLKSATGSEVRGKLETKSDLNMQQQEEEEKARLLIGLSVGDKNPGKKSIFGRRK

SEQ ID NO: 43299 - protein, 287 aa, Homo sapiens
  Payload ID: 8904
  Gene Symbol: KIAA0100
  Gene Name: KIAA0100
  ENSP ID: ENSP00000467944
DPSPPLPWWDKSRLLFHGDWHMDIEQANLHQLATEFVFKGDLDINVRTASKYDDCCFLHLPDLCMTLDLQWLCHGNPHDHHSVTLRAPEFLPEVPLGQLHDSYRAFRSENLNLSIKMDLTRHSGTISQPRILLYSSTLRWMQNFWATWTSVTRPICRGKLFNNLKPSKKKLGQHYKQLSYTALFPQLQVHYWASFAQQRGIQIECSQGHVFTRGTQRLIPQAGTVMRRLISDWSVTQMVSDLSQVTVHLMASPTEENADHCLDPLVTKTHLLSLSSLTYQRHSNRTA

SEQ ID NO: 43300 - protein, 111 aa, Homo sapiens; identical to SEQ ID NO: 20432
  Payload ID: 8905
  Gene Symbol: KIAA0101
  Gene Name: KIAA0101
  Uniprot ID: Q15004
  ENSP ID: ENSP00000300035

SEQ ID NO: 43301 - protein, 65 aa, Homo sapiens; identical to SEQ ID NO: 20431
  Payload ID: 8905
  Gene Symbol: KIAA0101
  Gene Name: KIAA0101
  Uniprot ID: Q15004
  ENSP ID: ENSP00000369608

SEQ ID NO: 43302 - protein, 84 aa, Homo sapiens
  Payload ID: 8905
  Gene Symbol: KIAA0101
  Gene Name: KIAA0101
  ENSP ID: ENSP00000452975
MVRTKADSVPGTYRKAENKYAGGNPVCVRPTPKWQKGIGEFFRLSPKDSEKENQIPEEAGSSGLGKAKRKACPLQPDHTNDEKE

SEQ ID NO: 43303 - protein, 115 aa, Homo sapiens
  Payload ID: 8905
  Gene Symbol: KIAA0101
  Gene Name: KIAA0101
  ENSP ID: ENSP00000453527
MVRTKADSVPGTYRKVVAARAPRKVLGSSTSATNSTSVSSRKAENKYAGGNPVCVRPTPKWQKGIGEFFRLSPKDSEKENQIPEEAGSSGLGKAKRNQEPPILQHTEQQAGHTAH

SEQ ID NO: 43304 - protein, 115 aa, Homo sapiens; identical to SEQ ID NO: 43303
  Payload ID: 8905
  Gene Symbol: KIAA0101
  Gene Name: KIAA0101
  ENSP ID: ENSP00000485699

SEQ ID NO: 43305 - protein, 515 aa, Homo sapiens
  Payload ID: 8906
  Gene Symbol: KIAA0141
  Gene Name: KIAA0141
  Uniprot ID: Q14154
  ENSP ID: ENSP00000194118
MWRLPGLLGRALPRTLGPSLWRVTPKSTSPDGPQTTSSTLLVPVPNLDRSGPHGPGTSGGPRSHGWKDAFQWMSSRVSPNTLWDAISWGTLAVLALQLARQIHFQASLPAGPQRVEHCSWHSPLDRFFSSPLWHPCSSLRQHILPSPDGPAPRHTGLREPRLGQEEASAQPRNFSHNSLRGARPQDPSEEGPGDFGFLHASSSIESEAKPAQPQPTGEKEQDKSKTLSLEEAVTSIQQLFQLSVSIAFNFLGTENMKSGDHTAAFSYFQKAAARGYSKAQYNAGLCHEHGRGTPRDISKAVLYYQLAASQGHSLAQYRYARCLLRDPASSWNPERQRAVSLLKQAADSGLREAQAFLGVLFTKEPYLDEQRAVKYLWLAANNGDSQSRYHLGICYEKGLGVQRNLGEALRCYQQSAALGNEAAQERLRALFSMGAAAPGPSDLTVTGLKSFSSPSLCSLNTLLAGTSRLPHASSTGNLGLLCRSGHLGASLEASSRAIPPHPYPLERSVVRLGFG

SEQ ID NO: 43306 - protein, 515 aa, Homo sapiens; identical to SEQ ID NO: 43305
  Payload ID: 8906
  Gene Symbol: KIAA0141
  Gene Name: KIAA0141
  Uniprot ID: Q14154
  ENSP ID: ENSP00000396225

SEQ ID NO: 43307 - protein, 322 aa, Homo sapiens
  Payload ID: 8906
  Gene Symbol: KIAA0141
  Gene Name: KIAA0141
  ENSP ID: ENSP00000422686
MWRLPGLLGRALPRTLGPSLWRVTPKSTSPDGPQTTSSTLLVPVPNLDRSGPHGPGTSGGPRSHGWKDAFQWMSSRVSPNTLWDAISWGTLAVLALQLARQIHFQASLPAGPQRVEHCSWHSPLDRFFSSPLWHPCSSLRQHILPSPDGPAPRHTGLREPRLGQEEASAQPRNFSHNSLRGARPQDPSEEGPGDFGFLHASSSIESEAKPAQPQPTGEKEQDKSKTLSLEEAVTSIQQLFQLSVSIAFNFLGTENMKSGDHTAAFSYFQKAAARGYSKAQYNAGLCHEHGRGTPRDISKLAASQGHSLAQYRYARCLLRDPA

SEQ ID NO: 43308 - protein, 216 aa, Homo sapiens
  Payload ID: 8906
  Gene Symbol: KIAA0141
  Gene Name: KIAA0141
  ENSP ID: ENSP00000426138
AVLYYQLAASQGHSLAQYRYARCLLRDPASSWNPERQRAVSLLKQAADSGLREAQAFLGVLFTKEPYLDEQRAVKYLWLAANNGDSQSRYHLGICYEKGLGVQRNLGEALRCYQQSAALGNEAAQERLRALFSMGAAAPGPSDLTVTGLKSFSSPSLCSLNTLLAGTSRLPHASSTGNLGLLCRSGHLGASLEASSRAIPPHPYPLERSVVRLGFG

SEQ ID NO: 43309 - protein, 1159 aa, Homo sapiens
  Payload ID: 8907
  Gene Symbol: KIAA0196
  Gene Name: KIAA0196
  Uniprot ID: Q12768
  ENSP ID: ENSP00000318016
MLDFLAENNLCGQAILRIVSCGNAIIAELLRLSEFIPAVFRLKDRADQQKYGDIIFDFSYFKGPELWESKLDAKPELQDLDEEFRENNIEIVTRFYLAFQSVHKYIVDLNRYLDDLNEGVYIQQTLETVLLNEDGKQLLCEALYLYGVMLLVIDQKIEGEVRERMLVSYYRYSAARSSADSNMDDICKLLRSTGYSSQPGAKRPSNYPESYFQRVPINESFISMVIGRLRSDDIYNQVSAYPLPEHRSTALANQAAMLYVILYFEPSILHTHQAKMREIVDKYFPDNWVISIYMGITVNLVDAWEPYKAAKTALNNTLDLSNVREQASRYATVSERVHAQVQQFLKEGYLREEMVLDNIPKLLNCLRDCNVAIRWLMLHTADSACDPNNKRLRQIKDQILTDSRYNPRILFQLLLDTAQFEFILKEMFKQMLSEKQTKWEHYKKEGSERMTELADVFSGVKPLTRVEKNENLQAWFREISKQILSLNYDDSTAAGRKTVQLIQALEEVQEFHQLESNLQVCQFLADTRKFLHQMIRTINIKEEVLITMQIVGDLSFAWQLIDSFTSIMQESIRVNPSMVTKLRATFLKLASALDLPLLRINQANSPDLLSVSQYYSGELVSYVRKVLQIIPESMFTSLLKIIKLQTHDIIEVPTRLDKDKLRDYAQLGPRYEVAKLTHAISIFTEGILMMKTTLVGIIKVDPKQLLEDGIRKELVKRVAFALHRGLIFNPRAKPSELMPKLKELGATMDGFHRSFEYIQDYVNIYGLKIWQEEVSRIINYNVEQECNNFLRTKIQDWQSMYQSTHIPIPKFTPVDESVTFIGRLCREILRITDPKMTCHIDQLNTWYDMKTHQEVTSSRLFSEIQTTLGTFGLNGLDRLLCFMIVKELQNFLSMFQKIILRDRTVQDTLKTLMNAVSPLKSIVANSNKIYFSAIAKTQKIWTAYLEAIMKVGQMQILRQQIANELNYSCRFDSKHLAAALENLNKALLADIEAHYQDPSLPYPKEDNTLLYEITAYLEAAGIHNPLNKIYITTKRLPYFPIVNFLFLIAQLPKLQYNKNLGMVCRKPTDPVDWPPLVLGLLTLLKQFHSRYTEQFLALIGQFICSTVEQCTSQKIPEIPADVVGALLFLEDYVRYTKLPRRVAEAHVPNFIFDEFRTVL

SEQ ID NO: 43310 - protein, 163 aa, Homo sapiens
  Payload ID: 8907
  Gene Symbol: KIAA0196
  Gene Name: KIAA0196
  ENSP ID: ENSP00000427946
MLLVIDQKIEGEVRERMLVSYYRYSAARSSADSNMDDICKLLRSTGYSSQPGAKRPSNYPESYFQRVPINESFISMVIGRLRSDDIYNQVSAYPLPEHRSTALANQAAMLYVILYFEPSILHTHQAKMREIVDKYFPDNWVISIYMGITVNLVDAWEPYKAAK

SEQ ID NO: 43311 - protein, 1011 aa, Homo sapiens
  Payload ID: 8907
  Gene Symbol: KIAA0196
  Gene Name: KIAA0196
  ENSP ID: ENSP00000429676
MLLVIDQKIEGEVRERMLVSYYRYSAARSSADSNMDDICKLLRSTGYSSQPGAKRPSNYPESYFQRVPINESFISMVIGRLRSDDIYNQVSAYPLPEHRSTALANQAAMLYVILYFEPSILHTHQAKMREIVDKYFPDNWVISIYMGITVNLVDAWEPYKAAKTALNNTLDLSNVREQASRYATVSERVHAQVQQFLKEGYLREEMVLDNIPKLLNCLRDCNVAIRWLMLHTADSACDPNNKRLRQIKDQILTDSRYNPRILFQLLLDTAQFEFILKEMFKQMLSEKQTKWEHYKKEGSERMTELADVFSGVKPLTRVEKNENLQAWFREISKQILSLNYDDSTAAGRKTVQLIQALEEVQEFHQLESNLQVCQFLADTRKFLHQMIRTINIKEEVLITMQIVGDLSFAWQLIDSFTSIMQESIRVNPSMVTKLRATFLKLASALDLPLLRINQANSPDLLSVSQYYSGELVSYVRKVLQIIPESMFTSLLKIIKLQTHDIIEVPTRLDKDKLRDYAQLGPRYEVAKLTHAISIFTEGILMMKTTLVGIIKVDPKQLLEDGIRKELVKRVAFALHRGLIFNPRAKPSELMPKLKELGATMDGFHRSFEYIQDYVNIYGLKIWQEEVSRIINYNVEQECNNFLRTKIQDWQSMYQSTHIPIPKFTPVDESVTFIGRLCREILRITDPKMTCHIDQLNTWYDMKTHQEVTSSRLFSEIQTTLGTFGLNGLDRLLCFMIVKELQNFLSMFQKIILRDRTVQDTLKTLMNAVSPLKSIVANSNKIYFSAIAKTQKIWTAYLEAIMKVGQMQILRQQIANELNYSCRFDSKHLAAALENLNKALLADIEAHYQDPSLPYPKEDNTLLYEITAYLEAAGIHNPLNKIYITTKRLPYFPIVNFLFLIAQLPKLQYNKNLGMVCRKPTDPVDWPPLVLGLLTLLKQFHSRYTEQFLALIGQFICSTVEQCTSQKIPEIPADVVGALLFLEDYVRYTKLPRRVAEAHVPNFIFDEFRTVL

SEQ ID NO: 43312 - protein, 505 aa, Homo sapiens
  Payload ID: 8908
  Gene Symbol: KIAA0226L
  Gene Name: KIAA0226-like
  ENSP ID: ENSP00000368057
MVSNHYFLLCVNLPLREIHTPGAVQVSRRTISSNSFSPEVFVLPVDVEKENAHFYVADMIISAMEKMKCNILSQQQTESWSKEVSGLLGSDQPDSEMTFDTNIKQESGSSTSSYSGYEGCAVLQVSPVTETRTYHDVKEICKCDVDEFVILELGDFNDITETCSCSCSSSKSVTYEPDFNSAELLAKELYRVFQKCWILSVVNSQLAGSLSAAGSIVVNEECVRKDFESSMNVVQEIKFKSRIRGTEDWAPPRFQIIFNIHPPLKRDLVVAAQNFFCAGCGTPVEPKFVKRLRYCEYLGKYFCDCCHSYAESCIPARILMMWDFKKYYVSNFSKQLLDSIWHQPIFNLLSIGQSLYAKAKELDRVKEIQEQLFHIKKLLKTCRFANSALKEFEQVPGHLTDELHLFSLEDLVRIKKGLLAPLLKDILKASLAHVAGCELCQGKGFICEFCQNTTVIFPFQTATCRRCSACRACFHKQCFQSSECPRCARITARRKLLESVASAAT

SEQ ID NO: 43313 - protein, 595 aa, Homo sapiens
  Payload ID: 8908
  Gene Symbol: KIAA0226L
  Gene Name: KIAA0226-like
  Uniprot ID: Q9H714
  ENSP ID: ENSP00000368061
MVSNHYFLLCVNLPLREIHTPGPSPSCLGDSLAETTLSEDTTDSVGSASPHGSSEKSSSFSLSSTEVHMVRPGYSHRVSLPTSPGILATSPYPETDSAFFEPSHLTSAADEGAVQVSRRTISSNSFSPEVFVLPVDVEKENAHFYVADMIISAMEKMKCNILSQQQTESWSKEVSGLLGSDQPDSEMTFDTNIKQESGSSTSSYSGYEGCAVLQVSPVTETRTYHDVKEICKCDVDEFVILELGDFNDITETCSCSCSSSKSVTYEPDFNSAELLAKELYRVFQKCWILSVVNSQLAGSLSAAGSIVVNEECVRKDFESSMNVVQEIKFKSRIRGTEDWAPPRFQIIFNIHPPLKRDLVVAAQNFFCAGCGTPVEPKFVKRLRYCEYLGKYFCDCCHSYAESCIPARILMMWDFKKYYVSNFSKQLLDSIWHQPIFNLLSIGQSLYAKAKELDRVKEIQEQLFHIKKLLKTCRFANSALKEFEQVPGHLTDELHLFSLEDLVRIKKGLLAPLLKDILKASLAHVAGCELCQGKGFICEFCQNTTVIFPFQTATCRRCSACRACFHKQCFQSSECPRCARITARRKLLESVASAAT

SEQ ID NO: 43314 - protein, 635 aa, Homo sapiens
  Payload ID: 8908
  Gene Symbol: KIAA0226L
  Gene Name: KIAA0226-like
  Uniprot ID: Q9H714
  ENSP ID: ENSP00000368064
MVSQSTVRQDSPVEPWEGISDHSGIIDGSPRLLNTDHPPCQLDIRLMRHKAVWINPQDVQQQPQDLQSQVPAAGNSGTHFVTDAASPSGPSPSCLGDSLAETTLSEDTTDSVGSASPHGSSEKSSSFSLSSTEVHMVRPGYSHRVSLPTSPGILATSPYPETDSAFFEPSHLTSAADEGAVQVSRRTISSNSFSPEVFVLPVDVEKENAHFYVADMIISAMEKMKCNILSQQQTESWSKEVSGLLGSDQPDSEMTFDTNIKQESGSSTSSYSGYEGCAVLQVSPVTETRTYHDVKEICKCDVDEFVILELGDFNDITETCSCSCSSSKSVTYEPDFNSAELLAKELYRVFQKCWILSVVNSQLAGSLSAAGSIVVNEECVRKDFESSMNVVQEIKFKSRIRGTEDWAPPRFQIIFNIHPPLKRDLVVAAQNFFCAGCGTPVEPKFVKRLRYCEYLGKYFCDCCHSYAESCIPARILMMWDFKKYYVSNFSKQLLDSIWHQPIFNLLSIGQSLYAKAKELDRVKEIQEQLFHIKKLLKTCRFANSCVKERALFVNFARIRLSSSHFRQQHVEDVQRAGLAFTNSASSPPSAPGVRGSQRGENFWKVWPLQQHDAPEYCEKDCSTCLMITPICVYYW

SEQ ID NO: 43315 - protein, 447 aa, Homo sapiens
  Payload ID: 8908
  Gene Symbol: KIAA0226L
  Gene Name: KIAA0226-like
  ENSP ID: ENSP00000368074
MIISAMEKMKCNILSQQQTESWSKEVSGLLGSDQPDSEMTFDTNIKQESGSSTSSYSGYEGCAVLQVSPVTETRTYHDVKEICKCDVDEFVILELGDFNDITETCSCSCSSSKSVTYEPDFNSAELLAKELYRVFQKCWILSVVNSQLAGSLSAAGSIVVNEECVRKDFESSMNVVQEIKFKSRIRGTEDWAPPRFQIIFNIHPPLKRDLVVAAQNFFCAGCGTPVEPKFVKRLRYCEYLGKYFCDCCHSYAESCIPARILMMWDFKKYYVSNFSKQLLDSIWHQPIFNLLSIGQSLYAKAKELDRVKEIQEQLFHIKKLLKTCRFANSALKEFEQVPGHLTDELHLFSLEDLVRIKKGLLAPLLKDILKASLAHVAGCELCQGKGFICEFCQNTTVIFPFQTATCRRCSACRACFHKQCFQSSECPRCARITARRKLLESVASAAT

SEQ ID NO: 43316 - protein, 662 aa, Homo sapiens
  Payload ID: 8908
  Gene Symbol: KIAA0226L
  Gene Name: KIAA0226-like
  Uniprot ID: Q9H714
  ENSP ID: ENSP00000374558
MVSQSTVRQDSPVEPWEGISDHSGIIDGSPRLLNTDHPPCQLDIRLMRHKAVWINPQDVQQQPQDLQSQVPAAGNSGTHFVTDAASPSGPSPSCLGDSLAETTLSEDTTDSVGSASPHGSSEKSSSFSLSSTEVHMVRPGYSHRVSLPTSPGILATSPYPETDSAFFEPSHLTSAADEGAVQVSRRTISSNSFSPEVFVLPVDVEKENAHFYVADMIISAMEKMKCNILSQQQTESWSKEVSGLLGSDQPDSEMTFDTNIKQESGSSTSSYSGYEGCAVLQVSPVTETRTYHDVKEICKCDVDEFVILELGDFNDITETCSCSCSSSKSVTYEPDFNSAELLAKELYRVFQKCWILSVVNSQLAGSLSAAGSIVVNEECVRKDFESSMNVVQEIKFKSRIRGTEDWAPPRFQIIFNIHPPLKRDLVVAAQNFFCAGCGTPVEPKFVKRLRYCEYLGKYFCDCCHSYAESCIPARILMMWDFKKYYVSNFSKQLLDSIWHQPIFNLLSIGQSLYAKAKELDRVKEIQEQLFHIKKLLKTCRFANSALKEFEQVPGHLTDELHLFSLEDLVRIKKGLLAPLLKDILKASLAHVAGCELCQGKGFICEFCQNTTVIFPFQTATCRRCSACRACFHKQCFQSSECPRCARITARRKLLESVASAAT

SEQ ID NO: 43317 - protein, 505 aa, Homo sapiens; identical to SEQ ID NO: 43312
  Payload ID: 8908
  Gene Symbol: KIAA0226L
  Gene Name: KIAA0226-like
  ENSP ID: ENSP00000386578

SEQ ID NO: 43318 - protein, 662 aa, Homo sapiens; identical to SEQ ID NO: 43316
  Payload ID: 8908
  Gene Symbol: KIAA0226L
  Gene Name: KIAA0226-like
  Uniprot ID: Q9H714
  ENSP ID: ENSP00000396935

SEQ ID NO: 43319 - protein, 129 aa, Homo sapiens
  Payload ID: 8908
  Gene Symbol: KIAA0226L
  Gene Name: KIAA0226-like
  ENSP ID: ENSP00000402357
MVRPGYSHRVSLPTSPGILATSPYPETDSAFFEPSHLTSAADEGAVQVSRRTISSNSFSPEVFVLPVDVEKENAHFYVADMIISAMEKMKCNILSQQQTESWSKEVSGLLGSDQPDSEMTFDTNIKQES

SEQ ID NO: 43320 - protein, 287 aa, Homo sapiens
  Payload ID: 8908
  Gene Symbol: KIAA0226L
  Gene Name: KIAA0226-like
  ENSP ID: ENSP00000412507
MVSQSTVRQDSPVEPWEGISDHSGIIDGSPRLLNTDHPPCQLDIRLMRHKAVWINPQDVQQQPQDLQSQVPAAGNSGTHFVTDAASPSGPSPSCLGDSLAETTLSEDTTDSVGSASPHGSSEKSSSFSLSSTEVHMVRPGYSHRVSLPTSPGILATSPYPETDSAFFEPSHLTSAADEGAVQVSRRTISSNSFSPEVFVLPVDVEKENAHFYVADMIISAMEKMKCNILSQQQTESWSKEVSGLLGSDQPDSEMTFDTNIKQESGSSTSSYSGYEGKLCCVTGQPSD

SEQ ID NO: 43321 - protein, 178 aa, Homo sapiens
  Payload ID: 8908
  Gene Symbol: KIAA0226L
  Gene Name: KIAA0226-like
  ENSP ID: ENSP00000414579
MVSQSTVRQDSPVEPWEGISDHSGIIDGSPRLLNTDHPPCQLDIRLMRHKAVWINPQDVQQQPQDLQSQVPAAGNSGTHFVTDAASPSGPSPSCLGDSLAETTLSEDTTDSVGSASPHGSSEKSSSFSLSSTEVHMVRPGYSHRVSLPTSPGILATSPYPETDSAFFEPSHLTSAADE

SEQ ID NO: 43322 - protein, 527 aa, Homo sapiens
  Payload ID: 8908
  Gene Symbol: KIAA0226L
  Gene Name: KIAA0226-like
  Uniprot ID: Q9H714
  ENSP ID: ENSP00000485932
MVRPGYSHRVSLPTSPGILATSPYPETDSAFFEPSHLTSAADEGAVQVSRRTISSNSFSPEVFVLPVDVEKENAHFYVADMIISAMEKMKCNILSQQQTESWSKEVSGLLGSDQPDSEMTFDTNIKQESGSSTSSYSGYEGCAVLQVSPVTETRTYHDVKEICKCDVDEFVILELGDFNDITETCSCSCSSSKSVTYEPDFNSAELLAKELYRVFQKCWILSVVNSQLAGSLSAAGSIVVNEECVRKDFESSMNVVQEIKFKSRIRGTEDWAPPRFQIIFNIHPPLKRDLVVAAQNFFCAGCGTPVEPKFVKRLRYCEYLGKYFCDCCHSYAESCIPARILMMWDFKKYYVSNFSKQLLDSIWHQPIFNLLSIGQSLYAKAKELDRVKEIQEQLFHIKKLLKTCRFANSALKEFEQVPGHLTDELHLFSLEDLVRIKKGLLAPLLKDILKASLAHVAGCELCQGKGFICEFCQNTTVIFPFQTATCRRCSACRACFHKQCFQSSECPRCARITARRKLLESVASAAT

SEQ ID NO: 43323 - protein, 1395 aa, Homo sapiens
  Payload ID: 8909
  Gene Symbol: KIAA0232
  Gene Name: KIAA0232
  Uniprot ID: Q92628
  ENSP ID: ENSP00000303928
MYPICTVVVDGLPSESSSSSYPGPVSVSEMSLLHALGPVQTWLGQELEKCGIDAMIYTRYVLSLLLHDSYDYDLQEQENDIFLGWEKGAYKKWGKSKKKCSDLTLEEMKKQAAVQCLRSASDESSGIETLVEELCSRLKDLQSKQEEKIHKKLEGSPSPEAELSPPAKDQVEMYYEAFPPLSEKPVCLQEIMTVWNKSKVCSYSSSSSSSTAPPASTDTSSPKDCNSESEVTKERSSEVPTTVHEKTQSKSKNEKENKFSNGTIEEKPALYKKQIRHKPEGKIRPRSWSSGSSEAGSSSSGNQGELKASMKYVKVRHKAREIRNKKGRNGQSRLSLKHGEKAERNIHTGSSSSSSSGSVKQLCKRGKRPLKEIGRKDPGSTEGKDLYMENRKDTEYKEEPLWYTEPIAEYFVPLSRKSKLETTYRNRQDTSDLTSEAVEELSESVHGLCISNNNLHKTYLAAGTFIDGHFVEMPAVINEDIDLTGTSLCSLPEDNKYLDDIHLSELTHFYEVDIDQSMLDPGASETMQGESRILNMIRQKSKENTDFEAECCIVLDGMELQGERAIWTDSTSSVGAEGLFLQDLGNLAQFWECCSSSSGDADGESFGGDSPVRLSPILDSTVLNSHLLAGNQELFSDINEGSGINSCFSVFEVQCSNSVLPFSFETLNLGNENTDSSANMLGKTQSRLLIWTKNSAFEENEHCSNLSTRTCSPWSHSEETRSDNETLNIQFEESTQFNAEDINYVVPRVSSNYVDEELLDFLQDETCQQNSRTLGEIPTLVFKKTSKLESVCGIQLEQKTENKNFETTQVCNESPHGDGYSSGVIKDIWTKMADTNSVATVEIERTDAELFSADVNNYCCCLDAEAELETLQEPDKAVRRSEYHLWEGQKESLEKRAFASSELSNVDGGDYTTPSKPWDVAQDKENTFILGGVYGELKTFNSDGEWAVVPPSHTKGSLLQCAASDVVTIAGTDVFMTPGNSFAPGHRQLWKPFVSFEQNDQPKSGENGLNKGFSFIFHEDLLGACGNFQVEDPGLEYSFSSFDLSNPFSQVLHVECSFEPEGIASFSPSFKPKSILCSDSDSEVFHPRICGVDRTQYRAIRISPRTHFRPISASELSPGGGSESEFESEKDEANIPIPSQVDIFEDPQADLKPLEEDAEKEGHYYGKSELESGKFLPRLKKSGMEKSAQTSLDSQEESTGILSVGKQNQCLECSMNESLEIDLESSEANCKIMAQCEEEINNFCGCKAGCQFPAYEDNPVSSGQLEEFPVLNTDIQGMNRSQEKQTWWEKALYSPLFPASECEECYTNAKGESGLEEYPDAKETPSNEERLLDFNRVSSVYEARCTGERDSGAKSDGFRGKMCSSASSTSEETGSEGGGEWVGPSEEELFSRTHL

SEQ ID NO: 43324 - protein, 1395 aa, Homo sapiens; identical to SEQ ID NO: 43323
  Payload ID: 8909
  Gene Symbol: KIAA0232
  Gene Name: KIAA0232
  Uniprot ID: Q92628
  ENSP ID: ENSP00000413739

SEQ ID NO: 43325 - protein, 75 aa, Homo sapiens
  Payload ID: 8909
  Gene Symbol: KIAA0232
  Gene Name: KIAA0232
  ENSP ID: ENSP00000426815
MYPICTVVVDGLPSESSSSSYPGPVSVSEMSLLHALGPVQTWLGQELEKCGIDAMIYTRYVLSLLLHDSYDYDLQ

SEQ ID NO: 43326 - protein, 1072 aa, Homo sapiens
  Payload ID: 8910
  Gene Symbol: KIAA0319
  Gene Name: KIAA0319
  Uniprot ID: Q5VV43
  ENSP ID: ENSP00000367459
MAPPTGVLSSLLLLVTIAGCARKQCSEGRTYSNAVISPNLETTRIMRVSHTFPVVDCTAACCDLSSCDLAWWFEGRCYLVSCPHKENCEPKKMGPIRSYLTFVLRPVQRPAQLLDYGDMMLNRGSPSGIWGDSPEDIRKDLTFLGKDWGLEEMSEYSDDYRELEKDLLQPSGKQEPRGSAEYTDWGLLPGSEGAFNSSVGDSPAVPAETQQDPELHYLNESASTPAPKLPERSVLLPLPTTPSSGEVLEKEKASQLQEQSSNSSGKEVLMPSHSLPPASLELSSVTVEKSPVLTVTPGSTEHSIPTPPTSAAPSESTPSELPISPTTAPRTVKELTVSAGDNLIITLPDNEVELKAFVAPAPPVETTYNYEWNLISHPTDYQGEIKQGHKQTLNLSQLSVGLYVFKVTVSSENAFGEGFVNVTVKPARRVNLPPVAVVSPQLQELTLPLTSALIDGSQSTDDTEIVSYHWEEINGPFIEEKTSVDSPVLRLSNLDPGNYSFRLTVTDSDGATNSTTAALIVNNAVDYPPVANAGPNHTITLPQNSITLNGNQSSDDHQIVLYEWSLGPGSEGKHVVMQGVQTPYLHLSAMQEGDYTFQLKVTDSSRQQSTAVVTVIVQPENNRPPVAVAGPDKELIFPVESATLDGSSSSDDHGIVFYHWEHVRGPSAVEMENIDKAIATVTGLQVGTYHFRLTVKDQQGLSSTSTLTVAVKKENNSPPRARAGGRHVLVLPNNSITLDGSRSTDDQRIVSYLWIRDGQSPAAGDVIDGSDHSVALQLTNLVEGVYTFHLRVTDSQGASDTDTATVEVQPDPRKSGLVELTLQVGVGQLTEQRKDTLVRQLAVLLNVLDSDIKVQKIRAHSDLSTVIVFYVQSRPPFKVLKAAEVARNLHMRLSKEKADFLLFKVLRVDTAGCLLKCSGHGHCDPLTKRCICSHLWMENLIQRYIWDGESNCEWSIFYVTVLAFTLIVLTGGFTWLCICCCKRQKRTKIRKKTKYTILDNMDEQERMELRPKYGIKHRSTEHNSSLMVSESEFDSDQDTIFSREKMERGNPKVSMNGSIRNGASFSYCSKDR

SEQ ID NO: 43327 - protein, 1027 aa, Homo sapiens
  Payload ID: 8910
  Gene Symbol: KIAA0319
  Gene Name: KIAA0319
  Uniprot ID: Q5VV43
  ENSP ID: ENSP00000401086
MRVSHTFPVVDCTAACCDLSSCDLAWWFEGRCYLVSCPHKENCEPKKMGPIRSYLTFVLRPVQRPAQLLDYGDMMLNRGSPSGIWGDSPEDIRKDLTFLGKDWGLEEMSEYSDDYRELEKDLLQPSGKQEPRGSAEYTDWGLLPGSEGAFNSSVGDSPAVPAETQQDPELHYLNESASTPAPKLPERSVLLPLPTTPSSGEVLEKEKASQLQEQSSNSSGKEVLMPSHSLPPASLELSSVTVEKSPVLTVTPGSTEHSIPTPPTSAAPSESTPSELPISPTTAPRTVKELTVSAGDNLIITLPDNEVELKAFVAPAPPVETTYNYEWNLISHPTDYQGEIKQGHKQTLNLSQLSVGLYVFKVTVSSENAFGEGFVNVTVKPARRVNLPPVAVVSPQLQELTLPLTSALIDGSQSTDDTEIVSYHWEEINGPFIEEKTSVDSPVLRLSNLDPGNYSFRLTVTDSDGATNSTTAALIVNNAVDYPPVANAGPNHTITLPQNSITLNGNQSSDDHQIVLYEWSLGPGSEGKHVVMQGVQTPYLHLSAMQEGDYTFQLKVTDSSRQQSTAVVTVIVQPENNRPPVAVAGPDKELIFPVESATLDGSSSSDDHGIVFYHWEHVRGPSAVEMENIDKAIATVTGLQVGTYHFRLTVKDQQGLSSTSTLTVAVKKENNSPPRARAGGRHVLVLPNNSITLDGSRSTDDQRIVSYLWIRDGQSPAAGDVIDGSDHSVALQLTNLVEGVYTFHLRVTDSQGASDTDTATVEVQPDPRKSGLVELTLQVGVGQLTEQRKDTLVRQLAVLLNVLDSDIKVQKIRAHSDLSTVIVFYVQSRPPFKVLKAAEVARNLHMRLSKEKADFLLFKVLRVDTAGCLLKCSGHGHCDPLTKRCICSHLWMENLIQRYIWDGESNCEWSIFYVTVLAFTLIVLTGGFTWLCICCCKRQKRTKIRKKTKYTILDNMDEQERMELRPKYGIKHRSTEHNSSLMVSESEFDSDQDTIFSREKMERGNPKVSMNGSIRNGASFSYCSKDR

SEQ ID NO: 43328 - protein, 1072 aa, Homo sapiens; identical to SEQ ID NO: 43326
  Payload ID: 8910
  Gene Symbol: KIAA0319
  Gene Name: KIAA0319
  Uniprot ID: Q5VV43
  ENSP ID: ENSP00000437656

SEQ ID NO: 43329 - protein, 1011 aa, Homo sapiens
  Payload ID: 8910
  Gene Symbol: KIAA0319
  Gene Name: KIAA0319
  Uniprot ID: Q5VV43
  ENSP ID: ENSP00000439700
MAPPTGVLSSLLLLVTIAGCARKQCSEGRTYSNAVISPNLETTRIMRVSHTFPVVDCTAACCDLSSCDLAWWFEGRCYLVSCPHKENCEPKKMGPIRSYLTFVLRPVQRPAQLLDYGDMMLNRGSPSGIWGDSPEDIRKDLTFLGKDWGLEEMSEYSDDYRELEKDLLQPSGKQEPRGSAEYTDWGLLPGSEGAFNSSVGDSPAVPAETQQDPELHYLNESASTPAPKLPERSVLLPLPTTPSSGEVLEKEKASQLQEQSSNSSGKEVLMPSHSLPPASLELSSVTVEKSPVLTVTPGSTEHSIPTPPTSAAPSESTPSELPISPTTAPRTVKELTVSAGDNLIITLPDNEVELKAFVAPAPPVETTYNYEWNLISHPTDYQGEIKQGHKQTLNLSQLSVGLYVFKVTVSSENAFGEGFVNVTVKPARRVNLPPVAVVSPQLQELTLPLTSALIDGSQSTDDTEIVSYHWEEINGPFIEEKTSVDSPVLRLSNLDPGNYSFRLTVTDSDGATNSTTAALIVNNAVDYPPVANAGPNHTITLPQNSITLNGNQSSDDHQIVLYEWSLGPGSEGKHVVMQGVQTPYLHLSAMQEGDYTFQLKVTDSSRQQSTAVVTVIVQPENNRPPVAVAGPDKELIFPVESATLDGSSSSDDHGIVFYHWEHVRGPSAVEMENIDKAIATVTGLQVGTYHFRLTVKDQQGLSSTSTLTVAVKKENNSPPRARAGGRHVLVLPNNSITLDGSRSTDDQRIVSYLWIRDGQSPAAGDVIDGSDHSVALQLTNLVEGVYTFHLRVTDSQGASDTDTATVEVQPDPRKSGLVELTLQVGVGQLTEQRKDTLVRQLAVLLNVLDSDIKVQKIRAHSDLSTVIVFYVQSRPPFKVLKAAEVARNLHMRLSKEKADFLLFKVLRVDTAGCLLKCSGHGHCDPLTKRCICSHLWMENLIQRYIWDGESNCGIKHRSTEHNSSLMVSESEFDSDQDTIFSREKMERGNPKVSMNGSIRNGASFSYCSKDR

SEQ ID NO: 43330 - protein, 1063 aa, Homo sapiens
  Payload ID: 8910
  Gene Symbol: KIAA0319
  Gene Name: KIAA0319
  Uniprot ID: Q5VV43
  ENSP ID: ENSP00000442403
MTRLGWPSPCCARKQCSEGRTYSNAVISPNLETTRIMRVSHTFPVVDCTAACCDLSSCDLAWWFEGRCYLVSCPHKENCEPKKMGPIRSYLTFVLRPVQRPAQLLDYGDMMLNRGSPSGIWGDSPEDIRKDLTFLGKDWGLEEMSEYSDDYRELEKDLLQPSGKQEPRGSAEYTDWGLLPGSEGAFNSSVGDSPAVPAETQQDPELHYLNESASTPAPKLPERSVLLPLPTTPSSGEVLEKEKASQLQEQSSNSSGKEVLMPSHSLPPASLELSSVTVEKSPVLTVTPGSTEHSIPTPPTSAAPSESTPSELPISPTTAPRTVKELTVSAGDNLIITLPDNEVELKAFVAPAPPVETTYNYEWNLISHPTDYQGEIKQGHKQTLNLSQLSVGLYVFKVTVSSENAFGEGFVNVTVKPARRVNLPPVAVVSPQLQELTLPLTSALIDGSQSTDDTEIVSYHWEEINGPFIEEKTSVDSPVLRLSNLDPGNYSFRLTVTDSDGATNSTTAALIVNNAVDYPPVANAGPNHTITLPQNSITLNGNQSSDDHQIVLYEWSLGPGSEGKHVVMQGVQTPYLHLSAMQEGDYTFQLKVTDSSRQQSTAVVTVIVQPENNRPPVAVAGPDKELIFPVESATLDGSSSSDDHGIVFYHWEHVRGPSAVEMENIDKAIATVTGLQVGTYHFRLTVKDQQGLSSTSTLTVAVKKENNSPPRARAGGRHVLVLPNNSITLDGSRSTDDQRIVSYLWIRDGQSPAAGDVIDGSDHSVALQLTNLVEGVYTFHLRVTDSQGASDTDTATVEVQPDPRKSGLVELTLQVGVGQLTEQRKDTLVRQLAVLLNVLDSDIKVQKIRAHSDLSTVIVFYVQSRPPFKVLKAAEVARNLHMRLSKEKADFLLFKVLRVDTAGCLLKCSGHGHCDPLTKRCICSHLWMENLIQRYIWDGESNCEWSIFYVTVLAFTLIVLTGGFTWLCICCCKRQKRTKIRKKTKYTILDNMDEQERMELRPKYGIKHRSTEHNSSLMVSESEFDSDQDTIFSREKMERGNPKVSMNGSIRNGASFSYCSKDR

SEQ ID NO: 43331 - protein, 483 aa, Homo sapiens
  Payload ID: 8910
  Gene Symbol: KIAA0319
  Gene Name: KIAA0319
  ENSP ID: ENSP00000483665
MQEGDYTFQLKVTDSSRQQSTAVVTVIVQPENNRPPVAVAGPDKELIFPVESATLDGSSSSDDHGIVFYHWEHVRGPSAVEMENIDKAIATVTGLQVGTYHFRLTVKDQQGLSSTSTLTVAVKKENNSPPRARAGGRHVLVLPNNSITLDGSRSTDDQRIVSYLWIRDGQSPAAGDVIDGSDHSVALQLTNLVEGVYTFHLRVTDSQGASDTDTATVEVQPDPRKSGLVELTLQVGVGQLTEQRKDTLVRQLAVLLNVLDSDIKVQKIRAHSDLSTVIVFYVQSRPPFKVLKAAEVARNLHMRLSKEKADFLLFKVLRVDTAGCLLKCSGHGHCDPLTKRCICSHLWMENLIQRYIWDGESNCEWSIFYVTVLAFTLIVLTGGFTWLCICCCKRQKRTKIRKKTKYTILDNMDEQERMELRPKYGIKHRSTEHNSSLMVSESEFDSDQDTIFSREKMERGNPKVSMNGSIRNGASFSYCSKDR

SEQ ID NO: 43332 - protein, 1049 aa, Homo sapiens
  Payload ID: 8911
  Gene Symbol: KIAA0319L
  Gene Name: KIAA0319-like
  Uniprot ID: Q8IZA0
  ENSP ID: ENSP00000318406
MEKRLGVKPNPASWILSGYYWQTSAKWLRSLYLFYTCFCFSVLWLSTDASESRCQQGKTQFGVGLRSGGENHLWLLEGTPSLQSCWAACCQDSACHVFWWLEGMCIQADCSRPQSCRAFRTHSSNSMLVFLKKFQTADDLGFLPEDDVPHLLGLGWNWASWRQSPPRAALRPAVSSSDQQSLIRKLQKRGSPSDVVTPIVTQHSKVNDSNELGGLTTSGSAEVHKAITISSPLTTDLTAELSGGPKNVSVQPEISEGLATTPSTQQVKSSEKTQIAVPQPVAPSYSYATPTPQASFQSTSAPYPVIKELVVSAGESVQITLPKNEVQLNAYVLQEPPKGETYTYDWQLITHPRDYSGEMEGKHSQILKLSKLTPGLYEFKVIVEGQNAHGEGYVNVTVKPEPRKNRPPIAIVSPQFQEISLPTTSTVIDGSQSTDDDKIVQYHWEELKGPLREEKISEDTAILKLSKLVPGNYTFSLTVVDSDGATNSTTANLTVNKAVDYPPVANAGPNQVITLPQNSITLFGNQSTDDHGITSYEWSLSPSSKGKVVEMQGVRTPTLQLSAMQEGDYTYQLTVTDTIGQQATAQVTVIVQPENNKPPQADAGPDKELTLPVDSTTLDGSKSSDDQKIISYLWEKTQGPDGVQLENANSSVATVTGLQVGTYVFTLTVKDERNLQSQSSVNVIVKEEINKPPIAKITGNVVITLPTSTAELDGSKSSDDKGIVSYLWTRDEGSPAAGEVLNHSDHHPILFLSNLVEGTYTFHLKVTDAKGESDTDRTTVEVKPDPRKNNLVEIILDINVSQLTERLKGMFIRQIGVLLGVLDSDIIVQKIQPYTEQSTKMVFFVQNEPPHQIFKGHEVAAMLKSELRKQKADFLIFRALEVNTVTCQLNCSDHGHCDSFTKRCICDPFWMENFIKVQLRDGDSNCEWSVLYVIIATFVIVVALGILSWTVICCCKRQKGKPKRKSKYKILDATDQESLELKPTSRAGIKQKGLLLSSSLMHSESELDSDDAIFTWPDREKGKLLHGQNGSVPNGQTPLKARSPREEIL

SEQ ID NO: 43333 - protein, 486 aa, Homo sapiens
  Payload ID: 8911
  Gene Symbol: KIAA0319L
  Gene Name: KIAA0319-like
  ENSP ID: ENSP00000362363
MQEGDYTYQLTVTDTIGQQATAQVTVIVQPENNKPPQADAGPDKELTLPVDSTTLDGSKSSDDQKIISYLWEKTQGPDGVQLENANSSVATVTGLQVGTYVFTLTVKDERNLQSQSSVNVIVKEEINKPPIAKITGNVVITLPTSTAELDGSKSSDDKGIVSYLWTRDEGSPAAGEVLNHSDHHPILFLSNLVEGTYTFHLKVTDAKGESDTDRTTVEVKPDPRKNNLVEIILDINVSQLTERLKGMFIRQIGVLLGVLDSDIIVQKIQPYTEQSTKMVFFVQNEPPHQIFKGHEVAAMLKSELRKQKADFLIFRALEVNTVTCQLNCSDHGHCDSFTKRCICDPFWMENFIKVQLRDGDSNCEWSVLYVIIATFVIVVALGILSWTVICCCKRQKGKPKRKSKYKILDATDQESLELKPTSRAGIKQKGLLLSSSLMHSESELDSDDAIFTWPDREKGKLLHGQNGSVPNGQTPLKARSPREEIL

SEQ ID NO: 43334 - protein, 304 aa, Homo sapiens
  Payload ID: 8911
  Gene Symbol: KIAA0319L
  Gene Name: KIAA0319-like
  ENSP ID: ENSP00000393862
  MOD_RES (1)..(1): Any amino acid
XDDLGFLPEDDVPHLLGLGWNWASWRQSPPRAALRPAVSSSDQQSLIRKLQKRGSPSDVVTPIVTQHSKVNDSNELGGLTTSGSAEVHKAITISSPLTTDLTAELSGGPKNVSVQPEISEGLATTPSTQQVKSSEKTQIAVPQPVAPSYSYATPTPQASFQSTSAPYPGETYTYDWQLITHPRDYSGEMEGKHSQILKLSKLTPGLYEFKVIVEGQNAHGEGYVNVTVKPEPRKNRPPIAIVSPQFQEISLPTTSTVIDGSQSTDDDKIVQYHWEELKGPLREEKISEDTAILKLSKLVPGNYT

SEQ ID NO: 43335 - protein, 1026 aa, Homo sapiens
  Payload ID: 8911
  Gene Symbol: KIAA0319L
  Gene Name: KIAA0319-like
  ENSP ID: ENSP00000395883
MEKRLGVKPNPASWILSGYYWQTSAKWLRSLYLFYTCFCFSVLWLSTDASESRCQQGKTQFGVGLRSGGENHLWLLEGTPSLQSCWAACCQDSACHVFWWLEGMCIQADCSRPQSCRAFRTHSSNSMLVFLKKFQTADDLGFLPEDDVPHLLGLGWNWASWRQSPPRAALRPAVSSSDQQSLIRKLQKRGSPSDVVTPIVTQHSKVNDSNELGGLTTSGSAEVHKAITISSPLTTDLTAELSGGPKNVSVQPEISEGLATTPSTQQVKSSEKTQIAVPQPVAPSYSYATPTPQASFQSTSAPYPVIKELVVSAGESVQITLPKNEVQLNAYVLQEPPKGETYTYDWQLITHPRDYSGEMEGKHSQILKLSKLTPGLYEFKVIVEGQNAHGEGYVNVTVKPEPRKNRPPIAIVSPQFQEISLPTTSTVIDGSQSTDDDKIVQYHWEELKGPLREEKISEDTAILKLSKLVPGNYTFSLTVVDSDGATNSTTANLTVNKAVDYPPVANAGPNQVITLPQNSITLFGNQSTDDHGITSYEWSLSPSSKGKVVEMQGVRTPTLQLSAMQEGDYTYQLTVTDTIGQQATAQVTVIVQPENNKPPQADAGPDKELTLPVDSTTLDGSKSSDDQKIISYLWEKTQGPDGVQLENANSSVATVTGLQVGTYVFTLTVKDERNLQSQSSVNVIVKEEINKPPIAKITGNVVITLPTSTAELDGSKSSDDKGIVSYLWTRDEGSPAAGEVLNHSDHHPILFLSNLVEGTYTFHLKVTDAKGESDTDRTTVEVKPDPRKNNLVEIILDINVSQLTERLKGMFIRQIGVLLGVLDSDIIVQKIQPYTEQSTKMVFFVQNEPPHQIFKGHEVAAMLKSELRKQKADFLIFRALEVNTVTCQLNCSDHGHCDSFTKRCICDPFWMENFIKVQLRDGDSNCEWSVLYVIIATFVIVVALGILSWTVICCCKRQKGKPKRKSKYKILDATDQESLELKPTSRAGIKQKGLLLSSSLMHSESELDSDDAIFTWPDREKGKLLH

SEQ ID NO: 43336 - protein, 685 aa, Homo sapiens
  Payload ID: 8911
  Gene Symbol: KIAA0319L
  Gene Name: KIAA0319-like
  ENSP ID: ENSP00000407576
MEKRLGVKPNPASWILSGYYWQTSAKWLRSLYLFYTCFCFSVLWLSTDASESRCQQGKTQFGVGLRSGGENHLWLLEGTPSLQSCWAACCQDSACHVFWWLEGMCIQADCSRPQSCRAFRTHSSNSMLVFLKKFQTADDLGFLPEDDVPHLLGLGWNWASWRQSPPRAALRPAVSSSDQQSLIRKLQKRGSPSDVVTPIVTQHSKVNDSNELGGLTTSGSAEVHKAITISSPLTTDLTAELSGGPKNVSVQPEISEGLATTPSTQQVKSSEKTQIAVPQPVAPSYSYATPTPQASFQSTSAPYPVIKELVVSAGESVQITLPKNEVQLNAYVLQEPPKGETYTYDWQLITHPRDYSGEMEGKHSQILKLSKLTPGLYEFKVIVEGQNAHGEGYVNVTVKPEPRKNRPPIAIVSPQFQEISLPTTSTVIDGSQSTDDDKIVQYHWEELKGPLREEKISEDTAILKLSKLVPGNYTFSLTVVDSDGATNSTTANLTVNKAVDYPPVANAGPNQVITLPQNSITLFGNQSTDDHGITSYEWSLSPSSKGKVVEMQGVRTPTLQLSAMQEGDYTYQLTVTDTIGQQATAQVTVIVQPENNKPPQADAGPDKELTLPVDSTTLDGSKSSDDQKIISYLWEKTQGPDGVQLENANSSVATVTGLQVGTYVFTLTVKDERNLQSQSSVNVIV

SEQ ID NO: 43337 - protein, 77 aa, Homo sapiens
  Payload ID: 8911
  Gene Symbol: KIAA0319L
  Gene Name: KIAA0319-like
  ENSP ID: ENSP00000417411
MEKRLGVKPNPASWILSGYYWQTSAKWLRSLYLFYTCFCFSVLWLSTGPQGDYNFQSPNHRPDCRAVWWAKECISAT

SEQ ID NO: 43338 - protein, 273 aa, Homo sapiens
  Payload ID: 8911
  Gene Symbol: KIAA0319L
  Gene Name: KIAA0319-like
  ENSP ID: ENSP00000419396
MEKRLGVKPNPASWILSGYYWQTSAKWLRSLYLFYTCFCFSVLWLSTDASESRCQQGKTQFGVGLRSGGENHLWLLEGTPSLQSCWAACCQDSACHVFWWLEGMCIQADCSRPQSCRAFRTHSSNSMLVFLKKFQTADDLGFLPEDDVPHLLGLGWNWASWRQSPPRAALRPAVSSSDQQSLIRKLQKRGSPSDVVTPIVTQHSKVNDSNELGGLTTSGSAEVHKAITISSPLTTDLTAELSGGPKNVSVQPEISEGLATTPSTQQVKSSEKT

SEQ ID NO: 43339 - protein, 179 aa, Homo sapiens
  Payload ID: 8911
  Gene Symbol: KIAA0319L
  Gene Name: KIAA0319-like
  ENSP ID: ENSP00000420226
MEKRLGVKPNPASWILSGYYWQTSAKWLRSLYLFYTCFCFSVLWLSTDASESRCQQGKTQFGVGLRSGGENHLWLLEGTPSLQSCWAACCQDSACHVFWWLEGMCIQADCSRPQSCRAFRTHSSNSMLVFLKKFQTADDLGFLPEDDVPHLLGLGWNWASWRQSPPRAALRPAVSSSDQ

SEQ ID NO: 43340 - protein, 344 aa, Homo sapiens
  Payload ID: 8911
  Gene Symbol: KIAA0319L
  Gene Name: KIAA0319-like
  ENSP ID: ENSP00000420369
MEKRLGVKPNPASWILSGYYWQTSAKWLRSLYLFYTCFCFSVLWLSTDASESRCQQGKTQFGVGLRSGGENHLWLLEGTPSLQSCWAACCQDSACHVFWWLEGMCIQADCSRPQSCRAFRTHSSNSMLVFLKKFQTADDLGFLPEDDVPHLLGLGWNWASWRQSPPRAALRPAVSSSDQQSLIRKLQKRGSPSDVVTPIVTQHSKVNDSNELGGLTTSGSAEVHKAITISSPLTTDLTAELSGGPKNVSVQPEISEGLATTPSTQQVKSSEKTQIAVPQPVAPSYSYATPTPQASFQSTSAPYPVIKELVVSAGESVQITLPKNEVQLNAYVLQEPPKAHSRPV

SEQ ID NO: 43341 - protein, 344 aa, Homo sapiens; identical to SEQ ID NO: 43340
  Payload ID: 8911
  Gene Symbol: KIAA0319L
  Gene Name: KIAA0319-like
  ENSP ID: ENSP00000420742

SEQ ID NO: 43342 - protein, 1070 aa, Homo sapiens
  Payload ID: 8912
  Gene Symbol: KIAA0355
  Gene Name: KIAA0355
  Uniprot ID: O15063
  ENSP ID: ENSP00000299505
MYCCSAQDSKMDYKRRFLLGGSKQKVQQHQQYPMPELGRALSAPLASTATTAPLGSLTAAGSCHHAMPHTTPIADIQQGISKYLDALNVFCRASTFLTDLFSTVFRNSHYSKAATQLKDVQEHVMEAASRLTSAIKPEIAKMLMELSAGAANFTDQKEFSLQDIEVLGRCFLTVVQVHFQFLTHALQKVQPVAHSCFAEVIVPEKKNSGSGGGLSGMGHTPEVEEAVRSWRGAAEATSRLRERGCDGCLAGIEVQQLFCSQSAAIPEHQLKELNIKIDSALQAYKIALESLGHCEYAMKAGFHLNPKAIEASLQGCCSEAEAQQTGRRQTPPQPMQCELPTVPVQIGSHFLKGVSFNESAADNLKLKTHTMLQLMKEAGCYNGITSRDDFPVTEVLNQVCPSTWRGACKTAVQLLFGQAGLVVVDTAQIENKEAYAPQISLEGSRIVVQVPSTWCLKEDPATMSLLQRSLDPEKTLGLVDVLYTAVLDLNRWRAGREQALPCIQIQLQREICDFGNQADLPSGNGNKSSGGLQKTFSKLTSRFTKKASCTSSSSSTNYSIQNTPSKNIFIAGCSEEKAKMPGNIDTRLQSILNIGNFPRTTDPSQSAQNSSNTVANGFLMERRENFLHGDDGKDEKGMNLPTDQEMQEVIDFLSGFNMGQSHQGSPLVTRHNSAATAMVTEQKAGAMQPQQPSLPVPPPPRAPQAGAHTPLTPQPGLAPQQQSPKQQQPQVQYYQHLLQPIGPQQPPPQPRAPGKWVHGSSQQPAQAVGAGLSPLGQWPGISDLSSDLYSLGLVSSYMDNVMSEVLGQKPQGPRNNTWPNRDQSDGVFGMLGEILPFDPAVGSDPEFARYVAGVSQAMQQKRQAQHGRRPGNPRGNWPPMDDAHRTWPFPEFFTEGDGLHGGWSGAQGDSASSSDETSSANGDSLFSMFSGPDLVAAVKQRRKHSSGEQDTSTLPSPPLLTTVEDVNQDNKTKTWPPKAPWQHPSPLPSTLPSPSAPLYAVTSPGSQWNDTMQMLQSPVWAATNDCSAAAFSYVQTPPQPPPPPAHKAAPKGFKAFPGKGERRPAYLPQY

SEQ ID NO: 43343 - protein, 31 aa, Homo sapiens
  Payload ID: 8912
  Gene Symbol: KIAA0355
  Gene Name: KIAA0355
  ENSP ID: ENSP00000465362
MYCCSAQDSKMDYKRRFLLGGSKQKVQQHQQ

SEQ ID NO: 43344 - protein, 77 aa, Homo sapiens
  Payload ID: 8912
  Gene Symbol: KIAA0355
  Gene Name: KIAA0355
  ENSP ID: ENSP00000475249
MEAASRLTSAIKPEIAKMLMELSAGAANFTDQKEFSLQDIEVLGRCFLTVVQVHFQFLTHALQKVQPVAHSCFAEVI

SEQ ID NO: 43345 - protein, 159 aa, Homo sapiens
  Payload ID: 8912
  Gene Symbol: KIAA0355
  Gene Name: KIAA0355
  ENSP ID: ENSP00000485195
MYCCSAQDSKMDYKRRFLLGGSKQKVQQHQQYPMPELGRALSAPLASTATTAPLGSLTAAGSCHHAMPHTTPIADIQQGISKYLDALNVFCRASTFLTDLFSTVFRNSHYSKAATQLKDVQEHVMEAASRLTSAIKPEIAKMLMELSAGAANFTDQKEF

SEQ ID NO: 43346 - protein, 31 aa, Homo sapiens; identical to SEQ ID NO: 43343
  Payload ID: 8912
  Gene Symbol: KIAA0355
  Gene Name: KIAA0355
  ENSP ID: ENSP00000485320

SEQ ID NO: 43347 - protein, 35 aa, Homo sapiens
  Payload ID: 8912
  Gene Symbol: KIAA0355
  Gene Name: KIAA0355
  ENSP ID: ENSP00000485344
MEAASRLTSAIKPEIAKMLMELSAGAANFTDQKEF

SEQ ID NO: 43348 - protein, 129 aa, Homo sapiens
  Payload ID: 8912
  Gene Symbol: KIAA0355
  Gene Name: KIAA0355
  ENSP ID: ENSP00000488450
  MOD_RES (1)..(1): Any amino acid
XKHSSGEQDTSTLPSPPLLTTVEDVNQDNKTKTWPPKAPWQHPSPLPSTLPSPSAPLYAVTSPGSQWNDTMQMLQSPVWAATNDCSAAAFSYVQTPPQPPPPPAHKAAPKGFKAFPGKGERRPAYLPQY

SEQ ID NO: 43349 - protein, 2017 aa, Homo sapiens
  Payload ID: 8913
  Gene Symbol: KIAA0368
  Gene Name: KIAA0368
  ENSP ID: ENSP00000259335
MTSRTKRRQKVKISISKINHSSYRKEHRPFWEHQPPPHQNWAVGGRCGAGARPGLSQRRGREVRREAQGGASSRRLRARLYFSESTSLPLDRRGSPGPLGPAPHGLRRAAPRGPARRTPRSTALTSRRRAQRPRHGDRLRLRSEARPRAAGDWPCARGGAVRPGRPHRPPRVESARGAHAGRAATDQLERVFLRLGHAETDEQLQNIISKFLPPVLLKLSSTQEGVRKKVMELLVHLNKRIKSRPKIQLPVETLLVQYQDPAAVSFVTNFTIIYVKMGYPRLPVEKQCELAPTLLTAMEGKPQPQQDSLMHLLIPTLFHMKYPVESSKSASPFNLAEKPKTVQLLLDFMLDVLLMPYGYVLNESQSRQNSSSAQGSSSNSGGGSGIPQPPPGMSFYAAKRVIGDNPWTPEQLEQCKLGIVKFIEAEQVPELEAVLHLVIASSDTRHSVATAADLELKSKQSLIDWNNPAIINKMYKVYLGDIPLKTKEGAVLKPELKRDPVSTRVKLKIVPHLLRSRQAAETFPANIQVVYDGLFGTNTNSKLRTLSLQFVHHICITCPEIKIKPLGPMLLNGLTKLINEYKEDPKLLSMAYSAVGKLSSRMPHLFTKDIALVQQLFEALCKEEPETRLAIQEALSMMVGAYSTLEGAQRTLMEALVASYLIKPEVQVRQVAVKFASTVFPSDHIPSRYLLLLAAGDPREEVHGEAQRVLRCLPGRNRKESTSEQMPSFPEMVYYIQEKASHRMKTPVKYMTGTTVLPFNPAAFGEIVLYLRMCLAHSAGVVPTSQSLADMQDHAPAIGRYIRTLMSSGQMAPSSSNKSGETNPVQIYIGLLQQLLAGVGGLPVMYCLLEAVSVYPEKLATKFVDKTEWIKSLMNNSKEEMRELAALFYSVVVSTVSGNELKSMIEQLIKTTKDNHSPEIQHGSLLALGFTVGRYLAKKKMRMSEQQDLERNADTLPDQEELIQSATETIGSFLDSTSPLLAIAACTALGEIGRNGPLPIPSEGSGFTKLHLVESLLSRIPSSKETNKMKERAIQTLGYFPVGDGDFPHQKLLLQGLMDSVEAKQIELQFTIGEAITSAAIGTSSVAARDAWQMTEEEYTPPAGAKVNDVVPWVLDVILNKHIISPNPHVRQAACIWLLSLVRKLSTHKEVKSHLKEIQSAFVSVLSENDELSQDVASKGLGLVYELGNEQDQQELVSTLVETLMTGKRVKHEVSGETVVFQGGALGKTPDGQGLSTYKELCSLASDLSQPDLVYKFMNLANHHAMWNSRKGAAFGFNVIATRAGEQLAPFLPQLVPRLYRYQFDPNLGIRQAMTSIWNALVTDKSMVDKYLKEILQDLVKNLTSNMWRVRESSCLALNDLLRGRPLDDIIDKLPEIWETLFRVQDDIKESVRKAAELALKTLSKVCVKMCDPAKGAAGQRTIAALLPCLLDKGMMSTVTEVRALSINTLVKISKSAGAMLKPHAPKLIPALLESLSVLEPQVLNYLSLRATEQEKAAMDSARLSAAKSSPMMETINMCLQYLDVSVLGELVPRLCELIRSGVGLGTKGGCASVIVSLTTQCPQDLTPYSGKLMSALLSGLTDRNSVIQKSCAFAMGHLVRTSRDSSTEKLLQKLNGWYMEKEEPIYKTSCALTIHAIGRYSPDVLKNHAKEVLPLAFLGMHEIADEEKSEKEECNLWTEVWQENVPGSFGGIRLYLQELITITQKALQSQSWKMKAQGAIAMASIAKQTSSLVPPYLGMILTALLQGLAGRTWAGKEELLKAIACVVTACSAELEKSVPNQPSTNEILQAVLKECSKENVKYKIVAISCAADILKATKEDRFQEFSNIVIPLIKKNSLESSGVRTTKNEEENEKEKELQLEYLLGAFESLGKAWPRNAETQRCYRQELCKLMCERLKLSTWKVQLGVLQSMNAFFQGLMLLEEEHADPEALAEILLETCKSITYSLENKTYSSVRTEALSVIELLLKKLEESKQWECLTSECRVLLIESLATMEPDSRPELQEKAALLKKTLENLE

SEQ ID NO: 43350 - protein, 1839 aa, Homo sapiens
  Payload ID: 8913
  Gene Symbol: KIAA0368
  Gene Name: KIAA0368
  Uniprot ID: Q5VYK3
  ENSP ID: ENSP00000339889
METGSDSDQLERVFLRLGHAETDEQLQNIISKFLPPVLLKLSSTQEGVRKKVMELLVHLNKRIKSRPKIQLPVETLLVQYQDPAAVSFVTNFTIIYVKMGYPRLPVEKQCELAPTLLTAMEGKPQPQQDSLMHLLIPTLFHMKYPVESSKSASPFNLAEKPKTVQLLLDFMLDVLLMPYGYVLNESQSRQNSSSAQGSSSNSGGGSGIPQPPPGMSFYAAKRVIGDNPWTPEQLEQCKLGIVKFIEAEQVPELEAVLHLVIASSDTRHSVATAADLELKSKQSLIDWNNPAIINKMYKVYLGDIPLKTKEGAVLKPELKRDPVSTRVKLKIVPHLLRSRQAAETFPANIQVVYDGLFGTNTNSKLRTLSLQFVHHICITCPEIKIKPLGPMLLNGLTKLINEYKEDPKLLSMAYSAVGKLSSRMPHLFTKDIALVQQLFEALCKEEPETRLAIQEALSMMVGAYSTLEGAQRTLMEALVASYLIKPEVQVRQVAVKFASTVFPSDHIPSRYLLLLAAGDPREEVHGEAQRVLRCLPGRNRKESTSEQMPSFPEMVYYIQEKASHRMKTPVKYMTGTTVLPFNPAAFGEIVLYLRMCLAHSAGVVPTSQSLADMQDHAPAIGRYIRTLMSSGQMAPSSSNKSGETNPVQIYIGLLQQLLAGVGGLPVMYCLLEAVSVYPEKLATKFVDKTEWIKSLMNNSKEEMRELAALFYSVVVSTVSGNELKSMIEQLIKTTKDNHSPEIQHGSLLALGFTVGRYLAKKKMRMSEQQDLERNADTLPDQEELIQSATETIGSFLDSTSPLLAIAACTALGEIGRNGPLPIPSEGSGFTKLHLVESLLSRIPSSKETNKMKERAIQTLGYFPVGDGDFPHQKLLLQGLMDSVEAKQIELQFTIGEAITSAAIGTSSVAARDAWQMTEEEYTPPAGAKVNDVVPWVLDVILNKHIISPNPHVRQAACIWLLSLVRKLSTHKEVKSHLKEIQSAFVSVLSENDELSQDVASKGLGLVYELGNEQDQQELVSTLVETLMTGKRVKHEVSGETVVFQGGALGKTPDGQGLSTYKELCSLASDLSQPDLVYKFMNLANHHAMWNSRKGAAFGFNVIATRAGEQLAPFLPQLVPRLYRYQFDPNLGIRQAMTSIWNALVTDKSMVDKYLKEILQDLVKNLTSNMWRVRESSCLALNDLLRGRPLDDIIDKLPEIWETLFRVQDDIKESVRKAAELALKTLSKVCVKMCDPAKGAAGQRTIAALLPCLLDKGMMSTVTEVRALSINTLVKISKSAGAMLKPHAPKLIPALLESLSVLEPQVLNYLSLRATEQEKAAMDSARLSAAKSSPMMETINMCLQYLDVSVLGELVPRLCELIRSGVGLGTKGGCASVIVSLTTQCPQDLTPYSGKLMSALLSGLTDRNSVIQKSCAFAMGHLVRTSRDSSTEKLLQKLNGWYMEKEEPIYKTSCALTIHAIGRYSPDVLKNHAKEVLPLAFLGMHEIADEEKSEKEECNLWTEVWQENVPGSFGGIRLYLQELITITQKALQSQSWKMKAQGAIAMASIAKQTSSLVPPYLGMILTALLQGLAGRTWAGKEELLKAIACVVTACSAELEKSVPNQPSTNEILQAVLKECSKENVKYKIVAISCAADILKATKEDRFQEFSNIVIPLIKKNSLESSGVRTTKNEEENEKEKELQLEYLLGAFESLGKAWPRNAETQRCYRQELCKLMCERLKLSTWKVQLGVLQSMNAFFQGLMLLEEEHADPEALAEILLETCKSITYSLENKTYSSVRTEALSVIELLLKKLEESKQWECLTSECRVLLIESLATMEPDSRPELQEKAALLKKTLENLE

SEQ ID NO: 43351 - protein, 142 aa, Homo sapiens
  Payload ID: 8913
  Gene Symbol: KIAA0368
  Gene Name: KIAA0368
  ENSP ID: ENSP00000363504
TITQKALQSQSWKMKAQGAIAMASIAKQTSSLVPPYLGMILTALLQGLAGRTWAGKEELLKAIACVVTACSAELEKSVPNQPSTNEILQAVLKECSKENVKYKIVAISCAADILKATKEDRFQEFSNIVIPLIKKKTLENLE

SEQ ID NO: 43352 - protein, 890 aa, Homo sapiens
  Payload ID: 8913
  Gene Symbol: KIAA0368
  Gene Name: KIAA0368
  ENSP ID: ENSP00000473399
MAAAAASASQDELNQLERVFLRLGHAETDEQLQNIISKFLPPVLLKLSSTQEGVRKKVMELLVHLNKRIKSRPKIQLPVETLLVQYQDPAAVSFVTNFTIIYVKMGYPRLPVEKQCELAPTLLTAMEGKPQPQQDSLMHLLIPTLFHMKYPVESSKSASPFNLAEKPKTVQLLLDFMLDVLLMPYGYVLNESQSRQNSSSAQGSSSNSGGGSGIPQPPPGMSFYAAKRVIGDNPWTPEQLEQCKLGIVKFIEAEQVPELEAVLHLVIASSDTRHSVATAADLELKSKQSLIDWNNPAIINKMYKVYLGDIPLKTKEGAVLKPELKRDPVSTRVKLKIVPHLLRSRQAAETFPANIQVVYDGLFGTNTNSKLRTLSLQFVHHICITCPEIKIKPLGPMLLNGLTKLINEYKEDPKLLSMAYSAVGKLSSRMPHLFTKDIALVQQLFEALCKEEPETRLAIQEALSMMVGAYSTLEGAQRTLMEALVASYLIKPEVQVRQVAVKFASTVFPSDHIPSRYLLLLAAGDPREEVHGEAQRVLRCLPGRNRKESTSEQMPSFPEMVYYIQEKASHRMKTPVKYMTGTTVLPFNPAAFGEIVLYLRMCLAHSAGVVPTSQSLADMQDHAPAIGRYIRTLMSSGQMAPSSSNKSGETNPVQIYIGLLQQLLAGVGGLPVMYCLLEAVSVYPEKLATKFVDKTEWIKSLMNNSKEEMRELAALFYSVVVSTVSGNELKSMIEQLIKTTKDNHSPEIQHGSLLALGFTVGRYLAKKKMRMSEQQDLERNADTLPDQEELIQSATETIGSFLDSTSPLLAIAACTALGEIGRNGPLPIPSEGSGFTKLHLVESLLSRIPSSKETNKMKERAIQTLGYFPVGDGDFPHQKLLLQGLMDSVE

SEQ ID NO: 43353 - protein, 128 aa, Homo sapiens
  Payload ID: 8913
  Gene Symbol: KIAA0368
  Gene Name: KIAA0368
  ENSP ID: ENSP00000473402
MYHIDCRDQLERVFLRLGHAETDEQLQNIISKFLPPVLLKLSSTQEGVRKKVMELLVHLNKRIKSRPKIQLPVETLLVQYQDPAAVSFVTNFTIIYVKMGYPRLPVEKQCELAPTLLTAMEGKPQPQQ

SEQ ID NO: 43354 - protein, 567 aa, Homo sapiens
  Payload ID: 8914
  Gene Symbol: KIAA0391
  Gene Name: KIAA0391
  Uniprot ID: O15091
  ENSP ID: ENSP00000250377
MTFYLFGIRSFPKLWKSPYLGLGPGHSYVSLFLADRCGIRNQQRLFSLKTMSPQNTKATNLIAKARYLRKDEGSNKQVYSVPHFFLAGAAKERSQMNSQTEDHALAPVRNTIQLPTQPLNSEEWDKLKEDLKENTGKTSFESWIISQMAGCHSSIDVAKSLLAWVAAKNNGIVSYDLLVKYLYLCVFHMQTSEVIDVFEIMKARYKTLEPRGYSLLIRGLIHSDRWREALLLLEDIKKVITPSKKNYNDCIQGALLHQDVNTAWNLYQELLGHDIVPMLETLKAFFDFGKDIKDDNYSNKLLDILSYLRNNQLYPGESFAHSIKTWFESGQCSGCGKTIESIQLSPEEYECLKGKIMRDVIDGGDQYRKTTPQELKRFENFIKSRPPFDVVIDGLNVAKMFPKVRESQLLLNVVSQLAKRNLRLLVLGRKHMLRRSSQWSRDEMEEVQKQASCFFADDISEDDPFLLYATLHSGNHCRFITRDLMRDHKACLPDAKTQRLFFKWQQGHQLAIVNRFPGSKLTFQRILSYDTVVQTTGDSWHIPYDEDLVERCSCEVPTKWLCLHQKT

SEQ ID NO: 43355 - protein, 211 aa, Homo sapiens
  Payload ID: 8914
  Gene Symbol: KIAA0391
  Gene Name: KIAA0391
  Uniprot ID: O15091
  ENSP ID: ENSP00000324697
MRDVIDGGDQYRKTTPQELKRFENFIKSRPPFDVVIDGLNVAKMFPKVRESQLLLNVVSQLAKRNLRLLVLGRKHMLRRSSQWSRDEMEEVQKQASCFFADDISEDDPFLLYATLHSGNHCRFITRDLMRDHKACLPDAKTQRLFFKWQQGHQLAIVNRFPGSKLTFQRILSYDTVVQTTGDSWHIPYDEDLVERCSCEVPTKWLCLHQKT

SEQ ID NO: 43356 - protein, 583 aa, Homo sapiens
  Payload ID: 8914
  Gene Symbol: KIAA0391
  Gene Name: KIAA0391
  Uniprot ID: O15091
  ENSP ID: ENSP00000440915
MTFYLFGIRSFPKLWKSPYLGLGPGHSYVSLFLADRCGIRNQQRLFSLKTMSPQNTKATNLIAKARYLRKDEGSNKQVYSVPHFFLAGAAKERSQMNSQTEDHALAPVRNTIQLPTQPLNSEEWDKLKEDLKENTGKTSFESWIISQMAGCHSSIDVAKSLLAWVAAKNNGIVSYDLLVKYLYLCVFHMQTSEVIDVFEIMKARYKTLEPRGYSLLIRGLIHSDRWREALLLLEDIKKVITPSKKNYNDCIQGALLHQDVNTAWNLYQELLGHDIVPMLETLKAFFDFGKDIKDDNYSNKLLDILSYLRNNQLYPGESFAHSIKTWFESVPGKQWKGQFTTVRKSGQCSGCGKTIESIQLSPEEYECLKGKIMRDVIDGGDQYRKTTPQELKRFENFIKSRPPFDVVIDGLNVAKMFPKVRESQLLLNVVSQLAKRNLRLLVLGRKHMLRRSSQWSRDEMEEVQKQASCFFADDISEDDPFLLYATLHSGNHCRFITRDLMRDHKACLPDAKTQRLFFKWQQGHQLAIVNRFPGSKLTFQRILSYDTVVQTTGDSWHIPYDEDLVERCSCEVPTKWLCLHQKT

SEQ ID NO: 43357 - protein, 185 aa, Homo sapiens
  Payload ID: 8914
  Gene Symbol: KIAA0391
  Gene Name: KIAA0391
  ENSP ID: ENSP00000450898
MRDVIDGGDQYRKTTPQELKRFENFIKSRPPFDVVIDGLNVAKMFPKVRESQLLLNVVSQLAKRNLRLLVLGRKHMLRRSSQWSRDEMEEVQKQASCFFADDISEDDPFLLYATLHSGNHCRFITRDLMRDHKACLPDAKTQRLFFKWQQGHQLAIVNRFPGSKLTFQRILSYDTVVQTTGDSWH

SEQ ID NO: 43358 - protein, 567 aa, Homo sapiens; identical to SEQ ID NO: 43354
  Payload ID: 8914
  Gene Symbol: KIAA0391
  Gene Name: KIAA0391
  Uniprot ID: O15091
  ENSP ID: ENSP00000473856

SEQ ID NO: 43359 - protein, 211 aa, Homo sapiens; identical to SEQ ID NO: 43355
  Payload ID: 8914
  Gene Symbol: KIAA0391
  Gene Name: KIAA0391
  Uniprot ID: O15091
  ENSP ID: ENSP00000474299

SEQ ID NO: 43360 - protein, 488 aa, Homo sapiens
  Payload ID: 8914
  Gene Symbol: KIAA0391
  Gene Name: KIAA0391
  Uniprot ID: O15091
  ENSP ID: ENSP00000474620
MNSQTEDHALAPVRNTIQLPTQPLNSEEWDKLKEDLKENTGKTSFESWIISQMAGCHSSIDVAKSLLAWVAAKNNGIVSYDLLVKYLYLCVFHMQTSEVIDVFEIMKARYKTLEPRGYSLLIRGLIHSDRWREALLLLEDIKKVITPSKKNYNDCIQGALLHQDVNTAWNLYQELLGHDIVPMLETLKAFFDFGKDIKDDNYSNKLLDILSYLRNNQLYPGESFAHSIKTWFESVPGKQWKGQFTTVRKSGQCSGCGKTIESIQLSPEEYECLKGKIMRDVIDGGDQYRKTTPQELKRFENFIKSRPPFDVVIDGLNVAKMFPKVRESQLLLNVVSQLAKRNLRLLVLGRKHMLRRSSQWSRDEMEEVQKQASCFFADDISEDDPFLLYATLHSGNHCRFITRDLMRDHKACLPDAKTQRLFFKWQQGHQLAIVNRFPGSKLTFQRILSYDTVVQTTGDSWHIPYDEDLVERCSCEVPTKWLCLHQKT

SEQ ID NO: 43361 - protein, 19 aa, Homo sapiens
  Payload ID: 8914
  Gene Symbol: KIAA0391
  Gene Name: KIAA0391
  ENSP ID: ENSP00000474656
MTFYLFGIRSFPKLWKSPY

SEQ ID NO: 43362 - protein, 23 aa, Homo sapiens
  Payload ID: 8914
  Gene Symbol: KIAA0391
  Gene Name: KIAA0391
  ENSP ID: ENSP00000474700
MTFYLFGIRSFPKLWKSPYLGLG

SEQ ID NO: 43363 - protein, 34 aa, Homo sapiens
  Payload ID: 8914
  Gene Symbol: KIAA0391
  Gene Name: KIAA0391
  ENSP ID: ENSP00000474967
MTFYLFGIRSFPKLWKSPYLGLGPGHSYVSLFLA

SEQ ID NO: 43364 - protein, 252 aa, Homo sapiens
  Payload ID: 8915
  Gene Symbol: KIAA0408
  Gene Name: KIAA0408
  ENSP ID: ENSP00000434384
MDLHKQWENTETNWHKEKMELLDQFDNERKEWESQWKIMQKKIEEASTLVLLSTELSLCREVKLWRKININESAKIIDLYHEKTIPEKVIESSPNYPDLGQSEFIRTNHKDGLRKENKREQSLVSGGNQMCKEQKATKKSKVGFLDPLATDNQKECEAWPDLRTSEEDSKSCSGALSTALEELAKVSEELCSFQEEIRKRSNHRRMKSDSFLQEMPNVTNIPHGDPMINNDQCILPISLEKEKQKNRKNLSC

SEQ ID NO: 43365 - protein, 694 aa, Homo sapiens
  Payload ID: 8915
  Gene Symbol: KIAA0408
  Gene Name: KIAA0408
  Uniprot ID: Q6ZU52
  ENSP ID: ENSP00000435150
MDLHKQWENTETNWHKEKMELLDQFDNERKEWESQWKIMQKKIEELCREVKLWRKININESAKIIDLYHEKTIPEKVIESSPNYPDLGQSEFIRTNHKDGLRKENKREQSLVSGGNQMCKEQKATKKSKVGFLDPLATDNQKECEAWPDLRTSEEDSKSCSGALSTALEELAKVSEELCSFQEEIRKRSNHRRMKSDSFLQEMPNVTNIPHGDPMINNDQCILPISLEKEKQKNRKNLSCTNVLQSNSTKKCGIDTIDLKRNETPPVPPPRSTSRNFPSSDSEQAYERWKERLDHNSWVPHEGRSKRNYNPHFPLRQQEMSMLYPNEGKTSKDGIIFSSLVPEVKIDSKPPSNEDVGLSMWSCDIGIGAKRSPSTSWFQKTCSTPSNPKYEMVIPDHPAKSHPDLHVSNDCSSSVAESSSPLRNFSCGFERTTRNEKLAAKTDEFNRTVFRTDRNCQAIQQNHSCSKSSEDLKPCDTSSTHTGSISQSNDVSGIWKTNAHMPVPMENVPDNPTKKSTTGLVRQMQGHLSPRSYRNMLHEHDWRPSNLSGRPRSADPRSNYGVVEKLLKTYETATESALQNSKCFQDNWTKCNSDVSGGATLSQHLEMLQMEQQFQQKTAVWGGQEVKQGIDPKKITEESMSVNASHGKGFSRPARPANRRLPSRWASRSPSAPPALRRTTHNYTISLRSEALMV

SEQ ID NO: 43366 - protein, 88 aa, Homo sapiens
  Payload ID: 8915
  Gene Symbol: KIAA0408
  Gene Name: KIAA0408
  ENSP ID: ENSP00000436178
SSSVAESSSPLRNFSCGFERTTRNEKLAAKTDEFNRTVFRTDRNCQAIQQNHSCSKSSEDLKPCDTSSTHTGIHVSERLTWKRIFPTC

SEQ ID NO: 43367 - protein, 1742 aa, Homo sapiens
  Payload ID: 8916
  Gene Symbol: KIAA0430
  Gene Name: KIAA0430
  Uniprot ID: Q9Y4F3
  ENSP ID: ENSP00000379654
MMEGNGTENSCSRTRGWLQQDNDAKPWLWKFSNCFSRPEQTLPHSPQTKEYMENKKVAVELKDVPSPLHAGSKLFPAVPLPDIRSLQQPKIQLSSVPKVSCCAHCPNEPSTSPMRFGGGGGGSGGTSSLIHPGALLDSQSTRTITCQVGSGFAFQSASSLQNASARNNLAGIASDFPSMCLESNLSSCKHLPCCGKLHFQSCHGNVHKLHQFPSLQGCTSAGYFPCSDFTSGAPGHLEEHISQSELTPHLCTNSLHLNVVPPVCLKGSLYCEDCLNKPARNSIIDAAKVWPNIPPPNTQPAPLAVPLCNGCGTKGTGKETTLLLATSLGKAASKFGSPEVAVAGQVLENLPPIGVFWDIENCSVPSGRSATAVVQRIREKFFKGHREAEFICVCDISKENKEVIQELNNCQVTVAHINATAKNAADDKLRQSLRRFANTHTAPATVVLVSTDVNFALELSDLRHRHGFHIILVHKNQASEALLHHANELIRFEEFISDLPPRLPLKMPQCHTLLYVYNLPANKDGKSVSNRLRRLSDNCGGKVLSITGCSAILRFINQDSAERAQKRMENEDVFGNRIIVSFTPKNRELCETKSSNAIADKVKSPKKLKNPKLCLIKDASEQSSSAKATPGKGSQANSGSATKNTNVKSLQELCRMESKTGHRNSEHQQGHLRLVVPTHGNSSAAVSTPKNSGVAEPVYKTSQKKENLSARSVTSSPVEKKDKEETVFQVSYPSAFSKLVASRQVSPLLASQSWSSRSMSPNLLNRASPLAFNIANSSSEADCPDPFANGADVQVSNIDYRLSRKELQQLLQEAFARHGKVKSVELSPHTDYQLKAVVQMENLQDAIGAVNSLHRYKIGSKKILVSLATGAASKSLSLLSAETMSVLQDAPACCLPLFKFTDIYEKKFGHKLNVSDLYKLTDTVAIREQGNGRLVCLLPSSQARQSPLGSSQSHDGSSTNCSPIIFEELEYHEPVCRQHCSNKDFSEHEFDPDSYKIPFVILSLKTFAPQVHSLLQTHEGTVPLLSFPDCYIAEFGDLEVVQENQGGVPLEHFITCVPGVNIATAQNGIKVVKWIHNKPPPPNTDPWLLRSKSPVGNPQLIQFSREVIDLLKSQPSCVIPISHFIPSYHHHFAKQCRVSDYGYSKLIELLEAVPHVLQILGMGSKRLLTLTHRAQVKRFTQDLLKLLKSQASKQVIVREFSQAYHWCFSKDWDVTEYGVCELIDIVSEIPDTTICLSQQDNEMVICIPKRERTQDEIERTKQFSKDVVDLLRHQPHFRMPFNKFIPSYHHHFGRQCKLAYYGFTKLLELFEAIPDTLQVLECGEEKILTLTEVERFKALAAQFVKLLRSQKDNCLMMTDLLTEYAKTFGYTFRLQDYDVSSISALTQKLCHVVKVADIESGRQIQLINRKSLRSLTAQLLVLLMSWEGTTHLSVEELKRHYESTHNTPLNPCEYGFMTLTELLKSLPYLVEVFTNDKMEECVKLTSLYLFAKNVRSLLHTYHYQQIFLHEFSMAYTKYVGETLQPKTYGHSSVEELLGAIPQVVWIKGHGHKRIVVLKNDMKSRLSSLSLSPANHENQPSEGERILEVPESHTASELKLGADGSGPSHTEQELLRLTDDSPVDLLCAPVPSCLPSPQLRPDPVILQSADLIQFEERPQEPSEIMILNQEEKMEIPIPGKSKTLTSDSSSSCISAAVPVPPCPSSETSESLLSKDPVESPAKKQPKNRVKLAANFSLAPITKL

SEQ ID NO: 43368 - protein, 1577 aa, Homo sapiens
  Payload ID: 8916
  Gene Symbol: KIAA0430
  Gene Name: KIAA0430
  ENSP ID: ENSP00000439819
MMEGNGTENSCSRTRGWLQQDNDAKPWLWKFSNCFSRPEQTLPHSPQTKEYMENKKVAVELKDVPSPLHAGSKLFPAVPLPDIRSLQQPKIQLSSVPKVSCCAHCPNEPSTSPMRFGGGGGGSGGTSSLIHPGALLDSQSTRTITCQVGSGFAFQSASSLQNASARNNLAGIASDFPSMCLESNLSSCKHLPCCGKLHFQSCHGNVHKLHQFPSLQGCTSAGYFPCSDFTSGAPGHLEEHISQSELTPHLCTNSLHLNVVPPVCLKGSLYCEDCLNKPARNSIIDAAKVWPNIPPPNTQPAPLAVPLCNGCGTKGTGKETTLLLATSLGKAASKFGSPEVAVAGQVLENLPPIGVFWDIENCSVPSGRSATAVVQRIREKFFKGHREAEFICVCDISKENKEVIQELNNCQVTVAHINATAKNAADDKLRQSLRRFANTHTAPATVVLVSTDVNFALELSDLRHRHGFHIILVHKNQASEALLHHANELIRFEEFISDLPPRLPLKMPELCRMESKTGHRNSEHQQGHLRLVVPTHGNSSAAVSTPKNSGVAEPVYKTSQKKENLSARSVTSSPVEKKDKEETVFQVSYPSAFSKLVASRQVSPLLASQSWSSSEADCPDPFANGADVQVSNIDYRLSRKELQQLLQEAFARHGKVKSVELSPHTDYQLKAVVQMENLQDAIGAVNSLHRYKIGSKKILVSLATGAASKSLSLLSAETMSVLQDAPACCLPLFKFTDIYEKKFGHKLNVSDLYKLTDTVAIREQGNGRLVCLLPSSQARQSPLGSSQSHDGSSTNCSPIIFEELEYHEPVCRQHCSNKDFSEHEFDPDSYKIPFVILSLKTFAPQVHSLLQTHEGTVPLLSFPDCYIAEFGDLEVVQENQGGVPLEHFITCVPGVNIATAQNGIKVVKWIHNKPPPPNTDPWLLRSKSPVGNPQLIQFSREVIDLLKSQPSCVIPISHFIPSYHHHFAKQCRVSDYGYSKLIELLEAVPHVLQILGMGSKRLLTLTHRAQVKRFTQDLLKLLKSQASKQVIVREFSQAYHWCFSKDWDVTEYGVCELIDIVSEIPDTTICLSQQDNEMVICIPKRERTQDEIERTKQFSKDVVDLLRHQPHFRMPFNKFIPSYHHHFGRQCKLAYYGFTKLLELFEAIPDTLQVLECGEEKILTLTEVERFKALAAQFVKLLRSQKDNCLMMTDLLTEYAKTFGYTFRLQDYDVSSISALTQKLCHVVKVADIESGRQIQLINRKSLRSLTAQLLVLLMSWEGTTHLSVEELKRHYESTHNTPLNPCEYGFMTLTELLKSLPYLVEVFTNDKMEECVKLTSLYLFAKNVRSLLHTYHYQQIFLHEFSMAYTKYVGETLQPKTYGHSSVEELLGAIPQVVWIKGHGHKRIVVLKNDMKSRLSSLSLSPANHENQPSEGERILEVPESHTASELKLGADGSGPSHTEQELLRLTDDSPVDLLCAPVPSCLPSPQLRPDPVILQSADLIQFEERPQEPSEIMILNQEEKMEIPIPGKSKTLTSDSSSSCISAAVPVPPCPSSETSESLLSKDPVESPAKKQPKNRVKLAANFSLAPITKL

SEQ ID NO: 43369 - protein, 164 aa, Homo sapiens
  Payload ID: 8916
  Gene Symbol: KIAA0430
  Gene Name: KIAA0430
  ENSP ID: ENSP00000448495
MMEGNGTENSCSRTRGWLQQDNDAKPWLWKFSNCFSRPEQTLPHSPQTKEYMENKKVAVELKDVPSPLHAGSKLFPAVPLPDIRSLQQPKIQLSSVPKVSCCAHCPNEPSTSPMRFGGGGGGSGGTSSLIHPGALLDSQSTRTITCQVGSGFAFQSASSLQNAS

SEQ ID NO: 43370 - protein, 19 aa, Homo sapiens
  Payload ID: 8916
  Gene Symbol: KIAA0430
  Gene Name: KIAA0430
  ENSP ID: ENSP00000449050
  MOD_RES (1)..(1): Any amino acid
XSELKLGADGSGLEGKLQV

SEQ ID NO: 43371 - protein, 1037 aa, Homo sapiens
  Payload ID: 8916
  Gene Symbol: KIAA0430
  Gene Name: KIAA0430
  ENSP ID: ENSP00000449329
MMEGNGTENSCSRTRGWLQQDNDAKPWLWKFSNCFSRPEQTLPHSPQTKEYMENKKVAVELKDVPSPLHAGSKLFPAVPLPDIRSLQQPKIQLSSVPKVSCCAHCPNEPSTSPMRFGGGGGGSGGTSSLIHPGALLDSQSTRTITCQVGSGFAFQSASSLQNASARNNLAGIASDFPSMCLESNLSSCKHLPCCGKLHFQSCHGNVHKLHQFPSLQGCTSAGYFPCSDFTSGAPGHLEEHISQSELTPHLCTNSLHLNVVPPVCLKGSLYCEDCLNKPARNSIIDAAKVWPNIPPPNTQPAPLAVPLCNGCGTKGTGKETTLLLATSLGKAASKFGSPEVAVAGQVLENLPPIGVFWDIENCSVPSGRSATAVVQRIREKFFKGHREAEFICVCDISKENKEVIQELNNCQVTVAHINATAKNAADDKLRQSLRRFANTHTAPATVVLVSTDVNFALELSDLRHRHGFHIILVHKNQASEALLHHANELIRFEEFISDLPPRLPLKMPQCHTLLYVYNLPANKDGKSVSNRLRRLSDNCGGKVLSITGCSAILRFINQDSAERAQKRMENEDVFGNRIIVSFTPKNRELCETKSSNAIADKVKSPKKLKNPKLCLIKDASEQSSSAKATPGKGSQANSGSATKNTNVKSLQELCRMESKTGHRNSEHQQGHLRLVVPTHGNSSAAVSTPKNSGVAEPVYKTSQKKENLSARSVTSSPVEKKDKEETVFQVSYPSAFSKLVASRQVSPLLASQSWSSRSMSPNLLNRASPLAFNIANSSSEADCPDPFANGADVQVSNIDYRLSRKELQQLLQEAFARHGKVKSVELSPHTDYQLKAVVQMENLQDAIGAVNSLHRYKIGSKKILVSLATGAASKSLSLLSAETMSVLQDAPACCLPLFKFTDIYEKKFGHKLNVSDLYKLTDTVAIREQGNGRLVCLLPSSQARQSPLGSSQSHDGSSTNCSPIIFEELEYHEPVCRQHCSNKDFSEHEFDPDSYKIPFVILSLKTFAPQVHSLLQTHEGTVPLLRPLASAFEESCR

SEQ ID NO: 43372 - protein, 1739 aa, Homo sapiens
  Payload ID: 8916
  Gene Symbol: KIAA0430
  Gene Name: KIAA0430
  Uniprot ID: Q9Y4F3
  ENSP ID: ENSP00000449376
MMEGNGTENSCSRTRGWLQQDNDAKPWLWKFSNCFSRPEQTLPHSPQTKEYMENKKVAVELKDVPSPLHAGSKLFPAVPLPDIRSLQQPKIQLSSVPKVSCCAHCPNEPSTSPMRFGGGGGGSGGTSSLIHPGALLDSQSTRTITCQVGSGFAFQSASSLQNASARNNLAGIASDFPSMCLESNLSSCKHLPCCGKLHFQSCHGNVHKLHQFPSLQGCTSAGYFPCSDFTSGAPGHLEEHISQSELTPHLCTNSLHLNVVPPVCLKGSLYCEDCLNKPARNSIIDAAKVWPNIPPPNTQPAPLAVPLCNGCGTKGTGKETTLLLATSLGKAASKFEVAVAGQVLENLPPIGVFWDIENCSVPSGRSATAVVQRIREKFFKGHREAEFICVCDISKENKEVIQELNNCQVTVAHINATAKNAADDKLRQSLRRFANTHTAPATVVLVSTDVNFALELSDLRHRHGFHIILVHKNQASEALLHHANELIRFEEFISDLPPRLPLKMPQCHTLLYVYNLPANKDGKSVSNRLRRLSDNCGGKVLSITGCSAILRFINQDSAERAQKRMENEDVFGNRIIVSFTPKNRELCETKSSNAIADKVKSPKKLKNPKLCLIKDASEQSSSAKATPGKGSQANSGSATKNTNVKSLQELCRMESKTGHRNSEHQQGHLRLVVPTHGNSSAAVSTPKNSGVAEPVYKTSQKKENLSARSVTSSPVEKKDKEETVFQVSYPSAFSKLVASRQVSPLLASQSWSSRSMSPNLLNRASPLAFNIANSSSEADCPDPFANGADVQVSNIDYRLSRKELQQLLQEAFARHGKVKSVELSPHTDYQLKAVVQMENLQDAIGAVNSLHRYKIGSKKILVSLATGAASKSLSLLSAETMSVLQDAPACCLPLFKFTDIYEKKFGHKLNVSDLYKLTDTVAIREQGNGRLVCLLPSSQARQSPLGSSQSHDGSSTNCSPIIFEELEYHEPVCRQHCSNKDFSEHEFDPDSYKIPFVILSLKTFAPQVHSLLQTHEGTVPLLSFPDCYIAEFGDLEVVQENQGGVPLEHFITCVPGVNIATAQNGIKVVKWIHNKPPPPNTDPWLLRSKSPVGNPQLIQFSREVIDLLKSQPSCVIPISHFIPSYHHHFAKQCRVSDYGYSKLIELLEAVPHVLQILGMGSKRLLTLTHRAQVKRFTQDLLKLLKSQASKQVIVREFSQAYHWCFSKDWDVTEYGVCELIDIVSEIPDTTICLSQQDNEMVICIPKRERTQDEIERTKQFSKDVVDLLRHQPHFRMPFNKFIPSYHHHFGRQCKLAYYGFTKLLELFEAIPDTLQVLECGEEKILTLTEVERFKALAAQFVKLLRSQKDNCLMMTDLLTEYAKTFGYTFRLQDYDVSSISALTQKLCHVVKVADIESGRQIQLINRKSLRSLTAQLLVLLMSWEGTTHLSVEELKRHYESTHNTPLNPCEYGFMTLTELLKSLPYLVEVFTNDKMEECVKLTSLYLFAKNVRSLLHTYHYQQIFLHEFSMAYTKYVGETLQPKTYGHSSVEELLGAIPQVVWIKGHGHKRIVVLKNDMKSRLSSLSLSPANHENQPSEGERILEVPESHTASELKLGADGSGPSHTEQELLRLTDDSPVDLLCAPVPSCLPSPQLRPDPVILQSADLIQFEERPQEPSEIMILNQEEKMEIPIPGKSKTLTSDSSSSCISAAVPVPPCPSSETSESLLSKDPVESPAKKQPKNRVKLAANFSLAPITKL

SEQ ID NO: 43373 - protein, 1742 aa, Homo sapiens
  Payload ID: 8916
  Gene Symbol: KIAA0430
  Gene Name: KIAA0430
  Uniprot ID: Q9Y4F3
  ENSP ID: ENSP00000450309
MMEGNGTENSCSRTRGWLQQDNDAKPWLWKFSNCFSRPEQTLPHSPQTKEYMENKKVAVELKDVPSPLHAGSKLFPAVPLPDIRSLQQPKIQLSSVPKVSCCAHCPNEPSTSPMRFGGGGGGSGGTSSLIHPGALLDSQSTRTITCQVGSGFAFQSASSLQNASARNNLAGIASDFPSMCLESNLSSCKHLPCCGKLHFQSCHGNVHKLHQFPSLQGCTSAGYFPCSDFTSGAPGHLEEHISQSELTPHLCTNSLHLNVVPPVCLKGSLYCEDCLNKPARNSIIDAAKVWPNIPPPNTQPAPLAVPLCNGCGTKGTGKETTLLLATSLGKAASKFGSPEVAVAGQVLENLPPIGVFWDIENCSVPSGRSATAVVQRIREKFFKGHREAEFICVCDISKENKEVIQELNNCQVTVAHINATAKNAADDKLRQSLRRFANTHTAPATVVLVSTDVNFALELSDLRHRHGFHIILVHKNQASEALLHHANELIRFEEFISDLPPRLPLKMPCHTLLYVYNLPANKDGKSVSNRLRRLSDNCGGKVLSITGCSAILRFINQDSAERAQKRMENEDVFGNRIIVSFTPKNRELCETKSSNAIADKVKSPKKLKNPKLCLIKDASEQSSSAKATPGKGSQANSGSATKNTNVKSLQELCRMESKTGHRNSEHQQGHLRLVVPTHGNSSAAVSTPKNSGVAEPVYKTSQKKENLSARSVTSSPVEKKDKEETVFQVSYPSAFSKLVASRQVSPLLASQSWSSSRSMSPNLLNRASPLAFNIANSSSEADCPDPFANGADVQVSNIDYRLSRKELQQLLQEAFARHGKVKSVELSPHTDYQLKAVVQMENLQDAIGAVNSLHRYKIGSKKILVSLATGAASKSLSLLSAETMSVLQDAPACCLPLFKFTDIYEKKFGHKLNVSDLYKLTDTVAIREQGNGRLVCLLPSSQARQSPLGSSQSHDGSSTNCSPIIFEELEYHEPVCRQHCSNKDFSEHEFDPDSYKIPFVILSLKTFAPQVHSLLQTHEGTVPLLSFPDCYIAEFGDLEVVQENQGGVPLEHFITCVPGVNIATAQNGIKVVKWIHNKPPPPNTDPWLLRSKSPVGNPQLIQFSREVIDLLKSQPSCVIPISHFIPSYHHHFAKQCRVSDYGYSKLIELLEAVPHVLQILGMGSKRLLTLTHRAQVKRFTQDLLKLLKSQASKQVIVREFSQAYHWCFSKDWDVTEYGVCELIDIVSEIPDTTICLSQQDNEMVICIPKRERTQDEIERTKQFSKDVVDLLRHQPHFRMPFNKFIPSYHHHFGRQCKLAYYGFTKLLELFEAIPDTLQVLECGEEKILTLTEVERFKALAAQFVKLLRSQKDNCLMMTDLLTEYAKTFGYTFRLQDYDVSSISALTQKLCHVVKVADIESGRQIQLINRKSLRSLTAQLLVLLMSWEGTTHLSVEELKRHYESTHNTPLNPCEYGFMTLTELLKSLPYLVEVFTNDKMEECVKLTSLYLFAKNVRSLLHTYHYQQIFLHEFSMAYTKYVGETLQPKTYGHSSVEELLGAIPQVVWIKGHGHKRIVVLKNDMKSRLSSLSLSPANHENQPSEGERILEVPESHTASELKLGADGSGPSHTEQELLRLTDDSPVDLLCAPVPSCLPSPQLRPDPVILQSADLIQFEERPQEPSEIMILNQEEKMEIPIPGKSKTLTSDSSSSCISAAVPVPPCPSSETSESLLSKDPVESPAKKQPKNRVKLAANFSLAPITKL

SEQ ID NO: 43374 - protein, 1742 aa, Homo sapiens; identical to SEQ ID NO: 43367
  Payload ID: 8916
  Gene Symbol: KIAA0430
  Gene Name: KIAA0430
  Uniprot ID: Q9Y4F3
  ENSP ID: ENSP00000479383

SEQ ID NO: 43375 - protein, 1037 aa, Homo sapiens; identical to SEQ ID NO: 43371
  Payload ID: 8916
  Gene Symbol: KIAA0430
  Gene Name: KIAA0430
  ENSP ID: ENSP00000487600

SEQ ID NO: 43376 - protein, 1739 aa, Homo sapiens; identical to SEQ ID NO: 43372
  Payload ID: 8916
  Gene Symbol: KIAA0430
  Gene Name: KIAA0430
  Uniprot ID: Q9Y4F3
  ENSP ID: ENSP00000487685

SEQ ID NO: 43377 - protein, 1742 aa, Homo sapiens; identical to SEQ ID NO: 43373
  Payload ID: 8916
  Gene Symbol: KIAA0430
  Gene Name: KIAA0430
  Uniprot ID: Q9Y4F3
  ENSP ID: ENSP00000488025

SEQ ID NO: 43378 - protein, 164 aa, Homo sapiens; identical to SEQ ID NO: 43369
  Payload ID: 8916
  Gene Symbol: KIAA0430
  Gene Name: KIAA0430
  ENSP ID: ENSP00000488482

SEQ ID NO: 43379 - protein, 19 aa, Homo sapiens
  Payload ID: 8916
  Gene Symbol: KIAA0430
  Gene Name: KIAA0430
  ENSP ID: ENSP00000488523
  MOD_RES (1)..(1): Any amino acid
XSELKLGADGSGLEGKLQV

SEQ ID NO: 43380 - protein, 1577 aa, Homo sapiens; identical to SEQ ID NO: 43368
  Payload ID: 8916
  Gene Symbol: KIAA0430
  Gene Name: KIAA0430
  ENSP ID: ENSP00000488857

SEQ ID NO: 43381 - protein, 411 aa, Homo sapiens
  Payload ID: 8917
  Gene Symbol: KIAA0513
  Gene Name: KIAA0513
  Uniprot ID: O60268
  ENSP ID: ENSP00000258180
METPEVPVGSLIDFGPEAPTSSPLEAPPPVLQDGDGSLGDGASESETTESADSENDMGESPSHPSWDQDRRSSSNESFSSNQSTESTQDEETLALRDFMRGYVEKIFSGGEDLDQEEKAKFGEYCSSENGKGREWFARYVSAQRCNSKCVSEATFYRLVQSFAVVLFECHQMDDFGPAKNLMTMCFTYYHIGKPQLLPPESREKPAGSIDSYLKSANSWLAEKKDIAERLLKNTSARTENVKGFFGGLETKLKGPLARRNEEDENKPQEKRPRAVTAYSPEDEKKGEKIYLYTHLKQQPIWHTLRFWNAAFFDAVHCERTKRSPTTRGDAGEEEEKREKWCHMTQEERDDSLRFNENITFGQLGTFTHNMLAFGLNKKLCNDFLKKQAVIGNLDEEQYKLLSDHIEQMATE

SEQ ID NO: 43382 - protein, 401 aa, Homo sapiens
  Payload ID: 8917
  Gene Symbol: KIAA0513
  Gene Name: KIAA0513
  Uniprot ID: O60268
  ENSP ID: ENSP00000446439
METPEVPVGSLIDFGPEAPTSSPLEAPPPVLQDGDGSLGDGASESETTESADSENDMGESPSHPSWDQDRRSSSNESFSSNQSTESTQDEETLALRDFMRGYVEKIFSGGEDLDQEEKAKFGEYCSSENGKGREWFARYVSAQRCNSKCVSEATFYRLVQSFAVVLFECHQMDDFGPAKNLMTMCFTYYHIGKPQLLPPESREKPAGSIDSYLKSANSWLAEKKDIAERLLKNTSARTENVKGFFGGLETKLKGPLARRNEEDENKPQEKRPRAVTAYSPEDEKKGEKIYLYTHLKQQPIWHTLRFWNAAFFDAVHCERTKRSPTTREKWCHMTQEERDDSLRFNENITFGQLGTFTHNMLAFGLNKKLCNDFLKKQAVIGNLDEEQYKLLSDHIEQMATE

SEQ ID NO: 43383 - protein, 198 aa, Homo sapiens
  Payload ID: 8917
  Gene Symbol: KIAA0513
  Gene Name: KIAA0513
  ENSP ID: ENSP00000454547
KPAGSIDSYLKSANSWLAEKKDIAERLLKNTSARTENVKGFFGGLETKLKGPLARRNEEDENKPQEKRPRAVTAYSPEDEKKGEKIYLYTHLKQQPIWHTLRFWNAAFFDAVHCERTKRSPTTREKWCHMTQEERDDSLRFNENITFGQLGTFTHNMLAFGLNKKLCNDFLKKQAVIGNLDEEQYKLLSDHIEQMATE

SEQ ID NO: 43384 - protein, 113 aa, Homo sapiens
  Payload ID: 8917
  Gene Symbol: KIAA0513
  Gene Name: KIAA0513
  ENSP ID: ENSP00000454758
DENKPQEKRPRAVTAYSPEDEKKGEKIYLYTHLKQQPIWEKWCHMTQEERDDSLRFNENITFGQLGTFTHNMLAFGLNKKLCNDFLKKQAVIGNLDEEQYKLLSDHIEQMATE

SEQ ID NO: 43385 - protein, 301 aa, Homo sapiens
  Payload ID: 8917
  Gene Symbol: KIAA0513
  Gene Name: KIAA0513
  Uniprot ID: O60268
  ENSP ID: ENSP00000455544
METPEVPVGSLIDFGPEAPTSSPLEAPPPVLQDGDGSLGDGASESETTESADSENDMGESPSHPSWDQDRRSSSNESFSSNQSTESTQDEETLALRDFMRGYVEKIFSGGEDLDQEEKAKFGEYCSSENGKGREWFARYVSAQRCNSKCVSEATFYRLVQSFAVVLFECHQMDDFGPAKNLMTMCFTYYHIGKPQLLPPESREKPAGSIDSYLKSANSWLAEKKDIAERLLKNTSARTENVKGFFGGLETKLKGPLARRNEEDENKPQEKRPRAVTAYSPEDEKKGEKIYLYTHLKQQPIW

SEQ ID NO: 43386 - protein, 411 aa, Homo sapiens; identical to SEQ ID NO: 43381
  Payload ID: 8917
  Gene Symbol: KIAA0513
  Gene Name: KIAA0513
  Uniprot ID: O60268
  ENSP ID: ENSP00000457408

SEQ ID NO: 43387 - protein, 1618 aa, Homo sapiens
  Payload ID: 8918
  Gene Symbol: KIAA0556
  Gene Name: KIAA0556
  Uniprot ID: O60303
  ENSP ID: ENSP00000261588
MDGQTLRKAERSWSCSREKKEGYAKDMVTDFDEKHDEYLILLQQRNRILKHLKSKDPVQLRLEHLEQGFSVYVNGANSELKSSPRKAIHSDFSRSASHTEGTHDYGRRTLFREAEEALRRSSRTAPSKVQRRGWHQKSVQIRTEAGPRLHIEPPVDYSDDFELCGDVTLQANNTSEDRPQELRRSLELSVNLQRKQKDCSSDEYDSIEEDILSEPEPEDPALVGHPRHDRPPSSGDWTQKDVHGEQETEGRSSPGPDTLVVLEFNPASKSHKRERNLSAKRKDNAEVFVPTKPEPNLTPQAPAVFPDQERMCSRPGSRRERPLSATRKTLCEAEYPEEDASAVLQAIQVENAALQRALLSRKAEQPASPLQDAEGPPAKPWTSLLEEKEETLELLPITTATTTQEPAGAAGGARAINQAMDRIGLLGSRQQQKLLKVLQAVESDSAHLGRVVSPTKEQVSDTEDKQRMRADEIKDAIYVTMEILSNWGNSWWVGLTEVEFFDLNDTKLYVSPHDVDIRNTATPGELGRLVNRNLAGKKDSSPWTCPFHPPLQLFFVIRNTRQLGDFHLAKIKVRNYWTADGDLDIGAKNVKLYVNRNLIFNGKLDKGDREAPADHSILVDQKNEKSEQLEEAMNAHSEESKGTHEMAGASGDKELGLGCSPPAETLADAKLSSQGNVSGKRKNSTNCRKDSLSQLEEYLRLSAVPTSMGDMPSAPATSPPVKCPPVHEEPSLIQQLENLMGRKICEPPGKTPSWLQPSPTGKDRKQGGRKPKPLWLSPEKPLAWKGRLPSDDVIGEGPGETEARDKGLRHEPGWGTSRSVNTKERPQRATTKVHSDDSDIFNQPPNRERPASGRRGSRKDAGSSSHGDDQPASREDTWSSRTPSRSRWRSEQEHTLHESWSSLSAFDRSHRGRISNTELPGDILDELLQQKSSRHSDLPPSKKGEQPGLSRGQDGYSGETDAGGDFKIPVLPYGQRLVIDIKSTWGDRHYVGLNGIEIFSSKGEPVQISNIKADPPDINILPAYGKDPRVVTNLIDGVNRTQDDMHVWLAPFTRGRSHSITIDFTHPCHVALIRIWNYNKSRIHSFRGVKDITMLLDTQCIFEGEIAKASGTLAGAPEHFGDTILFTTDDDILEAIFYSDEMFDLDVGSLDSLQDEEAMRRPSTADGEGDERPFTQAGLGADERIPELELPSSSPVPQVTTPEPGIYHGICLQLNFTASWGDLHYLGLTGLEVVGKEGQALPIHLHQISASPRDLNELPEYSDDSRALDKLIDGTNITMEDEHMWLIPFSPGLDHVVTIRLDRAESIAGLRFWNYNKSPEDTYRGAKIVHVSLDGLCVSPPEGFLIRKGPGNCHFDFAQEILFVDYLRAQLLPQPARRLDMRSLECASMDYEAPLMPCGFIFQFQLLTSWGDPYYIGLTGLELYDERGEKIPLSENNIAAFPDSVNSLEGVGGDVRTPDKLIDQVNDTSDGRHMWLAPILPGLVNRVYVIFDLPTTVSMIKLWNYAKTPHRGVKEFGLLVDDLLVYNGILAMVSHLVGGILPTCEPTVPYHTILFTEDRDIRHQEKHTTISNQAEDQDVQMMNENQIITNAKRKQSVVDPALRPKTCISEKETRRRRC

SEQ ID NO: 43388 - protein, 249 aa, Homo sapiens
  Payload ID: 8918
  Gene Symbol: KIAA0556
  Gene Name: KIAA0556
  ENSP ID: ENSP00000454884
  MOD_RES (1)..(1): Any amino acid
XLRKAERSWSCSREKKEGYAKDMVTDFDEKHDEYLILLQQRNRILKHLKSKDPVQLRLEHLEQGFSVYVNGANSELKSSPRKAIHSDFSRSASHTEGTHDYGRRTLFREAEEALRRSSRTAPSKVQRRGWHQKSVQIRTEAGPRLHIEPPVDYSDDFELCGDVTLQANNTSEDRPQDTKSPTSTKPCGFNFSLLNACGHSDPSSSVDKERILLTIQDVMELRRSLELSVNLQRKQKDCSSDEYDSIEED

SEQ ID NO: 43389 - protein, 55 aa, Homo sapiens
  Payload ID: 8918
  Gene Symbol: KIAA0556
  Gene Name: KIAA0556
  ENSP ID: ENSP00000455380
  MOD_RES (1)..(1): Any amino acid
XRSWSCSREKKEDIKAFEKQGPRAIEAGALGARFLCLCQRCQFGAEIITAESYSL

SEQ ID NO: 43390 - protein, 110 aa, Homo sapiens
  Payload ID: 8918
  Gene Symbol: KIAA0556
  Gene Name: KIAA0556
  ENSP ID: ENSP00000483214
EYLILLQQRNRILKHLKSKDPVQLRLEHLEQGFSVYVNGANSELKSSPRKAIHSDFSRSASHTEGTHDYGRRTLFREAEEALRRSSRTAPSKVQRRGWHQVWRLWPQPTL

SEQ ID NO: 43391 - protein, 1472 aa, Homo sapiens
  Payload ID: 8919
  Gene Symbol: KIAA0586
  Gene Name: KIAA0586
  Uniprot ID: Q9BVV6
  ENSP ID: ENSP00000261244
MKGSEVSLEKKKKIKMPVKRLREVVSQNHGDHLVLLKDELPCVPPALSANKRLPVGTGTSLNGTSRGSSDLTSARNCYQPLLENPMVSESDFSKDVAVQVLPLDKIEENNKQKANDIFISQYTMGQKDALRTVLKQKAQSMPVFKEVKVHLLEDAGIEKDAVTQETRISPSGIDSATTVAAATAAAIATAAPLIKVQSDLEAKVNSVTELLSKLQETDKHLQRVTEQQTSIQRKQEKLHCHDHEKQMNVFMEQHIRHLEKLQQQQIDIQTHFISAALKTSSFQPVSMPSSRAVEKYSVKPEHPNLGSCNPSLYNTFASKQAPLKEVEDTSFDKQKSPLETPAPRRFAPVPVSRDDELSKRENLLEEKENMEVSCHRGNVRLLEQILNNNDSLTRKSESSNTTSLTRSKIGWTPEKTNRFPSCEELETTKVTMQKSDDVLHDLGQKEKETNSMVQPKESLSMLKLPDLPQNSVKLQTTNTTRSVLKDAEKILRGVQNNKKVLEENLEAIIRAKDGAAMYSLINALSTNREMSEKIRIRKTVDEWIKTISAEIQGLLKATTVIQDEDYMLQVYGKPVYQGHRSTLKKGPYLRFNSPSPKSRPQRPKVIERVKGTKVKSIRTQTDFYATKPKKMDSKMKHSVPVLPHGDQQYLFSPSREMPTFSGTLEGHLIPMAILLGQTQSNSDTMPPAGVIVSKPHPVTVTTSIPPSSRKVETGVKKPNIAIVEMKSEKKDPPQLTVQVLPSVDIDSISNSSADVLSPLSSPKEASLPPVQTWIKTPEIMKVDEEEVKFPGTNFDEIIDVIQEEEKCDEIPDSEPILEFNRSVKADSTKYNGPPFPPVASTFQPTADILDKVIERKETLENSLIQWVEQEIMSRIISGLFPVQQQIAPSISVSVSETSEPLTSDIVEGTSSGALQLFVDAGVPVNSNVIKHFVNEALAETIAVMLGDREAKKQGPVATGVSGDASTNETYLPARVCTPLPTPQPTPPCSPSSPAKECVLVKTPDSSPCDSDHDMAFPVKEICAEKGDDMPAIMLVNTPTVTPTTTPPPAAAVFTPTLSDISIDKLKVSSPELPKPWGDGDLPLEEENPNSPQEELHPRAIVMSVAKDEEPESMDFPAQPPPPEPVPFMPFPAGTKAPSPSQMPGSDSSTLESTLSVTVTETETLDKPISEGEILFSCGQKLAPKILEDIGLYLTNLNDSLSSTLHDAVEMEDDPPSEGQVIRMSHKKFHADAILSFAKQNQESAVSQQAVYHSEDLENSVGELSEGQRPQLTAAAENILMGHSLYMQPPVTNTQSLDQQCDPKPLSRQFDTVSGSIYEDSCASHGPMSLGELELEPNSKLVLPTTLLTAQENDVNLPVAAEDFSQYQLKQNQDVKQVEHKPSQSYLRVRNKSDIAPSQQQVSPGDMDRTQIELNPYLTCVFSGGKAVPLSASQMPPAKMSVMLPSVNLEDCSQSLSLSTMQEDMESSGADTF

SEQ ID NO: 43392 - protein, 1644 aa, Homo sapiens
  Payload ID: 8919
  Gene Symbol: KIAA0586
  Gene Name: KIAA0586
  Uniprot ID: Q9BVV6
  ENSP ID: ENSP00000346359
MFWCGTCFVTNNMKGSEVSLEKKKKIKMPVKRLREVVSQNHGDHLVLLKDELPCVPPALSANKRLPVGTGTSLNGTSRGSSDLTSARNCYQPLLENPMVSESDFSKDVAVQVLPLDKIEENNKQKANDIFISQYTMGQKDALRTVLKQNVSLCLTGWSDHSGVITTHCSLYLLRLMRSSHLSLPSSWDYRAQSMPVFKEVKVHLLEDAGIEKDAVTQETRISPSGIDSATTVAAATAAAIATAAPLIKVQSDLEAKVNSVTELLSKLQETDKHLQRVTEQQTSIQRKQEKLHCHDHEKQMNVFMEQHIRHLEKLQQQQIDIQTHFISAALKTSSFQPVSMPSSRAVEKYSVKPEHPNLGSCNPSLYNTFASKQAPLKEVEDTSFDKQKSPLETPAPRRFAPVPVSRDDELSKRENLLEEKENMEVSCHRGNVRLLEQILNNNDSLTRKSESSNTTSLTRSKIGWTPEKTNRFPSCEELETTKVTMQKSDDVLHDLGQKEKETNSMVQPKESLSMLKLPDLPQNSVKLQTTNTTRSVLKDAEKILRGVQNNKKVLEENLEAIIRAKDGAAMYSLINALSTNREMSEKIRIRKTVDEWIKTISAEIQDELSRTDYEQKRFDQKNQRTKKGQNMTKDIRTNTQDKTVNKSVIPRKHSQKQIEEHFRNLPMRGMPASSLQKERKEGLLKATTVIQDEDYMLQVYGKPVYQGHRSTLKKGPYLRFNSPSPKSRPQRPKVIERVKGTKVKSIRTQTDFYATKPKKMDSKMKHSVPVLPHGDQQYLFSPSREMPTFSGTLEGHLIPMAILLGQTQSNSDTMPPAGVIVSKPHPVTVTTSIPPSSRKVETGVKKPNIAIVEMKSEKKDPPQLTVQVLPSVDIDSISNSSADVLSPLSSPKEASLPPVQTWIKTPEIMKVDEEEVKFPGTNFDEIIDVIQEEEKCDEIPDSEPILEFNRSVKADSTKYNGPPFPPVASTFQPTADILDKVIERKETLENSLIQWVEQEIMSRIISGLFPVQQQIAPSISVSVSETSEPLTSDIVEGTSSGALQLFVDAGVPVNSNVIKHFVNEALAETIAVMLGDREAKKQGPVATGVSGDASTNETYLPARVCTPLPTPQPTPPCSPSSPAKECVLVKTPDSSPCDSDHDMAFPVKEICAEKGDDMPAIMLVNTPTVTPTTTPPPAAAVFTPTLSDISIDKLKVSSPELPKPWGDGDLPLEEENPNSPQEELHPRAIVMSVAKDEEPESMDFPAQPPPPEPVPFMPFPAGTKAPSPSQMPGSDSSTLESTLSVTVTETETLDKPISEGEILFSCGQKLAPKILEDIGLYLTNLNDSLSSTLHDAVEMEDDPPSEGQVIRMSHKKFHADAILSFAKQNQESAVSQQAVYHSEDLENSVGELSEGQRPQLTAAAENILMGHSLYMQPPVTNTQSLDQQCDPKPLSRQFDTVSGSIYEDSCASHGPMSLGELELEPNSKLVLPTTLLTAQENDVNLPVAAEDFSQYQLKQNQDVKQVEHKPSQSYLRVRNKSDIAPSQQQVSPGDMDRTQIELNPYLTCVFSGLGVHVKKVSCIGKLGLWRFVIQIISSPRWESSATLRFTDAPCQDVSDAAVSEPRGLLSVSESQHNAGGHGVFGGRYLLNGKRQPAQCLCHWF

SEQ ID NO: 43393 - protein, 1504 aa, Homo sapiens
  Payload ID: 8919
  Gene Symbol: KIAA0586
  Gene Name: KIAA0586
  Uniprot ID: Q9BVV6
  ENSP ID: ENSP00000399427
MVSESDFSKDVAVQVLPLDKIEENNKQKANDIFISQYTMGQKDALRTVLKQNVSLCLTGWSDHSGVITTHCSLYLLRLMRSSHLSLPSSWDYRAQSMPVFKEVKVHLLEDAGIEKDAVTQETRISPSGIDSATTVAAATAAAIATAAPLIKVQSDLEAKVNSVTELLSKLQETDKHLQRVTEQQTSIQRKQEKLHCHDHEKQMNVFMEQHIRHLEKLQQQQIDIQTHFISAALKTSSFQPVSMPSSRAVEKYSVKPEHPNLGSCNPSLYNTFASKQAPLKEVEDTSFDKQKSPLETPAPRRFAPVPVSRDDELSKRENLLEEKENMEVSCHRGNVRLLEQILNNNDSLTRKSESSNTTSLTRSKIGWTPEKTNRFPSCEELETTKVTMQKSDDVLHDLGQKEKETNSMVQPKESLSMLKLPDLPQNSVKLQTTNTTRSVLKDAEKILRGVQNNKKVLEENLEAIIRAKDGAAMYSLINALSTNREMSEKIRIRKTVDEWIKTISAEIQDELSRTDYEQKRFDQKNQRTKKGQNMTKDIRTNTQDKTVNKSVIPRKHSQKQIEEHFRNLPMRGMPASSLQKERKEGLLKATTVIQDEDYMLQVYGKPVYQGHRSTLKKGPYLRFNSPSPKSRPQRPKVIERVKGTKVKSIRTQTDFYATKPKKMDSKMKHSVPVLPHGDQQYLFSPSREMPTFSGTLEGHLIPMAILLGQTQSNSDTMPPAGVIVSKPHPVTVTTSIPPSSRKVETGVKKPNIAIVEMKSEKKDPPQLTVQVLPSVDIDSISNSSADVLSPLSSPKEASLPPVQTWIKTPEIMKVDEEEVKFPGTNFDEIIDVIQEEEKCDEIPDSEPILEFNRSVKADSTKYNGPPFPPVASTFQPTADILDKVIERKETLENSLIQWVEQEIMSRIISGLFPVQQQIAPSISVSVSETSEPLTSDIVEGTSSGALQLFVDAGVPVNSNVIKHFVNEALAETIAVMLGDREAKKQGPVATGVSGDASTNETYLPARVCTPLPTPQPTPPCSPSSPAKECVLVKTPDSSPCDSDHDMAFPVKEICAEKGDDMPAIMLVNTPTVTPTTTPPPAAAVFTPTLSDISIDKLKVSSPELPKPWGDGDLPLEEENPNSPQEELHPRAIVMSVAKDEEPESMDFPAQPPPPEPVPFMPFPAGTKAPSPSQMPGSDSSTLESTLSVTVTETETLDKPISEGEILFSCGQKLAPKILEDIGLYLTNLNDSLSSTLHDAVEMEDDPPSEGQVIRMSHKKFHADAILSFAKQNQESAVSQQAVYHSEDLENSVGELSEGQRPQLTAAAENILMGHSLYMQPPVTNTQSLDQQCDPKPLSRQFDTVSGSIYEDSCASHGPMSLGELELEPNSKLVLPTTLLTAQENDVNLPVAAEDFSQYQLKQNQDVKQVEHKPSQSYLRVRNKSDIAPSQQQVSPGDMDRTQIELNPYLTCVFSGGKAVPLSASQMPPAKMSVMLPSVNLEDCSQSLSLSTMQEDMESSGADTF

SEQ ID NO: 43394 - protein, 234 aa, Homo sapiens
  Payload ID: 8919
  Gene Symbol: KIAA0586
  Gene Name: KIAA0586
  ENSP ID: ENSP00000450855
MVSESDFSKDVAVQVLPLDKIEENNKQKANDIFISQYTMGQKDALRTVLKQKAQSMPVFKEVKVHLLEDAGIEKDAVTQETRISPSGIDSATTVAAATAAAIATAAPLIKVQSDLEAKVNSVTELLSKLQETDKHLQRVTEQQTSIQRKQEKLHCHDHEKQMNVFMEQHIRHLEKLQQQQIDIQTHFISAALKTSSFQPVSMPSSRAVEKYSVKPEHPNLGSCNPSLYNTFASK

SEQ ID NO: 43395 - protein, 208 aa, Homo sapiens
  Payload ID: 8919
  Gene Symbol: KIAA0586
  Gene Name: KIAA0586
  ENSP ID: ENSP00000451356
SLSSTLHDAVEMDLENSVGELSEGQRPQLTAAAENILMGHSLYMQPPVTNTQSLDQQCDPKPLSRQFDTVSGSIYEDSCASHGPMSLGELELEPNSKLVLPTTLLTAQENDVNLPVAAEDFSQYQLKQNQDVKQVEHKPSQSYLRVRNKSDIAPSQQQGGKAVPLSASQMPPAKMSVMLPSVNLEDCSQSLSLSTMQEDMESSGADTF

SEQ ID NO: 43396 - protein, 132 aa, Homo sapiens
  Payload ID: 8919
  Gene Symbol: KIAA0586
  Gene Name: KIAA0586
  ENSP ID: ENSP00000451831
MVSESDFSKDVAVQVLPLDKIEENNKQKANDIFISQYTMGQKDALRTVLKQKAQSMPVFKEVKVHLLEDAGIEKDAVTQETRISPSGIDSATTVAAATAAAIATAAPLIKVQSDLEAKVNSVTELLSKLQET

SEQ ID NO: 43397 - protein, 1504 aa, Homo sapiens; identical to SEQ ID NO: 43393
  Payload ID: 8919
  Gene Symbol: KIAA0586
  Gene Name: KIAA0586
  Uniprot ID: Q9BVV6
  ENSP ID: ENSP00000452351

SEQ ID NO: 43398 - protein, 89 aa, Homo sapiens
  Payload ID: 8919
  Gene Symbol: KIAA0586
  Gene Name: KIAA0586
  ENSP ID: ENSP00000452536
MVSESDFSKDVAVQVLPLDKIEENNKQKANDIFISQYTMGQKDALRTVLKQKDRVCHVAQLVLNSWAQAVFLPQPPTVLGLQSSKHACF

SEQ ID NO: 43399 - protein, 1533 aa, Homo sapiens
  Payload ID: 8919
  Gene Symbol: KIAA0586
  Gene Name: KIAA0586
  Uniprot ID: Q9BVV6
  ENSP ID: ENSP00000478083
MPVKRLREVVSQNHGDHLVLLKDELPCVPPALSANKRLPVGTGTSLNGTSRGSSDLTSARNCYQPLLENPMVSESDFSKDVAVQVLPLDKIEENNKQKANDIFISQYTMGQKDALRTVLKQKAQSMPVFKEVKVHLLEDAGIEKDAVTQETRISPSGIDSATTVAAATAAAIATAAPLIKVQSDLEAKVNSVTELLSKLQETDKHLQRVTEQQTSIQRKQEKLHCHDHEKQMNVFMEQHIRHLEKLQQQQIDIQTHFISAALKTSSFQPVSMPSSRAVEKYSVKPEHPNLGSCNPSLYNTFASKQAPLKEVEDTSFDKQKSPLETPAPRRFAPVPVSRDDELSKRENLLEEKENMEVSCHRGNVRLLEQILNNNDSLTRKSESSNTTSLTRSKIGWTPEKTNRFPSCEELETTKVTMQKSDDVLHDLGQKEKETNSMVQPKESLSMLKLPDLPQNSVKLQTTNTTRSVLKDAEKILRGVQNNKKVLEENLEAIIRAKDGAAMYSLINALSTNREMSEKIRIRKTVDEWIKTISAEIQDELSRTDYEQKRFDQKNQRTKKGQNMTKDIRTNTQDKTVNKSVIPRKHSQKQIEEHFRNLPMRGMPASSLQKERKEGLLKATTVIQDEDYMLQVYGKPVYQGHRSTLKKGPYLRFNSPSPKSRPQRPKVIERVKGTKVKSIRTQTDFYATKPKKMDSKMKHSVPVLPHGDQQYLFSPSREMPTFSGTLEGHLIPMAILLGQTQSNSDTMPPAGVIVSKPHPVTVTTSIPPSSRKVETGVKKPNIAIVEMKSEKKDPPQLTVQVLPSVDIDSISNSSADVLSPLSSPKEASLPPVQTWIKTPEIMKVDEEEVKFPGTNFDEIIDVIQEEEKCDEIPDSEPILEFNRSVKADSTKYNGPPFPPVASTFQPTADILDKVIERKETLENSLIQWVEQEIMSRIISGLFPVQQQIAPSISVSVSETSEPLTSDIVEGTSSGALQLFVDAGVPVNSNVIKHFVNEALAETIAVMLGDREAKKQGPVATGVSGDASTNETYLPARVCTPLPTPQPTPPCSPSSPAKECVLVKTPDSSPCDSDHDMAFPVKEICAEKGDDMPAIMLVNTPTVTPTTTPPPAAAVFTPTLSDISIDKLKVSSPELPKPWGDGDLPLEEENPNSPQEELHPRAIVMSVAKDEEPESMDFPAQPPPPEPVPFMPFPAGTKAPSPSQMPGSDSSTLESTLSVTVTETETLDKPISEGEILFSCGQKLAPKILEDIGLYLTNLNDSLSSTLHDAVEMEDDPPSEGQVIRMSHKKFHADAILSFAKQNQESAVSQQAVYHSEDLENSVGELSEGQRPQLTAAAENILMGHSLYMQPPVTNTQSLDQQCDPKPLSRQFDTVSGSIYEDSCASHGPMSLGELELEPNSKLVLPTTLLTAQENDVNLPVAAEDFSQYQLKQNQDVKQVEHKPSQSYLRVRNKSDIAPSQQQVSPGDMDRTQIELNPYLTCVFSGGKAVPLSASQMPPAKMSVMLPSVNLEDCSQSLSLSTMQEDMESSGADTF

SEQ ID NO: 43400 - protein, 1463 aa, Homo sapiens
  Payload ID: 8919
  Gene Symbol: KIAA0586
  Gene Name: KIAA0586
  ENSP ID: ENSP00000481936
MVSESDFSKDVAVQVLPLDKIEENNKQKANDIFISQYTMGQKDALRTVLKQKAQSMPVFKEVKVHLLEDAGIEKDAVTQETRISPSGIDSATTVAAATAAAIATAAPLIKVQSDLEAKVNSVTELLSKLQETDKHLQRVTEQQTSIQRKQEKLHCHDHEKQMNVFMEQHIRHLEKLQQQQIDIQTHFISAALKTSSFQPVSMPSSRAVEKYSVKPEHPNLGSCNPSLYNTFASKQAPLKEVEDTSFDKQKSPLETPAPRRFAPVPVSRDDELSKRENLLEEKENMEVSCHRGNVRLLEQILNNNDSLTRKSESSNTTSLTRSKIGWTPEKTNRFPSCEELETTKVTMQKSDDVLHDLGQKEKETNSMVQPKESLSMLKLPDLPQNSVKLQTTNTTRSVLKDAEKILRGVQNNKKVLEENLEAIIRAKDGAAMYSLINALSTNREMSEKIRIRKTVDEWIKTISAEIQDELSRTDYEQKRFDQKNQRTKKGQNMTKDIRTNTQDKTVNKSVIPRKHSQKQIEEHFRNLPMRGMPASSLQKERKEGLLKATTVIQDEDYMLQVYGKPVYQGHRSTLKKGPYLRFNSPSPKSRPQRPKVIERVKGTKVKSIRTQTDFYATKPKKMDSKMKHSVPVLPHGDQQYLFSPSREMPTFSGTLEGHLIPMAILLGQTQSNSDTMPPAGVIVSKPHPVTVTTSIPPSSRKVETGVKKPNIAIVEMKSEKKDPPQLTVQVLPSVDIDSISNSSADVLSPLSSPKEASLPPVQTWIKTPEIMKVDEEEVKFPGTNFDEIIDVIQEEEKCDEIPDSEPILEFNRSVKADSTKYNGPPFPPVASTFQPTADILDKVIERKETLENSLIQWVEQEIMSRIISGLFPVQQQIAPSISVSVSETSEPLTSDIVEGTSSGALQLFVDAGVPVNSNVIKHFVNEALAETIAVMLGDREAKKQGPVATGVSGDASTNETYLPARVCTPLPTPQPTPPCSPSSPAKECVLVKTPDSSPCDSDHDMAFPVKEICAEKGDDMPAIMLVNTPTVTPTTTPPPAAAVFTPTLSDISIDKLKVSSPELPKPWGDGDLPLEEENPNSPQEELHPRAIVMSVAKDEEPESMDFPAQPPPPEPVPFMPFPAGTKAPSPSQMPGSDSSTLESTLSVTVTETETLDKPISEGEILFSCGQKLAPKILEDIGLYLTNLNDSLSSTLHDAVEMEDDPPSEGQVIRMSHKKFHADAILSFAKQNQESAVSQQAVYHSEDLENSVGELSEGQRPQLTAAAENILMGHSLYMQPPVTNTQSLDQQCDPKPLSRQFDTVSGSIYEDSCASHGPMSLGELELEPNSKLVLPTTLLTAQENDVNLPVAAEDFSQYQLKQNQDVKQVEHKPSQSYLRVRNKSDIAPSQQQVSPGDMDRTQIELNPYLTCVFSGGKAVPLSASQMPPAKMSVMLPSVNLEDCSQSLSLSTMQEDMESSGADTF

SEQ ID NO: 43401 - protein, 967 aa, Homo sapiens
  Payload ID: 8920
  Gene Symbol: KIAA0753
  Gene Name: KIAA0753
  Uniprot ID: Q2KHM9
  ENSP ID: ENSP00000355250
MGPGQPASTCVHLAPRTQLDGRSDPKVLQTQNQLQFNRNVPTHSSNLAIRYSCPHAIRIEKLKHSYNESYHCKDADCRVGPDLGSSVSFSVISQERLSYAVHLARRDVKRRQFEKHIKEHHLRSQPQSSQKCGHTKYKIPDHRVERKESKSQAACQCSHQPSKVEISSSGAKVYLYSSHPGQSDLTVPNSPPTHDPGLQPHPRIGDHKNISEQKSLLEVQRLQKELSSCIHKIEEVTKKDRLEEALDPDEERRIRIRRQEQAARSARMLYVLQQQVKEIQEELDKLSPHKIKHTKKSWAMSKLAAAHRGAIRALQMFVTQFTDRGEHPLPARCKELGSLIRQLSLCSVKLDADPSVPDVVIDILQQIEALESLLEKKLSPKKVKKCFSEIRSRFPIGSQKALERWPSTSPKGERRPLTAKDTFPQETSRPSVAKQLLADKYQPDTELPETQRLQSELDVLDADIVLEEGPFILDQSASFKDEVLAVAKTKAGKKKPVTENVPFRKKDTLAPARQQGLRKAERGRQSQPHSKSRVQQTTVSSRLKMNRQPVKDRKAPWIPPNPTSPPASPKCAAWLKVKTSPRDATKEPLQQEDPQEESHLTGAVEHEAARLAWLDAETSKRLKELEELKAKEIDSMQKQRLDWLDAETSRRTKELNELKAEEMYRLQQLSVSATHLADKVEEAVLDRLKPLLVKAQRVNSTTEANIHLKDGSSVNTAKAQPAQEVAAVDFESNNIRQLDDFLEDCASELWAVTHAKILGSETLATVEDSKDSPDLEIMMRRMEEMEKYQESVRQRYNKIAYADPRLWMQEENNDQKISAISEKPLSPHPIRITKTVDRKDPAVNIMLERPCNGNSLDESVGTEEGSEKREAPLLSLAEDSQQKEGRAPLFVPPGMQHSIGDYCSRFEQYLRIISHEAVGSFNPWLIAESFSEELVDEALGAVAAELQDMCEDYAEAVFTSEFLEAAT

SEQ ID NO: 43402 - protein, 45 aa, Homo sapiens
  Payload ID: 8920
  Gene Symbol: KIAA0753
  Gene Name: KIAA0753
  ENSP ID: ENSP00000444946
  MOD_RES (1)..(1): Any amino acid
XKALERWPSTSPKGERRPLTAKDTFPQETSRPSVAKQLLAGTPQS

SEQ ID NO: 43403 - protein, 72 aa, Homo sapiens
  Payload ID: 8920
  Gene Symbol: KIAA0753
  Gene Name: KIAA0753
  ENSP ID: ENSP00000458247
MGPGQPASTCVHLAPRTQLDGRSDPKVLQTQNQLQFNRNVPTHSSNLAIRYSCPHAIRIEKLKHSYNESYHC

SEQ ID NO: 43404 - protein, 87 aa, Homo sapiens
  Payload ID: 8920
  Gene Symbol: KIAA0753
  Gene Name: KIAA0753
  ENSP ID: ENSP00000458983
MGPGQPASTCVHLAPRTQLDGRSDPKVLQTQNQLQFNRNVPTHSSNLAIRYSCPHAIRIEKLKHSYNESYHCKDADCRVGPDLGSSV

SEQ ID NO: 43405 - protein, 69 aa, Homo sapiens
  Payload ID: 8920
  Gene Symbol: KIAA0753
  Gene Name: KIAA0753
  ENSP ID: ENSP00000459530
LTVPNSPPTHDPGLQPHPRIGDHKNISEQKSLLEVQRLQKELSSCIHKIEEVTKKVLILHCCRRDCSKT

SEQ ID NO: 43406 - protein, 668 aa, Homo sapiens
  Payload ID: 8920
  Gene Symbol: KIAA0753
  Gene Name: KIAA0753
  Uniprot ID: Q2KHM9
  ENSP ID: ENSP00000460050
MSKLAAAHRGAIRALQMFVTQFTDRGEHPLPARCKELGSLIRQLSLCSVKLDADPSVPDVVIDILQQIEALESLLEKKLSPKKVKKCFSEIRSRFPIGSQKALERWPSTSPKGERRPLTAKDTFPQETSRPSVAKQLLADKYQPDTELPETQRLQSELDVLDADIVLEEGPFILDQSASFKDEVLAVAKTKAGKKKPVTENVPFRKKDTLAPARQQGLRKAERGRQSQPHSKSRVQQTTVSSRLKMNRQPVKDRKAPWIPPNPTSPPASPKCAAWLKVKTSPRDATKEPLQQEDPQEESHLTGAVEHEAARLAWLDAETSKRLKELEELKAKEIDSMQKQRLDWLDAETSRRTKELNELKAEEMYRLQQLSVSATHLADKVEEAVLDRLKPLLVKAQRVNSTTEANIHLKDGSSVNTAKAQPAQEVAAVDFESNNIRQLDDFLEDCASELWAVTHAKILGSETLATVEDSKDSPDLEIMMRRMEEMEKYQESVRQRYNKIAYADPRLWMQEENNDQKISAISEKPLSPHPIRITKTVDRKDPAVNIMLERPCNGNSLDESVGTEEGSEKREAPLLSLAEDSQQKEGRAPLFVPPGMQHSIGDYCSRFEQYLRIISHEAVGSFNPWLIAESFSEELVDEALGAVAAELQDMCEDYAEAVFTSEFLEAAT

SEQ ID NO: 43407 - protein, 129 aa, Homo sapiens
  Payload ID: 8920
  Gene Symbol: KIAA0753
  Gene Name: KIAA0753
  ENSP ID: ENSP00000460156
RLWMQEENNDQKISAISEKPLSPHPIRITKTVDRKDPAVNIMLERPCNGNSLDESVGTEEGSEKREAPLLSLAEDSQQKEGRAPLFVPPGMQHSIGDYCSRFEQYLRIISHEAVGSFNPWLIAERQSEM

SEQ ID NO: 43408 - protein, 248 aa, Homo sapiens
  Payload ID: 8920
  Gene Symbol: KIAA0753
  Gene Name: KIAA0753
  ENSP ID: ENSP00000460816
MGPGQPASTCVHLAPRTQLDGRSDPKVLQTQNQLQFNRNVPTHSSNLAIRYSCPHAIRIEKLKHSYNESYHCKDADCRVGPDLGSSVSFSVISQERLSYAVHLARRDVKRRQFEKHIKEHHLRSQPQSSQKCGHTKYKIPDHRVERKESKSQAACQCSHQPSKVEISSSGAKVYLYSSHPGQSDLTVPNSPPTHDPGLQPHPRIGDHKNISEQKSLLEVQRLQKELSSCIHKIEEVTKKGKRNPGRIG

SEQ ID NO: 43409 - protein, 324 aa, Homo sapiens
  Payload ID: 8921
  Gene Symbol: KIAA0825
  Gene Name: KIAA0825
  Uniprot ID: Q8IV33
  ENSP ID: ENSP00000331385
MDWDDEYSHNSFDLHCLLNSFPGDLEFEQIFSDIDEKIEQNAASIKHCIKEIQSEINKQCPGVQLQTTTDCFEWLTNYNYSTSESSFISHGDLIKFFKTLQDLLKNEQNQEEMTLDLLWDLSCHSSVSFPSTLSGTSFHFLSRTSLHSVEDNSSMDVKSMWDDIRLHLRRFLVSKLQSHNEINNSQQKILLKKQCLQQLLFLYPESEVIIKYQNIQNKLLANLLWNCFPSYNRDSNLDVIAHGYQSTMLKLYSVIKEDFNTLCEILAPSSMVKFIKETYLDTVTEEMAKFLENFCELQFRENAVRVVKTSKSSSKHRGAVHALG

SEQ ID NO: 43410 - protein, 1237 aa, Homo sapiens
  Payload ID: 8921
  Gene Symbol: KIAA0825
  Gene Name: KIAA0825
  ENSP ID: ENSP00000400288
MDWDDEYSHNSFDLHCLLNSFPGDLEFEQIFSDIDEKIEQNAASIKHCIKEIQSEINKQCPGVQLQTTTDCFEWLTNYNYSTSESSFISHGDLIKFFKTLQDLLKNEQNQEEMTLDLLWDLSCHSSVSFPSTLSGTSFHFLSRTSLHSVEDNSSMDVKSMWDDIRLHLRRFLVSKLQSHNEINNSQQKILLKKQCLQQLLFLYPESEVIIKYQNIQNKLLANLLWNCFPSYNRDSNLDVIAHGYQSTMLKLYSVIKEDFNTLCEILAPSSMVKFIKETYLDTVTEEMAKFLENFCELQFRENAVRVVKTSKSSSKHRGAVHALVTTECPQKGRNFSLPLDKVEFLSQLIKSFMKLEKGVQELFDEILLSLKITRDTSGILEKSDREVVMEKPRANETNIPSEQSLPGKEATLLDFGWRSAFKEVSLPMAHCVVTAIEGFSTKILQQEQNERSSAVSYAMNLVNVQQVWQDSHMFPEEEQPKKIGKFCSDIMEKLDTMLPLALACRDDSFQEIRANLVEACCKVATAVLQRLQERAKEVPSKAPLKNLHTYLSTAVYVFQHFKRYDNLMKEMTKKPIFLVLVQRYQEFINTLQFQVTNYCVRVCATSILQDAESHHWDDYKAFYEGERCSFSIQMWHYFCWSLHYDLWTILPPKLAQEILVEVLEKSLSLLASRYARAHPSRKRTPQLRLDVTTILICTENMLWSVCTSVQKLLNPHQHTDDKIFKIHTHCNNLFTTLVILTSPLTELYKTFQHGLDESASDSLKSFFKQPLYWVSCISHFYPSLLRTPSAGGLKAEGQLKLLLSQPRCNWNLLLETLLHHDGLLLRILLKSSKQVSDTENNLNQGPSLMEAIFKILYHCSFSPQTFANVFVSYMEEEQLWDFLYNIPVSTCVEYELEVIRCLRLALTDAIKDTVQQIVSVMSSRRNCETNLNKHIVPDCLLESMPKEWNYSPKETNRKESCKSFTRLTAQAVSIVISKLPTVIACLPPPVKYFFFLSERKMSKKFVELKKAGLLVWNLIVIICRIFEDGNTVELLTGASLDRWSKEKLGLICMCLKSIMGDQTSIHNQMIQKVIQSIEQQKPNWIERQLLKARKLSTECAFMTIEKSTALQEGDVALELTEQKINTMVLDLCHKPGGREYLRQIYHIMQLNEEYLKEQLFSMNSSEEKPLPIRPLKTTLRSIEDQPSAFNPFHVYKAFSENMLDQVSITKWNWNWAKLLPNYLRLDKMTFSVLLKNR

SEQ ID NO: 43411 - protein, 1275 aa, Homo sapiens
  Payload ID: 8921
  Gene Symbol: KIAA0825
  Gene Name: KIAA0825
  ENSP ID: ENSP00000424618
MDWDDEYSHNSFDLHCLLNSFPGDLEFEQIFSDIDEKIEQNAASIKHCIKEIQSEINKQCPGVQLQTTTDCFEWLTNYNYSTSESSFISHGDLIKFFKTLQDLLKNEQNQEEMTLDLLWDLSCHSSVSFPSTLSGTSFHFLSRTSLHSVEDNSSMDVKSMWDDIRLHLRRFLVSKLQSHNEINNSQQKILLKKQCLQQLLFLYPESEVIIKYQNIQNKLLANLLWNCFPSYNRDSNLDVIAHGYQSTMLKLYSVIKEDFNTLCEILAPSSMVKFIKETYLDTVTEEMAKFLENFCELQFRENAVRVVKTSKSSSKHRGAVHALVTTECPQKGRNFSLPLDKVEFLSQLIKSFMKLEKGVQELFDEILLSLKITRDTSGILEKSDREVVMEKPRANETNIPSEQSLPGKEATLLDFGWRSAFKEVSLPMAHCVVTAIEGFSTKILQQEQNERSSAVSYAMNLVNVQQVWQDSHMFPEEEQPKKIGKFCSDIMEKLDTMLPLALACRDDSFQEIRANLVEACCKVATAVLQRLQERAKEVPSKAPLKNLHTYLSTAVYVFQHFKRYDNLMKEMTKKPIFLVLVQRYQEFINTLQFQVTNYCVRVCATSILQDAESHHWDDYKAFYEGERCSFSIQMWHYFCWSLHYDLWTILPPKLAQEILVEVLEKSLSLLASRYARAHPSRKRTPQLRLDVTTILICTENMLWSVCTSVQKLLNPHQHTDDKIFKIHTHCNNLFTTLVILTSPLTELYKTFQHGLDESASDSLKSFFKQPLYWVSCISHFYPSLLRTPSAGGLKAEGQLKLLLSQPRCNWNLLLETLLHHDGLLLRILLKSSKQVSDTENNLNQGPSLMEAIFKILYHCSFSPQTFANVFVSYMEEEQLWDFLYNIPVSTCVEYELEVIRCLRLALTDAIKDTVQQIVSVMSSRRNCETNLNKHIVPDCLLESMPKEWNYSPKETNRKESCKSFTRLTAQAVSIVISKLPTVIACLPPPVKYFFFLSERKMSKKFVELKKAGLLVWNLIVIICRIFEDGNTVELLTGASLDRWSKEKLGLICMCLKSIMGDQTSIHNQMIQKVIQSIEQQKPNWIERQLLKARKLSTECAFMTIEKSTALQEGDVALELTEQKINTMVLDLCHKPGGREYLRQIYHIMQLNEEYLKEQLFSMNSSEEKPLPIRPLKTTLRSIEDQPSAFNPFHVYKAFSENMLDQSAITKWNWNWAKLLPNYLRLDKMTFSVLLKNRWEMKKDETLEEEEKAILEHLKQICTPQNSSASDNIEEQ

SEQ ID NO: 43412 - protein, 520 aa, Homo sapiens
  Payload ID: 8922
  Gene Symbol: KIAA0895
  Gene Name: KIAA0895
  Uniprot ID: Q8NCT3
  ENSP ID: ENSP00000297063
MAGCTRKLTHLRKRIHRPRRRTTRRWKRWFKFRKRKGEKRPRPNHKAVARRAKLKFSTSEKLHWPEQELAKKSILNAEDSLIIDNKRSISHLSSGVLKDIFTTGTSSYNVLLQSKEEKKYHSQKQSSSTYSKRCRKPSKSPNTSRSKDPRRMKALVPVTSSGTWYCLERRPAVFVTSSVSSPVKFTHDISVTGNGIVLPPKPKSKVKWCHFSTLPKPKPQLSRSFEKGDDFSGKKFCILTAIKPTNLEKEKLRFFKSDYTYNPQFEYANPALPSVLAKHSHASDRFLKQIVVHLTEDLLSRASMTVVNGCPTLTINVSTAREHWLEGMLRHEIGTHYFRGINNLQQPWNSWTGRKKHELKPNNPTEEGLASIHSVLFRKDPFLWRAALLYYTVYQASQMSFCELFKDIGRFVKDPNTRWDYCVRAKRGWTDTSQPGCFSKDQVYLDGILQILRYRDTIDFHLLTALGKVSYEDVDRLKGLAVTENMRVPHFLQDHGRYMEHLEKIMEVNELTDRELKDLI

SEQ ID NO: 43413 - protein, 469 aa, Homo sapiens
  Payload ID: 8922
  Gene Symbol: KIAA0895
  Gene Name: KIAA0895
  Uniprot ID: Q8NCT3
  ENSP ID: ENSP00000319251
MLESIRVTEKLHWPEQELAKKSILNAEDSLIIDNKRSISHLSSGVLKDIFTTGTSSYNVLLQSKEEKKYHSQKQSSSTYSKRCRKPSKSPNTSRSKDPRRMKALVPVTSSGTWYCLERRPAVFVTSSVSSPVKFTHDISVTGNGIVLPPKPKSKVKWCHFSTLPKPKPQLSRSFEKGDDFSGKKFCILTAIKPTNLEKEKLRFFKSDYTYNPQFEYANPALPSVLAKHSHASDRFLKQIVVHLTEDLLSRASMTVVNGCPTLTINVSTAREHWLEGMLRHEIGTHYFRGINNLQQPWNSWTGRKKHELKPNNPTEEGLASIHSVLFRKDPFLWRAALLYYTVYQASQMSFCELFKDIGRFVKDPNTRWDYCVRAKRGWTDTSQPGCFSKDQVYLDGILQILRYRDTIDFHLLTALGKVSYEDVDRLKGLAVTENMRVPHFLQDHGRYMEHLEKIMEVNELTDRELKDLI

SEQ ID NO: 43414 - protein, 507 aa, Homo sapiens
  Payload ID: 8922
  Gene Symbol: KIAA0895
  Gene Name: KIAA0895
  Uniprot ID: Q8NCT3
  ENSP ID: ENSP00000344805
MVATGWARRSGLHPAPRPLRGAQEALAKNLWREERNRPLILSSLIIKKLHWPEQELAKKSILNAEDSLIIDNKRSISHLSSGVLKDIFTTGTSSYNVLLQSKEEKKYHSQKQSSSTYSKRCRKPSKSPNTSRSKDPRRMKALVPVTSSGTWYCLERRPAVFVTSSVSSPVKFTHDISVTGNGIVLPPKPKSKVKWCHFSTLPKPKPQLSRSFEKGDDFSGKKFCILTAIKPTNLEKEKLRFFKSDYTYNPQFEYANPALPSVLAKHSHASDRFLKQIVVHLTEDLLSRASMTVVNGCPTLTINVSTAREHWLEGMLRHEIGTHYFRGINNLQQPWNSWTGRKKHELKPNNPTEEGLASIHSVLFRKDPFLWRAALLYYTVYQASQMSFCELFKDIGRFVKDPNTRWDYCVRAKRGWTDTSQPGCFSKDQVYLDGILQILRYRDTIDFHLLTALGKVSYEDVDRLKGLAVTENMRVPHFLQDHGRYMEHLEKIMEVNELTDRELKDLI

SEQ ID NO: 43415 - protein, 417 aa, Homo sapiens
  Payload ID: 8922
  Gene Symbol: KIAA0895
  Gene Name: KIAA0895
  Uniprot ID: Q8NCT3
  ENSP ID: ENSP00000389985
MKALVPVTSSGTWYCLERRPAVFVTSSVSSPVKFTHDISVTGNGIVLPPKPKSKVKWCHFSTLPKPKPQLSRSFEKGDDFSGKKFCILTAIKPTNLEKEKLRFFKSDYTYNPQFEYANPALPSVLAKHSHASDRFLKQSINIMELTLQKYGSYEKFEQATGGSLLSKTRIWSHVRKYMMKEGCLGEIVVHLTEDLLSRASMTVVNGCPTLTINVSTAREHWLEGMLRHEIGTHYFRGINNLQQPWNSWTGRKKHELKPNNPTEEGLASIHSVLFRKDPFLWRAALLYYTVYQASQMSFCELFKDIGRFVKDPNTRWDYCVRAKRGWTDTSQPGCFSKDQVYLDGILQILRYRDTIDFHLLTALGKVSYEDVDRLKGLAVTENMRVPHFLQDHGRYMEHLEKIMEVNELTDRELKDLI

SEQ ID NO: 43416 - protein, 275 aa, Homo sapiens
  Payload ID: 8922
  Gene Symbol: KIAA0895
  Gene Name: KIAA0895
  ENSP ID: ENSP00000390183
MELTLQKYGSYEKFEQATGGSLLSKTRIWSHVRKYMMKEGCLGEIVVHLTEDLLSRASMTVVNGCPTLTINVSTAREHWLEGMLRHEIGTHYFRGINNLQQPWNSWTGRKKHELKPNNPTEEGLASIHSVLFRKDPFLWRAALLYYTVYQASQMSFCELFKDIGRFVKDPNTRWDYCVRAKRGWTDTSQPGCFSKDQVYLDGILQILRYRDTIDFHLLTALGKVSYEDVDRLKGLAVTENMRVPHFLQDHGRYMEHLEKIMEVNELTDRELKDLI

SEQ ID NO: 43417 - protein, 141 aa, Homo sapiens
  Payload ID: 8922
  Gene Symbol: KIAA0895
  Gene Name: KIAA0895
  ENSP ID: ENSP00000390527
MAGCTRKLTHLRKRIHRPRRRTTRRWKRWFKFRKRKGEKRPRPNHKAVARRAKLKFSTSGNGIVLPPKPKSKVKWCHFSTLPKPKPQLSRSFEKGDDFSGKKFCILTAIKPTNLEKEKLRFFKSDYTYNPQFEYANPALPS

SEQ ID NO: 43418 - protein, 517 aa, Homo sapiens
  Payload ID: 8922
  Gene Symbol: KIAA0895
  Gene Name: KIAA0895
  Uniprot ID: Q8NCT3
  ENSP ID: ENSP00000390837
MLESIRVTEKLHWPEQELAKKSILNAEDSLIIDNKRSISHLSSGVLKDIFTTGTSSYNVLLQSKEEKKYHSQKQSSSTYSKRCRKPSKSPNTSRSKDPRRMKALVPVTSSGTWYCLERRPAVFVTSSVSSPVKFTHDISVTGNGIVLPPKPKSKVKWCHFSTLPKPKPQLSRSFEKGDDFSGKKFCILTAIKPTNLEKEKLRFFKSDYTYNPQFEYANPALPSVLAKHSHASDRFLKQSINIMELTLQKYGSYEKFEQATGGSLLSKTRIWSHVRKYMMKEGCLGEIVVHLTEDLLSRASMTVVNGCPTLTINVSTAREHWLEGMLRHEIGTHYFRGINNLQQPWNSWTGRKKHELKPNNPTEEGLASIHSVLFRKDPFLWRAALLYYTVYQASQMSFCELFKDIGRFVKDPNTRWDYCVRAKRGWTDTSQPGCFSKDQVYLDGILQILRYRDTIDFHLLTALGKVSYEDVDRLKGLAVTENMRVPHFLQDHGRYMEHLEKIMEVNELTDRELKDLI

SEQ ID NO: 43419 - protein, 97 aa, Homo sapiens
  Payload ID: 8922
  Gene Symbol: KIAA0895
  Gene Name: KIAA0895
  ENSP ID: ENSP00000399935
MELTLQKYGSYEKFEQATGGSLLSKTRIWSHVRKYMMKEGCLGEIVVHLTEDLLSRASMTVVNGCPTLTINVSTAREHWLEGMLRHEIGTHYFRGIN

SEQ ID NO: 43420 - protein, 304 aa, Homo sapiens
  Payload ID: 8922
  Gene Symbol: KIAA0895
  Gene Name: KIAA0895
  Uniprot ID: Q8NCT3
  ENSP ID: ENSP00000400749
MVATGWARRSGLHPAPRPLRGAQEALAKNLWREERNRPLILSSLIIKKLHWPEQELAKKSILNAEDSLIIDNKRSISHLSSGVLKDIFTTGTSSYNVLLQSKEEKKYHSQKQSSSTYSKRCRKPSKSPNTSRSKDPRRMKALVPVTSSGTWYCLERRPAVFVTSSVSSPVKFTHDISVTGNGIVLPPKPKSKVKWCHFSTLPKPKPQLSRSFEKGDDFSGKKFCILTAIKPTNLEKEKLRFFKSDYTYNPQFEYANPALPSVLAKHSHASDRFLKQVKCHFNSGSSFLCTKTIICDLISKNKDI

SEQ ID NO: 43421 - protein, 471 aa, Homo sapiens
  Payload ID: 8923
  Gene Symbol: KIAA0895L
  Gene Name: KIAA0895-like
  Uniprot ID: Q68EN5
  ENSP ID: ENSP00000290881
MVLDSGAQAYDQAPPSPPTSPPSLRHRLKPSDRDGPPLYPWSQSLALPLALAVPPALQPQPEQQPFSQMLLGHRGHMRRSESTYSVNSTGRRGRGTLGRPPPGRGRNPGGGTLRPAASLPHIAKTQRDAGHIASKSPCMLVALRPTNMDRERDKFFQSHYTYNPQFEYQEPMPTAVLEKYCEASGQFIHQAVGIIEAVLEKFGTYEHFEAATGGQLLTKCQIWSIVRKYMQKEGCAGEVVVQLSEDLLSQAVMMVENSRPTLAINLTGARQYWLEGMLRHEIGTHYLRGVNNARQPWHNAEGRLRYGLRPANPTEEGLASLHSVLFRKQPFLWRAALLYYTIHRAARMSFRQLFQDLERYVQDADVRWEYCVRAKRGQTDTSLPGCFSKDQVYLDGIVRILRHRQTIDFPLLTSLGKVSYEDVDHLRPHGVLDNTRVPHFMQDLARYRQQLEHIMATNRLDEAELGRLLPD

SEQ ID NO: 43422 - protein, 471 aa, Homo sapiens; identical to SEQ ID NO: 43421
  Payload ID: 8923
  Gene Symbol: KIAA0895L
  Gene Name: KIAA0895-like
  Uniprot ID: Q68EN5
  ENSP ID: ENSP00000456838

SEQ ID NO: 43423 - protein, 408 aa, Homo sapiens
  Payload ID: 8923
  Gene Symbol: KIAA0895L
  Gene Name: KIAA0895-like
  Uniprot ID: Q68EN5
  ENSP ID: ENSP00000457099
MVLDSGAQAYDQAPPSPPTSPPSLRHRLKPSDRDGPPLYPWSQSLALPLALAVPPALQPQPEQQPFSQMLLGHRGHMRRSESTYSVNSTGRRGRGTLGRPPPGRGRNPGGGTLRPAASLPHIAKTQRDAGHIASKSPCMLVALRPTNMDRERDKFFQSHYTYNPQFEYQEPMPTAVLEKYCEASGQFIHQAVGIIEAVLEKFGTYEHFEAATGGQLLTKCQIWSIVRKYMQKEGCAGEVVVQLSEDLLSQAVMMVENSRPTLAINLTGARQYWLEGMLRHEIGTHYLRGVNNARQPWHNAEGRLRYGLRPANPTEEGLASLHSVLFRKQPFLWRAALLYYTIHRAARMSFRQLFQDLERYVQDADVRWEYCVRAKRGQTDTSLPARTRCTWTASCAFCDIARPSISRC

SEQ ID NO: 43424 - protein, 205 aa, Homo sapiens
  Payload ID: 8923
  Gene Symbol: KIAA0895L
  Gene Name: KIAA0895-like
  ENSP ID: ENSP00000459322
  MOD_RES (1)..(1): Any amino acid
XSGQFIHQAVGIIEAVLEKFGTYEHFEAATGGQLLTKCQIWSIVRKYMQKEGCAGEVVVQLSEDLLSQAVMMVENSRPTLAINLTGARQYWLEGMLRHEIGTHYLRGVNNARQPWHNAEGRLRYGLRPANPTEEGLASLHSVLFRKQPFLWRAALLYYTIHRAARMSFRQLFQDLERYVQDADVRWEYCVRAKRGQTDTSLPGVL

SEQ ID NO: 43425 - protein, 384 aa, Homo sapiens
  Payload ID: 8924
  Gene Symbol: KIAA0907
  Gene Name: KIAA0907
  Uniprot ID: Q7Z7F0
  ENSP ID: ENSP00000357302
MSAGSATHPGAGGRRSKWDQPAPAPLLFLPPAAPGGEVTSSGGSPGGTTAAPSGALDAAAAVAAKINAMLMAKGKLKPTQNASEKLQAPGKGLTSNKSKDDLVVAEVEINDVPLTCRNLLTRGQTQDEISRLSGAAVSTRGRFMTTEEKAKVGPGDRPLYLHVQGQTRELVDRAVNRIKEIITNGVVKAATGTSPTFNGATVTVYHQPAPIAQLSPAVSQKPPFQSGMHYVQDKLFVGLEHAVPTFNVKEKVEGPGCSYLQHIQIETGAKVFLRGKGSGCIEPASGREAFEPMYIYISHPKPEGLAAAKKLCENLLQTVHAEYSRFVNQINTAVPLPAASSTSLRSTKHSATSCFISTWSLAGITYWSPTCANTIPDNTSAASS

SEQ ID NO: 43426 - protein, 564 aa, Homo sapiens
  Payload ID: 8924
  Gene Symbol: KIAA0907
  Gene Name: KIAA0907
  Uniprot ID: Q7Z7F0
  ENSP ID: ENSP00000357303
MSAGSATHPGAGGRRSKWDQPAPAPLLFLPPAAPGGEVTSSGGSPGGTTAAPSGALDAAAAVAAKINAMLMAKGKLKPTQNASEKLQAPGKGLTSNKSKDDLVVAEVEINDVPLTCRNLLTRGQTQDEISRLSGAAVSTRGRFMTTEEKAKVGPGDRPLYLHVQGQTRELVDRAVNRIKEIITNGVVKAATGTSPTFNGATVTVYHQPAPIAQLSPAVSQKPPFQSGMHYVQDKLFVGLEHAVPTFNVKEKVEGPGCSYLQHIQIETGAKVFLRGKGSGCIEPASGREAFEPMYIYISHPKPEGLAAAKKLCENLLQTVHAEYSRFVNQINTAVPLPGYTQPSAISSVPPQPPYYPSNGYQSGYPVVPPPQQPVQPPYGVPSIVPPAVSLAPGVLPALPTGVPPVPTQYPITQVQPPASTGQSPMGGPFIPAAPVKTALPAGPQPQPQPQPPLPSQPQAQKRRFTEELPDERESGLLGYQHGPIHMTNLGTGFSSQNEIEGAGSKPASSSGKERERDRQLMPPPAFPVTGIKTESDERNGSGTLTGSHGECDIAGGTGEWLRLV

SEQ ID NO: 43427 - protein, 614 aa, Homo sapiens [sequence omitted]

SEQ ID NO: 43428 - protein, 1387 aa, Homo sapiens
  Payload ID: 8925
  Gene Symbol: KIAA0922
  Gene Name: KIAA0922
  ENSP ID: ENSP00000240487
PVPCRVIPAMGKTSFRIIFLPTEEGSIESSLFINTSSYGVLSYHVSGIGTRRISTEGSAKQLPNAYFLLPKVQSIQLSQMQAETTNTSLLQVQLECSLHNKVCQQLKGCYLESDDVLRLQMSIMVTMENFSKEFEENTQHLLDHLSIVYVATDESETSDDSAVNMYILHSGNSLIWIQDIRHFSQRDALSLQFEPVLLPTSTTNFTKIASFTCKAATSCDSGIIEDVKKTTHTPTLKACLFSSVAQGYFRMDSSATQFHIETHENTSGLWSIWYRNHFDRSVVLNDVFLSKETKHMLKILNFTGPLFLPPGCWNIFSLKLAVKDIAINLFTNVFLTTNIGAIFAIPLQIYSAPTKEGSLGFEVIAHCGMHYFMGKSKAGNPNWNGSLSLDQSTWNVDSELANKLYERWKKYKNGDVCKFGTDMQMINFTTGEFQLTEACPYLGTHSEESRFGILHLHLQPLEMKRVGVVFTPADYGKVTSLILIRNNLTVIDMIGVEGFGARELLKVGGRLPGAGGSLRFKVPESTLMDCRRQLKDSKQILSITKNFKVENIGPLPITVSSLKINGYNCQGYGFEVLDCHQFSLDPNTSRDISIVFTPDFTSSWVIRDLSLVTAADLEFRFTLNVTLPHHLLPLCADVVPGPSWEESFWRLTVFFVSLSLLGVILIAFQQAQYILMEFMKTRQRQNASSSSQQNNGPMDVISPHSYKSNCKNFLDTYGPSDKGRGKNCLPVNTPQSRIQNAAKRSPATYGHSQKKHKCSVYYSKHKTSTAAASSTSTTTEEKQTSPLGSSLPAAKEDICTDAMRENWISLRYASGINVNLQKNLTLPKNLLNKEENTLKNTIVFSNPSSECSMKEGIQTCMFPKETDIKTSENTAEFKERELCPLKTSKKLPENHLPRNSPQYHQPDLPEISRKNNGNNQQVPVKNEVDHCENLKKVDTKPSSEKKIHKTSREDMFSEKQDIPFVEQEDPYRKKKLQEKREGNLQNLNWSKSRTCRKNKKRGVAPVSRPPEQSDLKLVCSDFERSELSSDINVRSWCIQESTREVCKADAEIASSLPAAQREAEGYYQKPEKKCVDKFCSDSSSDCGSSSGSVRASRGSWGSWSSTSSSDGDKKPMVDAQHFLPAGDSVSQNDFPSEAPISLNLSHNICNPMTVNSLPQYAEPSCPSLPAGPTGVEEDKGLYSPGDLWPTPPVCVTSSLNCTLENGVPCVIQESAPVHNSFIDWSATCEGQFSSAYCPLELNDYNAFPEENMNYANGFPCPADVQTDFIDHNSQSTWNTPPNMPAAWGHASFISSPPYLTSTRSLSPMSGLFGSIWAPQSDVYENCCPINPTTEHSTHMENQAVVCKEYYPGFNPFRAYMNLDIWTTTANRNANFPLSRDSSYCGNV

SEQ ID NO: 43429 - protein, 1609 aa, Homo sapiens
  Payload ID: 8925
  Gene Symbol: KIAA0922
  Gene Name: KIAA0922
  Uniprot ID: A2VDJ0
  ENSP ID: ENSP00000386574
MAGLRRPQPGCYCRTAAAVNLLLGVFQVLLPCCRPGGAQGQAIEPLPNVVELWQAEEGELLLPTQGDSEEGLEEPSQEQSFSDKLFSGKGLHFQPSVLDFGIQFLGHPVAKILHAYNPSRDSEVVVNSVFAAAGHFHVPPVPCRVIPAMGKTSFRIIFLPTEEGSIESSLFINTSSYGVLSYHVSGIGTRRISTEGSAKQLPNAYFLLPKVQSIQLSQMQAETTNTSLLQVQLECSLHNKVCQQLKGCYLESDDVLRLQMSIMVTMENFSKEFEENTQHLLDHLSIVYVATDESETSDDSAVNMYILHSGNSLIWIQDIRHFSQRDALSLQFEPVLLPTSTTNFTKIASFTCKATSCDSGIIEDVKKTTHTPTLKACLFSSVAQGYFRMDSSATQFHIETHENTSGLWSIWYRNHFDRSVVLNDVFLSKETKHMLKILNFTGPLFLPPGCWNIFSLKLAVKDIAINLFTNVFLTTNIGAIFAIPLQIYSAPTKEGSLGFEVIAHCGMHYFMGKSKAGNPNWNGSLSLDQSTWNVDSELANKLYERWKKYKNGDVCKRNVLGTTRFAHLKKSKESESFVFFLPRLIAEPGLMLNFSATALRSRMIKYFVVQNPSSWPVSLQLLPLSLYPKPEALVHLLHRWFGTDMQMINFTTGEFQLTEACPYLGTHSEESRFGILHLHLQPLEMKRVGVVFTPADYGKVTSLILIRNNLTVIDMIGVEGFGARELLKVGGRLPGAGGSLRFKVPESTLMDCRRQLKDSKQILSITKNFKVENIGPLPITVSSLKINGYNCQGYGFEVLDCHQFSLDPNTSRDISIVFTPDFTSSWVIRDLSLVTAADLEFRFTLNVTLPHHLLPLCADVVPGPSWEESFWRLTVFFVSLSLLGVILIAFQQAQYILMEFMKTRQRQNASSSSQQNNGPMDVISPHSYKSNCKNFLDTYGPSDKGRGKNCLPVNTPQSRIQNAAKRSPATYGHSQKKHKCSVYYSKHKTSTAAASSTSTTTEEKQTSPLGSSLPAAKEDICTDAMRENWISLRYASGINVNLQKNLTLPKNLLNKEENTLKNTIVFSNPSSECSMKEGIQTCMFPKETDIKTSENTAEFKERELCPLKTSKKLPENHLPRNSPQYHQPDLPEISRKNNGNNQQVPVKNEVDHCENLKKVDTKPSSEKKIHKTSREDMFSEKQDIPFVEQEDPYRKKKLQEKREGNLQNLNWSKSRTCRKNKKRGVAPVSRPPEQSDLKLVCSDFERSELSSDINVRSWCIQESTREVCKADAEIASSLPAAQREAEGYYQKPEKKCVDKFCSDSSSDCGSSSGSVRASRGSWGSWSSTSSSDGDKKPMVDAQHFLPAGDSVSQNDFPSEAPISLNLSHNICNPMTVNSLPQYAEPSCPSLPAGPTGVEEDKGLYSPGDLWPTPPVCVTSSLNCTLENGVPCVIQESAPVHNSFIDWSATCEGQFSSAYCPLELNDYNAFPEENMNYANGFPCPADVQTDFIDHNSQSTWNTPPNMPAAWGHASFISSPPYLTSTRSLSPMSGLFGSIWAPQSDVYENCCPINPTTEHSTHMENQAVVCKEYYPGFNPFRAYMNLDIWTTTANRNANFPLSRDSSYCGNV

SEQ ID NO: 43430 - protein, 1610 aa, Homo sapiens
  Payload ID: 8925
  Gene Symbol: KIAA0922
  Gene Name: KIAA0922
  Uniprot ID: A2VDJ0
  ENSP ID: ENSP00000386787
MAGLRRPQPGCYCRTAAAVNLLLGVFQVLLPCCRPGGAQGQAIEPLPNVVELWQAEEGELLLPTQGDSEEGLEEPSQEQSFSDKLFSGKGLHFQPSVLDFGIQFLGHPVAKILHAYNPSRDSEVVVNSVFAAAGHFHVPPVPCRVIPAMGKTSFRIIFLPTEEGSIESSLFINTSSYGVLSYHVSGIGTRRISTEGSAKQLPNAYFLLPKVQSIQLSQMQAETTNTSLLQVQLECSLHNKVCQQLKGCYLESDDVLRLQMSIMVTMENFSKEFEENTQHLLDHLSIVYVATDESETSDDSAVNMYILHSGNSLIWIQDIRHFSQRDALSLQFEPVLLPTSTTNFTKIASFTCKAATSCDSGIIEDVKKTTHTPTLKACLFSSVAQGYFRMDSSATQFHIETHENTSGLWSIWYRNHFDRSVVLNDVFLSKETKHMLKILNFTGPLFLPPGCWNIFSLKLAVKDIAINLFTNVFLTTNIGAIFAIPLQIYSAPTKEGSLGFEVIAHCGMHYFMGKSKAGNPNWNGSLSLDQSTWNVDSELANKLYERWKKYKNGDVCKRNVLGTTRFAHLKKSKESESFVFFLPRLIAEPGLMLNFSATALRSRMIKYFVVQNPSSWPVSLQLLPLSLYPKPEALVHLLHRWFGTDMQMINFTTGEFQLTEACPYLGTHSEESRFGILHLHLQPLEMKRVGVVFTPADYGKVTSLILIRNNLTVIDMIGVEGFGARELLKVGGRLPGAGGSLRFKVPESTLMDCRRQLKDSKQILSITKNFKVENIGPLPITVSSLKINGYNCQGYGFEVLDCHQFSLDPNTSRDISIVFTPDFTSSWVIRDLSLVTAADLEFRFTLNVTLPHHLLPLCADVVPGPSWEESFWRLTVFFVSLSLLGVILIAFQQAQYILMEFMKTRQRQNASSSSQQNNGPMDVISPHSYKSNCKNFLDTYGPSDKGRGKNCLPVNTPQSRIQNAAKRSPATYGHSQKKHKCSVYYSKHKTSTAAASSTSTTTEEKQTSPLGSSLPAAKEDICTDAMRENWISLRYASGINVNLQKNLTLPKNLLNKEENTLKNTIVFSNPSSECSMKEGIQTCMFPKETDIKTSENTAEFKERELCPLKTSKKLPENHLPRNSPQYHQPDLPEISRKNNGNNQQVPVKNEVDHCENLKKVDTKPSSEKKIHKTSREDMFSEKQDIPFVEQEDPYRKKKLQEKREGNLQNLNWSKSRTCRKNKKRGVAPVSRPPEQSDLKLVCSDFERSELSSDINVRSWCIQESTREVCKADAEIASSLPAAQREAEGYYQKPEKKCVDKFCSDSSSDCGSSSGSVRASRGSWGSWSSTSSSDGDKKPMVDAQHFLPAGDSVSQNDFPSEAPISLNLSHNICNPMTVNSLPQYAEPSCPSLPAGPTGVEEDKGLYSPGDLWPTPPVCVTSSLNCTLENGVPCVIQESAPVHNSFIDWSATCEGQFSSAYCPLELNDYNAFPEENMNYANGFPCPADVQTDFIDHNSQSTWNTPPNMPAAWGHASFISSPPYLTSTRSLSPMSGLFGSIWAPQSDVYENCCPINPTTEHSTHMENQAVVCKEYYPGFNPFRAYMNLDIWTTTANRNANFPLSRDSSYCGNV

SEQ ID NO: 43431 - protein, 71 aa, Homo sapiens
  Payload ID: 8925
  Gene Symbol: KIAA0922
  Gene Name: KIAA0922
  ENSP ID: ENSP00000413054
MAGLRRPQPGCYCRTAAAVNLLLGVFQVLLPCCRPGGAQGQAIEPLPNVVELWQAEEGELLLPTQLLGQTI

SEQ ID NO: 43432 - protein, 409 aa, Homo sapiens
  Payload ID: 8926
  Gene Symbol: KIAA0930
  Gene Name: KIAA0930
  Uniprot ID: Q6ICG6
  ENSP ID: ENSP00000251993
MGSQAAAEWRNWASWEVSSSLSGCSMGCFKDDRIVFWTWMFSTYFMEKWAPRQDDMLFYVRRKLAYSGSESGADGRKAAEPEVEVEVYRRDSKKLPGLGDPDIDWEESVCLNLILQKLDYMVTCAVCTRADGGDIHIHKKKSQQVFASPSKHPMDSKGEESKISYPNIFFMIDSFEEVFSDMTVGEGEMVCVELVASDKTNTFQGVIFQGSIRYEALKKVYDNRVSVAARMAQKMSFGFYKYSNMEFVRMKGPQGKGHAEMAVSRVSTGDTSPCGTEEDSSPASPMHERVTSFSTPPTPERNNRPAFFSPSLKRKVPRNRIAEMKKSHSANDSEEFFREDDGGADLHNATNLRSRSLSGTGRSLVGSWLKLNRADGNFLLYAHLTYVTLPLHRILTDILEVRQKPILMT

SEQ ID NO: 43433 - protein, 404 aa, Homo sapiens
  Payload ID: 8926
  Gene Symbol: KIAA0930
  Gene Name: KIAA0930
  Uniprot ID: Q6ICG6
  ENSP ID: ENSP00000336720
MLRAIAEERGRLSLRREVCGLGCFKDDRIVFWTWMFSTYFMEKWAPRQDDMLFYVRRKLAYSGSESGADGRKAAEPEVEVEVYRRDSKKLPGLGDPDIDWEESVCLNLILQKLDYMVTCAVCTRADGGDIHIHKKKSQQVFASPSKHPMDSKGEESKISYPNIFFMIDSFEEVFSDMTVGEGEMVCVELVASDKTNTFQGVIFQGSIRYEALKKVYDNRVSVAARMAQKMSFGFYKYSNMEFVRMKGPQGKGHAEMAVSRVSTGDTSPCGTEEDSSPASPMHERVTSFSTPPTPERNNRPAFFSPSLKRKVPRNRIAEMKKSHSANDSEEFFREDDGGADLHNATNLRSRSLSGTGRSLVGSWLKLNRADGNFLLYAHLTYVTLPLHRILTDILEVRQKPILMT

SEQ ID NO: 43434 - protein, 370 aa, Homo sapiens
  Payload ID: 8926
  Gene Symbol: KIAA0930
  Gene Name: KIAA0930
  Uniprot ID: Q6ICG6
  ENSP ID: ENSP00000375485
MFSTYFMEKWAPRQDDMLFYVRRKLAYSGSESGADGRKAAEPEVEVEVYRRDSKKLPGLGDPDIDWEESVCLNLILQKLDYMVTCAVCTRADGGDIHIHKKKSQQVFASPSKHPMDSKGEESKISYPNIFFMIDSFEEVFSDMTVGEGEMVCVELVASDKTNTFQGVIFQGSIRYEALKKVYDNRVSVAARMAQKMSFGFYKYSNMEFVRMKGPQGKGHAEMAVSRVSTGDTSPCGTEEDSSPASPMHERVTSFSTPPTPERNNRPAFFSPSLKRKVPRNRIAEMKKSHSANDSEEFFREDDGGADLHNATNLRSRSLSGTGRSLVGSWLKLNRADGNFLLYAHLTYVTLPLHRILTDILEVRQKPILMT

SEQ ID NO: 43435 - protein, 152 aa, Homo sapiens
  Payload ID: 8926
  Gene Symbol: KIAA0930
  Gene Name: KIAA0930
  ENSP ID: ENSP00000392752
MGVGCFKDDRIVFWTWMFSTYFMEKWAPRQDDMLFYVRRKLAYSGSESGADGRKAAEPEVEVEVYRRDSKKLPGLGDPDIDWEESVCLNLILQKLDYMVTCAVCTRADGGDIHIHKKKSQQVFASPSKHPMDSKGEESKISYPNIFFMIDSF

SEQ ID NO: 43436 - protein, 84 aa, Homo sapiens
  Payload ID: 8926
  Gene Symbol: KIAA0930
  Gene Name: KIAA0930
  ENSP ID: ENSP00000395994
MLRAIAEERGRLSLRREVCGLGPHAAPGAEQAHRTGYEAQPHELARCPDLKVSVSLTVKWLLGGHTCGLGIVKALRGFHSVVQV

SEQ ID NO: 43437 - protein, 289 aa, Homo sapiens
  Payload ID: 8926
  Gene Symbol: KIAA0930
  Gene Name: KIAA0930
  ENSP ID: ENSP00000399125
GDPDIDWEESVCLNLILQKKKSQQVFASPSKHPMDSKGEESKISYPNIFFMIDSFEEVFSDMTVGEGEMVCVELVASDKTNTFQGVIFQGSIRYEALKKVYDNRVSVAARMAQKMSFGFYKYSNMEFVRMKGPQGKGHAEMAVSRVSTGDTSPCGTEEDSSPASPMHERVTSFSTPPTPERNNRPAFFSPSLKRKVPRNRIAEMKKSHSANDSEEFFREDDGGADLHNATNLRSRSLSGTGRSLVGSWLKLNRADGNFLLYAHLTYVTLPLHRILTDILEVRQKPILMT

SEQ ID NO: 43438 - protein, 70 aa, Homo sapiens
  Payload ID: 8926
  Gene Symbol: KIAA0930
  Gene Name: KIAA0930
  ENSP ID: ENSP00000402514
FWTWMFSTYFMEKWAPRQDDMLFYVRRKLAYSGSESGADGRKIPALPLGGAGLCTCKRAQQCPAPRSPSQ

SEQ ID NO: 43439 - protein, 136 aa, Homo sapiens
  Payload ID: 8926
  Gene Symbol: KIAA0930
  Gene Name: KIAA0930
  ENSP ID: ENSP00000403030
MFSTYFMEKWAPRQDDMLFYVRRKLAYSGSESGADGRKAAEPEVEVEVYRRDSKKLPGLGDPDIDWEESVCLNLILQKLDYMVTCAVCTRADGGDIHIHKKKSQQVFASPSKHPMDSKGEESKISYPNIFFMIDSF

SEQ ID NO: 43440 - protein, 85 aa, Homo sapiens
  Payload ID: 8926
  Gene Symbol: KIAA0930
  Gene Name: KIAA0930
  ENSP ID: ENSP00000477148
MGSQAAAEWRNWASWEVSSSLSGCSMGCFKDDRIVFWTWMFSTYFMEKWAPRQDDMLFYVRRKLAYSGSESGADGRKMRKRRARR

SEQ ID NO: 43441 - protein, 89 aa, Homo sapiens
  Payload ID: 8926
  Gene Symbol: KIAA0930
  Gene Name: KIAA0930
  ENSP ID: ENSP00000477454
MWGYGRSLAKAMLQGPGWPSFLTPVWPPSAGCFKDDRIVFWTWMFSTYFMEKWAPRQDDMLFYVRRKLAYSGSESGADGRKMRKRRARR

SEQ ID NO: 43442 - protein, 916 aa, Homo sapiens
  Payload ID: 8927
  Gene Symbol: KIAA1024
  Gene Name: KIAA1024
  Uniprot ID: Q9UPX6
  ENSP ID: ENSP00000307461
METSQETSLFLVKILEELDSKQNTVSYQDLCKSLCARFDLSQLAKLRSVLFYTACLDPNFPATLFKDKMKCTVNNQQSKKIMVAADIVTIFNLIQMNGGAAKEKLPTGRQKVRKKEASFESCRSDTEICNAAECEPLNCELSERSFSRGYPIRQSSKCRKMDCKDCPQFVPASEPNFLLGVSKEVKNRAASLDRLQALAPYSVTSPQPCEMQRTYFPMNIENESISDQDSLPINQSIKETFISNEEPFVVQSCVQKRNIFKEDFHNLMAVSPSLVGPISKAENEHREPQSRKEPHKPPFFNHSFEMPYNSQYLNPVYSPVPDKRRAKHESLDDLQASTYFGPTPVMGTQEARRCLGKPNKQTPWPAKSWSLNTEEVPDFERSFFNRNPSEEKLHYPNASSQTPNFPAPERRPTYLVPKDQQPILPIAYAAKQNGLKSKEISSPVDLEKHEPVKKFKDKSINCTSGQLSSDTSSVGTQTEHVLEPKKCRDLCTSGQGKYSDRHTMKHSDDDSEIVSDDISDIFRFLDDMSISGSTGVIQSSCYNSTGSLSQLHKSDCDSSPEHNLTKIANGVPNSKGDKGNRPENTHHSEEELKTSVCKLVLRIGEIERKLESLSGVRDEISQVLGKLNKLDQKMQQPEKVSVQIDLNSLTSEGPSDDSASPRMFHAHSGSHGPKLENNPDWCCSDASGSNSESLRVKALKKSLFTRPSSRSLTEENSATESKIASISNSPRDWRTITYTNRVGLNEEEIKDTGPGDNKDWHRKSKEADRQYDIPPQHRLPKQPKDGFLVEQVFSPHPYPASLKAHMKSNPLYTDMRLTELAEVKRGQPSWTIEEYARNAGDKGKLTALDLQTQESLNPNNLEYWMEDIYTPGYDSLLKRKEAEFRRAKVCKIAALIAAAACTVILVIVVPICTMKS

SEQ ID NO: 43443 - protein, 854 aa, Homo sapiens
  Payload ID: 8927
  Gene Symbol: KIAA1024
  Gene Name: KIAA1024
  ENSP ID: ENSP00000454088
METSQETSLFLVKILEELDSKQNTVSYQDLCKSLCARFDLSQLAKLRSVLFYTACLDPNFPATLFKDKMKCTVNNQQSKKIMVAADIVTIFNLIQMNGGAAKEKLPTGRQKVRKKEASFESCRSDTEICNAAECEPLNCELSERSFSRGYPIRQSSKCRKMDCKDCPQFVPASEPNFLLGVSKEVKNRAASLDRLQALAPYSVTSPQPCEMQRTYFPMNIENESISDQDSLPINQSIKETFISNEEPFVVQSCVQKRNIFKEDFHNLMAVSPSLVGPISKAENEHREPQSRKEPHKPPFFNHSFEMPYNSQYLNPVYSPVPDKRRAKHESLDDLQASTYFGPTPVMGTQEARRCLGKPNKQTPWPAKSWSLNTEEVPDFERSFFNRNPSEEKLHYPNASSQTPNFPAPERRPTYLVPKDQQPILPIAYAAKQNGLKSKEISSPVDLEKHEPVKKFKDKSINCTSGQLSSDTSSVGTQTEHVLEPKKCRDLCTSGQGKYSDRHTMKHSDDDSEIVSDDISDIFRFLDDMSISGSTGVIQSSCYNSTGSLSQLHKSDCDSSPEHNLTKIANGVPNSKGDKGNRPENTHHSEEELKTSVCKLVLRIGEIERKLESLSGVRDEISQVLGKLNKLDQKMQQPEKVSVQIDLNSLTSEGPSDDSASPRMFHAHSGSHGPKLENNPDWCCSDASGSNSESLRVKALKKSLFTRPSSRSLTEENSATESKIASISNSPRDWRTITYTNRVGLNEEEIKDTGPGDNKDWHRKSKEADRQYDIPPQHRLPKQPKDGFLVEQVFSPHPYPASLKAHMKSNPLYTDMRLTELAEVKRGQPSWTIEEYARNAGDKGKLTALDLQHVG

SEQ ID NO: 43444 - protein, 190 aa, Homo sapiens
  Payload ID: 8928
  Gene Symbol: KIAA1024L
  Gene Name: KIAA1024-like
  Uniprot ID: P59773
  ENSP ID: ENSP00000454268
MDLSVLPNNNHPDKFLQLDVKSLTRSSALLQASLVRFPGGNYPAAQHWQNLVYSQREKKNIAAQRIRGSSADSLVTADSPPPSMSSVMKNNPLYGDLSLEEAMEERKKNPSWTIEEYDKHSLHTNLSGHLKENPNDLRFWLGDMYTPGFDTLLKKEEKQEKHSKFCRMGLILLVVISILVTIVTIITFFT

SEQ ID NO: 43445 - protein, 1173 aa, Homo sapiens
  Payload ID: 8929
  Gene Symbol: KIAA1033
  Gene Name: KIAA1033
  Uniprot ID: Q2M389
  ENSP ID: ENSP00000328062
MAVETLSPDWEFDRVDDGSQKIHAEVQLKNYGKFLEEYTSQLRRIEDALDDSIGDVWDFNLDPIALKLLPYEQSSLLELIKTENKVLNKVITVYAALCCEIKKLKYEAETKFYNGLLFYGEGATDASMVEGDCQIQMGRFISFLQELSCFVTRCYEVVMNVVHQLAALYISNKIAPKIIETTGVHFQTMYEHLGELLTVLLTLDEIIDNHITLKDHWTMYKRLLKSVHHNPSKFGIQEEKLKPFEKFLLKLEGQLLDGMIFQACIEQQFDSLNGGVSVSKNSTFAEEFAHSIRSIFANVEAKLGEPSEIDQRDKYVGICGLFVLHFQIFRTIDKKFYKSLLDICKKVPAITLTANIIWFPDNFLIQKIPAAAKLLDRKSLQAIKIHRDTFLQQKAQSLTKDVQSYYVFVSSWMMKMESILSKEQRMDKFAEDLTNRCNVFIQGFLYAYSISTIIKTTMNLYMSMQKPMTKTSVKALCRLVELLKAIEHMFYRRSMVVADSVSHITQHLQHQALHSISVAKKRVISDKKYSEQRLDVLSALVLAENTLNGPSTKQRRLIVSLALSVGTQMKTFKDEELFPLQVVMKKLDLISELRERVQTQCDCCFLYWHRAVFPIYLDDVYENAVDAARLHYMFSALRDCVPAMMHARHLESYEILLDCYDKEIMEILNEHLLDKLCKEIEKDLRLSVHTHLKLDDRNPFKVGMKDLALFFSLNPIRFFNRFIDIRAYVTHYLDKTFYNLTTVALHDWATYSEMRNLATQRYGLVMTEAHLPSQTLEQGLDVLEIMRNIHIFVSRYLYNLNNQIFIERTSNNKHLNTINIRHIANSIRTHGTGIMNTTVNFTYQFLKKKFYIFSQFMYDEHIKSRLIKDIRFFREIKDQNDHKYPFDRAEKFNRGIRKLGVTPEGQSYLDQFRQLISQIGNAMGYVRMIRSGGLHCSSNAIRFVPDLEDIVNFEELVKEEGLAEETLKAARHLDSVLSDHTRNSAEGTEYFKMLVDVFAPEFRRPKNIHLRNFYIIVPPLTLNFVEHSISCKEKLNKKNKIGAAFTDDGFAMGVAYILKLLDQYREFDSLHWFQSVREKYLKEIRAVAKQQNVQSASQDEKLLQTMNLTQKRLDVYLQEFELLYFSLSSARIFFRADKTAAEENQEKKEKEEETKTSNGDLSDSTVSADPVVK

SEQ ID NO: 43446 - protein, 116 aa, Homo sapiens
  Payload ID: 8929
  Gene Symbol: KIAA1033
  Gene Name: KIAA1033
  ENSP ID: ENSP00000447015
MGYVRMIRSGGLHCSSNAIRFVPDLEDIVNFEELVKEEGLAEETLKAARHLDSVLSDHTRNSAEGTEYFKMLVDVFAPEFRRPKNIHLRNFYIIVPPLTLNFVEHSISCKEKLNKK

SEQ ID NO: 43447 - protein, 189 aa, Homo sapiens
  Payload ID: 8929
  Gene Symbol: KIAA1033
  Gene Name: KIAA1033
  ENSP ID: ENSP00000448966
MAVETLSPDWEFDRVDDGSQKIHAEVQLKNYGKFLEEYTSQLRRIEDALDDSIGDVWDFNLDPIALKLLPYEQSSLLELIKTENKVLNKVITVYAALCCEIKKLKYEAETKFYNGLLFYGEGATDASMVEGDCQIQMGRFISFLQELSCFVTRCYEVVMNVVHQLAALYISNKIAPKIIETTGVHFQVF

SEQ ID NO: 43448 - protein, 48 aa, Homo sapiens
  Payload ID: 8929
  Gene Symbol: KIAA1033
  Gene Name: KIAA1033
  ENSP ID: ENSP00000450166
MGYVRMIRSGGLHCSSNAIRFVPDLEDIVNFEELVKEEGLAEETLKAA

SEQ ID NO: 43449 - protein, 41 aa, Homo sapiens
  Payload ID: 8929
  Gene Symbol: KIAA1033
  Gene Name: KIAA1033
  ENSP ID: ENSP00000450243
MVEGDCQIQMGRFISFLQELSCFVTRCYEVVMNVVHQLAAL

SEQ ID NO: 43450 - protein, 62 aa, Homo sapiens
  Payload ID: 8929
  Gene Symbol: KIAA1033
  Gene Name: KIAA1033
  ENSP ID: ENSP00000473263
MVEGDCQIQMGRFISFLQELSCFVTRCYEVVMNVVHQLAALYISNKIAPKIIETTGVHFQVF

SEQ ID NO: 43451 - protein, 1174 aa, Homo sapiens
  Payload ID: 8929
  Gene Symbol: KIAA1033
  Gene Name: KIAA1033
  ENSP ID: ENSP00000484713
MAVETLSPDWEFDRVDDGSQKIHAEVQLKNYGKFLEEYTSQLRRIEDALDDSIGDVWDFNLDPIALKLLPYEQSSLLELIKTENKVLNKVITVYAALCCEIKKLKYEAETKFYNGLLFYGEGATDASMVEGDCQIQMGRFISFLQELSCFVTRCYEVVMNVVHQLAALYISNKIAPKIIETTGVHFQTMYEHLGELLTVLLTLDEIIDNHITLKDHWTMYKRLLKSVHHNPSKFGIQEEKLKPFEKFLLKLEGQLLDGMIFQACIEQQFDSLNGGVSVSKNSTFAEEFAHSIRSIFANVEAKLGEPSEIDQRDKYVGICGLFVLHFQIFRTIDKKFYKSLLDICKKVPAITLTANIIWFPDNFLIQKIPAAAKLLDRKSLQAIKIHRDTFLQQKAQSLTKDVQSYYVFVSSWMMKMESILSKEQRMDKFAEDLTNRCNVFIQVGFLYAYSISTIIKTTMNLYMSMQKPMTKTSVKALCRLVELLKAIEHMFYRRSMVVADSVSHITQHLQHQALHSISVAKKRVISDKKYSEQRLDVLSALVLAENTLNGPSTKQRRLIVSLALSVGTQMKTFKDEELFPLQVVMKKLDLISELRERVQTQCDCCFLYWHRAVFPIYLDDVYENAVDAARLHYMFSALRDCVPAMMHARHLESYEILLDCYDKEIMEILNEHLLDKLCKEIEKDLRLSVHTHLKLDDRNPFKVGMKDLALFFSLNPIRFFNRFIDIRAYVTHYLDKTFYNLTTVALHDWATYSEMRNLATQRYGLVMTEAHLPSQTLEQGLDVLEIMRNIHIFVSRYLYNLNNQIFIERTSNNKHLNTINIRHIANSIRTHGTGIMNTTVNFTYQFLKKKFYIFSQFMYDEHIKSRLIKDIRFFREIKDQNDHKYPFDRAEKFNRGIRKLGVTPEGQSYLDQFRQLISQIGNAMGYVRMIRSGGLHCSSNAIRFVPDLEDIVNFEELVKEEGLAEETLKAARHLDSVLSDHTRNSAEGTEYFKMLVDVFAPEFRRPKNIHLRNFYIIVPPLTLNFVEHSISCKEKLNKKNKIGAAFTDDGFAMGVAYILKLLDQYREFDSLHWFQSVREKYLKEIRAVAKQQNVQSASQDEKLLQTMNLTQKRLDVYLQEFELLYFSLSSARIFFRADKTAAEENQEKKEKEEETKTSNGDLSDSTVSADPVVK

SEQ ID NO: 43452 - protein, 1354 aa, Homo sapiens
  Payload ID: 8930
  Gene Symbol: KIAA1107
  Gene Name: KIAA1107
  ENSP ID: ENSP00000359404
MSSTADLLDTILKAIEENITTENSCSLLMALDTLLNSDSTKEMGFTCKIQALRDKLWIFLVQSFYAVRHTESWKLMSTDDQQKIQAAAFDKGDDRRLGKKPIFSSSQQRKQVSDSGDIKIKSWRGNNKKECWSYLSTNKKMKSDGLGASGHSSSTNRNSINKTLKQDDVKEKDGTKIASKITKELKTGGKNVSGKPKTVTKSKTENGDKARLENMSPRQVVERSATAAAAATGQKNLLNGKGVRNQEGQISGARPKVLTGNLNVQAKAKPLKKATGKDSPCLSIAGPSSRSTDSSMEFSISTECLDEPKENGSTEEEKPSGHKLSFCDSPGQMMKNSVDSVKNSTVAIKSRPVSRVTNGTSNKKSIHEQDTNVNNSVLKKVSGKGCSEPVPQAILKKRGTSNGCTAAQQRTKSTPSNLTKTQGSQGESPNSVKSSVSSRQSDENVAKLDHNTTTEKQAPKRKMVKQVHTALPKVNAKIVAMPKNLNQSKKGETLNNKDSKQKMPPGQVISKTQPSSQRPLKHETSTVQKSMFHDVRDNNNKDSVSEQKPHKPLINLASEISDAEALQSSCRPDPQKPLNDQEKEKLALECQNISKLDKSLKHELESKQICLDKSETKFPNHKETDDCDAANICCHSVGSDNVNSKFYSTTALKYMVSNPNENSLNSNPVCDLDSTSAGQIHLISDRENQVGRKDTNKQSSIKCVEDVSLCNPERTNGTLNSAQEDKKSKVPVEGLTIPSKLSDESAMDEDKHATADSDVSSKCFSGQLSEKNSPKNMETSESPESHETPETPFVGHWNLSTGVLHQRESPESDTGSATTSSDDIKPRSEDYDAGGSQDDDGSNDRGISKCGTMLCHDFLGRSSSDTSTPEELKIYDSNLRIEVKMKKQSNNDLFQVNSTSDDEIPRKRPEIWSRSAIVHSRERENIPRGSVQFAQEIDQVSSSADETEDERSEAENVAENFSISNPAPQQFQGIINLAFEDATENECREFSATKKFKRSVLLSVDECEELGSDEGEVHTPFQASVDSFSPSDVFDGISHEHHGRTCYSRFSRESEDNILECKQNKGNSVCKNESTVLDLSSIDSSRKNKQSVSATEKKNTIDVLSSRSRQLLREDKKVNNGSNVENDIQQRSKFLDSDVKSQERPCHLDLHQREPNSDIPKNSSTKSLDSFRSQVLPQEGPVKESHSTTTEKANIALSAGDIDDCDTLAQTRMYDHRPSKTLSPIYEMDVIEAFEQKVESETHVTDMDFEDDQHFAKQDWTLLKQLLSEQDSNLDVTNSVPEDLSLAQYLINQTLLLARDSSKPQGITHIDTLNRWSELTSPLDSSASITMASFSSEDCSPQGEWTILELETQH

SEQ ID NO: 43453 - protein, 5005 aa, Homo sapiens
  Payload ID: 8931
  Gene Symbol: KIAA1109
  Gene Name: KIAA1109
  Uniprot ID: Q2LD37
  ENSP ID: ENSP00000264501
MDQRKNESIVPSITQLEDFLTEHNSNVVWLLVATILSCGWIIYLTYYNSRNVGLILTLVLNRLYKHGYIHIGSFSFSVLSGKVMVREIYYITEDMSIRIQDGFIIFRWWKMYNPKQKQHDPKAETRLYITVNDFEFHVYNRSDLYGRLQELFGLEPTIIPPKKDDDKTREIGRTRTQSKIERVKVKTESQDPTSSWRSLIPVIKVNVSTGRLAFGNHYQPQTLCINFDDAFLTYTTKPPSSHLDQFMHIVKGKLENVRVMLVPSPRYVGLQNDEPPRLMGEGFVVMQSNDVDIYYYMDEPGLVPEETEENIEGEMSSEDCKLQDLPPCWGLDIVCGKGTDFNYGPWADRQRDCLWKFFFPPDYQVLKVSEIAQPGRPRQILAFELRMNIIADATIDLLFTKNRETNAVHVNVGAGSYLEINIPMTVEENGYTPAIKGQLLHVDATTSMQYRTLLEAEMLAFHINASYPRIWNMPQTWQCELEVYKATYHFIFAQKNFFTDLIQDWSSDSPPDIFSFVPYTWNFKIMFHQFEMIWAANQHNWIDCSTKQQENVYLAACGETLNIDFSLPFTDFVPATCNTKFSLRGEDVDLHLFLPDCHPSKYSLFMLVKNCHPNKMIHDTGIPAECQSGQKTVKPKWRNVTQEKSGWVECWTVPSVMLTIDYTWHPIYPQKADEQLKQSLSEMEETMLSVLRPSQKTSDRVVSSPSTSSRPPIDPSELPPDKLHVEMELSPDSQITLYGPLLNAFLCIKENYFGEDDMYMDFEEVISSPVLSLSTSSSSGWTAVGMENDKKENEGSAKSIHPLALRPWDITVLVNLYKVHGRLPVHGTTDGPECPTAFLERLCFEMKKGFRETMLQLILSPLNVFVSDNYQQRPPVDEVLREGHINLSGLQLRAHAMFSAEGLPLGSDSLEYAWLIDVQAGSLTAKVTAPQLACLLEWGQTFVFHVVCREYELERPKSVIICQHGIDRRFCESKLSCIPGPCPTSDDLKYTMIRLAVDGADIYIVEHGCATNIKMGAIRVANCNLHNQSVGEGISAAIQDFQVRQYIEQLNNCRIGLQPAVLRRAYWLEAGSANLGLITVDIALAADHHSKHEAQRHFLETHDARTKRLWFLWPDDILKNKRCRNKCGCLGGCRFFGGTVTGLDFFKLEELTPSSSSAFSSTSAESDMYYGQSLLQPGEWIITKEIPKIIDGNVNGMKRKEWENKSVGIEVERKTQHLSLQVPLRSHSSSSSSEENSSSSAAQPLLAGEKESPSSVADDHLVQKEFLHGTKRDDGQASIPTEISGNSPVSPNTQDKSVGQSPLRSPLKRQASVCSTRLGSTKSLTAAFYGDKQPVTVGVQFSSDVSRSDENVLDSPKQRRSFGSFPYTPSADSNSFHQYRSMDSSMSMADSEAYFSAAEEFEPISSDEGPGTYPGRKKKKKQTQQIDYSRGSIYHSVEGPLTGHGESIQDSRTLPFKTHPSQASFVSALGGEDDVIEHLYIVEGEKTVESEQITPQQPVMNCYQTYLTQFQVINWSVKHPTNKRTSKSSLHRPLDLDTPTSEESSSSFEQLSVPTFKVIKQGLTANSLLDRGMQLSGSTSNTPYTPLEKKLADNTDDETLTEEWTLDQPVSQTRTTAIVEVKGTVDIVLTPLVAEALDRYIEAMVHCASTRHPAAIVDDLHAKVLREAVQNSKTTFSENLSSKQDIRGTKTEQSTIGTTNQGQAQTNLTMKQDNVTIKGLQTNVSIPKVNLCLLQASVEESPTTAPSRSVTHVSLVALCFDRIATQVRMNRGVVEETSNNAEPGRTSNFDRYVHATKMQPQSSGSLRSNAGAEKGKEIAAKLNIHRVHGQLRGLDTTDIGTCAITAIPFEKSKVLFTLEELDEFTFVDETDQQAVPDVTRIGPSQEKWGWIMFECGLENLTIKGGRQSGAVLYNSFGIMGKASDTERGGVLTSNNSSDSPTGSGYNTDVSDDNLPCDRTSPSSDLNGNSVSDEQDEGVESDDLKKDLPLMPPPPDSCSMKLTIKEIWFSFAAPTNVRSHTHAFSRQLNLLSTATPAVGAWLVPIDQLKSSLNKLETEGTLRICAVMGCIMTEALENKSVHFPLRSKYNRLTKVARFLQENPSCLLCNILHHYLHQANYSIIDDATMSDGLPALVTLKKGLVALARQWMKFIVVTPAFKGVSLHRPAQPLKPQIAMDHEHEDGLGLDNGGGLQSDTSADGAEFEFDAATVSEHTMLLEGTANRPPPGSSGPVTGAEIMRKLSKTHTHSDSALKIKGIHPYHSLSYTSGDTATDSPVHVGRAGMPVKDSPRKESLLSYLTGSFPSLHNLLEGTPQRSSAAVKSSSLTRTGNTVATDMLSEHPLLSEPSSVSFYNWMSNAVGNRGSVLQESPVTKSGHNSLPTGVAPNLPTIPSASDFNTVLSSDQNTLDGTHSQHSTSQDDVAGVEEANQGFPAVQLADAQVVFKPLLSHTGIQSQDTMPFCYRMYFGEHLSFSGTLDCLRADIVDSDTAKERKGKRARRQGHVNLPPLEFKPALMLGTFSISAVVMEKSVCTPQNSTSALSFHDLSKRYYNTFHCNFTISCQSISQHVDMALVRLIHQFSTMIDDIKATQTDIKLSRYTAGSASPTPTFKTRKHRDFRSSDFSRSSRGSLNGGNRVNNAKNKRTNNENNKKESRNKNSLGRSERRTSKVSRKGSKDVVDHMTIHMDDSDSITVSEQSEPSAECWQNMYKLLNFYSLISDPTGILEKSSETFGPAGVRSPTEPTCKVVFENEQDNSSLTKTQRKRSLVTSEPQHVTLIVFGIGMVNRTHLEADIGGLTMESELKRIHGSFTLKEKMKDVLHQKMTETCATAHIGGVNIVLLEGITPNIQLEDFPTSPTSTAKQEFLTVVKCSIAKSQALYSAQRGLKTNNAAVFKVGAISINIPQHPATLHSMMVRSSHQLSKQISDLIRQPSTAPQPVKEDIATPLPSEKTPTSVNQTPVETNEFPQLPEGLEKKPIVLKFSAMLDGIAIGAALLPSLKAEYKMGRMRSHGMTGAQTRFTFELPNHRLRFTSKVSATDMSTIPPSASLNLPPVTMSGKYIMEEHDSYSDQVWSIDELPSKQGYYLQGNYLRCVAEVGSFEHNLTTDLLNHLVFVQKVFMKEVNEVIQKVSGGEQPIPLWNEHDGTADGDKPKILLYSLNLQFKGIQVTATTPSMRAVRFETGLIELELSNRLQTKASPGSSSYLKLFGKCQVDLNLALGQIVKHQVYEEAGSDFHQVAYFKTRIGLRNALREEISGSSDREAVLITLNRPIVYAQPVAFDRAVLFWLNYKAAYDNWNEQRMALHKDIHMATKEVVDMLPGIQQTSAQAFGTLFLQLTVNDLGICLPITNTAQSNHTGDLDTGSALVLTIESTLITACSSESLVSKGHFKNFCIRFADGFETSWDDWKPEIHGDLVMNACVVPDGTYEVCSRTTGQAAAESSSAGTWTLNVLWKMCGIDVHMDPNIGKRLNALGNTLTTLTGEEDIDDIADLNSVNIADLSDEDEVDTMSPTIHTEATDYRRQAASASQPGELRGRKIMKRIVDIRELNEQAKVIDDLKKLGASEGTINQEIQRYQQLESVAVNDIRRDVRKKLRRSSMRAASLKDKWGLSYKPSYSRSKSISASGRPPLKRMERASSRVGETEELPEIRVDAASPGPRVTFNIQDTFPEETELDLLSVTIEGPSHYSSNSEGSCSVFSSPKTPGGFSPGIPFQTEEGRRDDSLSSTSEDSEKDEKDEDHERERFYIYRKPSHTSRKKATGFAAVHQLFTERWPTTPVNRSLSGTATERNIDFELDIRVEIDSGKCVLHPTTLLQEHDDISLRRSYDRSSRSLDQDSPSKKKKFQTNYASTTHLMTGKKVPSSLQTKPSDLETTVFYIPGVDVKLHYNSKTLKTESPNASRGSSLPRTLSKESKLYGMKDSATSPPSPPLPSTVQSKTNTLLPPQPPPIPAAKGKGSGGVKTAKLYAWVALQSLPEEMVISPCLLDFLEKALETIPITPVERNYTAVSSQDEDMGHFEIPDPMEESTTSLVSSSTSAYSSFPVDVVVYVRVQPSQIKFSCLPVSRVECMLKLPSLDLVFSSNRGELETLGTTYPAETLSPGGNATQSGTKTSASKTGIPGSSGLGSPLGRSRHSSSQSDLTSSSSSSSGLSFTACMSDFSLYVFHPYGAGKQKTAVSGLTPGSGGLGNVDEEPTSVTGRKDSLSINLEFVKVSLSRIRRSGGASFFESQSVSKSASKMDTTLINISAVCDIGSASFKYDMRRLSEILAFPRAWYRRSIARRLFLGDQTINLPTSGPGTPDSIEGVSQHLSPESSRKAYCKTWEQPSQSASFTHMPQSPNVFNEHMTNSTMSPGTVGQSLKSPASIRSRSVSDSSVPRRDSLSKTSTPFNKSNKAASQQGTPWETLVVFAINLKQLNVQMNMSNVMGNTTWTTSGLKSQGRLSVGSNRDREISMSVGLGRSQLDSKGGVVGGTIDVNALEMVAHISEHPNQQPSHKIQITMGSTEARVDYMGSSILMGIFSNADLKLQDEWKVNLYNTLDSSITDKSEIFVHGDLKWDIFQVMISRSTTPDLIKIGMKLQEFFTQQFDTSKRALSTWGPVPYLPPKTMTSNLEKSSQEQLLDAAHHRHWPGVLKVVSGCHISLFQIPLPEDGMQFGGSMSLHGNHMTLACFHGPNFRSKSWALFHLEEPNIAFWTEAQKIWEDGSSDHSTYIVQTLDFHLGHNTMVTKPCGALESPMATITKITRRRHENPPHGVASVKEWFNYVTATRNEELNLLRNVDANNTENSTTVKNSSLLSGFRGGSSYNHETETIFALPRMQLDFKSIHVQEPQEPSLQDASLKPKVECSVVTEFTDHICVTMDAELIMFLHDLVSAYLKEKEKAIFPPRILSTRPGQKSPIIIHDDNSSDKDREDSITYTTVDWRDFMCNTWHLEPTLRLISWTGRKIDPVGVDYILQKLGFHHARTTIPKWLQRGVMDPLDKVLSVLIKKLGTALQDEKEKKGKDKEEH

SEQ ID NO: 43454 - protein, 1381 aa, Homo sapiens
  Payload ID: 8931
  Gene Symbol: KIAA1109
  Gene Name: KIAA1109
  ENSP ID: ENSP00000304374
  MOD_RES (1)..(1): Any amino acid
XPSYSRSKSISASGRPPLKRMERASSRVGETEELPEIRVDAASPGPRVTFNIQDTLKNTVWGSTPQSSCPGEGYFQFPEETELDLLSVTIEGPSHYSSNSEGSCSVFSSPKTPGGFSPGIPFQTEEGRRDDSLSSTSEDSEKDEKDEDHERERFYIYRKPSHTSRKKATGFAAVHQLFTERWPTTPVNRSLSGTATERNIDFELDIRVEIDSGKCVLHPTTLLQEHDDISLRRSYDRSSRSLDQDSPSKKKKFQTNYASTTHLMTGKKVPSSLQTKPSDLETTVFYIPGVDVKLHYNSKTLKTESPNASRGSSLPRTLSKESKLYAKGKGSGGVKTAKLYAWVALQSLPEEMVISPCLLDFLEKALETIPITPVERNYTAVSSQDEDMGHFEIPDPMEESTTSLVSSSTSAYSSFPVDVVVYVRVQPSQIKFSCLPVSRVECMLKLPSLDLVFSSNRGELETLGTTYPAETLSPGGNATQSGTKTSASKTGIPGSSGLGSPLGRSRHSSSQSDLTSSSSSSSGLSFTACMSDFSLYVFHPYGAGKQKTAVSGLTPGSGGLGNVDEEPTSVTGRKDSLSINLEFVKVSLSRIRRSGGASFFESQSVSKSASKMDTTLINISAVCDIGSASFKYDMRRLSEILAFPRAWYRRSIARRLFLGDQTINLPTSGPGTPDSIEGVSQHLSPESSRKAYCKTWEQPSQSASFTHMPQSPNVFNEHMTNSTMSPGTVGQSLKSPASIRSRSVSDSSVPRRDSLSKTSTPFNKSNKAASQQGTPWETLVVFAINLKQLNVQMNMSNVMGNTTWTTSGLKSQGRLSVGSNRDREISMSVGLGRSQLDSKGGVVGGTIDVNALEMVAHISEHPNQQPSHKIQITMGSTEARVDYMGSSILMGIFSNADLKLQDEWKVNLYNTLDSSITDKSEIFVHGDLKWDIFQVMISRSTTPDLIKIGMKLQEFFTQQFDTSKRALSTWGPVPYLPPKTMTSNLEKSSQEQLLDAAHHRHWPGVLKVVSGCHISLFQIPLPEDGMQFGGSMSLHGNHMTLACFHGPNFRSKSWALFHLEEPNIAFWTEAQKIWEDGSSDHSTYIVQTLDFHLGHNTMVTKPCGALESPMATITKITRRRHENPPHGVASVKEWFNYVTATRNEELNLLRNVDANNTENSTTVKNSSLLSGFRGGSSYNHETETIFALPRMQLDFKSIHVQEPQEPSLQDASLKPKVECSVVTEFTDHICVTMDAELIMFLHDLVSAYLKEKEKAIFPPRILSTRPGQKSPIIIHDDNSSDKDREDSITYTTVDWRDFMCNTWHLEPTLRLISWTGRKIDPVGVDYILQKLGFHHARTTIPKWLQRGVMDPLDKVLSVLIKKLGTALQDEKEKKGKDKEEH

SEQ ID NO: 43455 - protein, 5005 aa, Homo sapiens; identical to SEQ ID NO: 43453
  Payload ID: 8931
  Gene Symbol: KIAA1109
  Gene Name: KIAA1109
  Uniprot ID: Q2LD37
  ENSP ID: ENSP00000373390

SEQ ID NO: 43456 - protein, 1638 aa, Homo sapiens
  Payload ID: 8931
  Gene Symbol: KIAA1109
  Gene Name: KIAA1109
  ENSP ID: ENSP00000393219
  MOD_RES (1)..(1): Any amino acid
XIDQLKSSLNKLETEGTLRICAVMGCIMTEALENKSVHFPLRSKYNRLTKVARFLQENPSCLLCNILHHYLHQANYSIIDDATMSDGLPALVTLKKGLVALARQWMKFIVVTPAFKGVSLHRPAQPLKPQIAMDHEHEDGLGLDNGGGLQSDTSADGAEFEFDAATVSEHTMLLEGTANRPPPGSSGPVTGAEIMRKLSKTHTHSDSALKIKGIHPYHSLSYTSGDTATDSPVHVGRAGMPVKDSPRKESLLSYLTGSFPSLHNLLEGTPQRSSAAVKSSSLTRTGNTVATDMLSEHPLLSEPSSVSFYNWMSNAVGNRGSVLQESPVTKSGHNSLPTGVAPNLPTIPSASDFNTVLSSDQNTLDGTHSQHSTSQDDVAGVEEANQGFPAVQLADAQVVFKPLLSHTGIQSQDTMPFCYRMYFGEHLSFSGTLDCLRADIVDSDTAKERKGKRARRQGHVNLPPLEFKPALMLGTFSISAVVMEKSVCTPQNSTSALSFHDLSKRYYNTFHCNFTISCQSISQHVDMALVRLIHQFSTMIDDIKATQTDIKLSRYTAGSASPTPTFKTRKHRDFRSSDFSRSSRGSLNGGNRVNNAKNKRTNNENNKKESRNKNSLGRSERRTSKVSRKGSKDVVDHMTIHMDDSDSITVSEQSEPSAECWQNMYKLLNFYSLISDPTGILEKSSETFGPAGVRSPTEPTCKVVFENEQDNSSLTKTQRKRSLVTSEPQHVTLIVFGIGMVNRTHLEADIGGLTMESELKRIHGSFTLKEKMKDVLHQKMTETCATAHIGGVNIVLLEGITPNIQLEDFPTSPTSTAKQEFLTVVKCSIAKSQALYSAQRGLKTNNAAVFKVGAISINIPQHPATLHSMMVRSSHQLSKQISDLIRQPSTAPQPVKEDIATPLPSEKTPTSVNQTPVETNEFPQLPEGLEKKPIVLKFSAMLDGIAIGAALLPSLKAEYKMGRMRSHGMTGAQTRFTFELPNHRLRFTSKVSATDMSTIPPSASLNLPPVTMSGKYIMEEHDSYSDQVWSIDELPSKQGYYLQGNYLRCVAEVGSFEHNLTTDLLNHLVFVQKVFMKEVNEVIQKVSGGEQPIPLWNEHDGTADGDKPKILLYSLNLQFKGIQVTATTPSMRAVRFETGLIELELSNRLQTKASPGSSSYLKLFGKCQVDLNLALGQIVKHQVYEEAGSDFHQVAYFKTRIGLRNALREEISGSSDREAVLITLNRPIVYAQPVAFDRAVLFWLNYKAAYDNWNEQRMALHKDIHMATKEVVDMLPGIQQTSAQAFGTLFLQLTVNDLGICLPITNTAQSNHTGDLDTGSALVLTIESTLITACSSESLVSKGHFKNFCIRFADGFETSWDDWKPEIHGDLVMNACVVPDGTYEVCSRTTGQAAAESSSAGTWTLNVLWKMCGIDVHMDPNIGKRLNALGNTLTTLTGEEDIDDIADLNSVNIADLSDEDEVDTMSPTIHTEATDYRRQAASASQPGELRGRKIMKRIVDIRELNEQAKVIDDLKKLGASEGTINQEIQRYQQLESVAVNDIRRDVRKKLRRSSMRAASLKDKWGLSYKPSYSRSKSISASGRPPLKRMERASSRVGETEELPEIRVDAASPGPRVTFNIQDTIAEIRRKKISFKVVF

SEQ ID NO: 43457 - protein, 1447 aa, Homo sapiens
  Payload ID: 8931
  Gene Symbol: KIAA1109
  Gene Name: KIAA1109
  ENSP ID: ENSP00000394909
  MOD_RES (1)..(1): Any amino acid
XSRGSIYHSVEGPLTGHGESIQDSRTLPFKTHPSQASFVSALGGEDDVIEHLYIVEGEKTVESEQITPQQPVMNCYQTYLTQFQVINWSVKHPTNKRTSKSSLHRPLDLDTPTSEESSSSFEQLSVPTFKVIKQGLTANSLLDRGMQLSGSTSNTPYTPLEKKLADNTDDETLTEEWTLDQPVSQTRTTAIVEVKGTVDIVLTPLVAEALDRYIEAMVHCASTRHPAAIVDDLHAKVLREAVQNSKTTFSENLSSKQDIRGTKTEQSTIGTTNQGQAQTNLTMKQDNVTIKGLQTNVSIPKVNLCLLQASVEESPTTAPSRSVTHVSLVALCFDRIATQVRMNRGVVEETSNNAEPGRTSNFDRYVHATKMQPQSSGSLRSNAGAEKGKEIAAKLNIHRVHGQLRGLDTTDIGTCAITAIPFEKSKVLFTLEELDEFTFVDETDQQAVPDVTRIGPSQEKWGWIMFECGLENLTIKGGRQSGAVLYNSFGIMGKASDTERGGVLTSNNSSDSPTGSGYNTDVSDDNLPCDRTSPSSDLNGNSVSDEQDEGVESDDLKKDLPLMPPPPDSCSMKLTIKEIWFSFAAPTNVRSHTHAFSRQLNLLSTATPAVGAWLVPIDQLKSSLNKLETEGTLRICAVMGCIMTEALENKSVHFPLRSKYNRLTKVARFLQENPSCLLCNILHHYLHQANYSIIDDATMSDGLPALVTLKKGLVALARQWMKFIVVTPAFKGVSLHRPAQPLKPQIAMDHEHEDGLGLDNGGGLQSDTSADGAEFEFDAATVSEHTMLLEGTANRPPPGSSGPVTGAEIMRKLSKTHTHSDSALKIKGIHPYHSLSYTSGDTATDSPVHVGRAGMPVKDSPRKESLLSYLTGSFPSLHNLLEGTPQRSSAAVKSSSLTRTGNTVATDMLSEHPLLSEPSSVSFYNWMSNAVGNRGSVLQESPVTKSGHNSLPTGVAPNLPTIPSASDFNTVLSSDQNTLDGTHSQHSTSQDDVAGVEEANQGFPAVQLADAQVVFKPLLSHTGIQSQDTMPFCYRMYFGEHLSFSGTLDCLRADIVDSDTAKERKGKRARRQGHVNLPPLEFKPALMLGTFSISAVVMEKSVCTPQNSTSALSFHDLSKRYYNTFHCNFTISCQSISQHVDMALVRLIHQFSTMIDDIKATQTDIKLSRYTAGSASPTPTFKTRKHRDFRSSDFSRSSRGSLNGGNRVNNAKNKRTNNENNKKESRNKNSLGRSERRTSKVSRKGSKDVVDHMTIHMDDSDSITVSEQSEPSAECWQNMYKLLNFYSLISDPTGILEKSSETFGPAGVRSPTEPTCKVVFENEQDNSSLTKTQRKRSLVTSEPQHVTLIVFGIGMVNRTHLEADIGGLTMESELKRIHGSFTLKEKMKDVLHQKMTETCATAHIGGVNIVLLEGITPNIQLEDFPTSPTSTAKQEFLYVILFFFMAL

SEQ ID NO: 43458 - protein, 197 aa, Homo sapiens
  Payload ID: 8931
  Gene Symbol: KIAA1109
  Gene Name: KIAA1109
  ENSP ID: ENSP00000397543
  MOD_RES (1)..(1): Any amino acid
XFSCLPVSRVECMLKLPSLDLVFSSNRGELETLGTTYPAETLSPGGNATQSGTKTSASKTGIPGSSGLGSPLGRSRHSSSQSDLTSSSSSSSGLSFTACMSDFSLYVFHPYGAGKQKTAVSGLTPGSGGLGNVDEEPTSVTGRKDSLSINLEFVKVSLSRIRRSGGASFFESQSVSKSASKMDTTLINISGTQFYSF

SEQ ID NO: 43459 - protein, 1247 aa, Homo sapiens
  Payload ID: 8931
  Gene Symbol: KIAA1109
  Gene Name: KIAA1109
  ENSP ID: ENSP00000398039
  MOD_RES (1)..(1): Any amino acid
XREIGRTRTQSKIERVKVKTESQDPTSSWRSLIPVIKVNVSTGRLAFGNHYQPQTLCINFDDAFLTYTTKPPSSHLDQFMHIVKGKLENVRVMLVPSPRYVGLQNDEPPRLMGEGFVVMQSNDVDIYYYMDEPGLVPEETEENIEGEMSSEDCKLQDLPPCWGLDIVCGKGTDFNYGPWADRQRDCLWKFFFPPDYQVLKVSEIAQPGRPRQILAFELRMNIIADATIDLLFTKNRETNAVHVNVGAGSYLEINIPMTVEENGYTPAIKGQLLHVDATTSMQYRTLLEAEMLAFHINASYPRIWNMPQTWQCELEVYKATYHFIFAQKNFFTDLIQDWSSDSPPDIFSFVPYTWNFKIMFHQFEMIWAANQHNWIDCSTKQQENVYLAACGETLNIDFSLPFTDFVPATCNTKFSLRGEDVDLHLFLPDCHPSKYSLFMLVKNCHPNKMIHDTGIPAECQSGQKTVKPKWRNVTQEKSGWVECWTVPSVMLTIDYTWHPIYPQKADEQLKQSLSEMEETMLSVLRPSQKTSDRVVSSPSTSSRPPIDPSELPPDKLHVEMELSPDSQITLYGPLLNAFLCIKENYFGEDDMYMDFEEVISSPVLSLSTSSSSGWTAVGMENDKKENEGSAKSIHPLALRPWDITVLVNLYKVHGRLPVHGTTDGPECPTAFLERLCFEMKKGFRETMLQLILSPLNVFVSDNYQRPPVDEVLREGHINLSGLQLRAHAMFSAEGLPLGSDSLEYAWLIDVQAGSLTAKVTAPQLACLLEWGQTFVFHVVCREYELERPKSVIICQHGIDRRFCESKLSCIPGPCPTSDDLKYTMIRLAVDGADIYIVEHGCATNIKMGAIRVANCNLHNQSVGEGISAAIQDFQVRQYIEQLNNCRIGLQPAVLRRAYWLEAGSANLGLITVDIALAADHHSKHEAQRHFLETHDARTKRLWFLWPDDILKNKRCRNKCGCLGGCRFFGGTVTGLDFFKLEELTPSSSSAFSSTSAESDMYYGQSLLQPGEWIITKEIPKIIDGNVNGMKRKEWENKSVGIEVERKTQHLSLQVPLRSHSSSSSSEENSSSSAAQPLLAGEKESPSSVADDHLVQKEFLHGTKRDDGQASIPTEISGNSPVSPNTQDKSVGQSPLRSPLKRQASVCSTRLGSTKSLTAAFYGDKQPVTVGVQFSSDVSRSDENVLDSPKQRRSFGSFPYTPSADSNSFHQYRSMDSSMSMADSEAYFSAAEEFEPISSDEGPGTYPG

SEQ ID NO: 43460 - protein, 208 aa, Homo sapiens
  Payload ID: 8931
  Gene Symbol: KIAA1109
  Gene Name: KIAA1109
  ENSP ID: ENSP00000408229
SNHTGDLDTGSALVLTIESTLITACSSESLVSKGHFKNFCIRFADGFETSWDDWKPEIHGDLVMNACVVPDGTYEVCSRTTGQAAAGEEDIDDIADLNSVNIADLSDEDEVDTMSPTIHTSSDGSSISGDGHKLTFGQRLVNHLLGLTPPNQRHSVPAEYLCDPEMWGSPQSSQSHLKACRAHSWGNEATDYRRQAASASQPGELRGR

SEQ ID NO: 43461 - protein, 1674 aa, Homo sapiens
  Payload ID: 8931
  Gene Symbol: KIAA1109
  Gene Name: KIAA1109
  ENSP ID: ENSP00000410874
GHFKNFCIRFADGFETSWDDWKPEIHGDLVMNACVVPDGTYEVCSRTTGQAAAESSSAGTWTLNVLWKMCGIDVHMDPNIGKRLNALGNTLTTLTGEEDIDDIADLNSVNIADLSDEDEVDTMSPTIHTSSDGSSISGDGHKLTFGQRLVNHLLGLTPPNQRHSVPAEYLCDPEMWGSPQSSQSHLKACRAHSWGNEATDYRRQAASASQPGELRGRKIMKRIVDIRELNEQAKVIDDLKKLGASEGTINQEIQRYQQLESVAVNDIRRDVRKKLRRSSMRAASLKDKWGLSYKPSYSRSKSISASGRPPLKRMERASSRVGETEELPEIRVDAASPGPRVTFNIQDTLKNTVWGSTPQSSCPGEGYFQFPEETELDLLSVTIEGPSHYSSNSEGSCSVFSSPKTPGGFSPGIPFQTEEGRRDDSLSSTSEDSEKDEKDEDHERERFYIYRKPSHTSRKKATGFAAVHQLFTERWPTTPVNRSLSGTATERNIDFELDIRVEIDSGKCVLHPTTLLQEHDDISLRRSYDRSSRSLDQDSPSKKKKFQTNYASTTHLMTGKKVPSSLQTKPSDLETTVFYIPGVDVKLHYNSKTLKTESPNASRGSSLPRTLSKESKLYAKGKGSGGVKTAKLYAWVALQSLPEEMVISPCLLDFLEKALETIPITPVERNYTAVSSQDEDMGHFEIPDPMEESTTSLVSSSTSAYSSFPVDVVVYVRVQPSQIKFSCLPVSRVECMLKLPSLDLVFSSNRGELETLGTTYPAETLSPGGNATQSGTKTSASKTGIPGSSGLGSPLGRSRHSSSQSDLTSSSSSSSGLSFTACMSDFSLYVFHPYGAGKQKTAVSGLTPGSGGLGNVDEEPTSVTGRKDSLSINLEFVKVSLSRIRRSGGASFFESQSVSKSASKMDTTLINISAVCDIGSASFKYDMRRLSEILAFPRAWYRRSIARRLFLGDQTINLPTSGPGTPDSIEGVSQHLSPESSRKAYCKTWEQPSQSASFTHMPQSPNVFNEHMTNSTMSPGTVGQSLKSPASIRSRSVSDSSVPRRDSLSKTSTPFNKSNKAASQQGTPWETLVVFAINLKQLNVQMNMSNVMGNTTWTTSGLKSQGRLSVGSNRDREISMSVGLGRSQLDSKGGVVGGTIDVNALEMVAHISEHPNQQPSHKIQITMGSTEARVDYMGSSILMGIFSNADLKLQDEWKVNLYNTLDSSITDKSEIFVHGDLKWDIFQVMISRSTTPDLIKIGMKLQEFFTQQFDTSKRALSTWGPVPYLPPKTMTSNLEKSSQEQLLDAAHHRHWPGVLKVVSGCHISLFQIPLPEDGMQFGGSMSLHGNHMTLACFHGPNFRSKSWALFHLEEPNIAFWTEAQKIWEDGSSDHSTYIVQTLDFHLGHNTMVTKPCGALESPMATITKITRRRHENPPHGVASVKEWFNYVTATRNEELNLLRNVDANNTENSTTVKNSSLLSGFRGGSSYNHETETIFALPRMQLDFKSIHVQEPQEPSLQDASLKPKVECSVVTEFTDHICVTMDAELIMFLHDLVSAYLKEKEKAIFPPRILSTRPGQKSPIIIHDDNSSDKDREDSITYTTVDWRDFMCNTWHLEPTLRLISWTGRKIDPVGVDYILQKLGFHHARTTIPKWLQRGVMDPLDKVLSVLIKKLGTALQDEKEKKGKDKEEH

SEQ ID NO: 43462 - protein, 164 aa, Homo sapiens
  Payload ID: 8931
  Gene Symbol: KIAA1109
  Gene Name: KIAA1109
  ENSP ID: ENSP00000413018
NEGSAKSIHPLALRPWDITVLVNLYKVHGRLPVHGTTDGPECPTAFLERLCFEMKKGFRETMLQLILSPLNVFVSDNYQQRPPVDEVLREGHINLSGLQLRAHAMFSAEGLPLGSDSLEYAWLIDVQAGSLTAKVTAPQLSCIPGPCPTSDDLKYTMIRLAVDG

SEQ ID NO: 43463 - protein, 154 aa, Homo sapiens
  Payload ID: 8932
  Gene Symbol: KIAA1143
  Gene Name: KIAA1143
  Uniprot ID: Q96AT1
  ENSP ID: ENSP00000296121
MSKRNQVSYVRPAEPAFLARFKERVGYREGPTVETKRIQPQPPDEDGDHSDKEDEQPQVVVLKKGDLSVEEVMKIKAEIKAAKADEEPTPADGRIIYRKPVKHPSDEKYSGLTASSKKKKPNEDEVNQDSVKKNSQKQIKNSSLLSFDNEDENE

SEQ ID NO: 43464 - protein, 154 aa, Homo sapiens; identical to SEQ ID NO: 43463
  Payload ID: 8932
  Gene Symbol:
  Gene Name: KIAA1143
  ENSP ID: ENSP00000486878

SEQ ID NO: 43465 - protein, 351 aa, Homo sapiens
  Payload ID: 8933
  Gene Symbol: KIAA1147
  Gene Name: KIAA1147
  ENSP ID: ENSP00000418236
MVEWCLPQDIDLEGVEFKSMASGSHKIQSDFIYFRKGPFFGLACFANMPVESELERGARMKSVGILSPSYTLLYRYMHFLENQVRHQLEMPGHYSHLAAFYEDKKGVLHAGPGRGSSLPPVYWLPSIHRYMYPEMKFFGEQILILWKFALLRKRILIFSPPPVGVVCYRVYCCCCLANVSLPGIGGTIPESKPFFYVNVADIESLEVEVSYVACTTEKIFEEKRELYDVYVDNQNVKTHHDHLQPLLKINSADREKYRRLNEQRQMLLYSQEVEEDYNPCEEDLFVLFFLEQNNRIFQTLLEVSASQDKTLTAEHARGMGLDPQGDRSFLLDLLEAYGIDVMLVIDNPCCP

SEQ ID NO: 43466 - protein, 455 aa, Homo sapiens
  Payload ID: 8933
  Gene Symbol: KIAA1147
  Gene Name: KIAA1147
  Uniprot ID: A4D1U4
  ENSP ID: ENSP00000445768
MVEQGDAAPLLRWAEGPAVSLPQAPQPQAGGWGRGGGGGARPAAEPPRRREPEEPAAPEVLLQPGRLELGDVEEDQVVAVFVVTFDPRSGNMVEWCLPQDIDLEGVEFKSMASGSHKIQSDFIYFRKGPFFGLACFANMPVESELERGARMKSVGILSPSYTLLYRYMHFLENQVRHQLEMPGHYSHLAAFYEDKKGVLHAGPGRGSSLPPVYWLPSIHRYMYPEMKITHPAGCMSQFIKFFGEQILILWKFALLRKRILIFSPPPVGVVCYRVYCCCCLANVSLPGIGGTIPESKPFFYVNVADIESLEVEVSYVACTTEKIFEEKRELYDVYVDNQNVKTHHDHLQPLLKINSADREKYRRLNEQRQMLLYSQEVEEDYNPCEEDLFVLFFLEQNNRIFQTLLEVSASQDKTLTAEHARGMGLDPQGDRSFLLDLLEAYGIDVMLVIDNPCCP

SEQ ID NO: 43467 - protein, 455 aa, Homo sapiens; identical to SEQ ID NO: 43466
  Payload ID: 8933
  Gene Symbol: KIAA1147
  Gene Name: KIAA1147
  Uniprot ID: A4D1U4
  ENSP ID: ENSP00000459381

SEQ ID NO: 43468 - protein, 351 aa, Homo sapiens; identical to SEQ ID NO: 43465
  Payload ID: 8933
  Gene Symbol: KIAA1147
  Gene Name: KIAA1147
  ENSP ID: ENSP00000460973

SEQ ID NO: 43469 - protein, 714 aa, Homo sapiens
  Payload ID: 8934
  Gene Symbol: KIAA1161
  Gene Name: KIAA1161
  Uniprot ID: Q6NSJ0
  ENSP ID: ENSP00000297625
MLQNPQEKSQAYPRRRRPGCYAYRQNPEAIAAAAMYTFLPDNFSPAKPKPSKDLKPLLGSAVLGLLLVLAAVVAWCYYSVSLRKAERLRAELLDLKAGGFSIRNQKGEQVFRLAFRSGALDLDSCSRDGALLGCSLTADGLPLHFFIQTVRPKDTVMCYRVRWEEAAPGRAVEHAMFLGDAAAHWYGGAEMRTQHWPIRLDGQQEPQPFVTSDVYSSDAAFGGILERYWLSSRAAAIKVNDSVPFHLGWNSTERSLRLQARYHDTPYKPPAGRAAAPELSYRVCVGSDVTSIHKYMVRRYFNKPSRVPAPEAFRDPIWSTWALYGRAVDQDKVLRFAQQIRLHHFNSSHLEIDDMYTPAYGDFDFDEVKFPNASDMFRRLRDAGFRVTLWVHPFVNYNSSRFGEGVERELFVREPTGRLPALVRWWNGIGAVLDFTHPKARDWFQGHLRRLRSRYSVASFKFDAGEVSYLPRDFSTYRPLPDPSVWSRRYTEMALPFFSLAEVRVGYQSQNISCFFRLVDRDSVWGYDLGLRSLIPAVLTVSMLGYPFILPDMVGGNAVPQRTAGGDVPERELYIRWLEVAAFMPAMQFSIPPWRYDAEVVAIAQKFAALRASLVAPLLLELAGEVTDTGDPIVRPLWWIAPGDETAHRIDSQFLIGDTLLVAPVLEPGKQERDVYLPAGKWRSYKGELFDKTPVLLTDYPVDLDEIAYFTWAS

SEQ ID NO: 43470 - protein, 160 aa, Homo sapiens
  Payload ID: 8934
  Gene Symbol: KIAA1161
  Gene Name: KIAA1161
  ENSP ID: ENSP00000368437
FLPDNFSPAKPKPSKDLKPLLGSAVLGLLLVLAAVVAWCYYSVSLRKAERLRAELLDLKAGGFSIRNQKGEQEPQPFVTSDVYSSDAAFGGILERYWLSSRAAAIKVNDSVPFHLGWNSTERSLRLQARYHDTPYKPPAGRAAAPELSYRVCVGSDVTSI

SEQ ID NO: 43471 - protein, 305 aa, Homo sapiens
  Payload ID: 8935
  Gene Symbol: KIAA1191
  Gene Name: KIAA1191
  Uniprot ID: Q96A73
  ENSP ID: ENSP00000298569
MASRQPEVPALEASAPLGKMSLPIGIYRRAVSYDDTLEDPAPMTPPPSDMGSVPWKPVIPERKYQHLAKVEEGEASLPSPAMTLSSAIDSVDKVPVVKAKATHVIMNSLITKQTQESIQHFERQAGLRDAGYTPHKGLTTEETKYLRVAEALHKLKLQSGEVTKEERQPASAQSTPSTTPHSSPKQRPRGWFTSGSSTALPGPNPSTMDSGSGDKDRNLSDKWSLFGPRSLQKYDSGSFATQAYRGAQKPSPLELIRAQANRMAEDPAALKPPKMDIPVMEGKKQPPRAHNLKPRDLNVLTPTGF

SEQ ID NO: 43472 - protein, 286 aa, Homo sapiens
  Payload ID: 8935
  Gene Symbol: KIAA1191
  Gene Name: KIAA1191
  Uniprot ID: Q96A73
  ENSP ID: ENSP00000377326
MSLPIGIYRRAVSYDDTLEDPAPMTPPPSDMGSVPWKPVIPERKYQHLAKVEEGEASLPSPAMTLSSAIDSVDKVPVVKAKATHVIMNSLITKQTQESIQHFERQAGLRDAGYTPHKGLTTEETKYLRVAEALHKLKLQSGEVTKEERQPASAQSTPSTTPHSSPKQRPRGWFTSGSSTALPGPNPSTMDSGSGDKDRNLSDKWSLFGPRSLQKYDSGSFATQAYRGAQKPSPLELIRAQANRMAEDPAALKPPKMDIPVMEGKKQPPRAHNLKPRDLNVLTPTGF

SEQ ID NO: 43473 - protein, 305 aa, Homo sapiens; identical to SEQ ID NO: 43471
  Payload ID: 8935
  Gene Symbol: KIAA1191
  Gene Name: KIAA1191
  Uniprot ID: Q96A73
  ENSP ID: ENSP00000421061

SEQ ID NO: 43474 - protein, 95 aa, Homo sapiens
  Payload ID: 8935
  Gene Symbol: KIAA1191
  Gene Name: KIAA1191
  ENSP ID: ENSP00000421746
MSLPIGIYRRAVSYDDTLEDPAPMTPPPSDMGSVPWKPVIPERKYQHLAKVEEGEASLPSPAMTLSSAIDSVDKVPVVKAKATHVIMNSLITKQT

SEQ ID NO: 43475 - protein, 70 aa, Homo sapiens
  Payload ID: 8935
  Gene Symbol: KIAA1191
  Gene Name: KIAA1191
  ENSP ID: ENSP00000423741
MSLPIGIYRRAVSYDDTLEDPAPMTPPPSDMGSVPWKPVIPERKYQHLAKVEEGEASLPSPAMTLSSAID

SEQ ID NO: 43476 - protein, 65 aa, Homo sapiens
  Payload ID: 8935
  Gene Symbol: KIAA1191
  Gene Name: KIAA1191
  ENSP ID: ENSP00000424906
MSLPIGIYRRAVSYDDTLEDPAPMTPPPSDMGSVPWKPVIPERKYQHLAKVEEGEASLPSPAMTL

SEQ ID NO: 43477 - protein, 40 aa, Homo sapiens
  Payload ID: 8935
  Gene Symbol: KIAA1191
  Gene Name: KIAA1191
  ENSP ID: ENSP00000433506
MASRQPEVPETKVTEWRGNKRREAACISPVHPKHHSALFT

SEQ ID NO: 43478 - protein, 224 aa, Homo sapiens
  Payload ID: 8935
  Gene Symbol: KIAA1191
  Gene Name: KIAA1191
  ENSP ID: ENSP00000477518
MTLSSAIDSVDKVPVVKAKATHVIMNSLITKQTQESIQHFERQAGLRDAGYTPHKGLTTEETKYLRVAEALHKLKLQSGEVTKEERQPASAQSTPSTTPHSSPKQRPRGWFTSGSSTALPGPNPSTMDSGSGDKDRNLSDKWSLFGPRSLQKYDSGSFATQAYRGAQKPSPLELIRAQANRMAEDPAALKPPKMDIPVMEGKKQPPRAHNLKPRDLNVLTPTGF

SEQ ID NO: 43479 - protein, 286 aa, Homo sapiens; identical to SEQ ID NO: 43472
  Payload ID: 8935
  Gene Symbol: KIAA1191
  Gene Name: KIAA1191
  Uniprot ID: Q96A73
  ENSP ID: ENSP00000479627

SEQ ID NO: 43480 - protein, 1709 aa, Homo sapiens
  Payload ID: 8936
  Gene Symbol: KIAA1210
  Gene Name: KIAA1210
  Uniprot ID: Q9ULL0
  ENSP ID: ENSP00000384670
MRAGWTPRGFSAFHASLLPGRHPYLAHLGPRDRGARIGSRAYSQGCCSCLWLTYKGKKEGSTKGELGPAAVTDLEIPSYSRGFLPCTPRFPTTWCRGPGCFCGTAVIAGNLGDLARIVGPSHHASQLLLLQEQDSGNHPTMAESLSEISDSLDVLEAGDEGKKKCKFKALKSFFVKKKEKEAEDTQEEEMLELSLSSSNINISSLQPVRENQPTKARAKSSMGSKALSHDSIFMLGPEPERSASKMFPSMDPQRGRPQQRSHISRTLPKPRSKVPGVVSGAMSGAVLQNVPTSAVWVAGPKITENPPSRRRRLSIIPPVIQPEIISKNLVEISLDDESPKNPQKKALPHKSLTATQSFSELSSGPDCSQSLTAFATLASTSSTQLPIGFSTPATTQGCLDSSAARHKMTLNPRKQKKNLQVIIRGLPVWFSHFQGILEGSLQCVTQTLETPNLDEPLPVEPKEEEPNLPLVSEEEKSITKPKEINEKKLGMDSADSSSQKQNNKTEMYDKKTTDQAPNTDASRSQGYPMSAAYGRRWRRKGASVSGLSGCEFKGRSLKQSSEGYGLGDRAGSSPTNKTARNVPFSHLSLEKDNMEQPTTSQPETTTPQGLLSDKDDMGRRNAGIDFGSRKASAAQPIPENMDNSMVSDPQPYHEDAASGAEKTEARASLSLMVESLSTTQEEAILSVAAEAQVFMNPSHIQLEDQEAFSFDLQKAQSKMESAQDVQTICKEKPSGNVHQTFTASVLGMTSTTAKGDVYAKTLPPRSLFQSSRKPDAEEVSSDSENIPEEGDGSEELAHGHSSQSLGKFEDEQEVFSESKSFVEDLSSSEEELDLRCLSQALEEPEDAEVFTESSSYVEKYNTSDDCSSSEEDLPLRHPAQALGKPKNQQEVSSASNNTPEEQNDFMQQLPSRCPSQPIMNPTVQQQVPTSSVGTSIKQSDSVEPIPPRHPFQPWVNPKVEQEVSSSPKSMAVEESISMKPLPPKLLCQPLMNPKVQQNMFSGSEDIAVERVISVEPLLPRYSPQSLTDPQIRQISESTAVEEGTYVEPLPPRCLSQPSERPKFLDSMSTSAEWSSPVAPTPSKYTSPPWVTPKFEELYQLSAHPESTTVEEDISKEQLLPRHLSQLTVGNKVQQLSSNFERAAIEADISGSPLPPQYATQFLKRSKVQEMTSRLEKMAVEGTSNKSPIPRRPTQSFVKFMAQQIFSESSALKRGSDVAPLPPNLPSKSLSKPEVKHQVFSDSGSANPKGGISSKMLPMKHPLQSLGRPEDPQKVFSYSERAPGKCSSFKEQLSPRQLSQALRKPEYEQKVSPVSASSPKEWRNSKKQLPPKHSSQASDRSKFQPQMSSKGPVNVPVKQSSGEKHLPSSSPFQQQVHSSSVNAAARRSVFESNSDNWFLGRDEAFAIKTKKFSQGSKNPIKSIPAPATKPGKFTIAPVRQTSTSGGIYSKKEDLESGDGNNNQHANLSNQDDVEKLFGVRLKRAPPSQKYKSEKQDNFTQLASVPSGPISSSVGRGHKIRSTSQGLLDAAGNLTKISYVADKQQSRPKSESMAKKQPACKTPGKPAGQQSDYAVSEPVWITMAKQKQKSFKAHISVKELKTKSNAGADAETKEPKYEGAGSANENQPKKMFTSSVHKQEKTAQMKPPKPTKSVGFEAQKILQVPAMEKETKRSSTLPAKFQNPVEPIEPVWFSLARKKAKAWSHMAEITQ

SEQ ID NO: 43481 - protein, 1233 aa, Homo sapiens
  Payload ID: 8937
  Gene Symbol: KIAA1211
  Gene Name: KIAA1211
  Uniprot ID: Q6ZU35
  ENSP ID: ENSP00000264229
MGTRAFSHDSIFIPDGGAESEQTVQAMSQDNILGKVKTLQQQLGKNIKFGQRSPNAIPMNKANSGEASLEEDLFLTSPMEIVTQQDIVLSDAENKSSDTPSSLSPLNLPGAGSEMEEKVAPVKPSRPKRHFSSAGTIESVNLDAIPLAIARLDNSAAKHKLAVKPKKQRVSKKHRRLAQDPQHEQGGLESRPCLDQNGHPGEDKPTWHEEEPNPLDSEEERRRQEDYWRELEAKCKRQKAEAAEKRRLEEQRLQALERRLWEENRRQELLEEEGEGQEPPLEAERAPREEQQRSLEAPGWEDAERREREERERLEAEEERRRLQAQAQAEERRRLEEDARLEERRRQEEEEGRCAEELKRQEEEEAEGWEELEQQEAEVQGPPEALEETGEGRRGAEEEDLGEEEEEGQAHLEDWRGQLSELLNDFEERLEDQERLKPEGQREHSEEPGICEEQNPEAERRREQQGRSGDFQGADRPGPEEKREEGDTEPLLKQEGPVEAAQPPVERKEAAALEQGRKVEELRWQEVDERQTMPRPYTFQVSSGGKQILFPKVNLSPVTPAKDTGLTAAPQEPKAPKASPVQHALPSSLSVPHTAILVTGAQLCGPAVNLSQIKDTACKSLLGLEEKKHAEAPAGENPPRGPGDARAGSGKAKPRQESPSSASALAEWASIRSRILKNAESDPRSSERDQLRPGDESTPRGRCDSRGNQRKTPPVNAKFSIMPAWQKFSDGGTETSKQSTEAESIRKRPMLGPSEETAPQPPPAGVRELGKGPEKSEMHREPADTTEGCKFAKDLPSFLVPSLPYPPQKVVAHTEFTTSSDSETANGIAKPDPVMPGGEEKASPFGIKLRRTNYSLRFNCDQQAEQKKKKRHSSTGDSADAGPPAAGSARGEKEMEGVALKHGPSLPQERKQAPSTRRDSAEPSSSRSVPVAHPGPPPASSQTPAPEHDKAANKMPLAQKPALAPKPTSQTPPASPLSKLSRPYLVELLSRRAGRPDPEPSEPSKEDQESSDRRPPSPPGPEERKGQKRDEEEEATERKPASPPLPATQQEKPSQTPEAGRKEKPMLQSRHSLDGSKLTEKVETAQPLWITLALQKQKGFREQQATREERKQAREAKQAEKLSKENVSVSVQPGSSSVSRAGSLHKSTALPEEKRPETAVSRLERREQLKKANTLPTSVTVEISDSAPPAPLVKEVTKRFSTPDAAPVSTEPAWLALAKRKAKAWSDCPQIIK

SEQ ID NO: 43482 - protein, 1233 aa, Homo sapiens; identical to SEQ ID NO: 43481
  Payload ID: 8937
  Gene Symbol: KIAA1211
  Gene Name: KIAA1211
  Uniprot ID: Q6ZU35
  ENSP ID: ENSP00000423366

SEQ ID NO: 43483 - protein, 1226 aa, Homo sapiens
  Payload ID: 8937
  Gene Symbol: KIAA1211
  Gene Name: KIAA1211
  ENSP ID: ENSP00000444006
MGEQKVSRQFKQCHRTTSWAKSKLFSRLSSMFLQQLGKNIKFGQRSPNAIPMNKANSGEASLEEDLFLTSPMEIVTQQDIVLSDAENKSSDTPSSLSPLNLPGAGSEMEEKVAPVKPSRPKRHFSSAGTIESVNLDAIPLAIARLDNSAAKHKLAVKPKKQRVSKKHRRLAQDPQHEQGGLESRPCLDQNGHPGEDKPTWHEEEPNPLDSEEERRRQEDYWRELEAKCKRQKAEAAEKRRLEEQRLQALERRLWEENRRQELLEEEGEGQEPPLEAERAPREEQQRSLEAPGWEDAERREREERERLEAEEERRRLQAQAQAEERRRLEEDARLEERRRQEEEEGRCAEELKRQEEEEAEGWEELEQQEAEVQGPPEALEETGEGRRGAEEEDLGEEEEEGQAHLEDWRGQLSELLNDFEERLEDQERLKPEGQREHSEEPGICEEQNPEAERRREQQGRSGDFQGADRPGPEEKREEGDTEPLLKQEGPVEAAQPPVERKEAAALEQGRKVEELRWQEVDERQTMPRPYTFQVSSGGKQILFPKVNLSPVTPAKDTGLTAAPQEPKAPKASPVQHALPSSLSVPHTAILVTGAQLCGPAVNLSQIKDTACKSLLGLEEKKHAEAPAGENPPRGPGDARAGSGKAKPRQESPSSASALAEWASIRSRILKNAESDPRSSERDQLRPGDESTPRGRCDSRGNQRKTPPVNAKFSIMPAWQKFSDGGTETSKQSTEAESIRKRPMLGPSEETAPQPPPAGVRELGKGPEKSEMHREPADTTEGCKFAKDLPSFLVPSLPYPPQKVVAHTEFTTSSDSETANGIAKPDPVMPGGEEKASPFGIKLRRTNYSLRFNCDQQAEQKKKKRHSSTGDSADAGPPAAGSARGEKEMEGVALKHGPSLPQERKQAPSTRRDSAEPSSSRSVPVAHPGPPPASSQTPAPEHDKAANKMPLAQKPALAPKPTSQTPPASPLSKLSRPYLVELLSRRAGRPDPEPSEPSKEDQESSDRRPPSPPGPEERKGQKRDEEEEATERKPASPPLPATQQEKPSQTPEAGRKEKPMLQSRHSLDGSKLTEKVETAQPLWITLALQKQKGFREQQATREERKQAREAKQAEKLSKENVSVSVQPGSSSVSRAGSLHKSTALPEEKRPETAVSRLERREQLKKANTLPTSVTVEISDSAPPAPLVKEVTKRFSTPDAAPVSTEPAWLALAKRKAKAWSDCPQIIK

SEQ ID NO: 43484 - protein, 85 aa, Homo sapiens
  Payload ID: 8937
  Gene Symbol: KIAA1211
  Gene Name: KIAA1211
  ENSP ID: ENSP00000473672
  MOD_RES (1)..(1): Any amino acid
XQTPEAGRKEKPMLQSRHSLDGSKLTEKVETAQPLWITLALQKQKGFREQQATREERKQAREAKQAEKLSKENWRSPTRLPQRRW

SEQ ID NO: 43485 - protein, 37 aa, Homo sapiens
  Payload ID: 8937
  Gene Symbol: KIAA1211
  Gene Name: KIAA1211
  ENSP ID: ENSP00000486652
MGTRAFSHDSIFIPDGGAESEQTVQAMSQDNILGKVK

SEQ ID NO: 43486 - protein, 962 aa, Homo sapiens
  Payload ID: 8938
  Gene Symbol: KIAA1211L
  Gene Name: KIAA1211-like
  Uniprot ID: Q6NV74
  ENSP ID: ENSP00000380996
MISTRVMDIKLREAAEGLGEDSTGKKKSKFKTFKKFFGKKKRKESPSSTGSSTWKQSQTRNEVIAIESGPVGYDSEDELEESRGTLGSRALSHDSIFIPESGQDATRPVRVFSQENVCDRIKALQLKIQCNVKMGPPPPPGGLPAKRGEDAGMSSEDDGLPRSPPEMSLLHDVGPGTTIKVSVVSPDHVSDSTVSARISDNSLAPVADFSYPAESSSCLDNSAAKHKLQVKPRNQRSSKMRRLSSRAQSESLSDLTCTPEEEENEEKPLLEVSPEERPSSGQQDVAPDRGPEPGPPAPLPPPGGARARRARLQHSSALTASVEEGGVPGEDPSSRPATPELAEPESAPTLRVEPPSPPEGPPNPGPDGGKQDGEAPPAGPCAPATDKAEEVVCAPEDVASPFPTAIPEGDTTPPETDPAATSEAPSARDGPERSVPKEAEPTPPVLPDEEKGPPGPAPEPEREAETEPERGAGTEPERIGTEPSTAPAPSPPAPKSCLKHRPAAASEGPAASPPLAAAESPPVEPGPGSLDAEAAAPERPKAERAEAPPAGAERAAPERKAERGGAELRGAKKFSVSSCRARPRPGVSRPLERASGRLPLARSGPVWRSEAALDDLQGLPEPQHAKPGPRKLAERGPQDSGDRAASPAGPRKSPQEAAAAPGTREPCPAAQEPAPSEDRNPFPVKLRSTSLSLKYRDGASQEVKGVKRYSAEVRLERSLTVLPKEEKCPLGTAPALRGTRAPSDQGKGKARPPEPLSSKPPLPRKPLLQSFTLPHQPAPPDAGPGEREPRKEPRTAEKRPLRRGAEKSLPPAATGPGADGQPAPPWITVTRQKRRGTLDQPPNQEDKPGARTLKSEPGKQAKVPERGQEPVKQADFVRSKSFLITPVKPAVDRKQGAKLNFKEGLQRGISLSHQNLAQSAVMMEKELHQLKRASYASTDQPSWMELARKKSQAWSDMPQIIK

SEQ ID NO: 43487 - protein, 194 aa, Homo sapiens
  Payload ID: 8938
  Gene Symbol: KIAA1211L
  Gene Name: KIAA1211-like
  ENSP ID: ENSP00000387902
MISLASVQDKSELDMISTRVMDIKLREAAEGLGEDSTGKKKSKFKTFKKFFGKKKRKESPSSTGSSTWKQSQTRNEVIAIESGPVGYDSEDELEESRGTLGSRALSHDSIFIPESGQDATRPVRVFSQENVCDRIKALQLKIQCNVKMGPPPPPGGLPAKRGEDAGMSSEDDGLPRSPPEMSLLHDVGPGTTIK

SEQ ID NO: 43488 - protein, 178 aa, Homo sapiens
  Payload ID: 8938
  Gene Symbol: KIAA1211L
  Gene Name: KIAA1211-like
  ENSP ID: ENSP00000390799
MISLASVQDKSELDMISTRVMDIKLREAAEGLGEDSTGKKKSKFKTFKKFFGKKKRKESPSSTGSSTWKQSQTRNEVIAIESGPVGYDSEDELEESRGTLGSRALSHDSIFIPESGQDATRPVRVFSQENVCDRIKALQLKIQCNVKMGPPPPPGGLPAKRGEDAGMSSEDDGLPRSP

SEQ ID NO: 43489 - protein, 268 aa, Homo sapiens
  Payload ID: 8938
  Gene Symbol: KIAA1211L
  Gene Name: KIAA1211-like
  ENSP ID: ENSP00000396657
MRELEAHSTLRRMAAFYQCIRPDPSELDMISTRVMDIKLREAAEGLGEDSTGKKKSKFKTFKKFFGKKKRKESPSSTGSSTWKQSQTRNEVIAIESGPVGYDSEDELEESRGTLGSRALSHDSIFIPESGQDATRPVRVFSQENVCDRIKALQLKIQCNVKMGPPPPPGGLPAKRGEDAGMSSEDDGLPRSPPEMSLLHDVGPGTTIKVSVVSPDHVSDSTVSARISDNSLAPVADFSYPAESSSCLDNSAAKHKLQVKPRNQRSSKM

SEQ ID NO: 43490 - protein, 37 aa, Homo sapiens
  Payload ID: 8938
  Gene Symbol: KIAA1211L
  Gene Name: KIAA1211-like
  ENSP ID: ENSP00000403428
MISLASVQDKSELDMISTRVMDIKLREAAEGLGEDST

SEQ ID NO: 43491 - protein, 606 aa, Homo sapiens
  Payload ID: 8938
  Gene Symbol: KIAA1211L
  Gene Name: KIAA1211-like
  ENSP ID: ENSP00000480530
MDIKLREAAEGLGEDSTGKKKSKFKTFKKFFGKKKRKESPSSTGSSTWKQSQTRNEVIAIESGPVGYDSEDELEESRGTLGSRALSHDSIFIPESGQDATRPVRVFSQENVCDRIKALQLKIQCNVKMGPPPPPGGLPAKRGEDAGMSSEDDGLPRSPPEMSLLHDVGPGTTIKVSVVSPDHVSDSTVSARISDNSLAPVADFSYPAESSSCLDNSAAKHKLQVKPRNQRSSKMRRLSSRAQSESLSDLTCTPEEEENEEKPLLEVSPEERPSSGQQDVAPDRGPEPGPPAPLPPPGGARARRARLQHSSALTASVEEGGVPGEDPSSRPATPELAEPESAPTLRVEPPSPPEGPPNPGPDGGKQDGEAPPAGPCAPATDKAEEVVCAPEDVASPFPTAIPEGDTTPPETDPAATSEAPSARDGPERSVPKEAEPTPPVLPDEEKGPPGPAPEPEREAETEPERGAGTEPERIGTEPSTAPAPSPPAPKSCLKHRPAAASEGRRVPAACRCGVSPGGARPRFPRRRGRRPGAPQGRASRGATGGRREGGARAEGGEGRCRAARREEVLGVLVPSAASSGRLPPAGTGQRPPAPREERPGLEERGGS

SEQ ID NO: 43492 - protein, 932 aa, Homo sapiens
  Payload ID: 8939
  Gene Symbol: KIAA1217
  Gene Name: KIAA1217
  Uniprot ID: Q5T5P2
  ENSP ID: ENSP00000302343
MQRELVYARGDGPGAPRPGSTAHPPHAIPNSPPSTPVPHSMPPSPSRIPYGGTRSMVVPGNATIPRDRISSLPVSRPISPSPSAILERRDVKPDEDMSGKNIAMYRNEGFYADPYLYHEGRMSIASSHGGHPLDVPDHIIAYHRTAIRSASAYCNPSMQAEMHMEQSLYRQKSRKYPDSHLPTLGSKTPPASPHRVSDLRMIDMHAHYNAHGPPHTMQPDRASPSRQAFKKEPGTLVYIEKPRSAAGLSSLVDLGPPLMEKQVFAYSTATIPKDRETSEKMMKTTANRNHTDSAGTPHVSGGKMLSALESTVPPSQPPPVGTSAIHMSLLEMRRSVAELRLQLQQMRQLQLQNQELLRAMMKKAELEISGKVMETMKRLEDPVQRQRVLVEQERQKYLHEEEKIVKKLCELEDFVEDLKKDSTAASRLVTLKDVEDGAFLLRQVGEAVATLKGEFPTLQNKMRAILRIEVEAVRFLKEEPHKLDSLLKRVRSMTDVLTMLRRHVTDGLLKGTDAAQAAQYMAMEKATAAEVLKSQEEAAHTSGQPFHSTGAPGDAKSEVVPLSGMMVRHAQSSPVVIQPSQHSVALLNPAQNLPHVASSPAVPQEATSTLQMSQAPQSPQIPMNGSAMQSLFIEEIHSVSAKNRAVSIEKAEKKWEEKRQNLDHYNGKEFEKLLEEAQANIMKSIPNLEMPPATGPLPRGDAPVDKVELSEDSPNSEQDLEKLGGKSPPPPPPPPRRSYLPGSGLTTTRSGDVVYTGRKENITAKASSEDAGPSPQTRATKYPAEEPASAWTPSPPPVTTSSSKDEEEEEEEGDKIMAELQAFQKCSFMDVNSNSHAEPSRADSHVKDTRSGATVPPKEKKNLEFFHEDVRKSDVEYENGPQMEFQKGSSGAPQTSRMPVPMSAKNRPGTLDKPGKQSKLQDPRQYRQVVLP

SEQ ID NO: 43493 - protein, 1465 aa, Homo sapiens
  Payload ID: 8939
  Gene Symbol: KIAA1217
  Gene Name: KIAA1217
  Uniprot ID: Q5T5P2
  ENSP ID: ENSP00000365634
MQRELVYARGDGPGAPRPGSTAHPPHAIPNSPPSTPVPHSMPPSPSRIPYGGTRSMVVPGNATIPRDRISSLPVSRPISPSPSAILERRDVKPDEDMSGKNIAMYRNEGFYADPYLYHEGRMSIASSHGGHPLDVPDHIIAYHRTAIRSASAYCNPSMQAEMHMEQSLYRQKSRKYPDSHLPTLGSKTPPASPHRVSDLRMIDMHAHYNAHGPPHTMQPDRASPSRQAFKKEPGTLVYIEKPRSAAGLSSLVDLGPPLMEKQVFAYSTATIPKDRETSEKMMKTTANRNHTDSAGTPHVSGGKMLSALESTVPPSQPPPVGTSAIHMSLLEMRRSVAELRLQLQQMRQLQLQNQELLRAMMKKAELEISGKVMETMKRLEDPVQRQRVLVEQERQKYLHEEEKIVKKLCELEDFVEDLKKDSTAASRLVTLKDVEDGAFLLRQVGEAVATLKGEFPTLQNKMRAILRIEVEAVRFLKEEPHKLDSLLKRVRSMTDVLTMLRRHVTDGLLKGTDAAQAAQYMAMEKATAAEVLKSQEEAAHTSGQPFHSTGAPGDAKSEVVPLSGMMVRHAQSSPVVIQPSQHSVALLNPAQNLPHVASSPAVPQEATSTLQMSQAPQSPQIPMNGSAMQSLFIEEIHSVSAKNRAVSIEKAEKKWEEKRQNLDHYNGKEFEKLLEEAQANIMKSIPNLEMPPATGPLPRGDAPVDKVELSEDSPNSEQDLEKLGGKSPPPPPPPPRRSYLPGSGLTTTRSGDVVYTGRKENITAKASSEDAGPSPQTRATKYPAEEPASAWTPSPPPVTTSSSKDEEEEEEEGDKIMAELQAFQKCSFMDVNSNSHAEPSRADSHVKDTRSGATVPPKEKKNLEFFHEDVRKSDVEYENGPQMEFQKVTTGAVRPSDPPKWERGMENSISDASRTSEYKTEIIMKENSISNMSLLRDSRNYSQETVPKASFGFSGISPLEDEINKGSKISGLQYSIPDTENQTLNYGKTKEMEKQNTDKCHVSSHTRLTESSVHDFKTEDQEVITTDFGQVVLRPKEARHANVNPNEDGESSSSSPTEENAATDNIAFMITETTVQVLSSGEVHDIVSQKGEDIQTVNIDARKEMTPRQEGTDNEDPVVCLDKKPVIIIFDEPMDIRSAYKRLSTIFEECDEELERMMMEEKIEEEEEEENGDSVVQNNNTSQMSHKKVAPGNLRTGQQVETKSQPHSLATETRNPGGQEMNRTELNKFSHVDSPNSECKGEDATDDQFESPKKKFKFKFPKKQLAALTQAIRTGTKTGKKTLQVVVYEEEEEDGTLKQHKEAKRFEIARSQPEDTPENTVRRQEQPSIESTSPISRTDEIRKNTYRTLDSLEQTIKQLENTISEMSPKALVDTSCSSNRDSVASSSHIAQEASPRPLLVPDEGPTALEPPTSIPSASRKGSSGAPQTSRMPVPMSAKNRPGTLDKPGKQSKLQDPRQYRQVVLP

SEQ ID NO: 43494 - protein, 1374 aa, Homo sapiens
  Payload ID: 8939
  Gene Symbol: KIAA1217
  Gene Name: KIAA1217
  Uniprot ID: Q5T5P2
  ENSP ID: ENSP00000365635
MEENESQKCEPCLPYSADRRQMQEQGKGNLHVTSPEDAECRRTKERLSNGNSRGSVSKSSRNIPRRHTLGGPRSSKEILGMQTSEMDRKREAFLEHLKQKYPHHASAIMGHQERLRDQTRSPKLSHSPQPPSLGDPVEHLSETSADSLEAMSEGDAPTPFSRGSRTRASLPVVRSTNQTKERSLGVLYLQYGDETKQLRMPNEITSADTIRALFVSAFPQQLTMKMLESPSVAIYIKDESRNVYYELNDVRNIQDRSLLKVYNKDPAHAFNHTPKTMNGDMRMQRELVYARGDGPGAPRPGSTAHPPHAIPNSPPSTPVPHSMPPSPSRIPYGGTRSMVVPGNATIPRDRISSLPVSRPISPSPSAILERRDVKPDEDMSGKNIAMYRNEGFYADPYLYHEGRMSIASSHGGHPLDVPDHIIAYHRTAIRSASAYCNPSMQAEMHMEQSLYRQKSRKYPDSHLPTLGSKTPPASPHRVSDLRMIDMHAHYNAHGPPHTMQPDRASPSRQAFKKEPGTLVYIEKPRSAAGLSSLVDLGPPLMEKQVFAYSTATIPKDRETSEKMMKTTANRNHTDSAGTPHVSGGKMLSALESTVPPSQPPPVGTSAIHMSLLEMRRSVAELRLQLQQMRQLQLQNQELLRAMMKKAELEISGKVMETMKRLEDPVQRQRVLVEQERQKYLHEEEKIVKKLCELEDFVEDLKKDSTAASRLVTLKDVEDGAFLLRQVGEAVATLKGEFPTLQNKMRAILRIEVEAVRFLKEEPHKLDSLLKRVRSMTDVLTMLRRHVTDGLLKGTDAAQAAQYMAMEKATAAEVLKSQEEAAHTSGQPFHSTGAPGDAKSEVVPLSGMMVRHAQSSPVVIQPSQHSVALLNPAQNLPHVASSPAVPQEATSTLQMSQAPQSPQIPMNGSAMQSLFIEEIHSVSAKNRAVSIEKAEKKWEEKRQNLDHYNGKEFEKLLEEAQANIMKSIPNLEMPPATGPLPRGDAPVDKVELSDSPNSEQDLEKLGGKSPPPPPPPPRRSYLPGSGLTTTRSGDVVYTGRKENITAKASSEDAGPSPQTRATKYPAEEPASAWTPSPPPVTTSSSKDEEEEEEEGDKIMAELQAFQKCSFMDVNSNSHAEPSRADSHVKDTRSGATVPPKEKKNLEFFHEDVRKSDVEYENGPQMEFQKGSSGAPQTSRMPVPMSAKNRPGTLDKPGKQSKLQDPRQYRQANGSAKKSGGDFKPTSPSLPASKIPALSPSSGKSSSLPSSSGDSSNLPNPPATKPSIASNPLSPQTGPPAHSASLIPSVSNGSLKFQSLTHTGKGHHLSFSPQSQNGRAPPPLSFSSSPPSPASSVSLNQGAKGTRTIHTPSLTSYKAQNGSSSKATPSTAKETS

SEQ ID NO: 43495 - protein, 1943 aa, Homo sapiens
  Payload ID: 8939
  Gene Symbol: KIAA1217
  Gene Name: KIAA1217
  Uniprot ID: Q5T5P2
  ENSP ID: ENSP00000365637
MEENESQKCEPCLPYSADRRQMQEQGKGNLHVTSPEDAECRRTKERLSNGNSRGSVSKSSRNIPRRHTLGGPRSSKEILGMQTSEMDRKREAFLEHLKQKYPHHASAIMGHQERLRDQTRSPKLSHSPQPPSLGDPVEHLSETSADSLEAMSEGDAPTPFSRGSRTRASLPVVRSTNQTKERSLGVLYLQYGDETKQLRMPNEITSADTIRALFVSAFPQQLTMKMLESPSVAIYIKDESRNVYYELNDVRNIQDRSLLKVYNKDPAHAFNHTPKTMNGDMRMQRELVYARGDGPGAPRPGSTAHPPHAIPNSPPSTPVPHSMPPSPSRIPYGGTRSMVVPGNATIPRDRISSLPVSRPISPSPSAILERRDVKPDEDMSGKNIAMYRNEGFYADPYLYHEGRMSIASSHGGHPLDVPDHIIAYHRTAIRSASAYCNPSMQAEMHMEQSLYRQKSRKYPDSHLPTLGSKTPPASPHRVSDLRMIDMHAHYNAHGPPHTMQPDRASPSRQAFKKEPGTLVYIEKPRSAAGLSSLVDLGPPLMEKQVFAYSTATIPKDRETRERMQAMEKQIASLTGLVQSALFKGPITSYSKDASSEKMMKTTANRNHTDSAGTPHVSGGKMLSALESTVPPSQPPPVGTSAIHMSLLEMRRSVAELRLQLQQMRQLQLQNQELLRAMMKKAELEISGKVMETMKRLEDPVQRQRVLVEQERQKYLHEEEKIVKKLCELEDFVEDLKKDSTAASRLVTLKDVEDGAFLLRQVGEAVATLKGEFPTLQNKMRAILRIEVEAVRFLKEEPHKLDSLLKRVRSMTDVLTMLRRHVTDGLLKGTDAAQAAQYMAMEKATAAEVLKSQEEAAHTSGQPFHSTGAPGDAKSEVVPLSGMMVRHAQSSPVVIQPSQHSVALLNPAQNLPHVASSPAVPQEATSTLQMSQAPQSPQIPMNGSAMQSLFIEEIHSVSAKNRAVSIEKAEKKWEEKRQNLDHYNGKEFEKLLEEAQANIMKSIPNLEMPPATGPLPRGDAPVDKVELSEDSPNSEQDLEKLGGKSPPPPPPPPRRSYLPGSGLTTTRSGDVVYTGRKENITAKASSEDAGPSPQTRATKYPAEEPASAWTPSPPPVTTSSSKDEEEEEEEGDKIMAELQAFQKCSFMDVNSNSHAEPSRADSHVKDTRSGATVPPKEKKNLEFFHEDVRKSDVEYENGPQMEFQKVTTGAVRPSDPPKWERGMENSISDASRTSEYKTEIIMKENSISNMSLLRDSRNYSQETVPKASFGFSGISPLEDEINKGSKISGLQYSIPDTENQTLNYGKTKEMEKQNTDKCHVSSHTRLTESSVHDFKTEDQEVITTDFGQVVLRPKEARHANVNPNEDGESSSSSPTEENAATDNIAFMITETTVQVLSSGEVHDIVSQKGEDIQTVNIDARKEMTPRQEGTDNEDPVVCLDKKPVIIIFDEPMDIRSAYKRLSTIFEECDEELERMMMEEKIEEEEEEENGDSVVQNNNTSQMSHKKVAPGNLRTGQQVETKSQPHSLATETRNPGGQEMNRTELNKFSHVDSPNSECKGEDATDDQFESPKKKFKFKFPKKQLAALTQAIRTGTKTGKKTLQVVVYEEEEEDGTLKQHKEAKRFEIARSQPEDTPENTVRRQEQPSIESTSPISRTDEIRKNTYRTLDSLEQTIKQLENTISEMSPKALVDTSCSSNRDSVASSSHIAQEASPRPLLVPDEGPTALEPPTSIPSASRKGSSGAPQTSRMPVPMSAKNRPGTLDKPGKQSKLQDPRQYRQANGSAKKSGGDFKPTSPSLPASKIPALSPSSGKSSSLPSSSGDSSNLPNPPATKPSIASNPLSPQTGPPAHSASLIPSVSNGSLKFQSLTHTGKGHHLSFSPQSQNGRAPPPLSFSSSPPSPASSVSLNQGAKGTRTIHTPSLTSYKAQNGSSSKATPSTAKETS

SEQ ID NO: 43496 - protein, 933 aa, Homo sapiens
  Payload ID: 8939
  Gene Symbol: KIAA1217
  Gene Name: KIAA1217
  ENSP ID: ENSP00000365639
MEENESQKCEPCLPYSADRRQMQEQGKGNLHVTSPEDAECRRTKERLSNGNSRGSVSKSSRNIPRRHTLGGPRSSKEILGMQTSEMDRKREAFLEHLKQKYPHHASAIMGHQERLRDQTRSPKLSHSPQPPSLGDPVEHLSETSADSLEAMSEGDAPTPFSRGSRTRASLPVVRSTNQTKERSLGVLYLQYGDETKQLRMPNEITSADTIRALFVSAFPQQLTMKMLESPSVAIYIKDESRNVYYELNDVRNIQDRSLLKVYNKDPAHAFNHTPKTMNGDMRMQRELVYARGDGPGAPRPGSTAHPPHAIPNSPPSTPVPHSMPPSPSRIPYGGTRSMVVPGNATIPRDRISSLPVSRPISPSPSAILERRDVKPDEDMSGKNIAMYRNEGFYADPYLYHEGRMSIASSHGGHPLDVPDHIIAYHRTAIRSASAYCNPSMQAEMHMEQSLYRQKSRKYPDSHLPTLGSKTPPASPHRVSDLRMIDMHAHYNAHGPPHTMQPDRASPSRQAFKKEPGTLVYIEKPRSAAGLSSLVDLGPPLMEKQVFAYSTATIPKDRETSEKMMKTTANRNHTDSAGTPHVSGGKMLSALESTVPPSQPPPVGTSAIHMSLLEMRRSVAELRLQLQQMRQLQLQNQELLRAMMKKAELEISGKVMETMKRLEDPVQRQRVLVEQERQKYLHEEEKIVKKLCELEDFVEDLKKDSTAASRLVTLKDVEDGAFLLRQVGEAVATLKGEFPTLQNKMRAILRIEVEAVRFLKEEPHKLDSLLKRVRSMTDVLTMLRRHVTDGLLKGTDAAQAAQYMAMEKATAAEVLKSQEEAAHTSGQPFHSTGAPGDAKSEVVPLSGMMVRHAQSSPVVIQPSQHSVALLNPAQNLPHVASSPAVPQEATSTLQMSQAPQSPQIPMNGSAMQSLFIEEIHSVSAKNRAVSIEKA

SEQ ID NO: 43497 - protein, 1264 aa, Homo sapiens
  Payload ID: 8939
  Gene Symbol: KIAA1217
  Gene Name: KIAA1217
  Uniprot ID: Q5T5P2
  ENSP ID: ENSP00000365645
MQTSEMDRKREAFLEHLKQKYPHHASAIMGHQERLRDQTRSPKLSHSPQPPSLGDPVEHLSETSADSLEAMSEGDAPTPFSRGSRTRASLPVVRSTNQTKERSLGVLYLQYGDETKQLRMPNEITSADTIRALFVSAFPQQLTMKMLESPSVAIYIKDESRNVYYELNDVRNIQDRSLLKVYNKDPAHAFNHTPKTMNGDMRMQRELVYARGDGPGAPRPGSTAHPPHAIPNSPPSTPVPHSMPPSPSRIPYGGTRSMVVPGNATIPRDRISSLPVSRPISPSPSAILERRDVKPDEDMSGKNIAMYRNEGFYADPYLYHEGRMSIASSHGGHPLDVPDHIIAYHRTAIRSASAYCNPSMQAEMHMEQSLYRQKSRKYPDSHLPTLGSKTPPASPHRVSDLRMIDMHAHYNAHGPPHTMQPDRASPSRQAFKKEPGTLVYIEKPRSAAGLSSLVDLGPPLMEKQVFAYSTATIPKDRETRERMQAMEKQIASLTGLVQSALFKGPITSYSKDASSEKMMKTTANRNHTDSAGTPHVSGGKMLSALESTVPPSQPPPVGTSAIHMSLLEMRRSVAELRLQLQQMRQLQLQNQELLRAMMKKAELEISGKVMETMKRLEDPVQRQRVLVEQERQKYLHEEEKIVKKLCELEDFVEDLKKDSTAASRLVTLKDVEDGAFLLRQVGEAVATLKGEFPTLQNKMRAILRIEVEAVRFLKEEPHKLDSLLKRVRSMTDVLTMLRRHVTDGLLKGTDAAQAAQYMAMEKATAAEVLKSQEEAAHTSGQPFHSTGAPGDAKSEVVPLSGMMVRHAQSSPVVIQPSQHSVALLNPAQNLPHVASSPAVPQEATSTLQMSQAPQSPQIPMNGSAMQSLFIEEIHSVSAKNRAVSIEKAEKKWEEKRQNLDHYNGKEFEKLLEEAQANIMKSIPNLEMPPATGPLPRGDAPVDKVELSEDSPNSEQDLEKLGGKSPPPPPPPPRRSYLPGSGLTTTRSGDVVYTGRKENITAKASSEDAGPSPQTRATKYPAEEPASAWTPSPPPVTTSSSKDEEEEEEEGDKIMAELQGSSGAPQTSRMPVPMSAKNRPGTLDKPGKQSKLQDPRQYRQANGSAKKSGGDFKPTSPSLPASKIPALSPSSGKSSSLPSSSGDSSNLPNPPATKPSIASNPLSPQTGPPAHSASLIPSVSNGSLKFQSLTHTGKGHHLSFSPQSQNGRAPPPLSFSSSPPSPASSVSLNQGAKGTRTIHTPSLTSYKAQNGSSSKATPSTAKETS

SEQ ID NO: 43498 - protein, 906 aa, Homo sapiens
  Payload ID: 8939
  Gene Symbol: KIAA1217
  Gene Name: KIAA1217
  Uniprot ID: Q5T5P2
  ENSP ID: ENSP00000379722
MQRELVYARGDGPGAPRPGSTAHPPHAIPNSPPSTPVPHSMPPSPSRIPYGGTRSMVVPGNATIPRDRISSLPVSRPISPSPSAILERRDVKPDEDMSGKNIAMYRNEGFYADPYLYHEGRMSIASSHGGHPLDVPDHIIAYHRTAIRSASAYCNPSMQAEMHMEQSLYRQKSRKYPDSHLPTLGSKTPPASPHRVSDLRMIDMHAHYNAHGPPHTMQPDRASPSRQAFKKEPGTLVYIEKPRSAAGLSSLVDLGPPLMEKQVFAYSTATIPKDRETSEKMMKTTANRNHTDSAGTPHVSGGKMLSALESTVPPSQPPPVGTSAIHMSLLEMRRSVAELRLQLQQMRQLQLQNQELLRAMMKKAELEISGKVMETMKRLEDPVQRQRVLVEQERQKYLHEEEKIVKKLCELEDFVEDLKKDSTAASRLVTLKDVEDGAFLLRQVGEAVATLKGEFPTLQNKMRAILRIEVEAVRFLKEEPHKLDSLLKRVRSMTDVLTMLRRHVTDGLLKGTDAAQAAQYMAMEKATAAEVLKSQEEAAHTSGQPFHSTGAPGDAKSEVVPLSGMMVRHAQSSPVVIQPSQHSVALLNPAQNLPHVASSPAVPQEATSTLQMSQAPQSPQIPMNGSAMQSLFIEEIHSVSAKNRAVSIEKAEKKWEEKRQNLDHYNGKEFEKLLEEAQANIMKSIPNLEMPPATGPLPRGDAPVDKVELSEDSPNSEQDLEKLGGKSPPPPPPPPRRSYLPGSGLTTTRSGDVVYTGRKENITAKASSEDAGPSPQTRATKYPAEEPASAWTPSPPPVTTSSSKDEEEEEEEGDKIMAELQAFQKCSFMDVNSNSHAEPSRADSHVKDTRSGATVPPKEKKGSSGAPQTSRMPVPMSAKNRPGTLDKPGKQSKLQDPRQYRQVVLP

SEQ ID NO: 43499 - protein, 866 aa, Homo sapiens
  Payload ID: 8939
  Gene Symbol: KIAA1217
  Gene Name: KIAA1217
  Uniprot ID: Q5T5P2
  ENSP ID: ENSP00000379723
MQRELVYARGDGPGAPRPGSTAHPPHAIPNSPPSTPVPHSMPPSPSRIPYGGTRSMVVPGNATIPRDRISSLPVSRPISPSPSAILERRDVKPDEDMSGKNIAMYRNEGFYADPYLYHEGRMSIASSHGGHPLDVPDHIIAYHRTAIRSASAYCNPSMQAEMHMEQSLYRQKSRKYPDSHLPTLGSKTPPASPHRVSDLRMIDMHAHYNAHGPPHTMQPDRASPSRQAFKKEPGTLVYIEKPRSAAGLSSLVDLGPPLMEKQVFAYSTATIPKDRETSEKMMKTTANRNHTDSAGTPHVSGGKMLSALESTVPPSQPPPVGTSAIHMSLLEMRRSVAELRLQLQQMRQLQLQNQELLRAMMKKAELEISGKVMETMKRLEDPVQRQRVLVEQERQKYLHEEEKIVKKLCELEDFVEDLKKDSTAASRLVTLKDVEDGAFLLRQVGEAVATLKGEFPTLQNKMRAILRIEVEAVRFLKEEPHKLDSLLKRVRSMTDVLTMLRRHVTDGLLKGTDAAQAAQYMAMEKATAAEVLKSQEEAAHTSGQPFHSTGAPGDAKSEVVPLSGMMVRHAQSSPVVIQPSQHSVALLNPAQNLPHVASSPAVPQEATSTLQMSQAPQSPQIPMNGSAMQSLFIEEIHSVSAKNRAVSIEKAEKKWEEKRQNLDHYNGKEFEKLLEEAQANIMKSIPNLEMPPATGPLPRGDAPVDKVELSEDSPNSEQDLEKLGGKSPPPPPPPPRRSYLPGSGLTTTRSGDVVYTGRKENITAKASSEDAGPSPQTRATKYPAEEPASAWTPSPPPVTTSSSKDEEEEEEEGDKIMAELQGSSGAPQTSRMPVPMSAKNRPGTLDKPGKQSKLQDPRQYRQVVLP

SEQ ID NO: 43500 - protein, 1264 aa, Homo sapiens; identical to SEQ ID NO: 43497
  Payload ID: 8939
  Gene Symbol: KIAA1217
  Gene Name: KIAA1217
  Uniprot ID: Q5T5P2
  ENSP ID: ENSP00000389680

SEQ ID NO: 43501 - protein, 1349 aa, Homo sapiens
  Payload ID: 8939
  Gene Symbol: KIAA1217
  Gene Name: KIAA1217
  Uniprot ID: Q5T5P2
  ENSP ID: ENSP00000392625
MEENESQKCEPCLPYSADRRQMQEQGKGNLHVTSPEDAECRRTKERLSNGNSRGSVSKSSRNIPRRHTLGGPRSSKEILGMQTSEMDRKREAFLEHLKQKYPHHASAIMGHQERLRDQTRSPKLSHSPQPPSLGDPVEHLSETSADSLEAMSEGDAPTPFSRGSRTRASLPVVRSTNQTKERSLGVLYLQYGDETKQLRMPNEITSADTIRALFVSAFPQQLTMKMLESPSVAIYIKDESRNVYYELNDVRNIQDRSLLKVYNKDPAHAFNHTPKTMNGDMRMQRELVYARGDGPGAPRPGSTAHPPHAIPNSPPSTPVPHSMPPSPSRIPYGGTRSMVVPGNATIPRDRISSLPVSRPISPSPSAILERRDVKPDEDMSGKNIAMYRNEGFYADPYLYHEGRMSIASSHGGHPLDVPDHIIAYHRTAIRSASAYCNPSMQAEMHMEQSLYRQKSRKYPDSHLPTLGSKTPPASPHRVSDLRMIDMHAHYNAHGPPHTMQPDRASPSRQAFKKEPGTLVYIEKPRSAAGLSSLVDLGPPLMEKQVFAYSTATIPKDRETSEKMMKTTANRNHTDSAGTPHVSGGKMLSALESTVPPSQPPPVGTSAIHMSLLEMRRSVAELRLQLQQMRQLQLQNQELLRAMMKKAELEISGKVMETMKRLEDPVQRQRVLVEQERQKYLHEEEKIVKKLCELEDFVEDLKKDSTAASRLVTLKDVEDGAFLLRQVGEAVATLKGEFPTLQNKMRAILRIEVEAVRFLKEEPHKLDSLLKRVRSMTDVLTMLRRHVTDGLLKGTDAAQAAQYMAMEKATAAEVLKSQEEAAHTSGQPFHSTGAPGDAKSEVVPLSGMMVRHAQSSPVVIQPSQHSVALLNPAQNLPHVASSPAVPQEATSTLQMSQAPQSPQIPMNGSAMQSLFIEEIHSVSAKNRAVSIEKAEKKWEEKRQNLDHYNGKEFEKLLEEAQANIMKSIPNLEMPPATGPLPRGDAPVDKVELSEDSPNSEQDLEKLGGKSPPPPPPPPRRSYLPGSGLTTTRSGDVVYTGRKENITAKASSEDAGPSPQTRATKYPAEEPASAWTPSPPPVTTSSSKDEEEEEEEGDKIMAELQAFQKCSFMDVNSNSHAEPSRADSHVKDTRSGATVPPKEKKGSSGAPQTSRMPVPMSAKNRPGTLDKPGKQSKLQDPRQYRQANGSAKKSGGDFKPTSPSLPASKIPALSPSSGKSSSLPSSSGDSSNLPNPPATKPSIASNPLSPQTGPPAHSASLIPSVSNGSLKFQSLTHTGKGHHLSFSPQSQNGRAPPPLSFSSSPPSPASSVSLNQGAKGTRTIHTPSLTSYKAQNGSSSKATPSTAKETS

SEQ ID NO: 43502 - protein, 783 aa, Homo sapiens
  Payload ID: 8939
  Gene Symbol: KIAA1217
  Gene Name: KIAA1217
  ENSP ID: ENSP00000404798
MSEGDAPTPFSRGSRTRASLPVVRSTNQTKERSLGVLYLQYGDETKQLRMPNEITSADTIRALFVSAFPQQLTMKMLESPSVAIYIKDESRNVYYELNDVRNIQDRSLLKVYNKDPAHAFNHTPKTMNGDMRMQRELVYARGDGPGAPRPGSTAHPPHAIPNSPPSTPVPHSMPPSPSRIPYGGTRSMVVPGNATIPRDRISSLPVSRPISPSPSAILERRDVKPDEDMSGKNIAMYRNEGFYADPYLYHEGRMSIASSHGGHPLDVPDHIIAYHRTAIRSASAYCNPSMQAEMHMEQSLYRQKSRKYPDSHLPTLGSKTPPASPHRVSDLRMIDMHAHYNAHGPPHTMQPDRASPSRQAFKKEPGTLVYIEKPRSAAGLSSLVDLGPPLMEKQVFAYSTATIPKDRETSEKMMKTTANRNHTDSAGTPHVSGGKMLSALESTVPPSQPPPVGTSAIHMSLLEMRRSVAELRLQLQQMRQLQLQNQELLRAMMKKAELEISGKVMETMKRLEDPVQRQRVLVEQERQKYLHEEEKIVKKLCELEDFVEDLKKDSTAASRLVTLKDVEDGAFLLRQVGEAVATLKGEFPTLQNKMRAILRIEVEAVRFLKEEPHKLDSLLKRVRSMTDVLTMLRRHVTDGLLKGTDAAQAAQYMAMEKATAAEVLKSQEEAAHTSGQPFHSTGAPGDAKSEVVPLSGMMVRHAQSSPVVIQPSQHSVALLNPAQNLPHVASSPAVPQEATSTLQMSQAPQSPQIPMNGSAMQSLFIEEIHSVSAKNRAVSIEKA

SEQ ID NO: 43503 - protein, 180 aa, Homo sapiens
  Payload ID: 8939
  Gene Symbol: KIAA1217
  Gene Name: KIAA1217
  ENSP ID: ENSP00000489052
MEENESQKCEPCLPYSADRRQMQEQGKGNLHVTSPEDAECRRTKERLSNGNSRGSVSKSSRNIPRRHTLGGPRSSKEILGMQTSEMDRKREAFLEHLKQKYPHHASAIMGHQERLRDQALKGMLISLQAELDIQRQGAPNCLTVLNHPVWVTRSSIYQRRPLILWKPCLRGMLQPLFPEA

SEQ ID NO: 43504 - protein, 453 aa, Homo sapiens
  Payload ID: 8939
  Gene Symbol: KIAA1217
  Gene Name: KIAA1217
  ENSP ID: ENSP00000489575
  MOD_RES (1)..(1): Any amino acid
XDKIMAELQAFQKCSFMDVNSNSHAEPSRADSHVKDTRSGATVPPKEKKGIFGSWRTKQSKNLEFFHEDVRKSDVEYENGPQMEFQKVTTGAVRPSDPPKWERGMENSISDASRTSEYKTEIIMKENSISNMSLLRDSRNYSQETVPKASFGFSGISPLEDEINKGSKISGLQYSIPDTENQTLNYGKTKEMEKQNTDKCHVSSHTRLTESSVHDFKTEDQEVITTDFGQVVLRPKEARHANVNPNEDGESSSSSPTEENAATDNIAFMITETTVQVLSSGEVHDIVSQKGEDIQTVNIDARKEMTPRQEGTDNEDPVVCLDKKPVIIIFDEPMDIRSAYKRLSTIFEECDEELERMMMEEKIEEEEEEENGDSVVQNNNTSQMSHKKVAPGNLRTGQQVETKSQPHSLATETRNPGGQEMNRTELNKFSHVDSPNSECKGEDATDDQFESPK

SEQ ID NO: 43505 - protein, 409 aa, Homo sapiens
  Payload ID: 8940
  Gene Symbol: KIAA1257
  Gene Name: KIAA1257
  Uniprot ID: Q9ULG3
  ENSP ID: ENSP00000265068
MSLHAWEWEEDPASIEPISSITSFYQSTSECDVEEHLKAKARAQESDSDRPCSSIESSSEPASTFSSDVPHVVPCKFTISLAFPVNMGQKGKYASLIEKYKKHPKTDSSVTKMRRFYHIEYFLLPDDEEPKKVDILLFPMVAKVFLESGVKTVKPWHEGDKAWVSWEQTFNITVTKELLKKINFHKITLRLWNTKDKMSRKVRYYRLKTAGFTDDVGAFHKSEVRHLVLNQRKLSEQGIENTNIVREESNQEHPPGKQEKTEKHPKSLQGSHQAEPETSSKNSEEYEKSLKMDDSSTIQWSVSRTPTISLAGASMMEIKELIESESLSSLTNILDRQRSQIKGKDSEGRRKIQRRHKKPLAEEEADPTLTGPRKQSAFSIQLAVMPLLAGTHCLPCSQQLLLVLWPERP

SEQ ID NO: 43506 - protein, 297 aa, Homo sapiens
  Payload ID: 8940
  Gene Symbol: KIAA1257
  Gene Name: KIAA1257
  Uniprot ID: Q9ULG3
  ENSP ID: ENSP00000422539
MRRFYHIEYFLLPDDEEPKKVDILLFPMVAKVFLESGVKTVKPWHEGDKAWVSWEQTFNITVTKELLKKINFHKITLRLWNTKDKMSRKVRYYRLKTAGFTDDVGAFHKSEVRHLVLNQRKLSEQGIENTNIVREESNQEHPPGKQEKTEKHPKSLQGSHQAEPETSSKNSEEYEKSLKMDDSSTIQWSVSRTPTISLAGASMMEIKELIESESLSSLTNILDRQRSQIKGKDSEGRRKIQRRHKKPLAEEEADPTLTGPRKQSAFSIQLAVMPLLAGTHCLPCSQQLLLVLWPERP

SEQ ID NO: 43507 - protein, 400 aa, Homo sapiens
  Payload ID: 8940
  Gene Symbol: KIAA1257
  Gene Name: KIAA1257
  ENSP ID: ENSP00000426217
MSLHAWEWEEDPASIEPISSITSFYQSTSECDVEEHLKAKARAQESDSDRPCSSIESSSEPASTFSSDVPHVVPCKFTISLAFPVNMGQKGKYASLIEKYKKHPKTDSSVTKMRRFYHIEYFLLPDDEEPKKVDILLFPMVAKVFLESGVKTVKPWHEGDKAWVSWEQTFNITVTKELLKKINFHKITLRLWNTKDKMSRKVRYYRLKTAGFTDDVGAFHKSEVRHLVLNQRKLSEQGIENTNIVREESNQEHPPGKQEKTEKHPKSLQGSHQAEPETSSKNSEEYEKSLKMDDSSTIQWSVSRTPTISLAGASMMEIKELIESESLSSLTNILDRQRSQIKGKDSEGRRKIQRRHKKPLAEEEADPTLTGPRKQSAFSIQLAVMPLLAVRKKKGNSPIS

SEQ ID NO: 43508 - protein, 1013 aa, Homo sapiens
  Payload ID: 8941
  Gene Symbol: KIAA1324
  Gene Name: KIAA1324
  Uniprot ID: Q6UXG2
  ENSP ID: ENSP00000358955
MAEPGHSHHLSARVRGRTERRIPRLWRLLLWAGTAFQVTQGTGPELHACKESEYHYEYTACDSTGSRWRVAVPHTPGLCTSLPDPIKGTECSFSCNAGEFLDMKDQSCKPCAEGRYSLGTGIRFDEWDELPHGFASLSANMELDDSAAESTGNCTSSKWVPRGDYIASNTDECTATLMYAVNLKQSGTVNFEYYYPDSSIIFEFFVQNDQCQPNADDSRWMKTTEKGWEFHSVELNRGNNVLYWRTTAFSVWTKVPKPVLVRNIAITGVAYTSECFPCKPGTYADKQGSSFCKLCPANSYSNKGETSCHQCDPDKYSEKGSSSCNVRPACTDKDYFYTHTACDANGETQLMYKWAKPKICSEDLEGAVKLPASGVKTHCPPCNPGFFKTNNSTCQPCPYGSYSNGSDCTRCPAGTEPAVGFEYKWWNTLPTNMETTVLSGINFEYKGMTGWEVAGDHIYTAAGASDNDFMILTLVVPGFRPPQSVMADTENKEVARITFVFETLCSVNCELYFMVGVNSRTNTPVETWKGSKGKQSYTYIIEENTTTSFTWAFQRTTFHEASRKYTNDVAKIYSINVTNVMNGVASYCRPCALEASDVGSSCTSCPAGYYIDRDSGTCHSCPTNTILKAHQPYGVQACVPCGPGTKNNKIHSLCYNDCTFSRNTPTRTFNYNFSALANTVTLAGGPSFTSKGLKYFHHFTLSLCGNQGRKMSVCTDNVTDLRIPEGESGFSKSITAYVCQAVIIPPEVTGYKAGVSSQPVSLADRLIGVTTDMTLDGITSPAELFHLESLGIPDVIFFYRSNDVTQSCSSGRSTTIRVRCSPQKTVPGSLLLPGTCSDGTCDGCNFHFLWESAAACPLCSVADYHAIVSSCVAGIQKTTYVWREPKLCSGGISLPEQRVTICKTIDFWLKVGISAGTCTAILLTVLTCYFWKKNQKLEYKYSKLVMNATLKDCDLPAADSCAIMEGEDVEDDLIFTSKKSLFGKIKSFTSKRTPDGFDSVPLKTSSGGLDMDL

SEQ ID NO: 43509 - protein, 901 aa, Homo sapiens
  Payload ID: 8941
  Gene Symbol: KIAA1324
  Gene Name: KIAA1324
  ENSP ID: ENSP00000393964
MAEPGHSHHLSARVRGRTERRIPRLWRLLLWAGTAFQVTQGTGPELHACKESEYHYEYTACDSTGSRWRVAVPHTPGLCTSLPDPIKGTECSFSCNAGEFLDMKDQSCKPCAEGRYSLGTGIRFDEWDELPHGFASLSANMELDDSAAESTGNCTSSKWVPRGDYIASNTDECTATLMYAVNLKQSGTVNFEYYYPDSSIIFEFFVQNDQCQPNADDSRWMKTTEKGWEFHSVELNRGNNVLYWRTTAFSVWTKVPKPVLVRNIAITEKGSSSCNVRPACTDKDYFYTHTACDANGETQLMYKWAKPKICSEDLEGAVKLPASGVKTHCPPCNPGFFKTNNSTCQPCPYGSYSNGSDCTRCPAGTEPAVGFEYKWWNTLPTNMETTVLSGINFEYKGMTGWEVAGDHIYTAAGASDNDFMILTLVVPGFRPPQSVMADTENKEVARITFVFETLCSVNCELYFMVGVNSRTNTPVETWKGSKGKQSYTYIIEENTTTSFTWAFQRTTFHEASRKYTNDVAKIYSINVTNVMNGVASYCRPCALEASDVGSSCTSCPAGYYIDRDSGTCHSCPTNTILKAHQPYGVQACVPCGPGTKNNKIHSLCYNDCTFSRNTPTRTFNYNFSALANTVTLAGGPSFTSKGLKYFHHFTLSLCGNQGRKMSVCTDNVTDLRIPEGESGFSKSITAYVCQAVIIPPEVTGYKAGVSSQPVSLADRLIGVTTDMTLDGITSPAELFHLESLGIPDVIFFYRSNDVTQSCSSGRSTTIRVRCSPQKTVPGSLLLPGTCSDGTCDGCNFHFLWESAAACPLCSVADYHAIVSSCVAGIQKTTYVWREPKLCSGGISLPEQRVTICKTIDFWLKVGISAGTCTAILLTVLTCYFWKKNQKLEYKYSKLVMNATLK

SEQ ID NO: 43510 - protein, 91 aa, Homo sapiens
  Payload ID: 8941
  Gene Symbol: KIAA1324
  Gene Name: KIAA1324
  ENSP ID: ENSP00000431134
MAEPGHSHHLSARVRGRTERRIPRLWRLLLWAGTAFQVTQGTGPELHACKESEYHYEYTACDSTGSRWRVAVPHTPGLCTSLPDPIKGTEC

SEQ ID NO: 43511 - protein, 205 aa, Homo sapiens
  Payload ID: 8941
  Gene Symbol: KIAA1324
  Gene Name: KIAA1324
  ENSP ID: ENSP00000431349
MAEPGHSHHLSARVRGRTERRIPRLWRLLLWAGTAFQVTQGTGPELHACKESEYHYEYTACDSTGSRWRVAVPHTPGLCTSLPDPIKGTECSFSCNAGEFLDMKDQSCKPCAEGRYSLGTGIRFDEWDELPHGFASLSANMELDDSAAESTGNCTSSKWVPRGDYIASNTDECTATLMYAVNLKQSGTVNFEYYYPDSSIIFEFF

SEQ ID NO: 43512 - protein, 62 aa, Homo sapiens
  Payload ID: 8941
  Gene Symbol: KIAA1324
  Gene Name: KIAA1324
  ENSP ID: ENSP00000432023
MAEPGHSHHLSARVRGRTERRIPRLWRLLLWAGTAFQVTQGTGPELHACKEPSPATPGSFWI

SEQ ID NO: 43513 - protein, 152 aa, Homo sapiens
  Payload ID: 8941
  Gene Symbol: KIAA1324
  Gene Name: KIAA1324
  ENSP ID: ENSP00000432164
MAEPGHSHHLSARVRGRTERRIPRLWRLLLWAGTAFQVTQGTGPELHACKESEYHYEYTACDSTGSRWRVAVPHTPGLCTSLPDPIKGTECSFSCNAGEFLDMKDQSCKPCAEGRYSLGTGIRFDEWDELPHGFASLSANMELDDSAAESTG

SEQ ID NO: 43514 - protein, 82 aa, Homo sapiens
  Payload ID: 8941
  Gene Symbol: KIAA1324
  Gene Name: KIAA1324
  ENSP ID: ENSP00000433420
ILLTVLTCYFWKKNQKLEYKYSKLVMNATLKDCDLPAADSCAIMEGEDVEDDLIFTSKKSLFGKIKSFTSKVSGSSPLGAES

SEQ ID NO: 43515 - protein, 926 aa, Homo sapiens
  Payload ID: 8941
  Gene Symbol: KIAA1324
  Gene Name: KIAA1324
  Uniprot ID: Q6UXG2
  ENSP ID: ENSP00000434595
MAEPGHSHHLSARVRGRTERRIPRLWRLLLWAGTAFQVTQGTGPELHACKESEYHYEYTACDSTGSRWRVAVPHTPGLCTSLPDPIKGTECSFSCNAGEFLDMKDQSCKPCAEGRYSLGTGIRFDEWDELPHGFASLSANMELDDSAAESTGNCTSSKWVPRGDYIASNTDECTATLMYAVNLKQSGTVNFEYYYPDSSIIFEFFVQNDQCQPNADDSRWMKTTEKGWEFHSVELNRGNNVLYWRTTAFSVWTKVPKPVLTQLMYKWAKPKICSEDLEGAVKLPASGVKTHCPPCNPGFFKTNNSTCQPCPYGSYSNGSDCTRCPAGTEPAVGFEYKWWNTLPTNMETTVLSGINFEYKGMTGWEVAGDHIYTAAGASDNDFMILTLVVPGFRPPQSVMADTENKEVARITFVFETLCSVNCELYFMVGVNSRTNTPVETWKGSKGKQSYTYIIEENTTTSFTWAFQRTTFHEASRKYTNDVAKIYSINVTNVMNGVASYCRPCALEASDVGSSCTSCPAGYYIDRDSGTCHSCPTNTILKAHQPYGVQACVPCGPGTKNNKIHSLCYNDCTFSRNTPTRTFNYNFSALANTVTLAGGPSFTSKGLKYFHHFTLSLCGNQGRKMSVCTDNVTDLRIPEGESGFSKSITAYVCQAVIIPPEVTGYKAGVSSQPVSLADRLIGVTTDMTLDGITSPAELFHLESLGIPDVIFFYRSNDVTQSCSSGRSTTIRVRCSPQKTVPGSLLLPGTCSDGTCDGCNFHFLWESAAACPLCSVADYHAIVSSCVAGIQKTTYVWREPKLCSGGISLPEQRVTICKTIDFWLKVGISAGTCTAILLTVLTCYFWKKNQKLEYKYSKLVMNATLKDCDLPAADSCAIMEGEDVEDDLIFTSKKSLFGKIKSFTSKRTPDGFDSVPLKTSSGGLDMDL

SEQ ID NO: 43516 - protein, 155 aa, Homo sapiens
  Payload ID: 8941
  Gene Symbol: KIAA1324
  Gene Name: KIAA1324
  ENSP ID: ENSP00000435066
MAEPGHSHHLSARVRGRTERRIPRLWRLLLWAGTAFQVTQGTGPELHACKESEYHYEYTACDSTGSRWRVAVPHTPGLCTSLPDPIKGTECSFSCNAGEFLDMKDQSCKPCAEGRYSLGTGIRFDEWDELPHGFASLSANMELDDSAAESTGNCT

SEQ ID NO: 43517 - protein, 85 aa, Homo sapiens
  Payload ID: 8942
  Gene Symbol: KIAA1324L
  Gene Name: KIAA1324-like
  ENSP ID: ENSP00000378203
  MOD_RES (1)..(1): Any amino acid
XSSWIPRGNYIESNRDDCTVSLIYAVHLKKSGYVFFEYQYVDNNIFFEFFIQNDQCQEMDTTTDKWVKLTDNGEWGSHSDSSLNA

SEQ ID NO: 43518 - protein, 112 aa, Homo sapiens
  Payload ID: 8942
  Gene Symbol: KIAA1324L
  Gene Name: KIAA1324-like
  ENSP ID: ENSP00000381325
MKNQVCSKCGEGTYSLGSGIKFDEWDELPAGFSNIATFMDTVVGPSDSRPDGCNNSSWIPRGNYIESNRDDCTVSLIYAVHLKKSGYVFFEYQYVDNNIFFEFFIQNDQCQE

SEQ ID NO: 43519 - protein, 79 aa, Homo sapiens
  Payload ID: 8942
  Gene Symbol: KIAA1324L
  Gene Name: KIAA1324-like
  ENSP ID: ENSP00000387496
  MOD_RES (1)..(1): Any amino acid
XENQSLHYDFSNLSSVGSLMNGPSFTSKGTKYFHFFNISLCGHEKKKTFKRKLVQNKKETCRAKYQLIRGRRWLSVPTI

SEQ ID NO: 43520 - protein, 958 aa, Homo sapiens
  Payload ID: 8942
  Gene Symbol: KIAA1324L
  Gene Name: KIAA1324-like
  ENSP ID: ENSP00000397377
MLFRARGPVRGRGWGRPAEAPRRGRSPPWSPAWICCWALAGCQAAWAGDLPSSSSRPLPPCQEKDYHFEYTECDSSGSRWRVAIPNSAVDCSGLPDPVRGKECTFSCASGEYLEMKNQVCSKCGEGTYSLGSGIKFDEWDELPAGFSNIATFMDTVVGPSDSRPDGCNNSSWIPRGNYIESNRDDCTVSLIYAVHLKKSGYVFFEYQYVDNNIFFEFFIQNDQCQEMDTTTDKWVKLTDNGEWGSHSVMLKSGTNILYWRTTGILMGSKAVKPVLVKNITIEGVAYTSECFPCKPGTFSNKPGSFNCQVCPRNTYSEKGAKECIRCKDDSQFSEEGSSECTERPPCTTKDYFQIHTPCDEEGKTQIMYKWIEPKICREDLTDAIRLPPSGEKKDCPPCNPGFYNNGSSSCHPCPPGTFSDGTKECRPCPAGTEPALGFEYKWWNVLPGNMKTSCFNVGNSKCDGMNGWEVAGDHIQSGAGGSDNDYLILNLHIPGFKPPTSMTGATGSELGRITFVFETLCSADCVLYFMVDINRKSTNVVESWGGTKEKQAYTHIIFKNATFTFTWAFQRTNQGQDATTLRKKPTSARNVHLTPTCPYIRSMAKRLVFHAGLGVKTISNLSSVGSLMNGPSFTSKGTKYFHFFNISLCGHEGKKMALCTNNITDFTVKEIVAGSDDYTNLVGAFVCQSTIIPSESKGFRAALSSQSIILADTFIGVTVETTLKNINIKEDMFPVPTSQIPDVHFFYKSSTATTSCINGRSTAVKMRCNPTKSGAGVISVPSKCPAGTCDGCTFYFLWESAEACPLCTEHDFHEIEGACKRGFQETLYVWNEPKWCIKGISLPEKKLATCETVDFWLKVGAGVGAFTAVLLVALTCYFWKKNQKLEYKYSKLVMTTNSKECELPAADSCAIMEGEDNEEEVVYSNKQSLLGKLKSLATKEKEDHFESVQLKTSRSPNI

SEQ ID NO: 43521 - protein, 862 aa, Homo sapiens
  Payload ID: 8942
  Gene Symbol: KIAA1324L
  Gene Name: KIAA1324-like
  Uniprot ID: A8MWY0
  ENSP ID: ENSP00000402390
MHSSWIPRGNYIESNRDDCTVSLIYAVHLKKSGYVFFEYQYVDNNIFFEFFIQNDQCQEMDTTTDKWVKLTDNGEWGSHSVMLKSGTNILYWRTTGILMGSKAVKPVLVKNITIEGVAYTSECFPCKPGTFSNKPGSFNCQVCPRNTYSEKGAKECIRCKDDSQFSEEGSSECTERPPCTTKDYFQIHTPCDEEGKTQIMYKWIEPKICREDLTDAIRLPPSGEKKDCPPCNPGFYNNGSSSCHPCPPGTFSDGTKECRPCPAGTEPALGFEYKWWNVLPGNMKTSCFNVGNSKCDGMNGWEVAGDHIQSGAGGSDNDYLILNLHIPGFKPPTSMTGATGSELGRITFVFETLCSADCVLYFMVDINRKSTNVVESWGGTKEKQAYTHIIFKNATFTFTWAFQRTNQGQDNRRFINDMVKIYSITATNAVDGVASSCRACALGSEQSGSSCVPCPPGHYIEKETNQCKECPPDTYLSIHQVYGKEACIPCGPGSKNNQDHSVCYSDCFFYHEKENQSLHYDFSNLSSVGSLMNGPSFTSKGTKYFHFFNISLCGHEGKKMALCTNNITDFTVKEIVAGSDDYTNLVGAFVCQSTIIPSESKGFRAALSSQSIILADTFIGVTVETTLKNINIKEDMFPVPTSQIPDVHFFYKSSTATTSCINGRSTAVKMRCNPTKSGAGVISVPSKCPAGTCDGCTFYFLWESAEACPLCTEHDFHEIEGACKRGFQETLYVWNEPKWCIKGISLPEKKLATCETVDFWLKVGAGVGAFTAVLLVALTCYFWKKNQKLEYKYSKLVMTTNSKECELPAADSCAIMEGEDNEEEVVYSNKQSLLGKLKSLATKEKEDHFESVQLKTSRSPNI

SEQ ID NO: 43522 - protein, 971 aa, Homo sapiens
  Payload ID: 8942
  Gene Symbol: KIAA1324L
  Gene Name: KIAA1324-like
  ENSP ID: ENSP00000406961
  MOD_RES (1)..(1): Any amino acid
XDAVPRPGAGTGQGLGAAGGGSPPRALAALEPRLDLLLGARRLPGGLGWGPALLLQPPASSLPGAFSCASGEYLEMKNQVCSKCGEGTYSLGSGIKFDEWDELPAGFSNIATFMDTVVGPSDSRPDGCNNSSWIPRGNYIESNRDDCTVSLIYAVHLKKSGYVFFEYQYVDNNIFFEFFIQNDQCQEMDTTTDKWVKLTDNGEWGSHSVMLKSGTNILYWRTTGILMGSKAVKPVLVKNITIEGVAYTSECFPCKPGTFSNKPGSFNCQVCPRNTYSEKGAKECIRCKDDSQFSEEGSSECTERPPCTTKDYFQIHTPCDEEGKTQIMYKWIEPKICREDLTDAIRLPPSGEKKDCPPCNPGFYNNGSSSCHPCPPGTFSDGTKECRPCPAGTEPALGFEYKWWNVLPGNMKTSCFNVGNSKCDGMNGWEVAGDHIQSGAGGSDNDYLILNLHIPGFKPPTSMTGATGSELGRITFVFETLCSADCVLYFMVDINRKSTNVVESWGGTKEKQAYTHIIFKNATFTFTWAFQRTNQGQDNRRFINDMVKIYSITATNAVDGVASSCRACALGSEQSGSSCVPCPPGHYIEKETNQCKECPPDTYLSIHQVYGKEACIPCGPGSKNNQDHSVCYSDCFFYHEKENQSLHYDFSNLSSVGSLMNGPSFTSKGTKYFHFFNISLCGHEGKKMALCTNNITDFTVKEIVAGSDDYTNLVGAFVCQSTIIPSESKGFRAALSSQSIILADTFIGVTVETTLKNINIKEDMFPVPTSQIPDVHFFYKSSTATTSCINGRSTAVKMRCNPTKSGAGVISVPSKCPAGTCDGCTFYFLWESAEACPLCTEHDFHEIEGACKRGFQETLYVWNEPKWCIKGISLPEKKLATCETVDFWLKVGAGVGAFTAVLLVALTCYFWKKNQKLEYKYSKLVMTTNSKECELPAADSCAIMEGEDNEEEVVYSNKQSLLGKLKSLATK

SEQ ID NO: 43523 - protein, 87 aa, Homo sapiens
  Payload ID: 8942
  Gene Symbol: KIAA1324L
  Gene Name: KIAA1324-like
  ENSP ID: ENSP00000410045
MKNQVCSKCGEGTYSLGSGIKFDEWDELPAGFSNIATFMDTVVGPSDSRPDGCNNSSWIPRGNYIESNRDDCTVSLIYAVHLKKSGY

SEQ ID NO: 43524 - protein, 1029 aa, Homo sapiens
  Payload ID: 8942
  Gene Symbol: KIAA1324L
  Gene Name: KIAA1324-like
  Uniprot ID: A8MWY0
  ENSP ID: ENSP00000413445
MLFRARGPVRGRGWGRPAEAPRRGRSPPWSPAWICCWALAGCQAAWAGDLPSSSSRPLPPCQEKDYHFEYTECDSSGSRWRVAIPNSAVDCSGLPDPVRGKECTFSCASGEYLEMKNQVCSKCGEGTYSLGSGIKFDEWDELPAGFSNIATFMDTVVGPSDSRPDGCNNSSWIPRGNYIESNRDDCTVSLIYAVHLKKSGYVFFEYQYVDNNIFFEFFIQNDQCQEMDTTTDKWVKLTDNGEWGSHSVMLKSGTNILYWRTTGILMGSKAVKPVLVKNITIEGVAYTSECFPCKPGTFSNKPGSFNCQVCPRNTYSEKGAKECIRCKDDSQFSEEGSSECTERPPCTTKDYFQIHTPCDEEGKTQIMYKWIEPKICREDLTDAIRLPPSGEKKDCPPCNPGFYNNGSSSCHPCPPGTFSDGTKECRPCPAGTEPALGFEYKWWNVLPGNMKTSCFNVGNSKCDGMNGWEVAGDHIQSGAGGSDNDYLILNLHIPGFKPPTSMTGATGSELGRITFVFETLCSADCVLYFMVDINRKSTNVVESWGGTKEKQAYTHIIFKNATFTFTWAFQRTNQGQDNRRFINDMVKIYSITATNAVDGVASSCRACALGSEQSGSSCVPCPPGHYIEKETNQCKECPPDTYLSIHQVYGKEACIPCGPGSKNNQDHSVCYSDCFFYHEKENQSLHYDFSNLSSVGSLMNGPSFTSKGTKYFHFFNISLCGHEGKKMALCTNNITDFTVKEIVAGSDDYTNLVGAFVCQSTIIPSESKGFRAALSSQSIILADTFIGVTVETTLKNINIKEDMFPVPTSQIPDVHFFYKSSTATTSCINGRSTAVKMRCNPTKSGAGVISVPSKCPAGTCDGCTFYFLWESAEACPLCTEHDFHEIEGACKRGFQETLYVWNEPKWCIKGISLPEKKLATCETVDFWLKVGAGVGAFTAVLLVALTCYFWKKNQKLEYKYSKLVMTTNSKECELPAADSCAIMEGEDNEEEVVYSNKQSLLGKLKSLATKEKEDHFESVQLKTSRSPNI

SEQ ID NO: 43525 - protein, 577 aa, Homo sapiens
  Payload ID: 8943
  Gene Symbol: KIAA1328
  Gene Name: KIAA1328
  Uniprot ID: Q86T90
  ENSP ID: ENSP00000280020
MADVAGPSRPSAAAFWSRDFSDEEQSVVYVPGISAEGNVRSRHKLMSPKADVKLKTSRVTDASISMESLKGTGDSVDEQNSCRGEIKSASLKDLCLEDKRRIANLIKELARVSEEKEVTEERLKAEQESFEKKIRQLEEQNELIIKEREALQLQYRECQELLSLYQKYLSEQQEKLTMSLSELGAARMQEQQVSSRKSTLQCSSVELDGSYLSIARPQTYYQTKQRPKSAVQDSASESLIAFRNNSLKPVTLHHPKDDLDKIPSETTTCNCESPGRKPAVPTEKMPQEELHMKECPHLKPTPSQCCGHRLAADRVHDSHPTNMTPQHPKTHPESCSYCRLSWASLVHGGGALQPIETLKKQISEDRKQQLMLQKMELEIEKERLQHLLAQQETKLLLKQQQLHQSRLDYNCLLKSNCDGWLLGTSSSIKKHQDPPNSGENRKERKTVGFHSHMKDDAQWSCQKKDTCRPQRGTVTGVRKDASTSPMPTGSLKDFVTTASPSLQHTTSRYETSLLDLVQSLSPNSAPKPQRYPSREAGAWNHGTFRLSPLKSTRKKMGMHRTPEELEENQILEDIFFI

SEQ ID NO: 43526 - protein, 163 aa, Homo sapiens
  Payload ID: 8943
  Gene Symbol: KIAA1328
  Gene Name: KIAA1328
  ENSP ID: ENSP00000465036
MADVAGPSRPSAAAFWSRDFSDEEQSVVYVPGISAEGNVRSRHKLMSPKADVKLKTSRVTDASISMESLKGTGDSVDEQNSCRGEIKSASLKDLCLEDKRRIANLIKELARVSEEKEVTEERLKAEQESFEKKIRQLEEQNELIIKEREDILLKVLFFNVQEV

SEQ ID NO: 43527 - protein, 573 aa, Homo sapiens
  Payload ID: 8943
  Gene Symbol: KIAA1328
  Gene Name: KIAA1328
  Uniprot ID: Q86T90
  ENSP ID: ENSP00000465550
MPDNIIVFSFMFSCVVSDEEQSVVYVPGISAEGNVRSRHKLMSPKADVKLKTSRVTDASISMESLKGTGDSVDEQNSCRGEIKSASLKDLCLEDKRRIANLIKELARVSEEKEVTEERLKAEQESFEKKIRQLEEQNELIIKEREALQLQYRECQELLSLYQKYLSEQQEKLTMSLSELGAARMQEQQVSSRKSTLQCSSVELDGSYLSIARPQTYYQTKQRPKSAVQDSASESLIAFRNNSLKPVTLHHPKDDLDKIPSETTTCNCESPGRKPAVPTEKMPQEELHMKECPHLKPTPSQCCGHRLAADRVHDSHPTNMTPQHPKTHPESCSYCRLSWASLVHGGGALQPIETLKKQISEDRKQQLMLQKMELEIEKERLQHLLAQQETKLLLKQQQLHQSRLDYNCLLKSNCDGWLLGTSSSIKKHQDPPNSGENRKERKTVGFHSHMKDDAQWSCQKKDTCRPQRGTVTGVRKDASTSPMPTGSLKDFVTTASPSLQHTTSRYETSLLDLVQSLSPNSAPKPQRYPSREAGAWNHGTFRLSPLKSTRKKMGMHRTPEELEENQILEDIFFI

SEQ ID NO: 43528 - protein, 601 aa, Homo sapiens
  Payload ID: 8943
  Gene Symbol: KIAA1328
  Gene Name: KIAA1328
  ENSP ID: ENSP00000466355
  MOD_RES (1)..(1): Any amino acid
XTARGEPSRGSPRAEEKLRTNPGDGDVLLGPSLGAGLSPCLGVRWPRDWYCLQVWGHGSDASQRSLPNSCRGEIKSASLKDLCLEDKRRIANLIKELARVSEEKEVTEERLKAEQESFEKKIRQLEEQNELIIKEREALQLQYRECQELLSLYQKYLSEQQEKLTMSLSELGAARMQEQQVSSRKSTLQCSSVELDGSYLSIARPQTYYQTKQRPKSAVQDSASESLIAFRNNSLKPVTLHHPKDDLDKIPSETTTCNCESPGRKPAVPTEKMPQEELHMKECPHLKPTPSQCCGHRLAADRVHDSHPTNMTPQHPKTHPESCSYCRLSWASLVHGGGALQPIETLKKQISEDRKQQLMLQKMELEIEKERLQHLLAQQETKLLLKQQQLHQSRLDYNWLKAQALFKSRELVAEKQLTKPQELKLDMNGSDSGPSLLKSNCDGWLLGTSSSIKKHQDPPNSGENRKERKTVGFHSHMKDDAQWSCQKKDTCRPQRGTVTGVRKDASTSPMPTGSLKDFVTTASPSLQHTTSRYETSLLDLVQSLSPNSAPKPQRYPSREAGAWNHGTFRLSPLKSTRKKMGMHRTPEELEENQILEDIFFI

SEQ ID NO: 43529 - protein, 81 aa, Homo sapiens
  Payload ID: 8943
  Gene Symbol: KIAA1328
  Gene Name: KIAA1328
  ENSP ID: ENSP00000467248
MADVAGPSRPSAAAFWSRDFSDEEQSVVYVPGISAEGNVRSRHKLMSPKADVKLKTSRVTDASISMESLKGTGDSVDEQSK

SEQ ID NO: 43530 - protein, 279 aa, Homo sapiens
  Payload ID: 8943
  Gene Symbol: KIAA1328
  Gene Name: KIAA1328
  Uniprot ID: Q86T90
  ENSP ID: ENSP00000467507
MPQEELHMKECPHLKPTPSQCCGHRLAADRVHDSHPTNMTPQHPKTHPESCSYCRLSWASLVHGGGALQPIETLKKQISEDRKQQLMLQKMELEIEKERLQHLLAQQETKLLLKQQQLHQSRLDYNWLKAQALFKSRELVAEKQLTKPQELKLDMNGSDSGPSLLKSNCDGWLLGTSSSIKKHQDPPNSGENRKERKTVGFHSHMKDDAQWSCQKKDTCRPQRGTVTGVRKDASTSPMPTGSLKDFVTTASPSLQHTTSRPGISTKICFLSNHFFILFS

SEQ ID NO: 43531 - protein, 81 aa, Homo sapiens; identical to SEQ ID NO: 43529
  Payload ID: 8943
  Gene Symbol: KIAA1328
  Gene Name: KIAA1328
  ENSP ID: ENSP00000468653

SEQ ID NO: 43532 - protein, 12 aa, Homo sapiens
  Payload ID: 8943
  Gene Symbol: KIAA1328
  Gene Name: KIAA1328
  ENSP ID: ENSP00000470002
MPQEELHMKECP

SEQ ID NO: 43533 - protein, 129 aa, Homo sapiens
  Payload ID: 8943
  Gene Symbol: KIAA1328
  Gene Name: KIAA1328
  Uniprot ID: Q86T90
  ENSP ID: ENSP00000470371
MPQEELHMKECPHLKPTPSQCCGHRLAADRVHDSHPTNMTPQHPKTHPESCSYCRLSWASLVHGGGALQPIETLKKQISEDRKQQLMLQKMELEIEKERLQHLLAQQETKLLLKQQQLHQSRLDYNCSE

SEQ ID NO: 43534 - protein, 1812 aa, Homo sapiens
  Payload ID: 8944
  Gene Symbol: KIAA1429
  Gene Name: KIAA1429
  Uniprot ID: Q69YN4
  ENSP ID: ENSP00000297591
MAVDSAMELLFLDTFKHPSAEQSSHIDVVRFPCVVYINEVRVIPPGVRAHSSLPDNRAYGETSPHTFQLDLFFNNVSKPSAPVFDRLGSLEYDENTSIIFRPNSKVNTDGLVLRGWYNCLTLAIYGSVDRVISHDRDSPPPPPPPPPPPQPQPSLKRNPKHADGEKEDQFNGSPPRPQPRGPRTPPGPPPPDDDEDDPVPLPVSGDKEEDAPHREDYFEPISPDRNSVPQEGQYSDEGEVEEEQQEEGEEDEDDVDVEEEEDEDEDDRRTVDSIPEEEEEDEEEEGEEDEEGEGDDGYEQISSDEDGIADLERETFKYPNFDVEYTAEDLASVPPMTYDPYDRELVPLLYFSCPYKTTFEIEISRMKDQGPDKENSGAIEASVKLTELLDLYREDRGAKWVTALEEIPSLIIKGLSYLQLKNTKQDSLGQLVDWTMQALNLQVALRQPIALNVRQLKAGTKLVSSLAECGAQGVTGLLQAGVISGLFELLFADHVSSSLKLNAFKALDSVISMTEGMEAFLRGRQNEKSGYQKLLELILLDQTVRVVTAGSAILQKCHFYEVLSEIKRLGDHLAEKTSSLPNHSEPDHDTDAGLERTNPEYENEVEASMDMDLLESSNISEGEIERLINLLEEVFHLMETAPHTMIQQPVKSFPTMARITGPPERDDPYPVLFRYLHSHHFLELVTLLLSIPVTSAHPGVLQATKDVLKFLAQSQKGLLFFMSEYEATNLLIRALCHFYDQDEEEGLQSDGVIDDAFALWLQDSTQTLQCITELFSHFQRCTASEETDHSDLLGTLHNLYLITFNPVGRSAVGHVFSLEKNLQSLITLMEYYSKEALGDSKSKKSVAYNYACILILVVVQSSSDVQMLEQHAASLLKLCKADENNAKLQELGKWLEPLKNLRFEINCIPNLIEYVKQNIDNLMTPEGVGLTTALRVLCNVACPPPPVEGQQKDLKWNLAVIQLFSAEGMDTFIRVLQKLNSILTQPWRLHVNMGTTLHRVTTISMARCTLTLLKTMLTELLRGGSFEFKDMRVPSALVTLHMLLCSIPLSGRLDSDEQKIQNDIIDILLTFTQGVNEKLTISEETLANNTWSLMLKEVLSSILKVPEGFFSGLILLSELLPLPLPMQTTQVIEPHDISVALNTRKLWSMHLHVQAKLLQEIVRSFSGTTCQPIQHMLRRICVQLCDLASPTALLIMRTVLDLIVEDLQSTSEDKEKQYTSQTTRLLALLDALASHKACKLAILHLINGTIKGDERYAEIFQDLLALVRSPGDSVIRQQCVEYVTSILQSLCDQDIALILPSSSEGSISELEQLSNSLPNKELMTSICDCLLATLANSESSYNCLLTCVRTMMFLAEHDYGLFHLKSSLRKNSSALHSLLKRVVSTFSKDTGELASSFLEFMRQILNSDTIGCCGDDNGLMEVEGAHTSRTMSINAAELKQLLQSKEESPENLFLELEKLVLEHSKDDDNLDSLLDSVVGLKQMLESSGDPLPLSDQDVEPVLSAPESLQNLFNNRTAYVLADVMDDQLKSMWFTPFQAEEIDTDLDLVKVDLIELSEKCCSDFDLHSELERSFLSEPSSPGRTKTTKGFKLGKHKHETFITSSGKSEYIEPAKRAHVVPPPRGRGRGGFGQGIRPHDIFRQRKQNTSRPPSMHVDDFVAAESKEVVPQDGIPPPKRPLKVSQKISSRGGFSGNRGGRGAFHSQNRFFTPPASKGNYSRREGTRGSSWSAQNTPRGNYNESRGGQSNFNRGPLPPLRPLSSTGYRPSPRDRASRGRGGLGPSWASANSGSGGSRGKFVSGGSGRGRHVRSFTR

SEQ ID NO: 43535 - protein, 1147 aa, Homo sapiens
  Payload ID: 8944
  Gene Symbol: KIAA1429
  Gene Name: KIAA1429
  Uniprot ID: Q69YN4
  ENSP ID: ENSP00000398390
MAVDSAMELLFLDTFKHPSAEQSSHIDVVRFPCVVYINEVRVIPPGVRAHSSLPDNRAYGETSPHTFQLDLFFNNVSKPSAPVFDRLGSLEYDENTSIIFRPNSKVNTDGLVLRGWYNCLTLAIYGSVDRVISHDRDSPPPPPPPPPPPQPQPSLKRNPKHADGEKEDQFNGSPPRPQPRGPRTPPGPPPPDDDEDDPVPLPVSGDKEEDAPHREDYFEPISPDRNSVPQEGQYSDEGEVEEEQQEEGEEDEDDVDVEEEEDEDEDDRRTVDSIPEEEEEDEEEEGEEDEEGEGDDGYEQISSDEDGIADLERETFKYPNFDVEYTAEDLASVPPMTYDPYDRELVPLLYFSCPYKTTFEIEISRMKDQGPDKENSGAIEASVKLTELLDLYREDRGAKWVTALEEIPSLIIKGLSYLQLKNTKQDSLGQLVDWTMQALNLQVALRQPIALNVRQLKAGTKLVSSLAECGAQGVTGLLQAGVISGLFELLFADHVSSSLKLNAFKALDSVISMTEGMEAFLRGRQNEKSGYQKLLELILLDQTVRVVTAGSAILQKCHFYEVLSEIKRLGDHLAEKTSSLPNHSEPDHDTDAGLERTNPEYENEVEASMDMDLLESSNISEGEIERLINLLEEVFHLMETAPHTMIQQPVKSFPTMARITGPPERDDPYPVLFRYLHSHHFLELVTLLLSIPVTSAHPGVLQATKDVLKFLAQSQKGLLFFMSEYEATNLLIRALCHFYDQDEEEGLQSDGVIDDAFALWLQDSTQTLQCITELFSHFQRCTASEETDHSDLLGTLHNLYLITFNPVGRSAVGHVFSLEKNLQSLITLMEYYSKEALGDSKSKKSVAYNYACILILVVVQSSSDVQMLEQHAASLLKLCKADENNAKLQELGKWLEPLKNLRFEINCIPNLIEYVKQNIDNLMTPEGVGLTTALRVLCNVACPPPPVEGQQKDLKWNLAVIQLFSAEGMDTFIRVLQKLNSILTQPWRLHVNMGTTLHRVTTISMARCTLTLLKTMLTELLRGGSFEFKDMRVPSALVTLHMLLCSIPLSGRLDSDEQKIQNDIIDILLTFTQGVNEKLTISEETLANNTWSLMLKEVLSSILKVPEGFFSGLILLSELLPLPLPMQTTQVSLPYNMHLINDCSNTF

SEQ ID NO: 43536 - protein, 91 aa, Homo sapiens
  Payload ID: 8944
  Gene Symbol: KIAA1429
  Gene Name: KIAA1429
  ENSP ID: ENSP00000428784
  MOD_RES (1)..(1): Any amino acid
XHTSRTMSINAAELKQLLQSKEESPENLFLELEKLVLEHSKDDDNLDSLLDSVVGLKQMLESSGDPLPLSDQDVEPVLSAPESLQNLFNNR

SEQ ID NO: 43537 - protein, 730 aa, Homo sapiens
  Payload ID: 8944
  Gene Symbol: KIAA1429
  Gene Name: KIAA1429
  ENSP ID: ENSP00000429909
QPVKSFPTMARITGPPERDDPYPVLFRYLHSHHFLELVTLLLSIPVTSAHPGVLQATKDVLKFLAQSQKGLLFFMSEYEATNLLIRALCHFYDQDEEEGLQSDGVIDDAFALWLQDSTQTLQCITELFSHFQRCTASEETDHSDLLGTLHNLYLITFNPVGRSAVGHVFSLEKNLQSLITLMEYYSKEALGDSKSKKSVAYNYACILILVVVQSSSDVQMLEQHAASLLKLCKADENNAKLQELGKWLEPLKNLRFEINCIPNLIEYVKQNIDNLMTPEGVGLTTALRVLCNVACPPPPVEGQQKDLKWNLAVIQLFSAEGMDTFIRVLQKLNSILTQPWRLHVNMGTTLHRVTTISMARCTLTLLKTMLTELLRGGSFEFKDMRVPSALVTLHMLLCSIPLSGRLDSDEQKIQNDIIDILLTFTQGVNEKLTISEETLANNTWSLMLKEVLSSILKVPEGFFSGLILLSELLPLPLPMQTTQVIEPHDISVALNTRKLWSMHLHVQAKLLQEIVRSFSGTTCQPIQHMLRRICVQLCDLASPTALLIMRTVLDLIVEDLQSTSEDKEKQYTSQTTRLLALLDALASHKACKLAILHLINGTIKGDERYAEIFQDLLALVRSPGDSVIRQQCVEYVTSILQSLCDQDIALILPSSSEGSISELEQLSNSLPNKELMTSICDCLLATLANSESSYNCLLTCVRTMMFLAEHDYGLFHLKRDAVEMIMVSWK

SEQ ID NO: 43538 - protein, 60 aa, Homo sapiens
  Payload ID: 8944
  Gene Symbol: KIAA1429
  Gene Name: KIAA1429
  ENSP ID: ENSP00000430857
ELERSFLSEPSSPGRTKTTKGFKLGKHKHETFITSRKLQSSGRNKRLQLECSEYSSRKLQ

SEQ ID NO: 43539 - protein, 54 aa, Homo sapiens
  Payload ID: 8945
  Gene Symbol: KIAA1456
  Gene Name: KIAA1456
  ENSP ID: ENSP00000431717
MDHEAAQLEKQHVHNVYESTAPYFSDLQSKAWPRVRQFLQEQKPGSLIADIGCG

SEQ ID NO: 43540 - protein, 454 aa, Homo sapiens
  Payload ID: 8945
  Gene Symbol: KIAA1456
  Gene Name: KIAA1456
  Uniprot ID: Q9P272
  ENSP ID: ENSP00000432695
MDHEAAQLEKQHVHNVYESTAPYFSDLQSKAWPRVRQFLQEQKPGSLIADIGCGTGKYLKVNSQVHTVGCDYCGPLVEIARNRGCEAMVCDNLNLPFRDEGFDAIISIGVIHHFSTKQRRIRAIKEMARVLVPGGQLMIYVWAMEQKNRHFEKQDVLVPWNRALCSQLFSESSQSGRKRQCGYPERGHPYHPPCSECSCSVCFKEQCGSKRSHSVGYEPAMARTCFANISKEGEEEYGFYSTLGKSFRSWFFSRSLDESTLRKQIERVRPLKNTEVWASSTVTVQPSRHSSLDFDHQEPFSTKGQSLDEEVFVESSSGKHLEWLRAPGTLKHLNGDHQGEMRRNGGGNFLDSTNTGVNCVDAGNIEDDNPSASKILRRISAVDSTDFNPDDTMSVEDPQTDVLDSTAFMRYYHVFREGELCSLLKENVSELRILSSGNDHGNWCIIAEKKRGCD

SEQ ID NO: 43541 - protein, 196 aa, Homo sapiens
  Payload ID: 8945
  Gene Symbol: KIAA1456
  Gene Name: KIAA1456
  ENSP ID: ENSP00000443288
MDHEAAQLEKQHVHNVYESTAPYFSDLQSKAWPRVRQFLQEQKPGSLIADIGCGTGKYLKVNSQVHTVGCDYCGPLVEIARNRGCEAMGLEHPWIWYPRASWNQPPTDIEGPQYFYPPCHPIPDLQKQTIICHFKGPTLNEQQKSSPTHHRLHACFQHCREEESRPWLMALSSWDQVAMEGHVSASLTSCIVRLLL

SEQ ID NO: 43542 - protein, 60 aa, Homo sapiens
  Payload ID: 8945
  Gene Symbol: KIAA1456
  Gene Name: KIAA1456
  ENSP ID: ENSP00000466330
MDHEAAQLEKQHVHNVYESTAPYFSDLQSKAWPRVRQFLQEQKPGSLIADIGNQAASSLT

SEQ ID NO: 43543 - protein, 60 aa, Homo sapiens; identical to SEQ ID NO: 43542
  Payload ID: 8945
  Gene Symbol: KIAA1456
  Gene Name: KIAA1456
  ENSP ID: ENSP00000468715

SEQ ID NO: 43544 - protein, 1359 aa, Homo sapiens
  Payload ID: 8946
  Gene Symbol: KIAA1462
  Gene Name: KIAA1462
  Uniprot ID: Q9P266
  ENSP ID: ENSP00000364526
MYSVEDLLISHGYKLSRDPPASREDNPKGRQAARTGTRAGQGLQNGHEDGPAALAHRKTSAGKGHVSDSESRRSTPRGHGEPQSTSASRTSEAGFCNQPPSAWSSHPPTGNDQAYRRRGRQEARSQKPREHENLEARGMAQAHSLPVHVREGPWEVGGRSEHVMKKPVWEEELRMSGPAKWQNVSLESWNQPRKLGRQMSDGDGERLFQDLYPFIQGEHVLNSQNKGKSRSLPRVLSPESLSCTEIPIPLNERHSPKMPPYPPTCAPNLDSTRNSEKSGCSAPFPRPKFGRPLKPPSYSSHQQSRGGADSSDSQDSQQMDAYVPRHELCLSDPGLEPPVYVPPPSYRSPPQNIPNPYLEDTVPINVCGGHSQQQSPTEKAGASGQPPSGPPGTGNEYGVSPRLPQGLPAHPRPVTAYDGFVQYIPFDDPRLRHFKLAQPQGFCEDIKLDDKSYNSSPVTAQEPAHGGMQPDGAIWNPQSLIPPSGDERGLVLADSSPRWLWGQPPGDGENSGLPNQRDRCVARGQWPDVRGSQHGHTGRQVSSPYSQGESTCETQTKLKKFQTGTRTKKSSKKKMNETIFCLVSIPVKSESHLPDRDMDNNDLKPSADQKNGSDKSPALQEQSLLSMSSTDLELQALTGSMGGRTEFQKQDLGEPEEDRQTNDLSFIHLTKHRELKHSGSWPGHRYRDQQTQTSFSEEPQSSQLLPGAKLGGPSRAALSPKCSDPAASEAQTHTAFPTGDHKQRPSARNLKGHRSLSPSSNSAFSRTSLSVDQAPTPKAGRSQPCVDVHGLGAHPGPKREVVKGEPTGPCNSKQLFGQFLLKPVSRRPWDLISQLESFNKELQEEEESSSSSSSSSSSSEESEAEPQQENRAHCRQEDVGFRGNSPEMRVEPQPRMWVPESPVCRSGRGESKSESWSEELQPGHPRAWPPSPGRFRVEEGGGAPFCSADGSTSAEKRHLEVSNGMDELAGSPFPVTRMSSRSSDAKPLPASYPAEPREPQESPKITSAFSSVKPSEAVPRKFDSGGERGAGLPLSLSNKNRGLSAPDLRSVGLTPGQEQGASELEGSLGEASTIEIPPGESLQARAARILGIEVAVESLLPGIRRAGQNQPAEPDASACTPESPQEELLSRPAPADVPRVSTDAFYGRRKCGWTKSPLFVGDRDSARRAPQAFEHSDVDGVVTSTDPVPEPEPSPLESKFFEQKDVETKPPFRSTLFHFVERTPSVAGSEKRLRSPSKVIESLQEKLASPPRRADPDRLMRMKEVSSVSRMRVLSFRNADSQEDAEELKATTRGQAGLPGGLVSPGSGDRAQRLGHSLSVSKDSISREEKEHPAAQKEKSMDQDFWCPDSYDPSRVERV

SEQ ID NO: 43545 - protein, 1250 aa, Homo sapiens
  Payload ID: 8947
  Gene Symbol: KIAA1468
  Gene Name: KIAA1468
  Uniprot ID: Q9P260
  ENSP ID: ENSP00000256858
MAAMAPGGSGSGGGVNPFLSDSDEDDDEVAATEERRAVLRLGAGSGLDPGSAGSLSPQDPVALGSSARPGLPGEASAAAVALGGTGETPARLSIDAIAAQLLRDQYLLTALELHTELLESGRELPRLRDYFSNPGNFERQSGTPPGMGAPGVPGAAGVGGAGGREPSTASGGGQLNRAGSISTLDSLDFARYSDDGNRETDEKVAVLEFELRKAKETIQALRANLTKAAEHEVPLQERKNYKSSPEIQEPIKPLEKRALNFLVNEFLLKNNYKLTSITFSDENDDQDFELWDDVGLNIPKPPDLLQLYRDFGNHQVTGKDLVDVASGVEEDELEALTPIISNLPPTLETPQPAENSMLVQKLEDKISLLNSEKWSLMEQIRRLKSEMDFLKNEHFAIPAVCDSVQPPLDQLPHKDSEDSGQHPDVNSSDKGKNTDIHLSISDEADSTIPKENSPNSFPRREREGMPPSSLSSKKTVHFDKPNRKLSPAFHQALLSFCRMSADSRLGYEVSRIADSEKSVMLMLGRCLPHIVPNVLLAKREELIPLILCTACLHPEPKERDQLLHILFNLIKRPDDEQRQMILTGCVAFARHVGPTRVEAELLPQCWEQINHKYPERRLLVAESCGALAPYLPKEIRSSLVLSMLQQMLMEDKADLVREAVIKSLGIIMGYIDDPDKYHQGFELLLSALGDPSERVVSATHQVFLPAYAAWTTELGNLQSHLILTLLNKIEKLLREGEHGLDEHKLHMYLSALQSLIPSLFALVLQNAPFSSKAKLHGEVPQIEVTRFPRPMSPLQDVSTIIGSREQLAVLLQLYDYQLEQEGTTGWESLLWVVNQLLPQLIEIVGKINVTSTACVHEFSRFFWRLCRTFGKIFTNTKVKPQFQEILRLSEENIDSSAGNGVLTKATVPIYATGVLTCYIQIKEYLHIHNEISWEWDPSLNTKCVSYTHYTHSLKEEDRKLLVGFLEDVMTLLSLSHAPLDSLKASFVELGANPAYHELLLTVLWYGVVHTSALVRCTAARMFELLVKGVNETLVAQRVVPALITLSSDPEISVRIATIPAFGTIMETVIQRELLERVKMQLASFLEDPQYQDQHSLHTEIIKTFGRVGPNAEPRFRDEFVIPHLHKLALVNNLQIVDSKRLDIATHLFEAYSALSCCFISEDLMVNHFLPGLRCLRTDMEHLSPEHEVILSSMIKECEQKVENKTVQEPQGSMSIAASLVSEDTKTKFLNKMGQLTTSGAMLANVFQRKK

SEQ ID NO: 43546 - protein, 1216 aa, Homo sapiens
  Payload ID: 8947
  Gene Symbol: KIAA1468
  Gene Name: KIAA1468
  Uniprot ID: Q9P260
  ENSP ID: ENSP00000381198
MAAMAPGGSGSGGGVNPFLSDSDEDDDEVAATEERRAVLRLGAGSGLDPGSAGSLSPQDPVALGSSARPGLPGEASAAAVALGGTGETPARLSIDAIAAQLLRDQYLLTALELHTELLESGRELPRLRDYFSNPGNFERQSGTPPGMGAPGVPGAAGVGGAGGREPSTASGGGQLNRAGSISTLDSLDFARYSDDGNRETDEKVAVLEFELRKAKETIQALRANLTKAAEHEVPLQERKNYKSSPEIQEPIKPLEKRALNFLVNEFLLKNNYKLTSITFSDENDDQDFELWDDVGLNIPKPPDLLQLYRDFGNHQVTGKDLVDVASGVEEDELEALTPIISNLPPTLETPQPAENSMLVQKLEDKISLLNSEKWSLMEQIRRLKSEMDFLKNEHFAIPAVCDSVQPPLDQLPHKDSEDSGQHPDVNSSDKGKNTDIHLSISDEADSTIPKENSPNSFPRREREGMPPSSLSSKKTVHFDKPNRKLSPAFHQALLSFCRMSADSRLGYEVSRIADSEKSVMLMLGRCLPHIVPNVLLAKREELIPLILCTACLHPEPKERDQLLHILFNLIKRPDDEQRQMILTGCVAFARHVGPTRVEAELLPQCWEQINHKYPERRLLVAESCGALAPYLPKEIRSSLVLSMLQQMLMEDKADLVREAVIKSLGIIMGYIDDPDKYHQGFELLLSALGDPSERVVSATHQVFLPAYAAWTTELGNLQSHLILTLLNKIEKLLREGEHGLDEHKLHMYLSALQSLIPSLFALVLQNAPFSSKAKLHGEVPQIEVTRFPRPMSPLQDVSTIIGSREQLAVLLQLYDYQLEQEGTTGWESLLWVVNQLLPQLIEIVGKINVTSTACVHEFSRFFWRLCRTFGKIFTNTKVKPQFQEILRLSEENIDSSAGNGVLTKATVPIYATGVLTCYIQEEDRKLLVGFLEDVMTLLSLSHAPLDSLKASFVELGANPAYHELLLTVLWYGVVHTSALVRCTAARMFELTLRGMSEALVDKRVAPALVTLSSDPEFSVRIATIPAFGTIMETVIQRELLERVKMQLASFLEDPQYQDQHSLHTEIIKTFGRVGPNAEPRFRDEFVIPHLHKLALVNNLQIVDSKRLDIATHLFEAYSALSCCFISEDLMVNHFLPGLRCLRTDMEHLSPEHEVILSSMIKECEQKVENKTVQEPQGSMSIAASLVSEDTKTKFLNKMGQLTTSGAMLANVFQRKK

SEQ ID NO: 43547 - protein, 255 aa, Homo sapiens
  Payload ID: 8947
  Gene Symbol: KIAA1468
  Gene Name: KIAA1468
  ENSP ID: ENSP00000464995
  MOD_RES (1)..(1): Any amino acid
XFSSKAKLHGEVPQIEVTRFPRPMSPLQDVSTIIGSREQLAVLLQLYDYQLEQEGTTGWESLLWVVNQLLPQLIEIVGKINVTSTACVHEFSRFFWRLCRTFGKIFTNTKVKPQFQEILRLSEENIDSSAGNGVLTKATVPIYATGVLTCYIQEEDRKLLVGFLEDVMTLLSLSHAPLDSLKASFVELGANPAYHELLLTVLWYGVVHTSALVRCTAARMFEVCQHMPLLVSIIMIFFFLRRRREFFLIKRLCIS

SEQ ID NO: 43548 - protein, 1017 aa, Homo sapiens
  Payload ID: 8947
  Gene Symbol: KIAA1468
  Gene Name: KIAA1468
  ENSP ID: ENSP00000468816
MAAMAPGGSGSGGGVNPFLSDSDEDDDEVAATEERRAVLRLGAGSGLDPGSAGSLSPQDPVALGSSARPGLPGEASAAAVALGGTGETPARLSIDAIAAQLLRDQYLLTALELHTELLESGRELPRLRDYFSNPGNFERQSGTPPGMGAPGVPGAAGVGGAGGREPSTASGGGQLNRAGSISTLDSLDFARYSDDGNRETDEKVAVLEFELRKAKETIQALRANLTKAAEHEVPLQERKNYKSSPEIQEPIKPLEKRALNFLVNEFLLKNNYKLTSITFSDENDDQDFELWDDVGLNIPKPPDLLQLYRDFGNHQVTGKDLVDVASGVEEDELEALTPIISNLPPTLETPQPAENSMLVQKLEDKISLLNSEKWSLMEQIRRLKSEMDFLKNEHFAIPAVCDSVQPPLDQLPHKDSEDSGQHPDVNSSDKGKNTDIHLSISDEADSTIPKENSPNSFPRREREGMPPSSLSSKKTVHFDKPNRKLSPAFHQALLSFCRMSADSRLGYEVSRIADSEKSVMLMLGRCLPHIVPNVLLAKREELIPLILCTACLHPEPKERDQLLHILFNLIKRPDDEQRQMILTGCVAFARHVGPTRVEAELLPQCWEQINHKYPERRLLVAESCGALAPYLPKEIRSSLVLSMLQQMLMEDKADLVREAVIKSLGIIMGYIDDPDKYHQGFELLLSALGDPSERVVSATHQVFLPAYAAWTTELGNLQSHLILTLLNKIEKLLREGEHGLDEHKLHMYLSALQSLIPSLFALVLQNAPFSSKAKLHGEVPQIEVTRFPRPMSPLQDVSTIIGSREQLAVLLQLYDYQLEQEGTTGWESLLWVVNQLLPQLIEIVGKINVTSTACVHEFSRFFWRLCRTFGKIFTNTKVKPQFQEILRLSEENIGNGVLTKATVPIYATGVLTCYIQEEDRKLLVGFLEDVMTLLSLSHAPLDSLKASFVELGANPAYHELLLTVLWYGVVHTSALVRCTAARMFEVCQHMPLLVSIIMIFFFLRRRREFFLIKRLCI

SEQ ID NO: 43549 - protein, 143 aa, Homo sapiens
  Payload ID: 8948
  Gene Symbol: KIAA1522
  Gene Name: KIAA1522
  Uniprot ID: Q9P206
  ENSP ID: ENSP00000294521
MVVFVGRRLPALLGLFKKKGSAKAENDKHLSVGPGQGPGSAVDEHQDNVFFPSGRPPHLEELHTQAQEGLRSLQHQEKQKLNKGGWDHGDTQSIQSSRTGPDEDNISFCSQTTSYVAESSTAEDALSIRSEMIQRKDSQKELA

SEQ ID NO: 43550 - protein, 1035 aa, Homo sapiens
  Payload ID: 8948
  Gene Symbol: KIAA1522
  Gene Name: KIAA1522
  Uniprot ID: Q9P206
  ENSP ID: ENSP00000362579
MVVFVGRRLPALLGLFKKKGSAKAENDKHLSVGPGQGPGSAVDEHQDNVFFPSGRPPHLEELHTQAQEGLRSLQHQEKQKLNKGGWDHGDTQSIQSSRTGPDEDNISFCSQTTSYVAESSTAEDALSIRSEMIQRKGSTFRPHDSFPKSGKSGRRRRERRSTVLGLPQHVQKELGLRNEREAPGTPRAPGARDAVRIPTVDGRPRGTSGMGARVSLQALEAEAEAGAETEAMLQRHIDRVYRDDTFVGRSTGTRAPPLTRPMSLAVPGLTGGAGPAEPLSPAMSISPQATYLSKLIPHAVLPPTVDVVALGRCSLRTLSRCSLHSASPASVRSLGRFSSVSSPQPRSRHPSSSSDTWSHSQSSDTIVSDGSTLSSKGGSEGQPESSTASNSVVPPPQGGSGRGSPSGGSTAEASDTLSIRSSGQLSGRSVSLRKLKRPPPPPRRTHSLHQRGLAVPDGPLGLPPKPERKQQPQLPRPPTTGGSEGAGAAPCPPNPANSWVPGLSPGGSRRPPRSPERTLSPSSGYSSQSGTPTLPPKGLAGPPASPGKAQPPKPERVTSLRSPGASVSSSLTSLCSSSSDPAPSDRSGPQILTPLGDRFVIPPHPKVPAPFSPPPSKPRSPNPAAPALAAPAVVPGPVSTTDASPQSPPTPQTTLTPLQESPVISKDQSPPPSPPPSYHPPPPPTKKPEVVVEAPSASETAEEPLQDPNWPPPPPPAPEEQDLSMADFPPPEEAFFSVASPEPAGPSGSPELVSSPAASSSSATALQIQPPGSPDPPPAPPAPAPASSAPGHVAKLPQKEPVGCSKGGGPPREDVGAPLVTPSLLQMVRLRSVGAPGGAPTPALGPSAPQKPLRRALSGRASPVPAPSSGLHAAVRLKACSLAASEGLSSAQPNGPPEAEPRPPQSPASTASFIFSKGSRKLQLERPVSPETQADLQRNLVAELRSISEQRPPQAPKKSPKAPPPVARKPSVGVPPPASPSYPRAEPLTAPPTNGLPHTQDRTKRELAENGGVLQLVGPEEKMGLPGSDSQKELA

SEQ ID NO: 43551 - protein, 1046 aa, Homo sapiens
  Payload ID: 8948
  Gene Symbol: KIAA1522
  Gene Name: KIAA1522
  Uniprot ID: Q9P206
  ENSP ID: ENSP00000362580
MGNSHHKRKAPSGPRVRSFWRFGRSAKRPAGSAKAENDKHLSVGPGQGPGSAVDEHQDNVFFPSGRPPHLEELHTQAQEGLRSLQHQEKQKLNKGGWDHGDTQSIQSSRTGPDEDNISFCSQTTSYVAESSTAEDALSIRSEMIQRKGSTFRPHDSFPKSGKSGRRRRERRSTVLGLPQHVQKELGLRNEREAPGTPRAPGARDAVRIPTVDGRPRGTSGMGARVSLQALEAEAEAGAETEAMLQRHIDRVYRDDTFVGRSTGTRAPPLTRPMSLAVPGLTGGAGPAEPLSPAMSISPQATYLSKLIPHAVLPPTVDVVALGRCSLRTLSRCSLHSASPASVRSLGRFSSVSSPQPRSRHPSSSSDTWSHSQSSDTIVSDGSTLSSKGGSEGQPESSTASNSVVPPPQGGSGRGSPSGGSTAEASDTLSIRSSGQLSGRSVSLRKLKRPPPPPRRTHSLHQRGLAVPDGPLGLPPKPERKQQPQLPRPPTTGGSEGAGAAPCPPNPANSWVPGLSPGGSRRPPRSPERTLSPSSGYSSQSGTPTLPPKGLAGPPASPGKAQPPKPERVTSLRSPGASVSSSLTSLCSSSSDPAPSDRSGPQILTPLGDRFVIPPHPKVPAPFSPPPSKPRSPNPAAPALAAPAVVPGPVSTTDASPQSPPTPQTTLTPLQESPVISKDQSPPPSPPPSYHPPPPPTKKPEVVVEAPSASETAEEPLQDPNWPPPPPPAPEEQDLSMADFPPPEEAFFSVASPEPAGPSGSPELVSSPAASSSSATALQIQPPGSPDPPPAPPAPAPASSAPGHVAKLPQKEPVGCSKGGGPPREDVGAPLVTPSLLQMVRLRSVGAPGGAPTPALGPSAPQKPLRRALSGRASPVPAPSSGLHAAVRLKACSLAASEGLSSAQPNGPPEAEPRPPQSPASTASFIFSKGSRKLQLERPVSPETQADLQRNLVAELRSISEQRPPQAPKKSPKAPPPVARKPSVGVPPPASPSYPRAEPLTAPPTNGLPHTQDRTKRELAENGGVLQLVGPEEKMGLPGSDSQKELA

SEQ ID NO: 43552 - protein, 1094 aa, Homo sapiens
  Payload ID: 8948
  Gene Symbol: KIAA1522
  Gene Name: KIAA1522
  Uniprot ID: Q9P206
  ENSP ID: ENSP00000383851
MAARAPPAAPAAEEPGNPGGPPRRKKSRSGASGLRRAFSWLRGKRRKKKAAGAEGAEPAAPRAKKAEDKAKRAKGKGRGSAKAENDKHLSVGPGQGPGSAVDEHQDNVFFPSGRPPHLEELHTQAQEGLRSLQHQEKQKLNKGGWDHGDTQSIQSSRTGPDEDNISFCSQTTSYVAESSTAEDALSIRSEMIQRKGSTFRPHDSFPKSGKSGRRRRERRSTVLGLPQHVQKELGLRNEREAPGTPRAPGARDAVRIPTVDGRPRGTSGMGARVSLQALEAEAEAGAETEAMLQRHIDRVYRDDTFVGRSTGTRAPPLTRPMSLAVPGLTGGAGPAEPLSPAMSISPQATYLSKLIPHAVLPPTVDVVALGRCSLRTLSRCSLHSASPASVRSLGRFSSVSSPQPRSRHPSSSSDTWSHSQSSDTIVSDGSTLSSKGGSEGQPESSTASNSVVPPPQGGSGRGSPSGGSTAEASDTLSIRSSGQLSGRSVSLRKLKRPPPPPRRTHSLHQRGLAVPDGPLGLPPKPERKQQPQLPRPPTTGGSEGAGAAPCPPNPANSWVPGLSPGGSRRPPRSPERTLSPSSGYSSQSGTPTLPPKGLAGPPASPGKAQPPKPERVTSLRSPGASVSSSLTSLCSSSSDPAPSDRSGPQILTPLGDRFVIPPHPKVPAPFSPPPSKPRSPNPAAPALAAPAVVPGPVSTTDASPQSPPTPQTTLTPLQESPVISKDQSPPPSPPPSYHPPPPPTKKPEVVVEAPSASETAEEPLQDPNWPPPPPPAPEEQDLSMADFPPPEEAFFSVASPEPAGPSGSPELVSSPAASSSSATALQIQPPGSPDPPPAPPAPAPASSAPGHVAKLPQKEPVGCSKGGGPPREDVGAPLVTPSLLQMVRLRSVGAPGGAPTPALGPSAPQKPLRRALSGRASPVPAPSSGLHAAVRLKACSLAASEGLSSAQPNGPPEAEPRPPQSPASTASFIFSKGSRKLQLERPVSPETQADLQRNLVAELRSISEQRPPQAPKKSPKAPPPVARKPSVGVPPPASPSYPRAEPLTAPPTNGLPHTQDRTKRELAENGGVLQLVGPEEKMGLPGSDSQKELA

SEQ ID NO: 43553 - protein, 905 aa, Homo sapiens [sequence omitted]

SEQ ID NO: 43554 - protein, 121 aa, Homo sapiens
  Payload ID: 8949
  Gene Symbol: KIAA1524
  Gene Name: KIAA1524
  ENSP ID: ENSP00000417297
MDSTACLKSLLLTVSQYKAVKSEANATQLLRHLEVISGQKLTRLFTSNQILTSECLSCLVELLEDPNISASLILSIIGLLSQLAVDIETRDCLQNTYNLNSVLAGVVCRSSHTDSVFLQMN

SEQ ID NO: 43555 - protein, 48 aa, Homo sapiens
  Payload ID: 8949
  Gene Symbol: KIAA1524
  Gene Name: KIAA1524
  ENSP ID: ENSP00000419428
MDSTACLKSLLLTVSQYKAVKSEANATQLLRHLELTYCLWEEAEGIIP

SEQ ID NO: 43556 - protein, 746 aa, Homo sapiens
  Payload ID: 8949
  Gene Symbol: KIAA1524
  Gene Name: KIAA1524
  Uniprot ID: Q8TCG1
  ENSP ID: ENSP00000419487
MPCLGLLANLCRHNLSVQTHIKTLSNVKSFYRTLITLLAHSSLTVVVFALSILSSLTLNEEVGEKLFHARNIHQTFQLIFNILINGDGTLTRKYSVDLLMDLLKNPKIADYLTRYEHFSSCLHQVLGLLNGKDPDSSSKVLELLLAFCSVTQLRHMLTQMMFEQSPPGSATLGSHTKCLEPTVALLRWLSQPLDGSENCSVLALELFKEIFEDVIDAANCSSADRFVTLLLPTILDQLQFTEQNLDEALTRKKCERIAKAIEVLLTLCGDDTLKMHIAKILTTVKCTTLIEQQFTYGKIDLGFGTKVADSELCKLAADVILKTLDLINKLKPLVPGMEVSFYKILQDPRLITPLAFALTSDNREQVQSGLRILLEAAPLPDFPALVLGESIAANNAYRQQETEHIPRKMPWQSSNHSFPTSIKCLTPHLKDGVPGLNIEELIEKLQSGMVVKDQICDVRISDIMDVYEMKLSTLASKESRLQDLLETKALALAQADRLIAQHRCQRTQAETEARTLASMLREVERKNEELSVLLKAQQVESERAQSDIEHLFQHNRKLESVAEEHEILTKSYMELLQRNESTEKKNKDLQITCDSLNKQIETVKKLNESLKEQNEKSIAQLIEKEEQRKEVQNQLVDREHKLANLHQKTKVQEEKIKTLQKEREDKEETIDILRKELSRTEQIRKELSIKASSLEVQKAQLEGRLEEKESLVKLQQEELNKHSHMIAMIHSLSGGKINPETVNLSI

SEQ ID NO: 43557 - protein, 906 aa, Homo sapiens
  Payload ID: 8949
  Gene Symbol: KIAA1524
  Gene Name: KIAA1524
  ENSP ID: ENSP00000484616
MDSTACLKSLLLTVSQYKAVKSEANATQLLRHLEVISGQKLTRLFTSNQILTSECLSCLVELLEDPNISASLILSIIGLLSQLAVDIETRDCLQNTYNLNSVLAGVVCRSSHTDSVFLQCIQLLQKLTYNVKIFYSGANIDELITFLIDHIQSSEDELKMPCLGLLANLCRHNLSVQTHIKTLSNVKSFYRTLITLLAHSSLTVVVFALSILSSLTLNEEVGEKLFHARNIHQTFQLIFNILINGDGTLTRKYSVDLLMDLLKNPKIADYLTRYEHFSSCLHQVLGLLNGKDPDSSSKVLELLLAFCSVTQLRHMLTQMMFEQSPPGSATLGSHTKCLEPTVALLRWLSQPLDGSENCSVLALELFKEIFEDVIDAANCSSADRFVTLLLPTILDQLQFTEQNLDEALTRKKCERIAKAIEVLLTPLCGDDTLKMHIAKILTTVKCTTLIEQQFTYGKIDLGFGTKVADSELCKLAADVILKTLDLINKLKPLVPGMEVSFYKILQDPRLITPLAFALTSDNREQVQSGLRILLEAAPLPDFPALVLGESIAANNAYRQQETEHIPRKMPWQSSNHSFPTSIKCLTPHLKDGVPGLNIEELIEKLQSGMVVKDQICDVRISDIMDVYEMKLSTLASKESRLQDLLETKALALAQADRLIAQHRCQRTQAETEARTLASMLREVERKNEELSVLLKAQQVESERAQSDIEHLFQHNRKLESVAEEHEILTKSYMELLQRNESTEKKNKDLQITCDSLNKQIETVKKLNESLKEQNEKSIAQLIEKEEQRKEVQNQLVDREHKLANLHQKTKVQEEKIKTLQKEREDKEETIDILRKELSRTEQIRKELSIKASSLEVQKAQLEGRLEEKESLVKLQQEELNKHSHMIAMIHSLSGGKINPETVNLSI

SEQ ID NO: 43558 - protein, 48 aa, Homo sapiens; identical to SEQ ID NO: 43555
  Payload ID: 8949
  Gene Symbol: KIAA1524
  Gene Name: KIAA1524
  ENSP ID: ENSP00000485696

SEQ ID NO: 43559 - protein, 1934 aa, Homo sapiens
  Payload ID: 8950
  Gene Symbol: KIAA1549
  Gene Name: KIAA1549
  Uniprot ID: Q9HCM3
  ENSP ID: ENSP00000406661
MPGARRRRRGAAMEGKPRAGVALAPGPSGRRPSARCARRRRPGLLLPGLWLLLLARPASCAPDELSPEQHNLSLYSMELVLKKSTGHSAAQVALTETAPGSQHSSPLHVTAPPSATTFDTAFFNQGKQTKSTADPSIFVATYVSVTSKEVAVNDDEMDNFLPDTHWTTPRMVSPIQYITVSPPGLPREALEPMLTPSLPMVSLQDEEVTSGWQNTTRQPAAYAESASHFHTFRSAFRTSEGIVPTPGRNLVLYPTDAYSHLSSRTLPEIVASLTEGVETTLFLSSRSLMPQPLGDGITIPLPSLGEVSQPPEEVWATSADRYTDVTTVLSQSLEETISPRTYPTVTASHAALAFSRTHSPLLSTPLAFASSASPTDVSSNPFLPSDSSKTSELHSNSALPGPVDNTHILSPVSSFRPYTWCAACTVPSPQQVLATSLMEKDVGSGDGAETLCMTVLEESSISLMSSVVADFSEFEEDPQVFNTLFPSRPIVPLSSRSMEISETSVGISAEVDMSSVTTTQVPPAHGRLSVPASLDPTAGSLSVAETQVTPSSVTTAFFSVITSILLDSSFSVIANKNTPSLAVRDPSVFTPYSLVPSVESSLFSDQERSSFSEHKPRGALDFASSFFSTPPLELSGSISSPSEAPASLSLMPSDLSPFTSQSFSPLVETFTLFDSSDLQSSQLSLPSSTNLEFSQLQPSSELPLNTIMLLPSRSEVSPWSSFPSDSLEFVEASTVSLTDSEAHFTSAFIETTSYLESSLISHESAVTALVPPGSESFDILTAGIQATSPLTTVHTTPILTESSLFSTLTPPDDQISALDGHVSVLASFSKAIPTGTVLITDAYLPSGSSFVSEATPFPLPTELTVVGPSLTPTEVPLNTSTEVSTTSTGAATGGPLDSTLMGDAASQSPPESSAAPPLPSLRPVTAFTLEATVDTPTLATAKPPYVCDITVPDAYLITTVLARRAVQEYIITAIKEVLRIHFNRAVELKVYELFTDFTFLVTSGPFVYTAISVINVLINSKLVRDQTPLILSVKPSFLVPESRFQVQTVLQFVPPSVDTGFCNFTQRIEKGLMTALFEVRKHHQGTYNLTVQILNITISSSRVTPRRGPVNIIFAVKSTQGFLNGSEVSELLRNLSVVEFSFYLGYPVLQIAEPFQYPQLNLSQLLKSSWVRTVLLGVMEKQLQNEVFQAEMERKLAQLLSEVSTRRRMWRRATVAAGNSVVQVVNVSRLEGDDNPVQLIYFVEDQDGERLSAVKSSDLINKMDLQRAAIILGYRIQGVIAQPVDRVKRPSPESQSNNLWVIVGVVIPVLVVMVIVVILYWKLCRTDKLDFQPDTVANIQQRQKLQIPSVKGFDFAKQHLGQHNKDDILIIHEPAPLPGPLKDHTTPSENGDVPSPKSKIPSKNVRHRGRVSPSDADSTVSEESSERDAGDKTPGAVNDGRSHRAPQSGPPLPSSGNEQHSSASIFEHVDRISRPPEASRRVPSKIQLIAMQPIPAPPVQRPSPADRVAESNKINKEIQTALRHKSEIEHHRNKIRLRAKRRGHYEFPVVDDLSSGDTKERHRVYRRAQMQIDKILDPTASVPSVFIEPRKSSRIKRSPKPRRKHQVNGCPADAEKDRLITTDSDGTYRRPPGVHNSAYIGCPSDPDLPADVQTPSSVELGRYPALPFPASQYIPPQPSIEEARQTMHSLLDDAFALVAPSSQPASTAGVGPGVPPGLPANSTPSQEERRATQWGSFYSPAQTANNPCSRYEDYGMTPPTGPLPRPGFGPGLLQSTELVPPDPQQPQASAEAPFAARGIYSEEMPSVARPRPVGGTTGSQIQHLTQVGIASRIGAQPVEIPPSRGSQYGGPGWPSYGEDEAGRREAVPRTSGREPSAPSGNLPHRGLQGPGLGYPTSSTEDLQPGHSSASLIKAIREELLRLSQKQSTVQNFHS

SEQ ID NO: 43560 - protein, 1950 aa, Homo sapiens
  Payload ID: 8950
  Gene Symbol: KIAA1549
  Gene Name: KIAA1549
  Uniprot ID: Q9HCM3
  ENSP ID: ENSP00000416040
MPGARRRRRGAAMEGKPRAGVALAPGPSGRRPSARCARRRRPGLLLPGLWLLLLARPASCAPDELSPEQHNLSLYSMELVLKKSTGHSAAQVALTETAPGSQHSSPLHVTAPPSATTFDTAFFNQGKQTKSTADPSIFVATYVSVTSKEVAVNDDEMDNFLPDTHWTTPRMVSPIQYITVSPPGLPREALEPMLTPSLPMVSLQDEEVTSGWQNTTRQPAAYAESASHFHTFRSAFRTSEGIVPTPGRNLVLYPTDAYSHLSSRTLPEIVASLTEGVETTLFLSSRSLMPQPLGDGITIPLPSLGEVSQPPEEVWATSADRYTDVTTVLSQSLEETISPRTYPTVTASHAALAFSRTHSPLLSTPLAFASSASPTDVSSNPFLPSDSSKTSELHSNSALPGPVDNTHILSPVSSFRPYTWCAACTVPSPQQVLATSLMEKDVGSGDGAETLCMTVLEESSISLMSSVVADFSEFEEDPQVFNTLFPSRPIVPLSSRSMEISETSVGISAEVDMSSVTTTQVPPAHGRLSVPASLDPTAGSLSVAETQVTPSSVTTAFFSVITSILLDSSFSVIANKNTPSLAVRDPSVFTPYSLVPSVESSLFSDQERSSFSEHKPRGALDFASSFFSTPPLELSGSISSPSEAPASLSLMPSDLSPFTSQSFSPLVETFTLFDSSDLQSSQLSLPSSTNLEFSQLQPSSELPLNTIMLLPSRSEVSPWSSFPSDSLEFVEASTVSLTDSEAHFTSAFIETTSYLESSLISHESAVTALVPPGSESFDILTAGIQATSPLTTVHTTPILTESSLFSTLTPPDDQISALDGHVSVLASFSKAIPTGTVLITDAYLPSGSSFVSEATPFPLPTELTVVGPSLTPTEVPLNTSTEVSTTSTGAATGGPLDSTLMGDAASQSPPESSAAPPLPSLRPVTAFTLEATVDTPTLATAKPPYVCDITVPDAYLITTVLARRAVQEYIITAIKEVLRIHFNRAVELKVYELFTDFTFLVTSGPFVYTAISVINVLINSKLVRDQTPLILSVKPSFLVPESRFQVQTVLQFVPPSVDTGFCNFTQRIEKGLMTALFEVRKHHQGTYNLTVQILNITISSSRVTPRRGPVNIIFAVKSTQGFLNGSEVSELLRNLSVVEFSFYLGYPVLQIAEPFQYPQLNLSQLLKSSWVRTVLLGVMEKQLQNEVFQAEMERKLAQLLSEVSTRRRMWRRATVAAGNSVVQVVNVSRLEGDDNPVQLIYFVEDQDGERLSAVKSSDLINKMDLQRAAIILGYRIQGVIAQPVDRVKRPSPESQSNNLWVIVGVVIPVLVVMVIVVILYWKLCRTDKLDFQPDTVANIQQRQKLQIPSVKGFDFAKQHLGQHNKDDILIIHEPAPLPGPLKDHTTPSENGDVPSPKSKIPSKNVRHRGRVSPSDADSTVSEESSERDAGDKTPGAVNDGRSHRAPQSGPPLPSSGNEQHSSASIFEHVDRISRPPEASRRVPSKIQLIAMQPIPAPPVQRPSPADRVAESNKINKEIQTALRHKSEIEHHRNKIRLRAKRRGHYEFPVVDDLSSGDTKERHRVYRRAQMQIDKILDPTASVPSVFIEPRKSSRIKRSPKPRRKHQVNGCPADAEKDRLITTDSDGTYRRPPGVHNSAYIGCPSDPDLPADVQTPSSVELGRYPALPFPASQYIPPQPSIEEARQTMHSLLDDAFALVAPSSQPASTAGVGPGVPPGLPANSTPSQEERRATQWGSFYSPAQTANNPCSRYEDYGMTPPTGPLPRPGFGPGLLQSTELVPPDPQQPQASAEAPFAARGIYSEEMPSVARPRPVGGTTGSQIQHLTQVGIASRIGAQPVEIPPSRGSQYGGPGWPSYGEDEAGRREATHMLGHQEYSSSPLFQVPRTSGREPSAPSGNLPHRGLQGPGLGYPTSSTEDLQPGHSSASLIKAIREELLRLSQKQSTVQNFHS

SEQ ID NO: 43561 - protein, 1235 aa, Homo sapiens
  Payload ID: 8951
  Gene Symbol: KIAA1549L
  Gene Name: KIAA1549-like
  Uniprot ID: Q6ZVL6
  ENSP ID: ENSP00000265654
MDHTASQNAQDLIGIPHLGVSGSSTKWHSELSPTEGPHSAGSSTPGFLSPMAELSHPSPPPPALGSLLQLPDGSPSWSMLEVASGPASTQQIKAGVPGRVHNGVSLPTFKNTETATHEAEPPLFQTAESGAIEMTSRKLASATANDSANPLHLSAAPENSRGPALSAEHTSSLVPSLHITTLGQEQAILSGAVPASPSTGTADFPSILTFLQPTENHASPSPVPEMPTLPAEGSDGSPPATRDLLLSSKVPNLLSTSWTFPRWKKDSVTAILGKNEEANVTIPLQAFPRKEVLSLHTVNGFVSDFSTGSVSSPIITAPRTNPLPSGPPLPSILSIQATQTVFPSLGFSSTKPEAYAAAVDHSGLPASASKQVRASPSSMDVYDSLTIGDMKKPATTDVFWSSLSAETGSLSTESIISGLQQQTNYDLNGHTISTTSWETHLAPTAPPNGLTSAADAIKSQDFKDTAGHSVTAEGFSIQDLVLGTSIEQPVQQSDMTMVGSHIDLWPTSNNNHSRDFQTAEVAYYSPTTRHSVSHPQLQLPNQPAHPLLLTSPGPTSTGSLQEMLSDGTDTGSEISSDINSSPERNASTPFQNILGYHSAAESSISTSVFPRTSSRVLRASQHPKKWTGAATNAADTVSSKVQPTAAAAVTLFLRKSSPPALSAALVAKGTSSSPLAVASGPAKSSSMTTLAKNVTNKAASGPKRTPGAVHTAFPFTPTYMYARTGHTTSTHTAMQGNMDTASGLLSTTYLPRKPQAMHTGLPNPTNLEMPRASTPRPLTVTAALTSITASVKATRLPPLRAENTDAVLPAASAAVVTTGKMASNLECQMSSKLLVKTVLFLTQRRVQISESLKFSIAKGLTQALRKAFHQNDVSAHVDILEYSHNVTVGYYATKGKLVYLPAVVIEMLGVYGVSNVTADLKQHTPHLQSVAVLASPWNPQPAGYFQLKTVLQFVSQADNIQSCKFAQTMEQRLQKAFQDAERKVLNTKSNLTIQIVSTSNASQAVTLVYVVGNQSTFLNGTVASSLLSQLSAELVGFYLTYPPLTIAEPLEYPNLDISETTRDYWVITVLQGVDNSLVGLHNQSFARVMEQRLAQLFMMSQQQGRRFKRATTLGSYTVQMVKMQRVPGPKDPAELTYYTLYNGKPLLGTAAAKILSTIDSQRMALTLHHVVLLQADPVVKNPPNNLWIIAAVLAPIAVVTVIIIIITAVLCRKNKNDFKPDTMINLPQRAKQVAQ

SEQ ID NO: 43562 - protein, 1849 aa, Homo sapiens
  Payload ID: 8951
  Gene Symbol: KIAA1549L
  Gene Name: KIAA1549-like
  Uniprot ID: Q6ZVL6
  ENSP ID: ENSP00000315295
MDHTASQNAQDLIGIPHLGVSGSSTKWHSELSPTEGPHSAGSSTPGFLSPMAELSHPSPPPPALGSLLQLPDGSPSWSMLEVASGPASTQQIKAGVPGRVHNGVSLPTFKNTETATHEAEPPLFQTAESGAIEMTSRKLASATANDSANPLHLSAAPENSRGPALSAEHTSSLVPSLHITTLGQEQAILSGAVPASPSTGTADFPSILTFLQPTENHASPSPVPEMPTLPAEGSDGSPPATRDLLLSSKVPNLLSTSWTFPRWKKDSVTAILGKNEEANVTIPLQAFPRKEVLSLHTVNGFVSDFSTGSVSSPIITAPRTNPLPSGPPLPSILSIQATQTVFPSLGFSSTKPEAYAAAVDHSGLPASASKQVRASPSSMDVYDSLTIGDMKKPATTDVFWSSLSAETGSLSTESIISGLQQQTNYDLNGHTISTTSWETHLAPTAPPNGLTSAADAIKSQDFKDTAGHSVTAEGFSIQDLVLGTSIEQPVQQSDMTMVGSHIDLWPTSNNNHSRDFQTAEVAYYSPTTRHSVSHPQLQLPNQPAHPLLLTSPGPTSTGSLQEMLSDGTDTGSEISSDINSSPERNASTPFQNILGYHSAAESSISTSVFPRTSSRVLRASQHPKKWTADTVSSKVQPTAAAAVTLFLRKSSPPALSAALVAKGTSSSPLAVASGPAKSSSMTTLAKNVTNKAASGPKRTPGAVHTAFPFTPTYMYARTGHTTSTHTAMQGNMDTASGLLSTTYLPRKPQAMHTGLPNPTNLEMPRASTPRPLTVTAALTSITASVKATRLPPLRAENTDAVLPAASAAVVTTGKMASNLECQMSSKLLVKTVLFLTQRRVQISESLKFSIAKGLTQALRKAFHQNDVSAHVDILEYSHNVTVGYYATKGKLVYLPAVVIEMLGVYGVSNVTADLKQHTPHLQSVAVLASPWNPQPAGYFQLKTVLQFVSQADNIQSCKFAQTMEQRLQKAFQDAERKVLNTKSNLTIQIVSTSNASQAVTLVYVVGNQSTFLNGTVASSLLSQLSAELVGFYLTYPPLTIAEPLEYPNLDISETTRDYWVITVLQGVDNSLVGLHNQSFARVMEQRLAQLFMMSQQQGRRFKRATTLGSYTVQMVKMQRVPGPKDPAELTYYTLYNGKPLLGTAAAKILSTIDSQRMALTLHHVVLLQADPVVKNPPNNLWIIAAVLAPIAVVTVIIIIITAVLCRKNKNDFKPDTMINLPQRAKPVQGFDYAKQHLGQQGADEEVIPVTQETVVLPLPIRDAPQERDVAQDGSTIKTAKSTETRKSRSPSENGSVISNESGKPSSGRRSPQNVMAQQKVTKEEARKRNVPASDEEEGAVLFDNSSKVAAEPFDTSSGSVQLIAIKPTALPMVPPTSDRSQESSAVLNGEVNKALKQKSDIEHYRNKLRLKAKRKGYYDFPAVETSKGLTERKKMYEKAPKEMEHVLDPDSELCAPFTESKNRQQMKNSVYRSRQSLNSPSPGETEMDLLVTRERPRRGIRNSGYDTEPEIIEETNIDRVPEPRGYSRSRQVKGHSETSTLSSQPSIDEVRQQMHMLLEEAFSLASAGHAGQSRHQEAYGSAQHLPYSEVVTSAPGTMTRPRAGVQWVPTYRPEMYQYSLPRPAYRFSQLPEMVMGSPPPPVPPRTGPVAVASLRRSTSDIGSKTRMAESTGPEPAQLHDSASFTQMSRGPVSVTQLDQSALNYSGNTVPAVFAIPAANRPGFTGYFIPTPPSSYRNQAWMSYAGENELPSQWADSVPLPGYIEAYPRSRYPQSSPSRLPRQYSQPANLHPSLEQAPAPSTAASQQSLAENDPSDAPLTNISTAALVKAIREEVAKLAKKQTDMFEFQV

SEQ ID NO: 43563 - protein, 836 aa, Homo sapiens
  Payload ID: 8951
  Gene Symbol: KIAA1549L
  Gene Name: KIAA1549-like
  ENSP ID: ENSP00000433481
  MOD_RES (1)..(1): Any amino acid
XPSKDSTESLVQPGPKGGQEAADVSADTVSSKVQPTAAAAVTLFLRKSSPPALSAALVAKGTSSSPLAVASGPAKSSSMTTLAKNVTNKAASGPKRTPGAVHTAFPFTPTYMYARTGHTTSTHTAMQGNMDTASGLLSTTYLPRKPQAMHTGLPNPTNLEMPRASTPRPLTVTAALTSITASVKATRLPPLRAENTDAVLPAASAAVVTTGKMASNLECQMSSKLLVKTVLFLTQRRVQISESLKFSIAKGLTQALRKAFHQNDVSAHVDILEYSHNVTVGYYATKGKLVYLPAVVIEMLGVYGVSNVTADLKQHTPHLQSVAVLASPWNPQPAGYFQLKTVLQFVSQADNIQSCKFAQTMEQRLQKAFQDAERKVLNTKSNLTIQIVSTSNASQAVTLVYVVGNQSTFLNGTVASSLLSQLSAELVGFYLTYPPLTIAEPLEYPNLDISETTRDYWVITVLQGVDNSLVGLHNQSFARVMEQRLAQLFMMSQQQGRRFKRATTLGSYTVQMVKMQRVPGPKDPAELTYYTLYNGKPLLGTAAAKILSTIDSQRMALTLHHVVLLQADPVVKNPPNNLWIIAAVLAPIAVVTVIIIIITAVLCRKNKNDFKPDTMINLPQRAKPVQGFDYAKQHLGQQGADEEVIPVTQETVVLPLPIRDAPQERDVAQDGSTIKTAKSTETRKSRSPSENGSVISNESGKPSSGRRSPQNVMAQQKVTKEEARKRNVPASDEEEGAVLFDNSSKVAAEPFDTSSGSVQLIAIKPTALPMVPPTSDRSQESSAVLNGEVNKALKQKSDIEHYRNKLRLKAKRKGYYDFPAVETSKGLTERKKMYEK

SEQ ID NO: 43564 - protein, 1747 aa, Homo sapiens
  Payload ID: 8952
  Gene Symbol: KIAA1551
  Gene Name: KIAA1551
  Uniprot ID: Q9HCM1
  ENSP ID: ENSP00000310338
MNWNEKPKSATLPPLYPKSQPPFLHQSLINQITTTSQSSFSYPGSNQEACMYPGNSNPISQPLLNIQNYPQQISVSDMHNGTVVASHTSVERITYANVNGPKQLTHNLQMSSGVTQNVWLNSPMRNPVHSHIGATVSHQTDFGANVPNMPALQSQLITSDTYSMQMQMIPSNSTRLPVAYQGNQGLNQSFSEQQVDWTQQCISKGLTYPDYRPPPKLYRYSPQSFLPDSTIQKQNFIPHTSLQVKNSQLLNSVLTLPSRQTSAVPSQQYATQTDKRPPPPPYNCRYGSQPLQSTQHITKHLSMEVPQSREMLSSEIRTSFQQQWQNPNENVSTIGNFTNLKVNTNSKQPFNSPIRSSVDGVQTLAQTNEEKIMDSCNPTSNQVLDTSVAKEKLVRDIKTLVEIKQKFSELARKIKINKDLLMAAGCIKMTNTSYSEPAQNSKLSLKQTAKIQSGPQITPVMPENAERQTPTVVESAETNKTQCMLNSDIQEVNCRRFNQVDSVLPNPVYSEKRPMPDSSHDVKVLTSKTSAVEMTQAVLNTQLSSENVTKVEQNSPAVCETISVPKSMSTEEYKSKIQNENMLLLALLSQARKTQKTVLKDANQTIQDSKPDSCEMNPNTQMTGNQLNLKNMETPSTSNVSGRVLDNSFCSGQESSTKGMPAKSDSSCSMEVLATCLSLWKKQPSDTAKEKECDKLRTNTTAVGISKPANIHVKSPCSVVGNSNSQNKISNPSQQTALSMVMHNYESSGINITKGTELQIAVVSPLVLSEVKTLSVKGITPAVLPETVYPVIKEGSVCSLQNQLAENAKATAALKVDVSGPVASTATSTKIFPLTQKEKQNESTNGNSEVTPNVNQGKHNKLESAIHSPMNDQQISQESRNSTVVSSDTLQIDNICSLVEGDTSYNSQIAKIFSSLPLKMVEPQKPSLPNQQGIGSREPEKQLDNTTENKDFGFQKDKPVQCTDVSHKICDQSKSEPPLESSFNNLETNRVILEKSSLEHATEKSTANDTCSSAAIQEDIYPQEIDASSNYTPQDPARNEIHSDKAPVLYLHDQLSELLKEFPYGIEAVNTREGSVGQQTTYQTSEDQTADKTSSDSKDPADQIQITILSSEQMKEIFPEQDDQPYVVDKLAEPQKEEPITEVVSQCDLQAPAAGQSRDSVILDSEKDDIHCCALGWLSMVYEGVPQCQCNSIKNSSSEEEKQKEQCSPLDTNSCKQGERTSDRDVTVVQFKSLVNNPKTPPDGKSHFPELQDDSRKDTPKTKHKSLPRTEQELVAGQFSSKCDKLNPLQNHKRKKLRFHEVTFHSSNKMTASYEQASQETRQKKHVTQNSRPLKTKTAFLPNKDVYKKHSSLGQSLSPEKIKLKLKSVSFKQKRKLDQGNVLDMEVKKKKHDKQEQKGSVGATFKLGDSLSNPNERAIVKEKMVSNTKSVDTKASSSKFSRILTPKEYLQRQKHKEALSNKASKKICVKNVPCDSEHMRPSKLAVQVESCGKSNEKHSSGVQTSKESLNGLTSHGKNLKIHHSQESKTYNILRNVKEKVGGKQPDKIWIDKTKLDKLTNISNEAQFSQMPPQVKDQKKLYLNRVGFKCTERESISLTKLESSPRKLHKDKRQENKHKTFLPVKGNTEKSNMLEFKLCPDILLKNTNSVEERKDVKPHPRKEQAPLQVSGIKSTKEDWLKFVATKKRTQKDSQERDNVNSRLSKRSFSADGFEMLQNPVKDSKEMFQTYKQMYLEKRSRSLGSSPVK

SEQ ID NO: 43565 - protein, 674 aa, Homo sapiens
  Payload ID: 8952
  Gene Symbol: KIAA1551
  Gene Name: KIAA1551
  ENSP ID: ENSP00000370442
MNWNEKPKSATLPPLYPKSQPPFLHQSLINQITTTSQSSFSYPGSNQEACMYPGNSNPISQPLLNIQNYPQQISVSDMHNGTVVASHTSVERITYANVNGPKQLTHNLQMSSGVTQNVWLNSPMRNPVHSHIGATVSHQTDFGANVPNMPALQSQLITSDTYSMQMQMIPSNSTRLPVAYQGNQGLNQSFSEQQVDWTQQCISKGLTYPDYRPPPKLYRYSPQSFLPDSTIQKQNFIPHTSLQVKNSQLLNSVLTLPSRQTSAVPSQQYATQTDKRPPPPPYNCRYGSQPLQSTQHITKHLSMEVPQSREMLSSEIRTSFQQQWQNPNENVSTIGNFTNLKVNTNSKQPFNSPIRSSVDGVQTLAQTNEEKIMDSCNPTSNQVLDTSVAKEKLVRDIKTLVEIKQKFSELARKIKINKDLLMAAGCIKMTNTSYSEPAQNSKLSLKQTAKIQSGPQITPVMPENAERQTPTVVESAETNKTQCMLNSDIQEVNCRRFNQVDSVLPNPVYSEKRPMPDSSHDVKVLTSKTSAVEMTQAVLNTQLSSENVTKVEQNSPAVCETISVPKSMSTEEYKSKIQNENMLLLALLSQARKTQKTVLKDANQTIQDSKPDSCEMNPNTQMTGNQLNLKNMETPSTSNVSGRVLDNSFCSGQESSTKGMPAKSDSSCSMEVLA

SEQ ID NO: 43566 - protein, 35 aa, Homo sapiens
  Payload ID: 8952
  Gene Symbol: KIAA1551
  Gene Name: KIAA1551
  ENSP ID: ENSP00000445152
MNWNEKPKSATLPPLYPKSQPPFLHQSLINQITTT

SEQ ID NO: 43567 - protein, 787 aa, Homo sapiens
  Payload ID: 8953
  Gene Symbol: KIAA1586
  Gene Name: KIAA1586
  Uniprot ID: Q9HCI6
  ENSP ID: ENSP00000359768
MGDPGSEIIESVPPAGPEASESTTDENEDDIQFVSEGPSRPVLEYIDLVCGDDENPSAYYSDILFPKMPKRQGDFLHFLNVKKVKTDTENNEVSKNHCRLSKAKEPHFEYIEQPIIEEKPSLSSKKEIDNLVLPDCWNEKQAFMFTEQYKWLEIKEGKLGCKDCSAVRHLGSKAEKHVHVSKEWIAYLVTPNGSNKTTRQASLRKKIREHDVSKAHGKIQDLLKESTNDSICNLVHKQNNKNIDATVKVFNTVYSLVKHNRPLSDIEGARELQEKNGEVNCLNTRYSATRIAEHIAKEMKMKIFKNIIEENAKICIIIDEASTVSKKTTLVIYLQCTIQSAPAPVMLFVALKELVSTIAECIVNTLLTTLNDCGFTNEYLKANLIAFCSDGANTILGRKSGVATKLLENFPEIIIWNCLNHRLQLSLDDSISEIKQINHLKIFIDKIYSIYHQPNKNQTKLLGTVAKELETEIIKIGRVMGPRWAACSLQAATAVWHAYPILYMHFSHSYSGLAKRLANINFLQDLALMIDILEEFSVLSTALQSRSTNIKKAQKLIKRTIRALENLKIGTGKYESQIEDLIKSDKFKDIPFNKNNKFNALPRSILLDNIIQHMNLRLLSDRNHEDIFNYFDLLEPSTWPYEEITSPWIAGEKTLFHLCKILKYEVDLNDFREFVNNNIKSNNVSIPTTIYKAKKIVSTIAINSAEAERGFNLMNIICTRVRNSLTIDHVSDLMTINLLGKELADWDATPFVKSWSNCNHRLATDTRVRQKSTKVFHENQLAIWNLK

SEQ ID NO: 43568 - protein, 760 aa, Homo sapiens
  Payload ID: 8953
  Gene Symbol: KIAA1586
  Gene Name: KIAA1586
  ENSP ID: ENSP00000445507
MGDPGSEIIESVPPAGPEASESTTDENEDDIQFVSILFPKMPKRQGDFLHFLNVKKVKTDTENNEVSKNHCRLSKAKEPHFEYIEQPIIEEKPSLSSKKEIDNLVLPDCWNEKQAFMFTEQYKWLEIKEGKLGCKDCSAVRHLGSKAEKHVHVSKEWIAYLVTPNGSNKTTRQASLRKKIREHDVSKAHGKIQDLLKESTNDSICNLVHKQNNKNIDATVKVFNTVYSLVKHNRPLSDIEGARELQEKNGEVNCLNTRYSATRIAEHIAKEMKMKIFKNIIEENAKICIIIDEASTVSKKTTLVIYLQCTIQSAPAPVMLFVALKELVSTIAECIVNTLLTTLNDCGFTNEYLKANLIAFCSDGANTILGRKSGVATKLLENFPEIIIWNCLNHRLQLSLDDSISEIKQINHLKIFIDKIYSIYHQPNKNQTKLLGTVAKELETEIIKIGRVMGPRWAACSLQAATAVWHAYPILYMHFSHSYSGLAKRLANINFLQDLALMIDILEEFSVLSTALQSRSTNIKKAQKLIKRTIRALENLKIGTGKYESQIEDLIKSDKFKDIPFNKNNKFNALPRSILLDNIIQHMNLRLLSDRNHEDIFNYFDLLEPSTWPYEEITSPWIAGEKTLFHLCKILKYEVDLNDFREFVNNNIKSNNVSIPTTIYKAKKIVSTIAINSAEAERGFNLMNIICTRVRNSLTIDHVSDLMTINLLGKELADWDATPFVKSWSNCNHRLATDTRVRQKSTKVFHENQLAIWNLK

SEQ ID NO: 43569 - protein, 811 aa, Homo sapiens
  Payload ID: 8954
  Gene Symbol: KIAA1614
  Gene Name: KIAA1614
  Uniprot ID: Q5VZ46
  ENSP ID: ENSP00000356559
MKARTRPLRASHDIVPTITQGSRDGHRSPARDPRTTPACRDSLQNGHTSDSSSGESSGGHRPRRGPSPSHVRFEDESAREAEFRHLERLQQRQRQVLSTVLQAADQGPLRSKPDLADYINGAPRLRDAGQGTFHRLVGSLDRRGHPAPPAPGSERRCQACGSCIDDPRPAQGKAPPVPRTLQELQAACGMERVLGGLSSPLRLLPAEPRLHMEWIRETHIGDTVCPAEVDSALDSTDNSDNCRTDSEEAGTSQAGWACGRTQGSSPRLRLRGSRPRGHRWSKKAEAELPWGLQAQQHLPRADDVEVENEVKEGRGHTPEGTLFLREDAKPPDLELKRVSLGPQWQPGPGLGSHQPHPLDSRTPCRTAYATTAPMTPESSGPGGQAQVTESHESLEIVSPSSLQQSHAEPSAPHQAWQPTASLCPEGWAPTPPPSRKTTSPVSHRKAALAGLLRLGDQTEPVGIPRPPSRSAVLRTCELPPSQTQPSRPQVRHPLLALSTNNCNNSAPRGLQEPYGGAVHEGRVERGPCSREPEPPLENSRDGGPQGFLGSADVATINSTGITLSLSSEESESSKESEGSLQRTGSGSGGHVLSRASAGAGTGPGSPSAAPLDQNKKRSSSIASTLGLKKLFSALGQSSRPKLGKSRSYSVEQLQPAPPGLTSQSRAPSLQSLHPVSPSHQRRKAASFQNLHSLLSSKGNRSSLYLVAGPGDHSAAGRPAKTSPRRALSVEDVGAPSLARTVGRLVEVFPDGTSQLQLQRSPGGTFGFCVASGNGRPDSGMPSPLPQPHGWGGLSKQGRAFWLWSEAFLVFG

SEQ ID NO: 43570 - protein, 1190 aa, Homo sapiens
  Payload ID: 8954
  Gene Symbol: KIAA1614
  Gene Name: KIAA1614
  Uniprot ID: Q5VZ46
  ENSP ID: ENSP00000356560
MEGTEAAAAKPAGGSPQGPKTGSGTASPVEGTSAVEWSGPEPQLDNGHPPRPWPCPQENRTSSLMAPQPPRVWGVQLQGPSVLESKVRALKEKMTVAKQGVSPCSASQEWSSPKKPQCRRGKAGRAGTPSEGSFLPGAVVAPRTQNLPDGQLDGSINEEQPARDGGPRLPRPPAPGREYCNRGSPWPPEAEWTLPDHDRGPLLGPSSLQQSPIHGVTPGRPGGPGHCNKIIHIPSPRTGRSYPFPDGVVTEADLDSTSLTSEEVFVPRTALLGERWRAGDLEALGAGSSVLSLSDRVERNRLLLQEMLNVSGQSPRKVGTPAWTPSWDTAAPERPVGDVDWASGTSLQDSGQNRTVGPNPEPVLSPRHEEATHLLQRARMKARTRPLRASHDIVPTITQGSRDGHRSPARDPRTTPACRDSLQNGHTSDSSSGESSGGHRPRRGPSPSHVRFEDESAREAEFRHLERLQQRQRQVLSTVLQAADQGPLRSKPDLADYINGAPRLRDAGQGTFHRLVGSLDRRGHPAPPAPGSERRCQACGSCIDDPRPAQGKAPPVPRTLQELQAACGMERVLGGLSSPLRLLPAEPRLHMEWIRETHIGDTVCPAEVDSALDSTDNSDNCRTDSEEAGTSQAGWACGRTQGSSPRLRLRGSRPRGHRWSKKAEAELPWGLQAQQHLPRADDVEVENEVKEGRGHTPEGTLFLREDAKPPDLELKRVSLGPQWQPGPGLGSHQPHPLDSRTPCRTAYATTAPMTPESSGPGGQAQVTESHESLEIVSPSSLQQSHAEPSAPHQAWQPTASLCPEGWAPTPPPSRKTTSPVSHRKAALAGLLRLGDQTEPVGIPRPPSRSAVLRTCELPPSQTQPSRPQVRHPLLALSTNNCNNSAPRGLQEPYGGAVHEGRVERGPCSREPEPPLENSRDGGPQGFLGSADVATINSTGITLSLSSEESESSKESEGSLQRTGSGSGGHVLSRASAGAGTGPGSPSAAPLDQNKKRSSSIASTLGLKKLFSALGQSSRPKLGKSRSYSVEQLQPAPPGLTSQSRAPSLQSLHPVSPSHQRRKAASFQNLHSLLSSKGNRSSLYLVAGPGDHSAAGRPAKTSPRRALSVEDVGAPSLARTVGRLVEVFPDGTSQLQLQRSPGGTFGFCVASGNGRPDSGMPSPLPQPHGWGGLSKQGRAFWLWSEAFLVFG

SEQ ID NO: 43571 - protein, 199 aa, Homo sapiens
  Payload ID: 8955
  Gene Symbol: KIAA1644
  Gene Name: KIAA1644
  Uniprot ID: Q3SXP7
  ENSP ID: ENSP00000370568
MTSCGQQSLNVLAVLFSLLFSAVLSAHFRVCEPYTDHKGRYHFGFHCPRLSDNKTFILCCHHNNTVFKYCCNETEFQAVMQANLTASSEGYMHNNYTALLGVWIYGFFVLMLLVLDLLYYSAMNYDICKVYLARWGIQGRWMKQDPRRWGNPARAPRPGQRAPQPQPPPGPLPQAPQAVHTLRGDAHSPPLMTFQSSSA

SEQ ID NO: 43572 - protein, 1806 aa, Homo sapiens
  Payload ID: 8956
  Gene Symbol: KIAA1671
  Gene Name: KIAA1671
  Uniprot ID: Q9BY89
  ENSP ID: ENSP00000351207
MATRVEVGSITPLTAVPGLGEMGKEETLTRTYFLQAGEASGAPPARILEAKSPLRSPARLLPLPRLAPKPFSKEQDVKSPVPSLRPSSTGPSPSGGLSEEPAAKDLDNRMPGLVGQEVGSGEGPRTSSPLFNKAVFLRPSSSTMILFETTKSGPALGKAVSEGAEEAKLGVSGSRPEVAAKPALPTQKPAGTLPRSAPLSQDTKPPVPQEEAGQDHPPSKASSVEDTARPLVEPRPRLKRRPVSAIFTESIQPQKPGPGAAATVGKVPPTPPEKTWVRKPRPLSMDLTARFENKEALLRKVADEGSGPTAGDMAGLERPRAASKLDRDCLVKAEAPLHDPDLDFLEVAKKIRERKEKMLSKPEMGSPRALVGGSSGVTPSNDQSPWEEKAKLDPEPEKAAESPSPRLGRGLELAEVKSRVADGEAAAGGEWASRRSVRKCISLFREDSTLALAVGSESPLATPASPSAAPEPEKGVVSVQERIRGWTAESSEAKPEVRRRTFQARPLSADLTKLFSSSASSNEVKYEKSAELSGEFPKEPREKQKEGHSLDGACIPRSPWKPGTLRDKSRQTEQKVSSNQDPDSCRGGSSVEAPCPSDVTPEDDRSFQTVWATVFEHHVERHTVADQSGRCLSTTPPGDMAHARVSEPRPRPEMGSWLGRDPPDMTKLKKENSRGFDNPETEKLGPTTLLNGELRPYHTPLRDKYPLSENHNNNTFLKHLENPPTSQRIEPRYDIVHAVGERVHSEAISPAPEEKAVTLRSLRSWLSLKDRQLSQEVTPADLECGLEGQAGSVQRASLIWEARGMPEASGPKFGGNCPFPKWTGGAVVSSHKATVAVSEEHCAPGATSVRAIKAAIWESQHEGPEGARSKPGVGARGPPQGCPLDPLSRATNGPSDSQARTHPDAFAVQKGPFIVAAREGDPGPAQVPQPAVRMRKAGAMDQRMDRWRRRTLPPNVKFDTFSSLVPEDSPHVGHRRTDYVSPTASALRKPQLSHYRVETQEVNPGASRDQTSPAVKQGSPVEPKATFFAVTYQIPNTQKAKGVVLSGAESLLEHSRKITPPSSPHSLTSTLVSLGHEEALEMAGSKNWMKGREHENASILKTLKPTDRPSSLGAWSLDPFNGRIIDVDALWSHRGSEDGPRPQSNWKESANKMSPSGGAPQTTPTLRSRPKDLPVRRKTDVISDTFPGKIRDGYRSSVLDIDALMAEYQELSLKVPGEAQERRSPTVEPSTLPRERPVQLGGVEQRRRSLKEMPDTGGLWKPASSAEINHSFTPGLGKQLAETLETAMGTKSSPPFWALPPSAPSERYPGGSPIPADPRKKTGFAEDDRKAFASKHHVAKCQNYLAESKPSGREDPGSGVRVSPKSPPTDQKKGTPRKSTGRGEEDSVAQWGDHPRDCGRVPLDIKRAYSEKGPPANIREGLSIMHEARERRREQPKGRPSLTGENLEAKMGPCWWESGTGDSHKVLPRDLEKEDAPQEKERPLQQVSPVASVPWRSHSFCKDRRSGPFVDQLKQCFSRQPTEPKDTDTLVHEAGSQYGTWTEQCQSGESLATESPDSSATSTRKQPPSSRLSSLSSQTEPTSAGDQYDCSRDQRSTSVDHSSTDLESTDGMEGPPPPDACPEKRVDDFSFIDQTSVLDSSALKTRVQLSKRSRRRAPISHSLRRSRFSESESRSPLEDETDNTWMFKDSTEEKSPRKEESDEEETASKAERTPVSHPQRMPAFPGMDPAVLKAQLHKRPEVDSPGETPSWAPQPKSPKSPFQPGVLGSRVLPSSMDKDERSDEPSPQWLKELKSKKRQSLYENQV

SEQ ID NO: 43573 - protein, 1806 aa, Homo sapiens; identical to SEQ ID NO: 43572
  Payload ID: 8956
  Gene Symbol: KIAA1671
  Gene Name: KIAA1671
  Uniprot ID: Q9BY89
  ENSP ID: ENSP00000385152

SEQ ID NO: 43574 - protein, 313 aa, Homo sapiens
  Payload ID: 8956
  Gene Symbol: KIAA1671
  Gene Name: KIAA1671
  Uniprot ID: Q9BY89
  ENSP ID: ENSP00000385377
MEYYYCPSLLKLLRYLWDQLKQCFSRQPTEPKDTDTLVHEAGSQYGTWTEQCQSGESLATESPDSSATSTRKQPPSSRLSSLSSQTEPTSAGDQYDCSRDQRSTSVDHSSTDLESTDGMEGPPPPDACPEKRVDDFSFIDQTSVLDSSALKTRVQLSKRSRRRAPISHSLRRSRFSESESRSPLEDETDNTWMFKDSTEEKSPRKEESDEEETASKAERTPVSHPQRMPAFPGMDPAVLKAQLHKRPEVDSPGETPSWAPQPKSPKSPFQPGVLGSRVLPSSMDKDERSDEPSPQWLKELKSKKRQSLYENQV

SEQ ID NO: 43575 - protein, 1367 aa, Homo sapiens
  Payload ID: 8957
  Gene Symbol: KIAA1683
  Gene Name: KIAA1683
  Uniprot ID: Q9H0B3
  ENSP ID: ENSP00000376213
MTLQGRADLSGNQGNAAGRLATVHEPVVTQWAVHPPAPAHPSLLDKMEKAPPQPQHEGLKSKEHLPQQPAEGKTASRRVPRLRAVVESQAFKNILVDEMDMMHARAATLIQANWRGYWLRQKLISQMMAAKAIQEAWRRFNKRHILHSSKSLVKKTRAEEGDIPYHAPQQVRFQHPEENRLLSPPIMVNKETQFPSCDNLVLCRPQSSPLLQPPAAQGTPEPCVQGPHAARVRGLAFLPHQTVTIRFPCPVSLDAKCQPCLLTRTIRSTCLVHIEGDSVKTKRVSARTNKARAPETPLSRRYDQAVTRPSRAQTQGPVKAETPKAPFQICPGPMITKTLLQTYPVVSVTLPQTYPASTMTTTPPKTSPVPKVTIIKTPAQMYPGPTVTKTAPHTCPMPTMTKIQVHPTASRTGTPRQTCPATITAKNRPQVSLLASIMKSLPQVCPGPAMAKTPPQMHPVTTPAKNPLQTCLSATMSKTSSQRSPVGVTKPSPQTRLPAMITKTPAQLRSVATILKTLCLASPTVANVKAPPQVAVAAGTPNTSGSIHENPPKAKATVNVKQAAKVVKASSPSYLAEGKIRCLAQPHPGTGVPRAAAELPLEAEKIKTGTQKQAKTDMAFKTSVAVEMAGAPSWTKVAEEGDKPPHVYVPVDMAVTLPRGQLAAPLTNASSQRHPPCLSQRPLAAPLTKASSQGHLPTELTKTPSLAHLDTCLSKMHSQTHLATGAVKVQSQAPLATCLTKTQSRGQPITDITTCLIPAHQAADLSSNTHSQVLLTGSKVSNHACQRLGGLSAPPWAKPEDRQTQPQPHGHVPGKTTQGGPCPAACEVQGMLVPPMAPTGHSTCNVESWGDNGATRAQPSMPGQAVPCQEDTVGSLLASLCAEVAGVLASQEDLRTLLAKALSQGEVWAALNQALSKEVLGATVTKALPQSMLSMALVKALSWSELRLTLSRALSRGELRAELTKVMQGKLAEVLSKALTEEEWVALSQALCQGELGALLSQSWCRVALRTGTILPKAASKSTGSGVTKTPALVKVACRRSPSAAWGPSLGPVRPQTSKGPADAGVVGGQSWNRAWEPARGAASWDTWRNKAVVPPRRSGEPMVSMQAAEEIRILAVITIQAGVRGYLARRRIRLWHRGAMVIQATWRGYRVRRNLAHLCRATTTIQSAWRGYSTRRDQARHWQMLHPVTWVELGSRAGVMSDRSWFQDGRARTVSDHRCFQSCQAHACSVCHSLSSRIGSPPSVVMLVGSSPRTCHTCGRTQPTRVVQGMGQGTEGPGAVSWASAYQLAALSPRQPHRQDKAATAIQSAWRGFKIRQQMRQQQMAAKIVQATWRGHHTRSCLKNTEALLGPADPSASSRHMHWPGI

SEQ ID NO: 43576 - protein, 1180 aa, Homo sapiens
  Payload ID: 8957
  Gene Symbol: KIAA1683
  Gene Name: KIAA1683
  Uniprot ID: Q9H0B3
  ENSP ID: ENSP00000470780
MTLQGRADLSGNQGNAAGRLATVHEPVVTQWAVHPPAPAHPSLLDKMEKAPPQPQHEGLKSKEHLPQQPAEGKTASRRVPRLRAVVESQAFKNILVDEMDMMHARAATLIQANWRGYWLRQKLISQMMAAKAIQEAWRRFNKRHILHSSKSLVKKTRAEEGDIPYHAPQQVRFQHPEENRLLSPPIMVNKETQFPSCDNLVLCRPQSSPLLQPPAAQGTPEPCVQGPHAARVRGLAFLPHQTVTIRFPCPVSLDAKCQPCLLTRTIRSTCLVHIEGDSVKTKRVSARTNKARAPETPLSRRYDQAVTRPSRAQTQGPVKAETPKAPFQICPGPMITKTLLQTYPVVSVTLPQTYPASTMTTTPPKTSPVPKVTIIKTPAQMYPGPTVTKTAPHTCPMPTMTKIQVHPTASRTGTPRQTCPATITAKNRPQVSLLASIMKSLPQVCPGPAMAKTPPQMHPVTTPAKNPLQTCLSATMSKTSSQRSPVGVTKPSPQTRLPAMITKTPAQLRSVATILKTLCLASPTVANVKAPPQVAVAAGTPNTSGSIHENPPKAKATVNVKQAAKVVKASSPSYLAEGKIRCLAQPHPGTGVPRAAAELPLEAEKIKTGTQKQAKTDMAFKTSVAVEMAGAPSWTKVAEEGDKPPHVYVPVDMAVTLPRGQLAAPLTNASSQRHPPCLSQRPLAAPLTKASSQGHLPTELTKTPSLAHLDTCLSKMHSQTHLATGAVKVQSQAPLATCLTKTQSRGQPITDITTCLIPAHQAADLSSNTHSQVLLTGSKVSNHACQRLGGLSAPPWAKPEDRQTQPQPHGHVPGKTTQGGPCPAACEVQGMLVPPMAPTGHSTCNVESWGDNGATRAQPSMPGQAVPCQEDTGPADAGVVGGQSWNRAWEPARGAASWDTWRNKAVVPPRRSGEPMVSMQAAEEIRILAVITIQAGVRGYLARRRIRLWHRGAMVIQATWRGYRVRRNLAHLCRATTTIQSAWRGYSTRRDQARHWQMLHPVTWVELGSRAGVMSDRSWFQDGRARTVSDHRCFQSCQAHACSVCHSLSSRIGSPPSVVMLVGSSPRTCHTCGRTQPTRVVQGMGQGTEGPGAVSWASAYQLAALSPRQPHRQDKAATAIQSAWRGFKIRQQMRQQQMAAKIVQATWRGHHTRSCLKNTEALLGPADPSASSRHMHWPGI

SEQ ID NO: 43577 - protein, 1134 aa, Homo sapiens
  Payload ID: 8957
  Gene Symbol: KIAA1683
  Gene Name: KIAA1683
  Uniprot ID: Q9H0B3
  ENSP ID: ENSP00000472912
MEKAPPQPQHEGLKSKEHLPQQPAEGKTASRRVPRLRAVVESQAFKNILVDEMDMMHARAATLIQANWRGYWLRQKLISQMMAAKAIQEAWRRFNKRHILHSSKSLVKKTRAEEGDIPYHAPQQVRFQHPEENRLLSPPIMVNKETQFPSCDNLVLCRPQSSPLLQPPAAQGTPEPCVQGPHAARVRGLAFLPHQTVTIRFPCPVSLDAKCQPCLLTRTIRSTCLVHIEGDSVKTKRVSARTNKARAPETPLSRRYDQAVTRPSRAQTQGPVKAETPKAPFQICPGPMITKTLLQTYPVVSVTLPQTYPASTMTTTPPKTSPVPKVTIIKTPAQMYPGPTVTKTAPHTCPMPTMTKIQVHPTASRTGTPRQTCPATITAKNRPQVSLLASIMKSLPQVCPGPAMAKTPPQMHPVTTPAKNPLQTCLSATMSKTSSQRSPVGVTKPSPQTRLPAMITKTPAQLRSVATILKTLCLASPTVANVKAPPQVAVAAGTPNTSGSIHENPPKAKATVNVKQAAKVVKASSPSYLAEGKIRCLAQPHPGTGVPRAAAELPLEAEKIKTGTQKQAKTDMAFKTSVAVEMAGAPSWTKVAEEGDKPPHVYVPVDMAVTLPRGQLAAPLTNASSQRHPPCLSQRPLAAPLTKASSQGHLPTELTKTPSLAHLDTCLSKMHSQTHLATGAVKVQSQAPLATCLTKTQSRGQPITDITTCLIPAHQAADLSSNTHSQVLLTGSKVSNHACQRLGGLSAPPWAKPEDRQTQPQPHGHVPGKTTQGGPCPAACEVQGMLVPPMAPTGHSTCNVESWGDNGATRAQPSMPGQAVPCQEDTGPADAGVVGGQSWNRAWEPARGAASWDTWRNKAVVPPRRSGEPMVSMQAAEEIRILAVITIQAGVRGYLARRRIRLWHRGAMVIQATWRGYRVRRNLAHLCRATTTIQSAWRGYSTRRDQARHWQMLHPVTWVELGSRAGVMSDRSWFQDGRARTVSDHRCFQSCQAHACSVCHSLSSRIGSPPSVVMLVGSSPRTCHTCGRTQPTRVVQGMGQGTEGPGAVSWASAYQLAALSPRQPHRQDKAATAIQSAWRGFKIRQQMRQQQMAAKIVQATWRGHHTRSCLKNTEALLGPADPSASSRHMHWPGI

SEQ ID NO: 43578 - protein, 7 aa, Homo sapiens
  Payload ID: 8957
  Gene Symbol: KIAA1683
  Gene Name: KIAA1683
  ENSP ID: ENSP00000475649
MEKAPPQ

SEQ ID NO: 43579 - protein, 22 aa, Homo sapiens
  Payload ID: 8957
  Gene Symbol: KIAA1683
  Gene Name: KIAA1683
  ENSP ID: ENSP00000475861
MEKAPPQPQHEGLKSKEHLPQQ

SEQ ID NO: 43580 - protein, 94 aa, Homo sapiens
  Payload ID: 8957
  Gene Symbol: KIAA1683
  Gene Name: KIAA1683
  ENSP ID: ENSP00000476085
MEKAPPQPQHEGLKSKEHLPQQPAEGKTASRRVPRLRAVVESQAFKNILVDEMDMMHARAATLIQANWRGYWLRQKLISQMMAAKAIQEAWRRF

SEQ ID NO: 43581 - protein, 150 aa, Homo sapiens
  Payload ID: 8957
  Gene Symbol: KIAA1683
  Gene Name: KIAA1683
  ENSP ID: ENSP00000476292
MTLQGRADLSGNQGNAAGRLATVHEPVVTQWAVHPPAPAHPSLLDKMEKAPPQPQHEGLKSKEHLPQQPAEGKTASRRVPRLRAVVESQAFKNILVDEMDMMHARAATLIQANWRGYWLRQKLISQMMAAKAIQEAWRRFNKRHILHSSK

SEQ ID NO: 43582 - protein, 794 aa, Homo sapiens
  Payload ID: 8957
  Gene Symbol: KIAA1683
  Gene Name: KIAA1683
  ENSP ID: ENSP00000481156
MTLQGRADLSGNQGNAAGRLATVHEPVVTQWAVHPPAPAHPSLLDKMEKAPPQPQHEGLKSKEHLPQQPAEGKTASRRVPRLRAVVESQAFKNILVDEMDMMHARAATLIQANWRGYWLRQKLISQMMAAKAIQEAWRRFNKRHILHSSKSLVKKTRAEEGDIPYHAPQQVRFQHPEENRLLSPPIMVNKETQFPSCDNLVLCRPQSSPLLQPPAAQGTPEPCVQGPHAARVRGLAFLPHQTVTIRFPCPVSLDAKCQPCLLTRTIRSTCLVHIEGDSVKTNASSQRHPPCLSQRPLAAPLTKASSQGHLPTELTKTPSLAHLDTCLSKMHSQTHLATGAVKVQSQAPLATCLTKTQSRGQPITDITTCLIPAHQAADLSSNTHSQVLLTGSKVSNHACQRLGGLSAPPWAKPEDRQTQPQPHGHVPGKTTQGGPCPAACEVQGMLVPPMAPTGHSTCNVESWGDNGATRAQPSMPGQAVPCQEDTGPADAGVVGGQSWNRAWEPARGAASWDTWRNKAVVPPRRSGEPMVSMQAAEEIRILAVITIQAGVRGYLARRRIRLWHRGAMVIQATWRGYRVRRNLAHLCRATTTIQSAWRGYSTRRDQARHWQMLHPVTWVELGSRAGVMSDRSWFQDGRARTVSDHRCFQSCQAHACSVCHSLSSRIGSPPSVVMLVGSSPRTCHTCGRTQPTRVVQGMGQGTEGPGAVSWASAYQLAALSPRQPHRQDKAATAIQSAWRGFKIRQQMRQQQMAAKIVQATWRGHHTRSCLKNTEALLGPADPSASSRHMHWPGI

SEQ ID NO: 43583 - protein, 428 aa, Homo sapiens
  Payload ID: 8958
  Gene Symbol: KIAA1715
  Gene Name: KIAA1715
  Uniprot ID: Q9C0E8
  ENSP ID: ENSP00000272748
MGGLFSRWRTKPSTVEVLESIDKEIQALEEFREKNQRLQKLWVGRLILYSSVLYLFTCLIVYLWYLPDEFTARLAMTLPFFAFPLIIWSIRTVIIFFFSKRTERNNEALDDLKSQRKKILEEVMEKETYKTAKLILERFDPDSKKAKECEPPSAGAAVTARPGQEIRQRTAAQRNLSPTPASPNQGPPPQVPVSPGPPKDSSAPGGPPERTVTPALSSNVLPRHLGSPATSVPGMGLHPPGPPLARPILPRERGALDRIVEYLVGDGPQNRYALICQQCFSHNGMALKEEFEYIAFRCAYCFFLNPARKTRPQAPRLPEFSFEKRQVVEGSSSVGPLPSGSVLSSDNQFNEESLEHDVLDDNTEQTDDKIPATEQTNQVIEKASDSEEPEEKQETENEEASVIETNSTVPGADSIPDPELSGESLTAE

SEQ ID NO: 43584 - protein, 114 aa, Homo sapiens
  Payload ID: 8958
  Gene Symbol: KIAA1715
  Gene Name: KIAA1715
  ENSP ID: ENSP00000376323
MEGKTKPSTVEVLESIDKEIQALEEFREKNQRLQKLWVGRLILYSSVLYLFTCLIVYLWYLPDEFTARLAMTLPFFAFPLIIWSIRTVIIFFFSKRTERNNEALDDLKSQRKKI

SEQ ID NO: 43585 - protein, 305 aa, Homo sapiens
  Payload ID: 8958
  Gene Symbol: KIAA1715
  Gene Name: KIAA1715
  Uniprot ID: Q9C0E8
  ENSP ID: ENSP00000386237
MEKETYKTAKLILERFDPDSKKAKECEPPSAGAAVTARPGQEIRQRTAAQRNLSPTPASPNQGPPPQVPVSPGPPKDSSAPGGPPERTVTPALSSNVLPRHLGSPATSVPGMGLHPPGPPLARPILPRERGALDRIVEYLVGDGPQNRYALICQQCFSHNGMALKEEFEYIAFRCAYCFFLNPARKTRPQAPRLPEFSFEKRQVVEGSSSVGPLPSGSVLSSDNQFNEESLEHDVLDDNTEQTDDKIPATEQTNQVIEKASDSEEPEEKQETENEEASVIETNSTVPGADSIPDPELSGESLTAE

SEQ ID NO: 43586 - protein, 83 aa, Homo sapiens
  Payload ID: 8958
  Gene Symbol: KIAA1715
  Gene Name: KIAA1715
  ENSP ID: ENSP00000388262
MGGLFSRWRTKPSTVEVLESIDKEIQALEEFREKNQRLQKLWVGRLILYSSVLYLFTCLIVYLWYLPDEFTARLAMTLPFFAF

SEQ ID NO: 43587 - protein, 69 aa, Homo sapiens
  Payload ID: 8958
  Gene Symbol: KIAA1715
  Gene Name: KIAA1715
  ENSP ID: ENSP00000388507
GSPATSVPGMGLHPPGPPLARPILPRERGALDRIVEYLVGDGPQNSFSMCLLFFLEPCKKNQTSGSKTS

SEQ ID NO: 43588 - protein, 459 aa, Homo sapiens
  Payload ID: 8958
  Gene Symbol: KIAA1715
  Gene Name: KIAA1715
  Uniprot ID: Q9C0E8
  ENSP ID: ENSP00000440905
MGGLFSRWRTKPSTVEVLESIDKEIQALEEFREKNQRLQKLWVGRLILYSSVLYLFTCLIVYLWYLPDEFTARLAMTLPFFAFPLIIWSIRTVIIFFFSKRTERNNEALDDLKSQRKKILEEVMEKETYKTAKLILERFDPDSKKAKECEPPSAGAAVTARPGQEIRQRTAAQRNLSPTPASPNQGPPPQVPVSPGPPKDSSAPGGPPERTVTPALSSNVLPRHLGSPATSVPGMEMGLPHIAQAGLEHLSSSDLSTSTSQSAGITGLHPPGPPLARPILPRERGALDRIVEYLVGDGPQNRYALICQQCFSHNGMALKEEFEYIAFRCAYCFFLNPARKTRPQAPRLPEFSFEKRQVVEGSSSVGPLPSGSVLSSDNQFNEESLEHDVLDDNTEQTDDKIPATEQTNQVIEKASDSEEPEEKQETENEEASVIETNSTVPGADSIPDPELSGESLTAE

SEQ ID NO: 43589 - protein, 1200 aa, Homo sapiens
  Payload ID: 8959
  Gene Symbol: KIAA1755
  Gene Name: KIAA1755
  Uniprot ID: Q5JYT7
  ENSP ID: ENSP00000279024
MDPPSLDTAIQHALAGLYPPFEATAPTVLGQVFRLLDSGFQGDGLSFLLDFLIPAKRLCEQVREAACAPYSHCLFLHEGWPLCLRDEVVVHLAPLNPLLLRQGDFYLQVEPQEEQSVCIMIKCLSLDLCTVDKKPVPEPAYPILFTQEWLEAINSDFEGNPLHNCLVASENGIAPVPWTKITSPEFVDDRPQVVNALCQAWGPLPLEALDLSSPQELHQASSPDNQVLPAQSLAKGKGRTYGSKYPGLIKVEQARCGEVAFRMDEVVSQDFEGDYVALLGFSQESRGESPSREAGTSSGCTSGALEEIAGTKETPLFQKILPLSEANEGPSLGNRACTKPESSEERPYNLGFRRKVNLKAPTHNSERPPQGSYMNVLEDALDCASGLRAGVSQEPAASKMQGPLGNPENMVQLRPGPRQASSPRLSPASPAAAASETKIEVKTKERNGRLPKPMPCPSRNTSSPEPPTPGLKFSFLRGQRQPSVTPEKASLQHNGPWKVLCSLYSPKPNRAKSLGKAGTTQTKTSGPATAPSPLTEEKAALPEASAGSPERGPTLEEEPPGPEPRIGALGVKVFRSRIACLPGGRDRAGRPLLLVSTTEGAWEAPWCTVSEVTKLLSYLCTIPRPEDKAKGLAVLIDARRQPPQPGLVSALQATQAQVPASIRAILFLGEKEAALQLQTLPDVQVEVLTSLKALSHHVDPSQLPAVLEGPFPYCHTEWVHFFQKLDPFLADLHQASSLLQASIEEFEKADPPGGMQEATRCLSKSKELMEAVLRDPGLLGLQREGGATLARLQHDASRLDFSPDVRSHLAAATALYSLVDEQLHVLVTASNSLLGKLELRVRLGRLEAAIHQVSDWMEQEGRRCLQSLTPKDGSLETVEKAHAEFENFFLQAAAQYRRGLELSKQAAQLGATARGAGEAERAEFPELAAFASTQRAFQAELTHFYMAAERQRTDLETLLHLHRFCKRMTWFHMDCQDLMAQLRLDKTSRVSPGDQRRLHRYLQRLASEFPAEKLAAVGLQVASLSRAGLGQELWEEARIRHEEIRMLLEKALTHSSCPEAPAAHSARPERRGVAAKGQGVSVEVTSKGRWDQPPLDSLGMDHLPKSYWPPGPPRGEQNRTFQAGSPPQEAGQAAEAEDGKGSHKLPDPAREHLLATTFFRQQPPRQSQVPRLTGGSFSSEGTDSQTSLEDSPQTSPLASL

SEQ ID NO: 43590 - protein, 266 aa, Homo sapiens
  Payload ID: 8959
  Gene Symbol: KIAA1755
  Gene Name: KIAA1755
  ENSP ID: ENSP00000393503
RAILFLGEKEAALQLQTLPDVQKLDPFLADLHQASSLLQASIEEFEKADPPGGMQEATRCLSKSKELMEAVLRDPGLLGLQREGGATLARLQHDASRLDFSPDVRSHLAAATALYSLVDEQLHVLVTASNSLLGKLELRVRLGRLEAAIHQVSDWMEQEGRRCLQSLTPKDGSLETVEKAHAEFENFFLQAAAQYRRGLELSKQAAQLGATARGAGEAERAEFPELAAFASTQRAFQAELTHFYMAAERQRTDLETLLHLHRFCKR

SEQ ID NO: 43591 - protein, 38 aa, Homo sapiens
  Payload ID: 8959
  Gene Symbol: KIAA1755
  Gene Name: KIAA1755
  ENSP ID: ENSP00000480536
  MOD_RES (1)..(1): Any amino acid
XPGPEPRIGALGVKVFRSRIACLPGSSFLFGSGPFPSG

SEQ ID NO: 43592 - protein, 732 aa, Homo sapiens
  Payload ID: 8959
  Gene Symbol: KIAA1755
  Gene Name: KIAA1755
  ENSP ID: ENSP00000483264
MDPPSLDTAIQHALAGLYPPFEATAPTVLGQVFRLLDSGFQGDGLSFLLDFLIPAKRLCEQVREAACAPYSHCLFLHEGWPLCLRDEVVVHLAPLNPLLLRQGDFYLQVEPQEEQSVCIMIKCLSLDLCTVDKKPVPEPAYPILFTQEWLEAINSDFEGNPLHNCLVASENGIAPVPWTKITSPEFVDDRPQVVNALCQAWGPLPLEALDLSSPQELHQASSPDNQVLPAQSLAKGKGRTYGSKYPGLIKVEQARCGEVAFRMDEVVSQDFEGDYVALLGFSQESRGESPSREAGTSSGCTSGALEEIAGTKETPLFQKILPLSEANEGPSLGNRACTKPESSEERPYNLGFRRKVNLKAPTHNSERPPQGSYMNVLEDALDCASGLRAGVSQEPAASKMQGPLGNPENMVQLRPGPRQASSPRLSPASPAAAASETKIEVKTKERNGRLPKPMPCPSRNTSSPEPPTPGLKFSFLRGQRQPSVTPEKASLQHNGPWKVLCSLYSPKPNRAKSLGKAGTTQTKTSGPATAPSPLTEEKAALPEASAGSPERGPTLEEEPPGPEPRIGALGVKVFRSRIACLPGGRDRAGRPLLLVSTTEGAWEAPWCTVSEVTKLLSYLCTIPRPEDKAKGLAVLIDARRQPPQPGLVSALQATQAQVPASIRAILFLGEKEAALQLQTLPDVQVEVLTSLKALSHHVDPSQLPAVLEGPFPYCHTEWVHFFQVFTVTAFSP

SEQ ID NO: 43593 - protein, 707 aa, Homo sapiens
  Payload ID: 8960
  Gene Symbol: KIAA1841
  Gene Name: KIAA1841
  Uniprot ID: Q6NSI8
  ENSP ID: ENSP00000295031
MSRGYSENNNFLNNNNQMVLDMILYPLIGIPQTINWETIARLVPGLTPKECAKRFDELKSSGSSPVDNQYNSLMAAGESPVETLATYIKSSLLDIHGEFQETPVGHDAVSKTGRHSIASTRNCSSESENCTTHNGGEMTEESEGPNMVIHVCDEAKNLKEDFTCPRDLLISEMKYFAEYLSMDAQRWEEVDISVHCDVHIFNWLIKYIKRNTKENKDCEMPTLEPGNVISILISSEFLKMDSLVEQCIQYCHKNMNAIVATPCNMNCINANLLTRIADLFSHNEVDDLKDKKDKFKSKLFCKKIERLFDPEYLNPDSRSNAATLYRCCLCKKLLTKETERRIPCIPGKINVDRRGNIVYIHIRDKTWDVHEYLNSLFEELKSWRDVYWRLWGTINWLTCSRCYQAFLCIEFSHCQYHSETVVYPTAASSLNTVGTGIYPCCNQKVLRFDPTQLTKGCKVRDHMVTLRDQGEGGDLPSCPTARMLDDLHKYRDVIVVPFSKDTVSDVGVGLCDEKGIECDVLLEPNTPWGPKTGELNAFLSLKNWTLQLKQQSLFSEEEEYTTGSEVTEDEVGDEEEVSKKQRKKEKPKKFTRQPKKQVSSPCAQRKEKALEKSASRDVSPFVMSMQKNKWDATRSLRFNQDAQREDDQRRMTEITGHLIKMRLGDLDRVKSKEAKETDKLRPRDGTVSKSNRKSGLSSVLLMTVLLC

SEQ ID NO: 43594 - protein, 707 aa, Homo sapiens; identical to SEQ ID NO: 43593
  Payload ID: 8960
  Gene Symbol: KIAA1841
  Gene Name: KIAA1841
  Uniprot ID: Q6NSI8
  ENSP ID: ENSP00000349154

SEQ ID NO: 43595 - protein, 718 aa, Homo sapiens
  Payload ID: 8960
  Gene Symbol: KIAA1841
  Gene Name: KIAA1841
  Uniprot ID: Q6NSI8
  ENSP ID: ENSP00000385579
MSRGYSENNNFLNNNNQMVLDMILYPLIGIPQTINWETIARLVPGLTPKECAKRFDELKSSGSSPVDNQYNSLMAAGESPVETLATYIKSSLLDIHGEFQETPVGHDAVSKTGRHSIASTRNCSSESENCTTHNGGEMTEESEGPNMVIHVCDEAKNLKEDFTCPRDLLISEMKYFAEYLSMDAQRWEEVDISVHCDVHIFNWLIKYIKRNTKENKDCEMPTLEPGNVISILISSEFLKMDSLVEQCIQYCHKNMNAIVATPCNMNCINANLLTRIADLFSHNEVDDLKDKKDKFKSKLFCKKIERLFDPEYLNPDSRSNAATLYRCCLCKKLLTKETERRIPCIPGKINVDRRGNIVYIHIRDKTWDVHEYLNSLFEELKSWRDVYWRLWGTINWLTCSRCYQAFLCIEFSHCQYHSETVVYPTAASSLNTVGTGIYPCCNQKVLRFDPTQLTKGCKVRDHMVTLRDQGEGGDLPSCPTARMLDDLHKYRDVIVVPFSKDTVSDVGVGLCDEKGIECDVLLEPNTPWGPKTGELNAFLSLKNWTLQLKQQSLFSEEEEYTTGSEVTEDEVGDEEEVSKKQRKKEKPKKFTRQPKKQVSSPCAQRKEKALEKSASRDVSPFVMSMQKNKWDATRSLRFNQDAQREDDQRRMTEITGHLIKMRLGDLDRVKSKEAKEFAGGIYSRLEAQIKASVPVSARQSSSEKNTRSKSRFGQGRPA

SEQ ID NO: 43596 - protein, 116 aa, Homo sapiens
  Payload ID: 8960
  Gene Symbol: KIAA1841
  Gene Name: KIAA1841
  ENSP ID: ENSP00000413200
MSRGYSENNNFLNNNNQMVLDMILYPLIGIPQTINWETIARLVPGLTPKECAKRFDELKSSGSSPVDNQYNSLMAAGESPVETLATYIKSSLLDIHGEFQETPVGHDAVSKTGQTW

SEQ ID NO: 43597 - protein, 718 aa, Homo sapiens; identical to SEQ ID NO: 43595
  Payload ID: 8960
  Gene Symbol: KIAA1841
  Gene Name: KIAA1841
  Uniprot ID: Q6NSI8
  ENSP ID: ENSP00000416795

SEQ ID NO: 43598 - protein, 572 aa, Homo sapiens
  Payload ID: 8960
  Gene Symbol: KIAA1841
  Gene Name: KIAA1841
  Uniprot ID: Q6NSI8
  ENSP ID: ENSP00000482126
MVIHVCDEAKNLKEDFTCPRDLLISEMKYFAEYLSMDAQRWEEVDISVHCDVHIFNWLIKYIKRNTKENKDCEMPTLEPGNVISILISSEFLKMDSLVEQCIQYCHKNMNAIVATPCNMNCINANLLTRIADLFSHNEVDDLKDKKDKFKSKLFCKKIERLFDPEYLNPDSRSNAATLYRCCLCKKLLTKETERRIPCIPGKINVDRRGNIVYIHIRDKTWDVHEYLNSLFEELKSWRDVYWRLWGTINWLTCSRCYQAFLCIEFSHCQYHSETVVYPTAASSLNTVGTGIYPCCNQKVLRFDPTQLTKGCKVRDHMVTLRDQGEGGDLPSCPTARMLDDLHKYRDVIVVPFSKDTVSDVGVGLCDEKGIECDVLLEPNTPWGPKTGELNAFLSLKNWTLQLKQQSLFSEEEEYTTGSEVTEDEVGDEEEVSKKQRKKEKPKKFTRQPKKQVSSPCAQRKEKALEKSASRDVSPFVMSMQKNKWDATRSLRFNQDAQREDDQRRMTEITGHLIKMRLGDLDRVKSKEAKEFAGGIYSRLEAQIKASVPVSARQSSSEKNTRSKSRFGQGRPA

SEQ ID NO: 43599 - protein, 518 aa, Homo sapiens
  Payload ID: 8961
  Gene Symbol: KIAA1919
  Gene Name: KIAA1919
  Uniprot ID: Q5TF39
  ENSP ID: ENSP00000357840
MLCASFLGLGLSVAIVGPTFQDLATNVNRNISSLSFIFVGRALGYLSGSVIGGFLVDVMNYFLLLGISMSATTVGLYLVPFCKTAILLTVMMSIFGVSIGILDTGGNVLILAIWGDKGAPHMQALHFSFALGAFLAPLLAKLALGPTASAENHTESDFHPALNQSSDADSEALFGVPNDKNLLWAYAVIGTYMFLVSVIFFCLFLKNSSKQEKARASAETFRRAKYHNALLCLLFLFFFFYVGAEVTYGSYVFSFATTHAGMKESEAAGLNSIFWGTFAACRGLAIFFATCLQPGTMIVLSNIGSLTSSLFLVLFDKNPICLWIATSVYGASMATTFPSGVSWIEQYTTIHGKSAAFFVIGASLGEMAIPAVIGILQGKYPDLPVVLYTSLGASIATGILFPVLYKLATSPLDRQRKEDRKSEDQKALLSSSGLNEYEEENEEEDAEKWNEMDFEMIETNDTMRHSIIETSRSSLTEPTAEVYNQYPSNALVFESSPFNTGSAHVKHLPETRTKGTNV

SEQ ID NO: 43600 - protein, 716 aa, Homo sapiens
  Payload ID: 8962
  Gene Symbol: KIAA1958
  Gene Name: KIAA1958
  Uniprot ID: Q8N8K9
  ENSP ID: ENSP00000336940
MEDCLHTSSENLSKLVSWAHSHGTICSLIPNLKHLLSEGSHGNLTAMWGCSAGHAYHWPLTATCRAGSQERVCFQDNRSFNSDSPSIIGVPSETQTSPVERYPGRPVKAKLDCNRTRDSCDFSYCSEPSELDETVEEYEDENTLFDMVCESSVTDEDSDFEPQTQRPQSIARKRPGVVPSSLHSSSQTQMVDECSNDVIIKKIKQEIPEDYYIVANAELTGGVDGPALSLTQMAKPKPQTHAGPSCVGSAKLIPHVTSAISTELDPHGMSASPSVISRPIVQKTARVSLASPNRGPPGTHGTNQQVAMQMPVSTSHPNKQISIPLSALQLPGQDEQVASEEFLSHLPSQVSSCEVALSPSVNTEPEVSSSQQQPPVAPAITTEATAQCIPAYSTKLNKFPVFNINDDLNDLCTSAVSPNTTKATRYALNVWRYWCMTNGLKDHTDITKIPAVKLNELLENFYVTVKKSDGSDFLATSLHAIRRGLDRILKNAGVGFSITSSTFSSSTKKLKEKLWVLSKAGMSGARSRNIVYFSLSDEEEMWQAGCLGDDSPITLLSTVVKYNSQYLNMRTLQEHADLMYGDIELLKDPQNQPYFARTDSVKRESRSGSTRVCHGKIYHEHSRGHKQCPYCLLYKYMYIHRPPTQMEAKSPFYLTARKEATDMGSVWYEEQRMGLRSLRGIVPNLAKKVKLENCENFTFVSFTQVSRRLGSHSCCQ

SEQ ID NO: 43601 - protein, 738 aa, Homo sapiens
  Payload ID: 8962
  Gene Symbol: KIAA1958
  Gene Name: KIAA1958
  Uniprot ID: Q8N8K9
  ENSP ID: ENSP00000363362
MEDCLHTSSENLSKLVSWAHSHGTICSLIPNLKHLLSEGSHGNLTAMWGCSAGHAYHWPLTATCRAGSQERVCFQDNRSFNSDSPSIIGVPSETQTSPVERYPGRPVKAKLDCNRTRDSCDFSYCSEPSELDETVEEYEDENTLFDMVCESSVTDEDSDFEPQTQRPQSIARKRPGVVPSSLHSSSQTQMVDECSNDVIIKKIKQEIPEDYYIVANAELTGGVDGPALSLTQMAKPKPQTHAGPSCVGSAKLIPHVTSAISTELDPHGMSASPSVISRPIVQKTARVSLASPNRGPPGTHGTNQQVAMQMPVSTSHPNKQISIPLSALQLPGQDEQVASEEFLSHLPSQVSSCEVALSPSVNTEPEVSSSQQQPPVAPAITTEATAQCIPDQDERAAELSREQNEKTIRSTQTALRNFREFLISKYPSETREIYVIPCKELDAYLASFFVDARQKDGSEYEPNSLANYQCGLERYLKEHRYGYSITRDKEFKRSQEALKQKQIELRCKGKGNKPHKSMKLTFADELILRKRGLLSRYNPEGLLNLVWLNNTKAFGHCTGFHGSTLKWGDIRLRVTETGLEYLEWMGQDTGDLNAKTKRGGTDSRVYATQHAPQTCPVQDYKEYAQRRPPAMRYEDAPFYLSIKPVVNLAALHWYNCQALGKNKLAKMVKTMCEKGNIPGRKTNFSVYQSCSTLSEAQSNQLVLICNNLSQQAAQSVAGHSNNGNFIVSASYDSSSDTA

SEQ ID NO: 43602 - protein, 744 aa, Homo sapiens
  Payload ID: 8962
  Gene Symbol: KIAA1958
  Gene Name: KIAA1958
  Uniprot ID: Q8N8K9
  ENSP ID: ENSP00000440504
MEDCLHTSSENLSKLVSWAHSHGTICSLIPNLKHLLSEGSHGNLTAMWGCSAGHAYHWPLTATCRAGSQERVCFQDNRSFNSDSPSIIGVPSETQTSPVERYPGRPVKAKLDCNRTRDSCDFSYCSEPSELDETVEEYEDENTLFDMVCESSVTDEDSDFEPQTQRPQSIARKRPGVVPSSLHSSSQTQMVDECSNDVIIKKIKQEIPEDYYIVANAELTGGVDGPALSLTQMAKPKPQTHAGPSCVGSAKLIPHVTSAISTELDPHGMSASPSVISRPIVQKTARVSLASPNRGPPGTHGTNQQVAMQMPVSTSHPNKQISIPLSALQLPGQDEQVASEEFLSHLPSQVSSCEVALSPSVNTEPEVSSSQQQPPVAPAITTEATAQCIPDQDERAAELSREQNEKTIRSTQTALRNFPYSTKLNKFPVFNINDDLNDLCTSAVSPNTTKATRYALNVWRYWCMTNGLKDHTDITKIPAVKLNELLENFYVTVKKSDGSDFLATSLHAIRRGLDRILKNAGVGFSITSSTFSSSTKKLKEKLWVLSKAGMSGARSRNIVYFSLSDEEEMWQAGCLGDDSPITLLSTVVKYNSQYLNMRTLQEHADLMYGDIELLKDPQNQPYFARTDSVKRESRSGSTRVCHGKIYHEHSRGHKQCPYCLLYKYMYIHRPPTQMEAKSPFYLTARKEATDMGSVWYEEQRMGLRSLRGIVPNLAKKVKLENCENFTFVSFTQVSRRLGSHSCCQ

SEQ ID NO: 43603 - protein, 641 aa, Homo sapiens
  Payload ID: 8963
  Gene Symbol: KIAA2012
  Gene Name: KIAA2012
  ENSP ID: ENSP00000419834
VKKKKAPKALKLPPISEEPPRVLEPLKSQFKANEPPTELFILPVEIHYHTKQPPKEKAHRRGAPHPESEPESSEESTPVWRPPLKHASLETPWELTVHLPVDASRDTLSPQDDDAPPHDVAPPLDLLPPIKGKKSPESQKGVDSPRTSDHNSPPSLPNMRVPRRALPAAQAYESVNSNISHEEEGPSSQHFLKANTEPRANLHMNLYETSPLTQTTEKQGAQQSLEAAAQKTGEPQSCINKALICSNRKEFYTRKLHIDMTPFLKESGNALDYQEEAGRPLRETHHNDQDPEPRSMTLDSPRASRTEHIQTPEADIVQKVGRDYDVHHLHRGLLGYGPESPERLSAVYTSLLPREREGKAEPRLFSQETSANISHERDLINEAKRKEKPKKDKTKGPKSEREGKVYGQAEAAIGKSKDSKAKKKLEKKTRPQRKRTQKERNLEIAAELSGPDVSYEETEDTSNRGSFASDSFVEDPWLSPKYDAQESQVSLDGRSSPSQIATVTGNMESKEERRCEDPSKALLTKREQEKASWDRLRAERAEMRWLEVEKKRREQEEQRQLQQEQLERAKKMEEELELEQQRRTEEIRLRKQRLQEEQQRQEEEERKQQLRLKAAQERARQQQEEFRRKLRELQRKKQQEE

SEQ ID NO: 43604 - protein, 1180 aa, Homo sapiens
  Payload ID: 8963
  Gene Symbol: KIAA2012
  Gene Name: KIAA2012
  Uniprot ID: Q0VF49
  ENSP ID: ENSP00000437957
MFTLSLLSRGHGKLGQDKQKLEVYFEPEDYLNWRSPEDYVPVSKPQDKNNASQHSWSLFLPKTFSTRKGALILYSEGFAISAWTPKERRKGPYCPRGPWRKLDLELHTLQDLKEAILAYGRQQGEQDRAWQPYLHFRSQLESQAQRQIQPGHSAKRYLRGLLRTWPPDAMYRLWCAGYIKDSVLLQDSQLNVPKKLRPQQDLSGVPPKYHLLPVFPSFWIQQGKSFEQRQQGLDEGEAGAAGHVDQGPLAKNHGSQGTRLPPRRKQPWQEDETQAEDTSIENHLCLYASKESYNEKTQQTSRKAFGHGRIDHSWLPSDKSHITFCGGAFPNRKADLSDKQRNVKLHKARSSHLLQVLPAERSLFPPVASATGSRIITPGEVKKKKAPKALKLPPISEEPPRVLEPLKSQFKANEPPTELFILPVEIHYHTKQPPKEKAHRRGAPHPESEPESSEESTPVWRPPLKHASLETPWELTVHLPVDASRDTLSPQGSSSLPPASLGNLTLKGSKARHTRVHSQGKGVWKGDDDAPPHDVAPPLDLLPPIKGKKSPESQKGVDSPRTSDHNSPPSLPNMRVPRRALPAAQEDSSDPTLGHFLLGPDGEKVCLSLPGHTQTEALPSGKAYESVNSNISHEEEGPSSQHFLKANTEPRANLHMNLYETSPLTQTTEKQGAQQSLEAAAQKTGEPQSCINKALICSNRKEFYTRKLHIDMTPFLKESGNALDYQEEAGRPLRETHHNDQDPEPRSMTLDSPRASRTEHIQTPEADIVQKVGRDYDVHHLHRGLLGYGPESPERLSAVYTSLLPREREGKAEPRLFSQETSANISHERDLINEAKRKEKPKKDKTKGPKSEREGKVYGQAEAAIGKSKDSKAKKKLEKKTRPQRKRTQKERNLEIAAELSGPDVSYEETEDTSNRGSFASDSFVEDPWLSPKYDAQESQVSLDGRSSPSQIATVTGNMESKEERRCEDPSKALLTKREQEKASWDRLRAERAEMRWLEVEKKRREQEEQRQLQQEQLERAKKMEEELELEQQRRTEEIRLRKQRLQEEQQRQEEEERKQQLRLKAAQERARQQQEEFRRKLRELQRKKQQEEAERAEAEKQRQEELEMQLEEEQKHLMEMAEEERLEYQRRKQEAEEKARLEAEERRQKEEEAARLALEEATKQAQEQARYWIFGQQLP

SEQ ID NO: 43605 - protein, 634 aa, Homo sapiens
  Payload ID: 8964
  Gene Symbol: KIAA2013
  Gene Name: KIAA2013
  Uniprot ID: Q8IYS2
  ENSP ID: ENSP00000365756
MWLQQRLKGLPGLLSSSWARRLLCLLGLLLLLLWFGGSGARRAAGGLHLLPWSRGEPGAAEPSACLEAATRAWRGLRERGEVVPLGPGVPALVANGFLALDVAANRLWVTPGEREPAVAPDFVPFVQLRPLSALAEAGEAVLLLREGLLRRVRCLQLGSPGPGPVAAGPGPASVSGLAAGSGRDCVLLQEDFLAHRGRPHVYLQRIQLNNPTERVAALQTVGPTAGPAPKAFTSTLEKVGDHQFLLYSGRSPPTPTGLVHLVVVAAKKLVNRLQVAPKTQLDETVLWVVHVSGPINPQVLKSKAAKELKALQDLARKEMLELLDMPAAELLQDHQLLWAQLFSPGVEMKKITDTHTPSGLTVNLTLYYMLSCSPAPLLSPSLSHRERDQMESTLNYEDHCFSGHATMHAENLWPGRLSSVQQILQLSDLWRLTLQKRGCKGLVKVGAPGILQGMVLSFGGLQFTENHLQFQADPDVLHNSYALHGIRYKNDHINLAVLADAEGKPYLHVSVESRGQPVKIYACKAGCLDEPVELTSAPTGHTFSVMVTQPITPLLYISTDLTHLQDLRHTLHLKAILAHDEHMAQQDPGLPFLFWFSVASLITLFHLFLFKLIYNEYCGPGAKPLFRSKEDPSV

SEQ ID NO: 43606 - protein, 667 aa, Homo sapiens
  Payload ID: 8964
  Gene Symbol: KIAA2013
  Gene Name: KIAA2013
  Uniprot ID: Q8IYS2
  ENSP ID: ENSP00000365760
MWLQQRLKGLPGLLSSSWARRLLCLLGLLLLLLWFGGSGARRAAGGLHLLPWSRGEPGAAEPSACLEAATRAWRGLRERGEVVPLGPGVPALVANGFLALDVAANRLWVTPGEREPAVAPDFVPFVQLRPLSALAEAGEAVLLLREGLLRRVRCLQLGSPGPGPVAAGPGPASVSGLAAGSGRDCVLLQEDFLAHRGRPHVYLQRIQLNNPTERVAALQTVGPTAGPAPKAFTSTLEKVGDHQFLLYSGRSPPTPTGLVHLVVVAAKKLVNRLQVAPKTQLDETVLWVVHVSGPINPQVLKSKAAKELKALQDLARKEMLELLDMPAAELLQDHQLLWAQLFSPGVEMKKITDTHTPSGLTVNLTLYYMLSCSPAPLLSPSLSHRERDQMESTLNYEDHCFSGHATMHAENLWPGRLSSVQQILQLSDLWRLTLQKRGCKGLVKVGAPGILQGMVLSFGGLQFTENHLQFQADPDVLHNSYALHGIRYKNDHINLAVLADAEGKPYLHVSVESRGQPVKIYACKAGCLDEPVELTSAPTGHTFSVMVTQPITPLLYISTDLTHLQDLRHTLHLKAILAHDEHMAQQDPGLPFLFWFSVASLITLFHLFLFKLIYNEYCGPGAKPLFRSKVGSRHLVETRGLGLALSPVSRKGLAWRGGVRPGQEWVS

SEQ ID NO: 43607 - protein, 634 aa, Homo sapiens; identical to SEQ ID NO: 43605
  Payload ID: 8964
  Gene Symbol: KIAA2013
  Gene Name: KIAA2013
  Uniprot ID: Q8IYS2
  ENSP ID: ENSP00000480577

SEQ ID NO: 43608 - protein, 1516 aa, Homo sapiens
  Payload ID: 8965
  Gene Symbol: KIAA2022
  Gene Name: KIAA2022
  Uniprot ID: Q5QGS0
  ENSP ID: ENSP00000055682
MDNQQDKAIVASANGENTLINGVKENDSEDQDVAMKSFAALEAAAPIQPTPVAQKETLMYPRGLLPLPSKKPCMQSPPSPLGLIEAPEHAANSASVNAISLTSGIAKGLNTWSLPNECEKAPFAIMEPAGMSALNGDCLMQPSRTCLGCFMESKDAVDPEPGISLKVGDLNRDYETCAVSDIGIQCINAGENMKYGEQLLSDQLLGFPLHKSRAGDRRETEKPDIDLEDPAQKSYYEALLLDKCNTEEALLANSNQDWGYFETFISESKIELLDLCSKNELSVNLFSEEDVDNYMFDDDESTLGSDVCSLKIRYESFQDNVRDKTTLLMQEDAQFNFFPSVFTTCPKRESKSGALKQSSDFSQFKVPDVSIIWGEEDKNLDKKKGKEEGQEDKGVEKKDGKDNGEKPALNKPCSGTEVEQLKNPKQGHLANSLETSGSFSDDSSFIEISYDAMGEIKDCSRYMARDTNSGSSSSQQNYGLRAKRKVRYSEDYLYDVDSLEGEKVNERKEWLPVGSKEEDDDEWCPKKRRKVTRKEPPVIIKYIIINRFKGEKNMLVKLGKVDASETTVNLSENQLNKYAKLAPLKGFWQKKKKQRNTNTDSIKTPFSQKQSFEPGSFEVSFLPPARKRKSKLGNRHRIQRIPSIEISASSKQISLCNDQRHASNHKEDGGLKGTLKSAPLGAPSCANGSHLNDITGPDSVKVKAQDTEFKGPERKVLNKIKFKSEARLKSKKVKAAGQESKPIVQMSPLLENQSSKANLKNEVIPGTSNSSRLSEFHEAKAAKSSTFLPTTCSSEMPLSSANVTTNIPVIPGGYLQTLLDASDLSNNTSISYFSHHSPEQNEGSLTQTEKSFVPLQPTQDCVLTSSSDSELQQSSHNFKMESSNYRNVWPNKATSGTQEFMAEVSREIAPTQSSEFGASQVVSMENNLTPTTYNPICLNSGGSNCNKVLYDSMQDTQLPSDDSYQLCHFNNGEICFPFQQGPVNMDDGRLFSFDSMAPLSVSSSNYCSLSLKSCEKDGDDDITDDFLAHCSPKLVIQQSIDEIAPLKESTDLLDISNFTPDKFRHSSLSEMSPPDTPSLSPQITRCESMKTLGTLKGFQEGVPGPLDSVEKIKWDCSTLSRQVQMEDGFTLNNHQFQFHMFNDEDSVSLLQKNPCLSTFNDPSGQISTNNKVSKSRKKSSPSKSGAMNQSSSQKNTRKKSLKGNNKGIEKPPGKNSRQVPKSTKKGKYMAAINGEKMQIGIGRGGSQTNTISSTGKTLAECIQHGGPMASMKMPSQKGLSGDWALGKESSPGWSDMSMGTNTNSLLDDDQREFQEPSYILSNIASGMADVQRFMMASIEPLWEPMEHHGDPNIFYSPESNSLKLKTLKILAGTPQESKKKINSGSQGATKNHRSIKGVSKSNGKTAIGDPGRANMPGYNEDSRSTFFDKKYSNMSTLGNNGPTHKKLYRHKSSSKALRDEKCKGKHMEREQVHKDESGTASFEKLRDSDYNLLKAETTFWVLPVFEEETRIFQKDI

SEQ ID NO: 43609 - protein, 118 aa, Homo sapiens
  Payload ID: 8965
  Gene Symbol: KIAA2022
  Gene Name: KIAA2022
  ENSP ID: ENSP00000407055
  MOD_RES (1)..(1): Any amino acid
XKSNGKTAIGDPGRANMPGYNEDSRSTFFDKKYSNMSTLGNNGPTHKKLYRHKSSSKALRDEKCKGKHMEREQVHKDESGTASFEKLRDSDYNLLKAETTFWVLPVFEEETRIFQKDI

SEQ ID NO: 43610 - protein, 1516 aa, Homo sapiens; identical to SEQ ID NO: 43608
  Payload ID: 8965
  Gene Symbol: KIAA2022
  Gene Name: KIAA2022
  Uniprot ID: Q5QGS0
  ENSP ID: ENSP00000480284

SEQ ID NO: 43611 - protein, 2073 aa, Homo sapiens
  Payload ID: 8966
  Gene Symbol: KIAA2026
  Gene Name: KIAA2026
  Uniprot ID: Q5HYC2
  ENSP ID: ENSP00000370870
MSVPGTPGAMEPAGEEERPPPAAEGEDDEEEVAAAAQTSGPAHGRSASSLEDADDQEEEMEAMVIGGGCCKEQELTYELQQGYRILGEFLQEKHRGLTAPFLQPLGGVATAEEEVAEGPRSGGRGGRAFPQQPGQGMCLLQMEEKFASGQYGGITEFVADFRLMLETCYRLHGVDHWISKQGQKLEMMLEQKLALLSRHLREKTTIAVTSRGYYGLEDEKGTACTSTRRRSTPRSLAGLTSGVFESIMVQVLRQEEQLRAKEEKRLREQERKEAEEASQKEIEEWERKLLAQAAPTCMETMWEIPAIGHFLCLAQQILNLPEIVFYELERCLLMPQCNAFLSKIMTSLLSPPHRRPTLHRRPTLPYRTWEAALRQKVQQWYTAVGQTENPDNCAEKLGLCPQFFKVLGEVNPLEEKPFHELPFYQKVWLLKGLCDFVYETQKEVQDAVLGQPIHECREVILGYDYLENAYVHFPQFCGADVRIYKQRPFQAPEFPIPPIKIQRVPRIKLEKLKCDYVSTSNGEHRCSRDSLPSSFKKEQENNFDPACCPAKMILDNHDISVEMGVKSNYEIRIRRPCEIKKTDCCKENLEKPRSPGEVTGFGEPLSPGEIRFIENQEKYGEASRIKIEPSPLKENTLKSCQIHVNGSHSDHPEINCHKVVRDILLEQSLQSHKKLKLTKMRAKKKKKKKKKLKDVLNENLQRKREGLHSLAFKSYKPEIQNKLLIIKKKAKHKKHKSGKKSVSKKAITKKRKTVIKSPTVPEFQGKWYHRRQAVKELHSTLIRLLNELLPWEPKLMKAFQRNRSRLKKDYDDFRRQPDHDTFNRELWTTDEGEGDLGKDSPKGEISKSIDSTEPLDILEKDHFDSDDMKLSEIDFPMARSKLLKKELPSKDLPKTLLKTLKRQSKQTDYVDDSTKELSPRKKAKLSTNETTVENLESDVQIDCFSESKHTEPSFPESFASLDSVPVSTLQKGTKPIQALLAKNIGNKVTLTNQLPPSTGRNALAVEKPVLSPPEASPIKPALTCHTNTKGPLQMVYKMPCGQWLPIDLQNSSVKIQVQPMVDPKTGEKIMQQVLILPKNFVIQHKEGKAVAKEVPPLQQKGTEQHCSSFPQTTNINSSLASVFVNSPGTVSTQLPNTAFNKTITPLSNISSARPQPLSPVTSVSNLLTPSVKTSQSEAGKAKNAVSAATFSLPSASPTISSTGQPLSSTTTLNGSTNPGSSFNCFAQQTADSSEAKQELKTVCIRDSQSILVRTRGGNTGVVKVQTNPDQNSPNTVSSSSVFTFAPQLQAFLVPKSTTSSSAFSPVAGTTTTSSLSPFSQTPTSVSIPASFAPSMGKNLKLTLGHTTGSGDLGHVIDKTSHMPSSPLKSSICSSTLLPSTTSSSVSVISISAANFGQNNANIIHTPTKQQQVDYITKSYPVTRSEATAATNGDVISGTPVQKLMLVSAPSILSSGNGTAINMTPALTSTGVSAQKLVFINAPVPSGTSTPTLVAESLKQTLPPPLHKAYVKTPEQPQIVLIPSTVGTPIKINSSPAVSQIKDVKIGLNIGQAIVNTSGTVPAIPSINILQNVTPKGEDKSSKGYILPLSTSGNSVPVSSNFVSQNITPVNESVVSSARAVNVLSVTGANLSLGSFPVTSASASAGAQPPVLVSGNDTSSRIMPILSNRLCSSSLGNTVAISTVKTGHLASSVLISTTQPVVSPKCLTSALQIPVTVALPTPATTSPKIINTVPHSAAVPGATRSVSISKRQSRTSLQFHSPGISTTVPTNVNTNKPQTELSSLSTSPGKITNTSNFASLPNQQALVKTPSYSSAPGGTTIHTASAPSNVTSLVGSQFSEPCIQQKIVINTSTPLAPGTQIMINGTRFIVPPQGLGAGSHVLLISTNPKYGAPLVLNSGQGIQSTPIDNSAQKITLASNNSLSGQPLQHPLRSPTKFINSFGNASSIPTVHTSPQLINTTAKVPVPPPVPTVSLTSVIKSPATLLAKTSLVSAICPSNPPLPSSTSVFHLDPPVKKLLVSPEGAILNTINTPASKVSSLSPSLSQIVVSASRSPASVFPAFQSSGLEKPDRAAS

SEQ ID NO: 43612 - protein, 2103 aa, Homo sapiens
  Payload ID: 8966
  Gene Symbol: KIAA2026
  Gene Name: KIAA2026
  Uniprot ID: Q5HYC2
  ENSP ID: ENSP00000382815
MSVPGTPGAMEPAGEEERPPPAAEGEDDEEEVAAAAQTSGPAHGRSASSLEDADDQEEEMEAMVIGGGCCKEQELTYELQQGYRILGEFLQEKHRGLTAPFLQPLGGVATAEEEVAEGPRSGGRGGRAFPQQPGQGMCLLQMEEKFASGQYGGITEFVADFRLMLETCYRLHGVDHWISKQGQKLEMMLEQKLALLSRHLREKTTIAVTSRGYYGLEDEKGTACTSTRRRSTPRSLAGLTSGVFESIMVQVLRQEEQLRAKEEKRLREQERKEAEEASQKEIEEWERKLLAQAAPTCMETMWEIPAIGHFLCLAQQILNLPEIVFYELERCLLMPQCNAFLSKIMTSLLSPPHRRPTLHRRPTLPYRTWEAALRQKVQQWYTAVGQTENPDNCAEKLGLCPQFFKVLGEVNPLEEKPFHELPFYQKVWLLKGLCDFVYETQKEVQDAVLGQPIHECREVILGYDYLENAYVHFPQFCGADVRIYKQRPFQAPEFPIPPIKIQRVPRIKLEKLKCDYVSTSNGEHRCSRDSLPSSFKKEQENNFDPACCPAKMILDNHDISVEMGVKSNYEIRIRRPCEIKKTDCCKENLEKPRSPGEVTGFGEPLSPGEIRFIENQEKYGEASRIKIEPSPLKENTLKSCQIHVNGSHSDHPEINCHKVVRDILLEQSLQSHKKLKLTKMRAKKKKKKKKKLKDVLNENLQRKREGLHSLAFKSYKPEIQNKLLIIKKKAKHKKHKSGKKSVSKKAITKKRKTVIKSPTVPEFQLICTNLDELRELITKIENELKDLENSRKKSGKWYHRRQAVKELHSTLIRLLNELLPWEPKLMKAFQRNRSRLKKDYDDFRRQPDHDTFNRELWTTDEGEGDLGKDSPKGEISKSIDSTEPLDILEKDHFDSDDMKLSEIDFPMARSKLLKKELPSKDLPKTLLKTLKRQSKQTDYVDDSTKELSPRKKAKLSTNETTVENLESDVQIDCFSESKHTEPSFPESFASLDSVPVSTLQKGTKPIQALLAKNIGNKVTLTNQLPPSTGRNALAVEKPVLSPPEASPIKPALTCHTNTKGPLQMVYKMPCGQWLPIDLQNSSVKIQVQPMVDPKTGEKIMQQVLILPKNFVIQHKEGKAVAKEVPPLQQKGTEQHCSSFPQTTNINSSLASVFVNSPGTVSTQLPNTAFNKTITPLSNISSARPQPLSPVTSVSNLLTPSVKTSQSEAGKAKNAVSAATFSLPSASPTISSTGQPLSSTTTLNGSTNPGSSFNCFAQQTADSSEAKQELKTVCIRDSQSILVRTRGGNTGVVKVQTNPDQNSPNTVSSSSVFTFAPQLQAFLVPKSTTSSSAFSPVAGTTTTSSLSPFSQTPTSVSIPASFAPSMGKNLKLTLGHTTGSGDLGHVIDKTSHMPSSPLKSSICSSTLLPSTTSSSVSVISISAANFGQNNANIIHTPTKQQQVDYITKSYPVTRSEATAATNGDVISGTPVQKLMLVSAPSILSSGNGTAINMTPALTSTGVSAQKLVFINAPVPSGTSTPTLVAESLKQTLPPPLHKAYVKTPEQPQIVLIPSTVGTPIKINSSPAVSQIKDVKIGLNIGQAIVNTSGTVPAIPSINILQNVTPKGEDKSSKGYILPLSTSGNSVPVSSNFVSQNITPVNESVVSSARAVNVLSVTGANLSLGSFPVTSASASAGAQPPVLVSGNDTSSRIMPILSNRLCSSSLGNTVAISTVKTGHLASSVLISTTQPVVSPKCLTSALQIPVTVALPTPATTSPKIINTVPHSAAVPGATRSVSISKRQSRTSLQFHSPGISTTVPTNVNTNKPQTELSSLSTSPGKITNTSNFASLPNQQALVKTPSYSSAPGGTTIHTASAPSNVTSLVGSQFSEPCIQQKIVINTSTPLAPGTQIMINGTRFIVPPQGLGAGSHVLLISTNPKYGAPLVLNSGQGIQSTPIDNSAQKITLASNNSLSGQPLQHPLRSPTKFINSFGNASSIPTVHTSPQLINTTAKVPVPPPVPTVSLTSVIKSPATLLAKTSLVSAICPSNPPLPSSTSVFHLDPPVKKLLVSPEGAILNTINTPASKVSSLSPSLSQIVVSASRSPASVFPAFQSSGLEKPDRAAS

SEQ ID NO: 43613 - protein, 207 aa, Homo sapiens
  Payload ID: 8966
  Gene Symbol: KIAA2026
  Gene Name: KIAA2026
  ENSP ID: ENSP00000438370
  MOD_RES (1)..(1): Any amino acid
XQNITPVNESVVSSARAVNVLSVTGANLSLGSFPVTSASASAGAQPPVLVSGNDTSSRIMPILSNRLCSSSLGNTVAISTVKTGHLASSVLISTTQPVVSPKCLTSALQIPVTVALPTPATTSPKIINTVPHSAAVPGATRSVSISKRQSRTSLQFHSPGISTTVPTNVNTNKPQTELSSLSTSPVSFLLSVPSCHPTFLSIFSHGK

SEQ ID NO: 43614 - protein, 131 aa, Homo sapiens
  Payload ID: 8966
  Gene Symbol: KIAA2026
  Gene Name: KIAA2026
  ENSP ID: ENSP00000444949
  MOD_RES (1)..(1): Any amino acid
XEIQNKLLIIKKKAKHKKHKSGKKSVSKKAITKKRKTVIKSPTVPEFQLICTNLDELRELITKIENELKDLENSRKKSVSNVPSISRLPTPSPCHTPASVMLVLSYPSQITVAECSCSLVVRENGIIGGKL

SEQ ID NO: 43615 - protein, 617 aa, Homo sapiens
  Payload ID: 8966
  Gene Symbol: KIAA2026
  Gene Name: KIAA2026
  ENSP ID: ENSP00000444993
MSVPGTPGAMEPAGEEERPPPAAEGEDDEEEVAAAAQTSGPAHGRSASSLEDADDQEEEMEAMVIGGGCCKEQELTYELQQGYRILGEFLQEKHRGLTAPFLQPLGGVATAEEEVAEGPRSGGRGGRAFPQQPGQGMCLLQMEEKFASGQYGGITEFVADFRLMLETCYRLHGVDHWISKQGQKLEMMLEQKLALLSRLREQERKEAEEASQKEIEEWERKLLAQAAPTCMETMWEIPAIGHFLCLAQQILNLPEIVFYELERCLLMPQCNAFLSKIMTSLLSPPHRRPTLHRRPTLPYRTWEAALRQKVQQWYTAVGQTENPDNCAEKLGLCPQFFKVLGEVNPLEEKPFHELPFYQKVWLLKGLCDFVYETQKEVQDAVLGQPIHECREVILGYDYLENAYVHFPQFCGADVRIYKQRPFQAPEFPIPPIKIQRVPRIKLEKLKCDYVSTSNGEHRCSRDSLPSSFKKEQENNFDPACCPAKMILDNHDISVEMGVKSNYEIRIRRPCEIKKTDCCKENLEKPRSPGEVTGFGEPLSPGEIRFIENQEKYGEASRIKIEPSPLKENTLKSCQIHVNGSHSDHPEINCHKVVRDILLEQSLQSHKKLKLTKMRAKK

SEQ ID NO: 43616 - protein, 84 aa, Homo sapiens
  Payload ID: 8967
  Gene Symbol: KAAG1
  Gene Name: kidney associated antigen 1
  Uniprot ID: Q9UBP8
  ENSP ID: ENSP00000274766
MDDDAAPRVEGVPVAVHKHALHDGLRQVAGPGAAAAHLPRWPPPQLAASRREAPPLSQRPHRTQGAGSPPETNEKLTNPQVKEK

SEQ ID NO: 43617 - protein, 1568 aa, Homo sapiens
  Payload ID: 8968
  Gene Symbol: KCP
  Gene Name: kielin/chordin-like protein
  ENSP ID: ENSP00000477644
MAGVGAAALSLLLHLGALALAAGAEGGAVPREPPGQQTTAHSSVLAGNSQEQWHPLREWLGRLEAAVMELREQNKDLQTRVRQLESCECHPASPQCWGLGRAWPEGARWEPDACTACVCQDGAAHCGPQAHLPHCRGCSQNGQTYGNGETFSPDACTTCRCLTGAVQCQGPSCSELNCLESCTPPGECCPICRPGCDYEGQLYEEGVTFLSSSNPCLQCTCLRSRVRCMALKCPPSPCPEPVLRPGHCCPTCQGCTEGGSHWEHGQEWTTPGDPCRICRCLEGHIQCRQRECASLCPYPARPLPGTCCPVCDGCFLNGREHRSGEPVGSGDPCSHCRCANGSVQCEPLPCPPVPCRHPGKIPGQCCPVCDGCEYQGHQYQSQETFRLQERGLCVRCSCQAGEVSCEEQECPVTPCALPASGRQLCPACELDGEEFAEGVQWEPDGRPCTACVCQDGVPKCGAVLCPPAPCQHPTQPPGACCPSCDSCTYHSQVYANGQNFTDADSPCHACHCQDGTVTCSLVDCPPTTCARPQSGPGQCCPRCPDCILEEEVFVDGESFSHPRDPCQECRCQEGHAHCQPRPCPRAPCAHPLPGTCCPNDCSGCAFGGKEYPSGADFPHPSDPCRLCRCLSGNVQCLARRCVPLPCPEPVLLPGECCPQCPAAPAPAGCPRPGAAHARHQEYFSPPGDPCRRCLCLDGSVSCQRLPCPPAPCAHPRQGPCCPSCDGCLYQGKEFASGERFPSPTAACHLCLCWEGSVSCEPKACAPALCPFPARGDCCPDCDGCEYLGESYLSNQEFPDPREPCNLCTCLGGFVTCGRRPCEPPGCSHPLIPSGHCCPTCQGCRYHGVTTASGETLPDPLDPTCSLCTCQEGSMRCQKKPCPPALCPHPSPGPCFCPVCHSCLSQGREHQDGEEFEGPAGSCEWCRCQAGQVSCVRLQCPPLPCKLQVTERGSCCPRCRGCLAHGEEHPEGSRWVPPDSACSSCVCHEGVVTCARIQCISSCAQPRQGPHDCCPQCSDCEHEGRKYEPGESFQPGADPCEVCICEPQPEGPPSLRCHRRQCPSLVGCPPSQLLPPGPQHCCPTCAEALSNCSEGLLGSELAPPDPCYTCQCQDLTWLCIHQACPELSCPLSERHTPPGSCCPVCRAPTQSCVHQGREVASGERWTVDTCTSCSCMAGTVRCQSQRCSPLSCGPDKAPALSPGSCCPRCLPRPASCMAFGDPHYRTFDGRLLHFQGSCSYVLAKDCHSGDFSVHVTNDDRGRSGVAWTQEVAVLLGDMAVRLLQDGAVTVDGHPVALPFLQEPLLYVELRGHTVILHAQPGLQVLWDGQSQVEVSVPGSYQGRTCGLCGNFNGFAQDDLQGPEGLLLPSEAAFGNSWQVSEGLWPGRPCSAGREVDPCRAAGYRARREANARCGVLKSSPFSRCHAVVPPEPFFAACVYDLCACGPGSSADACLCDALEAYASHCRQAGVTPTWRGPTLCVVGCPLERGFVFDECGPPCPRTCFNQHIPLGELAAHCVRPCVPGCQCPAGLVEHEAHCIPPEACPQVLLTGDQPLGARPSPSREPQETP

SEQ ID NO: 43618 - protein, 1628 aa, Homo sapiens
  Payload ID: 8968
  Gene Symbol: KCP
  Gene Name: kielin/chordin-like protein
  ENSP ID: ENSP00000479679
MAGVGAAALSLLLHLGALALAAGAEGGAVPREPPGQQTTAHSSVLAGNSQEQWHPLREWLGRLEAAVMELREQNKDLQTRVRQLESCECHPASPQCWGLGRAWPEGARWEPDACTACVCQDGAAHCGPQAHLPHCRGCSQNGQTYGNGETFSPDACTTCRCLEGTITCNQKPCPRGPCPEPGACCPHCKPGCDYEGQLYEEGVTFLSSSNPCLQCTCLRSRVRCMALKCPPSPCPEPVLRPGHCCPTCQGCTEGGSHWEHGQEWTTPGDPCRICRCLEGHIQCRQRECASLCPYPARPLPGTCCPVCDGCFLNGREHRSGEPVGSGDPCSHCRCANGSVQCEPLPCPPVPCRHPGKIPGQCCPVCDGCEYQGHQYQSQETFRLQERGLCVRCSCQAGEVSCEEQECPVTPCALPASGRQLCPACELDGEEFAEGVQWEPDGRPCTACVCQDGVPKCGAVLCPPAPCQHPTQPPGACCPSCDSCTYHSQVYANGQNFTDADSPCHACHCQDGTVTCSLVDCPPTTCARPQSGPGQCCPRCPDCILEEEVFVDGESFSHPRDPCQECRCQEGHAHCQPRPCPRAPCAHPLPGTCCPNDCSGCAFGGKEYPSGADFPHPSDPCRLCRCLSGNVQCLARRCVPLPCPEPVLLPGECCPQCPAAPAPAGCPRPGAAHARHQEYFSPPGDPCRRCLCLDGSVSCQRLPCPPAPCAHPRQGPCCPSCDGCLYQGKEFASGERFPSPTAACHLCLCWEGSVSCEPKACAPALCPFPARGDCCPDCDGCEYLGESYLSNQEFPDPREPCNLCTCLGGFVTCGRRPCEPPGCSHPLIPSGHCCPTCQGCRYHGVTTASGETLPDPLDPTCSLCTCQEGSMRCQKKPCPPALCPHPSPGPCFCPVCHSCLSQGREHQDGEEFEGPAGSCEWCRCQAGQVSCVRLQCPPLPCKLQVTERGSCCPRCRGCLAHGEEHPEGSRWVPPDSACSSCVCHEGVVTCARIQCISSCAQPRQGPHDCCPQCSDCEHEGRKYEPGESFQPGADPCEVCICEPQPEGPPSLRCHRRQCPSLVGCPPSQLLPPGPQHCCPTCAEALSNCSEGLLGSELAPPDPCYTCQCQDLTWLCIHQACPELSCPLSERHTPPGSCCPVCRECVVEAEGRRVADGESWRDPSNACIACTCHRGHVECHLEECQALSCPHGWAKVPQADSCCERCQAPTQSCVHQGREVASGERWTVDTCTSCSCMAGTVRCQSQRCSPLSCGPDKAPALSPGSCCPRCLPRPASCMAFGDPHYRTFDGRLLHFQGSCSYVLAKDCHSGDFSVHVTNDDRGRSGVAWTQEVAVLLGDMAVRLLQDGAVTVDGHPVALPFLQEPLLYVELRGHTVILHAQPGLQVLWDGQSQVEVSVPGSYQGRTCGLCGNFNGFAQDDLQGPEGLLLPSEAAFGNSWQVSEGLWPGRPCSAGREVDPCRAAGYRARREANARCGVLKSSPFSRCHAVVPPEPFFAACVYDLCACGPGSSADACLCDALEAYASHCRQAGVTPTWRGPTLCVVGCPLERGFVFDECGPPCPRTCFNQHIPLGELAAHCVRPCVPGCQCPAGLVEHEAHCIPPEACPQVLLTGDQPLGARPSPSREPQETP

SEQ ID NO: 43619 - protein, 1275 aa, Homo sapiens
  Payload ID: 8968
  Gene Symbol: KCP
  Gene Name: kielin/chordin-like protein
  ENSP ID: ENSP00000480867
MAGVGAAALSLLLHLGALALAAGAEGGAVPREPPGQQTTAHSSVLAGNSQEQWHPLREWLGRLEAAVMELREQNKDLQTRVRQLESCECHPASPQCWGLGRAWPEGARWEPDACTACVCQDGAAHCGPQAHLPHCRGCSQNGQTYGNGETFSPDACTTCRCLTGAVQCQGPSCSELNCLESCTPPGECCPICRPGCDYEGQLYEEGVTFLSSSNPCLQCTCLRSRVRCMALKCPPSPCPEPVLRPGHCCPTCQGCTEGGSHWEHGQEWTTPGDPCRICRCLEGHIQCRQRECASLCPYPARPLPGTCCPVCDGCFLNGREHRSGEPVGSGDPCSHCRCANGSVQCEPLPCPPVPCRHPGKIPGQCCPVCDGCEYQGHQYQSQETFRLQERGLCVRCSCQAGEVSCEEQECPVTPCALPASGRQLCPACELDGEEFAEGVQWEPDGRPCTACVCQDGVPKCGAVLCPPAPCQHPTQPPGACCPSCDSCTYHSQVYANGQNFTDADSPCHACHCQDGTVTCSLVDCPPTTCARPQSGPGQCCPRCPDCILEEEVFVDGESFSHPRDPCQECRCQEGHAHCQPRPCPRAPCAHPLPGTCCPNDCSGCAFGGKEYPSGADFPHPSDPCRLCRCLSGNVQCLARRCVPLPCPEPVLLPGECCPQCPAAPAPAGCPRPGAAHARHQEYFSPPGDPCRRCLCLDGSVSCQRLPCPPAPCAHPRQGPCCPSCDGCLYQGKEFASGERFPSPTAACHLCLCWEGSVSCEPKACAPALCPFPARGDCCPDCDGCEYLGESYLSNQEFPDPREPCNLCTCLGGFVTCGRRPCEPPGCSHPLIPSGHCCPTCQGCRYHGVTTASGETLPDPLDPTCSLCTCQEGSMRCQKKPCPPALCPHPSPGPCFCPVCHSCLSQGREHQDGEEFEGPAGSCEWCRCQAGQVSCVRLQCPPLPCKLQVTERGSCCPRCRGCLAHGEEHPEGSRWVPPDSACSSCVCHEGVVTCARIQCISSCAQPRQGPHDCCPQCSDCEHEGRKYEPGESFQPGADPCEVCICEPQPEGPPSLRCHRRQCPSLVGCPPSQLLPPGPQHCCPTCAEALSNCSEGLLGSELAPPDPCYTCQCQDLTWLCIHQACPELSCPLSERHTPPGSCCPVCRAPTQSCVHQGREVASGERWTVDTCTSCSCMAGTVRCQSQRCSPLSCGPDKAPALSPGSCCPRCLPRPASCMAFGDPHYRTFDGRLLHFQGSCSYVLAKDCHSGDFRWMGTRWPCPSCRSRCCMWSCEDTL

SEQ ID NO: 43620 - protein, 1504 aa, Homo sapiens
  Payload ID: 8968
  Gene Symbol: KCP
  Gene Name: kielin/chordin-like protein
  ENSP ID: ENSP00000484293
MAGVGAAALSLLLHLGALALAAGAEGGAVPREPPGQQTTAHSSVLAGNSQEQWHPLREWLGRLEAAVMELREQNKDLQTRVRQLESCECHPASPQCWGLGRAWPEGARWEPDACTACVCQDGAAHCGPQAHLPHCRGCSQNGQTYGNGETFSPDACTTCRCLTGAVQCQGPSCSELNCLESCTPPGECCPICRCTEGGSHWEHGQEWTTPGDPCRICRCLEGHIQCRQRECASLCPYPARPLPGTCCPVCDGCFLNGREHRSGEPVGSGDPCSHCRCANGSVQCEPLPCPPVPCRHPGKIPGQCCPVCDGCEYQGHQYQSQETFRLQERGLCVRCSCQAGEVSCEEQECPVTPCALPASGRQLCPACELDGEEFAEGVQWEPDGRPCTACVCQDGVPKCGAVLCPPAPCQHPTQPPGACCPSCDSCTYHSQVYANGQNFTDADSPCHACHCQDGTVTCSLVDCPPTTCARPQSGPGQCCPRCPDCILEEEVFVDGESFSHPRDPCQECRCQEGHAHCQPRPCPRAPCAHPLPGTCCPNDCSGCAFGGKEYPSGADFPHPSDPCRLCRCLSGNVQCLARRCVPLPCPEPVLLPGECCPQCPAPAGCPRPGAAHARHQEYFSPPGDPCRRCLCLDGSVSCQRLPCPPAPCAHPRQGPCCPSCDGCLYQGKEFASGERFPSPTAACHLCLCWEGSVSCEPKACAPALCPFPARGDCCPDCDGCEYLGESYLSNQEFPDPREPCNLCTCLGGFVTCGRRPCEPPGCSHPLIPSGHCCPTCQGCRYHGVTTASGETLPDPLDPTCSLCTCQEGSMRCQKKPCPPALCPHPSPGPCFCPVCHSCLSQGREHQDGEEFEGPAGSCEWCRCQAGQVSCVRLQCPPLPCKLQVTERGSCCPRCRGCLAHGEEHPEGSRWVPPDSACSSCVCHEGVVTCARIQCISSCAQPRQGPHDCCPQCSDCEHEGRKYEPGESFQPGADPCEVCICEPQPEGPPSLRCHRRQCPSLVGCPPSQLLPPGPQHCCPTCAEALSNCSEGLLGSELAPPDPCYTCQCQDLTWLCIHQACPELSCPLSERHTPPGSCCPVCRAPTQSCVHQGREVASGERWTVDTCTSCSCMAGTVRCQSQRCSPLSCGPDKAPALSPGSCCPRCLPRPASCMAFGDPHYRTFDGRLLHFQGSCSYVLAKDCHSGDFSVHVTNDDRGRSGVAWTQEVAVLLGDMAVRLLQDGAVTVDGHPVALPFLQEPLLYVELRGHTVILHAQPGLQVLWDGQSQVEVSVPGSYQGRTCGLCGNFNGFAQDDLQGPEGLLLPSEAAFGNSWQVSEGLWPGRPCSAGREVDPCRAAGYRARREANARCGVLKSSPFSRCHAVVPPEPFFAACVYDLCACGPGSSADACLCDALEAYASHCRQAGVTPTWRGPTLCVVGCPLERGFVFDECGPPCPRTCFNQHIPLGELAAHCVRPCVPGCQCPAGLVEHEAHCIPPEACPQVLLTGDQPLGARPSPSREPQETP

SEQ ID NO: 43621 - protein, 621 aa, Homo sapiens
  Payload ID: 8969
  Gene Symbol: KIF1BP
  Gene Name: KIF1 binding protein
  Uniprot ID: Q96EK5
  ENSP ID: ENSP00000354848
MANVPWAEVCEKFQAALALSRVELHKNPEKEPYKSKYSARALLEEVKALLGPAPEDEDERPEAEDGPGAGDHALGLPAEVVEPEGPVAQRAVRLAVIEFHLGVNHIDTEELSAGEEHLVKCLRLLRRYRLSHDCISLCIQAQNNLGILWSEREEIETAQAYLESSEALYNQYMKEVGSPPLDPTERFLPEEEKLTEQERSKRFEKVYTHNLYYLAQVYQHLEMFEKAAHYCHSTLKRQLEHNAYHPIEWAINAATLSQFYINKLCFMEARHCLSAANVIFGQTGKISATEDTPEAEGEVPELYHQRKGEIARCWIKYCLTLMQNAQLSMQDNIGELDLDKQSELRALRKKELDEEESIRKKAVQFGTGELCDAISAVEEKVSYLRPLDFEEARELFLLGQHYVFEAKEFFQIDGYVTDHIEVVQDHSALFKVLAFFETDMERRCKMHKRRIAMLEPLTVDLNPQYYLLVNRQIQFEIAHAYYDMMDLKVAIADRLRDPDSHIVKKINNLNKSALKYYQLFLDSLRDPNKVFPEHIGEDVLRPAMLAKFRVARLYGKIITADPKKELENLATSLEHYKFIVDYCEKHPEAAQEIEVELELSKEMVSLLPTKMERFRTKMALT

SEQ ID NO: 43622 - protein, 297 aa, Homo sapiens
  Payload ID: 8969
  Gene Symbol: KIF1BP
  Gene Name: KIF1 binding protein
  ENSP ID: ENSP00000486692
MANVPWAEVCEKFQAALALSRVELHKNPEKEPYKSKYSARALLEEVKALLGPAPEDEDERPEAEDGPGAGDHALGLPAEVVEPEGPVAQRAVRLAVIEFHLGVNHIDTEELSAGEEHLVKCLRLLRRYRLSHDCISLCIQAQNNLGILWSEREEIETAQAYLESSEALYNQYMKEVGSPPLDPTERFLPEEEKLTEQERSKRFEKVYTHNLYYLAQVYQHLEMFEKAAHYCHSTLKRQLEHNAYHPIEWAINAATLSQFYINKLCFMEARHCLSAANVIFGQTGKISATEDRQHRRA

SEQ ID NO: 43623 - protein, 427 aa, Homo sapiens
  Payload ID: 8970
  Gene Symbol: KIR3DL1
  Gene Name: killer cell immunoglobulin-like receptor, three domains, long cytoplasmic tail, 1
  ENSP ID: ENSP00000326868
MSLMVVSMACVGLFLVQRAGPHMGGQDKPFLSAWPSAVVPRGGHVTLRCHYRHRFNNFMLYKEDRIHIPIFHGRIFQESFNMSPVTTAHAGNYTCRGSHPHSPTGWSAPSNPVVIMVTGNHRKPSLLAHPGPLVKSGERVILQCWSDIMFEHFFLHKEGISKDPSRLVGQIHDGVSKANFSIGPMMLALAGTYRCYGSVTHTPYQLSAPSDPLDIVVTGPYEKPSLSAQPGPKVQAGESVTLSCSSRSSYDMYHLSREGGAHERRLPAVRKVNRTFQADFPLGPATHGGTYRCFGSFRHSPYEWSDPSDPLLVSVTGNPRHLHILIGTSVVIILFILLLFFLLHLWCSNKKNAAVMDQEPAGNRTANSEDSDEQDPEEVTYAQLDHCVFTQRKITRPSQRPKTPPTDTILYTELPNAKPRSKVVSCP

SEQ ID NO: 43624 - protein, 349 aa, Homo sapiens
  Payload ID: 8970
  Gene Symbol: KIR3DL1
  Gene Name: killer cell immunoglobulin-like receptor, three domains, long cytoplasmic tail, 1
  Uniprot ID: P43629
  ENSP ID: ENSP00000350901
MSLMVVSMACVGLFLVQRAGPHMGNHRKPSLLAHPGPLVKSGERVILQCWSDIMFEHFFLHKEGISKDPSRLVGQIHDGVSKANFSIGPMMLALAGTYRCYGSVTHTPYQLSAPSDPLDIVVTGPYEKPSLSAQPGPKVQAGESVTLSCSSRSSYDMYHLSREGGAHERRLPAVRKVNRTFQADFPLGPATHGGTYRCFGSFRHSPYEWSDPSDPLLVSVTGNPSSSWPSPTEPSSKSGNPRHLHILIGTSVVIILFILLLFFLLHLWCSNKKNAAVMDQEPAGNRTANSEDSDEQDPEEVTYAQLDHCVFTQRKITRPSQRPKTPPTDTILYTELPNAKPRSKVVSCP

SEQ ID NO: 43625 - protein, 444 aa, Homo sapiens
  Payload ID: 8970
  Gene Symbol: KIR3DL1
  Gene Name: killer cell immunoglobulin-like receptor, three domains, long cytoplasmic tail, 1
  Uniprot ID: P43629
  ENSP ID: ENSP00000375608
MSLMVVSMACVGLFLVQRAGPHMGGQDKPFLSAWPSAVVPRGGHVTLRCHYRHRFNNFMLYKEDRIHIPIFHGRIFQESFNMSPVTTAHAGNYTCRGSHPHSPTGWSAPSNPVVIMVTGNHRKPSLLAHPGPLVKSGERVILQCWSDIMFEHFFLHKEGISKDPSRLVGQIHDGVSKANFSIGPMMLALAGTYRCYGSVTHTPYQLSAPSDPLDIVVTGPYEKPSLSAQPGPKVQAGESVTLSCSSRSSYDMYHLSREGGAHERRLPAVRKVNRTFQADFPLGPATHGGTYRCFGSFRHSPYEWSDPSDPLLVSVTGNPSSSWPSPTEPSSKSGNPRHLHILIGTSVVIILFILLLFFLLHLWCSNKKNAAVMDQEPAGNRTANSEDSDEQDPEEVTYAQLDHCVFTQRKITRPSQRPKTPPTDTILYTELPNAKPRSKVVSCP

SEQ ID NO: 43626 - protein, 455 aa, Homo sapiens
  Payload ID: 8970
  Gene Symbol: KIR3DL1
  Gene Name: killer cell immunoglobulin-like receptor, three domains, long cytoplasmic tail, 1
  ENSP ID: ENSP00000384528
MSLMVVSMACVGLFLVQRAGPHMGGQDKPFLSAWPSAVVPRGGHVTLRCHYRHRFNNFMLYKEDRIHIPIFHGRIFQESFNMSPVTTAHAGNYTCRGSHPHSPTGWSAPSNPVVIMVTGNHRKPSLLAHPGPLVKSGERVILQCWSDIMFEHFFLHKEGISKDPSRLVGQIHDGVSKANFSIGPMMLALAGTYRCYGSVTHTPYQLSAPSDPLDIVVTGPYEKPSLSAQPGPKVQAGESVTLSCSSRSSYDMYHLSREGGAHERRLPAVRKVNRTFQADFPLGPATHGGTYRCFGSFRHSPYEWSDPSDPLLVSVTGNPSSSWPSPTEPSSKSGICRHLHVLIGTSVVIFLFILLLFFLLYRWCSNKKNAAVMDQEPAGDRTVNRQDSDEQDPQEVTYAQLDHCVFIQRKISRPSQRPKTPLTDTSVYTELPNAEPRSKVVSCPRAPQSGLEGVF

SEQ ID NO: 43627 - protein, 427 aa, Homo sapiens
  Payload ID: 8970
  Gene Symbol: KIR3DL1
  Gene Name: killer cell immunoglobulin-like receptor, three domains, long cytoplasmic tail, 1
  ENSP ID: ENSP00000477743
MLLMVVSMACVGFFLVQRAGPHVGGQDKPFLSAWPSAVVPRGGHVTLRCHYRHRFNNFMLYKEDRIHVPIFHGRLFQESFNMSPVTTAHAGNYTCRGSHPHSPTGWSAPSNPVVIMVTGNHRKPSLLAHPGPLVKSGERVILQCWSDIMFEHFFLHKEGISKDPSRLVGQIHDGVSKANFSIGPMMLALAGTYRCYGSVTHTPYQLSAPSDPLDIVVTGPYEKPSLSAQPGPKVQAGESVTLSCSSRSSYDMYHLSRERGAHERRLPAVRKVNRTFQADFPLGPATHGGTYRCFGSFRHSPYEWSDPSDPLLVSVTGNPRHLHILIGTSVVIILFILLLFFLLHLWCSNKKNAAVMDQEPAGNRTANSEDSDEQDPEEVTYAQLDHCVFTQRKITRPSQRPKTPPTDTILYTELPNAKPRSKVVSCP

SEQ ID NO: 43628 - protein, 455 aa, Homo sapiens; identical to SEQ ID NO: 43626
  Payload ID: 8970
  Gene Symbol: KIR3DL1
  Gene Name: killer cell immunoglobulin-like receptor, three domains, long cytoplasmic tail, 1
  ENSP ID: ENSP00000477777

SEQ ID NO: 43629 - protein, 444 aa, Homo sapiens
  Payload ID: 8970
  Gene Symbol: KIR3DL1
  Gene Name: killer cell immunoglobulin-like receptor, three domains, long cytoplasmic tail, 1
  ENSP ID: ENSP00000477840
MSLMVVSMACVGFFLVQRAGPHVGGQDKPFLSAWPSAVVPRGGHVTLRCHYRHRFNNFMLYKEDRIHVPIFHGRLFQESFNMSPVTTAHAGNYTCRGSHPHSPTGWSAPSNPVVIMVTGNHRKPSLLAHPGPLVKSGERVILQCWSDIMFEHFFLHKEGISKDPSRLVGQIHDGVSKANFSIGPMMLALAGTYRCYGSVTHTPYQLSAPSDPLDIVVTGPYEKPSLSAQPGPKVQAGESVTLSCSSRSSYDMYHLSREGGAHERRLPAVRKVNRTFKADFPLGPATHGGTYRCFGSFRHSPYEWSDPSDPLLVSVTGNPSSSWPSPTEPSSKSGNPRHLHILIGTSVVIILFILLLFFLLHLWCSNKKNAAVMDQEPAGNRTANSEDSDEQDPEEVTYAQLDHCVFTQRKITRPSQRPKTPPTDTILYTELPNAKPRSKVVSCP

SEQ ID NO: 43630 - protein, 455 aa, Homo sapiens
  Payload ID: 8970
  Gene Symbol: KIR3DL1
  Gene Name: killer cell immunoglobulin-like receptor, three domains, long cytoplasmic tail, 1
  ENSP ID: ENSP00000477900
MSLMVVSMACVGFFLLQGAWPHEGGQDKPFLSAWPSAVVPRGGHVTLRCHYRHRFNNFMLYKEDRIHVPIFHGRLFQESFNMSPVTTAHAGNYTCRGSHPHSPTGWSAPSNPVVIMVTGNHRKPSLLAHPGPLVKSGERVILQCWSDIMFEHFFLHKEGISKDPSRLVGQIHDGVSKANFSIGPMMLALAGTYRCYGSVTHTPYQLSAPSDPLDIVVTGPYEKPSLSAQPGPKVQAGESVTLSCSSRSSYDMYHLSREGGAHERRLPAVRKVNRTFKADFPLGPATHGGTYRCFGSFRHSPYEWSDPSDPLLVSVTGNPSSSWPSPTEPSSKSGNPRHLHILIGTSVVIILFILLLFFLLHLWCSNKKNAAVMDQEPAGNRTANSEDSDEQDPEEVTYAQLDHCVFTQRKITRPSQRPKTPPTDTILYTELPNAKPRSKVVSCPRAPQSGLEGIF

SEQ ID NO: 43631 - protein, 444 aa, Homo sapiens
  Payload ID: 8970
  Gene Symbol: KIR3DL1
  Gene Name: killer cell immunoglobulin-like receptor, three domains, long cytoplasmic tail, 1
  ENSP ID: ENSP00000478023
MLLMVVSMACVGFFLVQRAGPHVGGQDKPFLSAWPSAVVPRGGHVTLRCHYRHRFNNFMLYKEDRIHVPIFHGRLFQESFNMSPVTTAHAGNYTCRGSHPHSPTGWSAPSNPVVIMVTGNHRKPSLLAHPGPLVKSGERVILQCWSDIMFEHFFLHKEGISKDPSRLVGQIHDGVSKANFSIGPMMLALAGTYRCYGSVTHTPYQLSAPSDPLDIVVTGPYEKPSLSAQPGPKVQAGESVTLSCSSRSSYDMYHLSREGGAHERRLPAVRKVNRTFQADFPLGPATHGGTYRCFGSFRHSPYEWSDPSDPLLVSVTGNPSSSWPSPTEPSSKSGNPRHLHVLIGTSVVIILFILLLFFLLHLWCSNKKNAAVMDQEPAGNRTANSEDSDEQDPQEVTYAQLDHCVFTQRKITRPSQRPKTPPTDTILYTELPNAKPRSKVVSCP

SEQ ID NO: 43632 - protein, 444 aa, Homo sapiens
  Payload ID: 8970
  Gene Symbol: KIR3DL1
  Gene Name: killer cell immunoglobulin-like receptor, three domains, long cytoplasmic tail, 1
  ENSP ID: ENSP00000478110
MLLMVVSMACVGFFLVQRAGPHVGGQDKPFLSAWPSAVVPRGGHVTLRCHYRHRFNNFMLYKEDRIHVPIFHGRLFQESFNMSPVTTAHAGNYTCRGSHPHSPTGWSAPSNPVVIMVTGNHRKPSLLAHPGPLVKSGERVILQCWSDIMFEHFFLHKEGISKDPSSLVGQIHDGVSKANFSIGPMMLALAGTYRCYGSVTHTPYQLSAPSDPLDIVVTGPYEKPSLSAQPGPKVQAGESVTLSCSSRSSYDMYHLSREGGAHERRLPAVRKVNRTFQADFPLGPATHGGTYRCFGSFRHSPYEWSDPSDPLLVSVTGNPSSSWPSPTEPSSKSGNPRHLHILIGTSVVIILFILLLFFLLHLWCSNKKNAAVMDQEPAGNRTANSEDSDEQDPQEVTYAQLDHCVFTQRKITRPSQRPKTPPTDTILYTELPNAKPRSKVVSCP

SEQ ID NO: 43633 - protein, 444 aa, Homo sapiens [sequence omitted]

SEQ ID NO: 43634 - protein, 427 aa, Homo sapiens
  Payload ID: 8970
  Gene Symbol: KIR3DL1
  Gene Name: killer cell immunoglobulin-like receptor, three domains, long cytoplasmic tail, 1
  ENSP ID: ENSP00000478424
MLLMVVSMACVGFFLVQRAGPHMGGQDKPFLSAWPSAVVPRGGHVTLRCHYRHRFNNFMLYKEDRIHVPIFHGRLFQESFNMSPVTTAHAGNYTCRGSHPHSPTGWSAPSNPVVIMVTGNHRKPSLLAHPGPLVKSGERVILQCWSDIMFEHFFLHKEGISKDPSRLVGQIHDGVSKANFSIGPMMLALAGTYRCYGSVTHTPYQLSAPSDPLDIVVTGPYEKPSLSAQPGPKVQAGESVTLSCSSRSSYDMYHLSREGGAHERRLPAVRKVNRTFQADFPLGPATHGGTYRCFGSFRHSPYEWSDPSDPLLVSVTGNPRHLHILIGTSVVIILFILLLFFLLHLWCSNKKNAAVMDQEPAGNRTANSEDSDEQDPEEVTYAQLDHCVFTQRKITRPSQRPKTPPTDTILYTELPNAKPRSKVVSCP

SEQ ID NO: 43635 - protein, 427 aa, Homo sapiens
  Payload ID: 8970
  Gene Symbol: KIR3DL1
  Gene Name: killer cell immunoglobulin-like receptor, three domains, long cytoplasmic tail, 1
  ENSP ID: ENSP00000478631
MLLMVVSMACVGFFLVQRAGPHVGGQDKPFLSAWPSAVVPRGGHVTLRCHYRHRFNNFMLYKEDRIHVPIFHGRLFQESFNMSPVTTAHAGNYTCRGSHPHSPTGWSAPSNPVVIMVTGNHRKPSLLAHPGPLVKSGERVILQCWSDIMFEHFFLHKEGISKDPSRLVGQIHDGVSKANFSIGPMMLALAGTYRCYGSVTHTPYQLSAPSDPLDIVVTGPYEKPSLSAQPGPKVQAGESVTLSCSSRSSYDMYHLSREGGAHERRLPAVRKVNRTFQADFPLGPATHGGTYRCFGSFRHSPYEWSDPSDPLLVSVTGNPRHLHILIGTSVVIILFILLLFFLLHLWCSNKKNAAVMDQEPAGNRTANSEDSDEQDPEEVTYAQLDHCVFTQRKITRPSQRPKTPPTDTILYTELPNAKPRSKVVSCP

SEQ ID NO: 43636 - protein, 444 aa, Homo sapiens
  Payload ID: 8970
  Gene Symbol: KIR3DL1
  Gene Name: killer cell immunoglobulin-like receptor, three domains, long cytoplasmic tail, 1
  ENSP ID: ENSP00000478759
MLLMVVSMACVGFFLVQRAGPHVGGQDKPFLSAWPSAVVPRGGHVTLRCHYRHRFNNFMLYKEDRIHVPIFHGRLFQESFNMSPVTTAHAGNYTCRGSHPHSPTGWSAPSNPVVIMVTGNHRKPSLLAHPGPLVKSGERVILQCWSDIMFEHFFLHKEGISKDPSRLVGQIHDGVSKANFSIGPMMLALAGTYRCYGSVTHTPYQLSAPSDPLDIVVTGPYEKPSLSAQPGPKVQAGESVTLSCSSRSSYDMYHLSREGGAHERRLPAVRKVNRTFQADFPLGPATHGGTYRCFGSFRHSPYEWSDPSDPLLVSVTGNPSSSWPSPTEPSSKSGNPRHLHILIGTSVVIILFILLLFFLLHLWCSNKKNAAVMDQEPAGNRTANSEDSDEQDPQEVTYAQLDHCVFTQRKITRPSQRPKTPPTDTILYTELPNAKPRSKVVSCP

SEQ ID NO: 43637 - protein, 455 aa, Homo sapiens; identical to SEQ ID NO: 43626
  Payload ID: 8970
  Gene Symbol: KIR3DL1
  Gene Name: killer cell immunoglobulin-like receptor, three domains, long cytoplasmic tail, 1
  ENSP ID: ENSP00000478761

SEQ ID NO: 43638 - protein, 444 aa, Homo sapiens
  Payload ID: 8970
  Gene Symbol: KIR3DL1
  Gene Name: killer cell immunoglobulin-like receptor, three domains, long cytoplasmic tail, 1
  ENSP ID: ENSP00000478844
MSLMVVSMACVGFFLVQRAGPHVGGQDKPFLSAWPSAVVPRGGHVTLRCHYRHRFNNFMLYKEDRIHVPIFHGRLFQESFNMSPVTTAHAGNYTCRGSHPHSPTGWSAPSNPVVIMVTGNHRKPSLLAHPGPLVKSGERVILQCWSDIMFEHFFLHKEGISKDPSRLVGQIHDGVSKANFSIGPMMLALAGTYRCYGSVTHTPYQLSAPSDPLDIVVTGPYEKPSLSAQPGPKVQAGESVTLSCSSRSSYDMYHLSREGGAHERRLPAVRKVNRTFQADFPLGPATHGGTYRCFGSFRHSPYEWSDPSDPLLVSVTGNPSSSWPSPTEPSSKSGNPRHLHILIGTSVVIILFILLLFFLLHLWCSNKKNAAVMDQEPAGNRTANSEDSDEQDPEEVTYAQLDHCVFTQRKITRPSQRPKTPPTDTILYTELPNAKPRSKVVSCP

SEQ ID NO: 43639 - protein, 444 aa, Homo sapiens
  Payload ID: 8970
  Gene Symbol: KIR3DL1
  Gene Name: killer cell immunoglobulin-like receptor, three domains, long cytoplasmic tail, 1
  ENSP ID: ENSP00000478871
MSLMVVSMACVGLFLVQRAGPHMGGQDKPFLSAWPSAVVPRGGHVTLRCHYRHRFNNFMLYKEDRIHIPIFHGRIFQESFNMSPVTTAHAGNYTCRGSHPHSPTGWSAPSNPVVIMVTGNHRKPSLLAHPGPLVKSGERVILQCWSDIMFEHFFLHKEGISKDPSRLVGQIHDGVSKANFSIGPMMLALAGTYRCYGSVTHTSYQLSAPSDPLDIVVTGPYEKPSLSAQPGPKVQAGESVTLSCSSRSSYDMYHLSREGGAHERRLPAVRKVNRTFQADFPLGPATHGGTYRCFGSFRHSPYELSDPSDPLLVSVTGNPSSSWPSPTEPSSKSGNPRHLHILIGTSVVIILFILLLFFLLHLWCSNKKNAAVMDQEPAGNRTANSEDSDEQDPEEVTYAQLDHCVFTQRKITRPSQRPKTPPTDTILYTELPNAKPRSKVVSCP

SEQ ID NO: 43640 - protein, 444 aa, Homo sapiens; identical to SEQ ID NO: 43639
  Payload ID: 8970
  Gene Symbol: KIR3DL1
  Gene Name: killer cell immunoglobulin-like receptor, three domains, long cytoplasmic tail, 1
  ENSP ID: ENSP00000478978

SEQ ID NO: 43641 - protein, 444 aa, Homo sapiens; identical to SEQ ID NO: 43625
  Payload ID: 8970
  Gene Symbol: KIR3DL1
  Gene Name: killer cell immunoglobulin-like receptor, three domains, long cytoplasmic tail, 1
  Uniprot ID: P43629
  ENSP ID: ENSP00000479009

SEQ ID NO: 43642 - protein, 444 aa, Homo sapiens
  Payload ID: 8970
  Gene Symbol: KIR3DL1
  Gene Name: killer cell immunoglobulin-like receptor, three domains, long cytoplasmic tail, 1
  ENSP ID: ENSP00000479177
MLLMVVSMACVGFFLVQRAGPHVGGQDKPFLSAWPSAVVPRGGHVTLRCHYRHRFNNFMLYKEDRIHVPIFHGRLFQESFNMSPVTTAHAGNYTCRGSHPHSPTGWSAPSNPVVIMVTGNHRKPSLLAHPGPLVKSGERVILQCWSDIMFEHFFLHKEGISKDPSRLVGQIHDGVSKANFSIGPMMLALAGTYRCYGSVTHTPYQLSAPSDPLDIVVTGPYEKPSLSAQPGPKVQAGESVTLSCSSRSSYDMYHLSREGGAHERRLPAVRKVNRTFQADFPLGPATHGGTYRCFGSFRHSPYEWSDPSDPLLVSVTGNPSSSWPSPTEPSSKSGNPRHLHILIGTSVVIILFILLLFFLLHLWCSNKKNAAVMDQEPAGNRTANSEDSDEQDPEEVTYAQLDHCVFTQRKITRPSQRPKTPPTDTILYTELPNAKPRSKVVSCP

SEQ ID NO: 43643 - protein, 444 aa, Homo sapiens; identical to SEQ ID NO: 43638
  Payload ID: 8970
  Gene Symbol: KIR3DL1
  Gene Name: killer cell immunoglobulin-like receptor, three domains, long cytoplasmic tail, 1
  ENSP ID: ENSP00000479259

SEQ ID NO: 43644 - protein, 427 aa, Homo sapiens
  Payload ID: 8970
  Gene Symbol: KIR3DL1
  Gene Name: killer cell immunoglobulin-like receptor, three domains, long cytoplasmic tail, 1
  ENSP ID: ENSP00000479469
MLLMVVSMACVGFFLVQRAGPHVGGQDKPFLSAWPSAVVPRGGHVTLRCHYRHRFNNFMLYKEDRIHVPIFHGRLFQESFNMSPVTTAHAGNYTCRGSHPHSPTGWSAPSNPVVIMVTGNHRKPSLLAHPGPLVKSGERVILQCWSDIMFEHFFLHKEGISKDPSSLVGQIHDGVSKANFSIGPMMLALAGTYRCYGSVTHTPYQLSAPSDPLDIVVTGPYEKPSLSAQPGPKVQAGESVTLSCSSRSSYDMYHLSREGGAHERRLPAVRKVNRTFQADFPLGPATHGGTYRCFGSFRHSPYEWSDPSDPLLVSVTGNPRHLHILIGTSVVIILFILLLFFLLHLWCSNKKNAAVMDQEPAGNRTANSEDSDEQDPQEVTYAQLDHCVFTQRKITRPSQRPKTPPTDTILYTELPNAKPRSKVVSCP

SEQ ID NO: 43645 - protein, 455 aa, Homo sapiens
  Payload ID: 8970
  Gene Symbol: KIR3DL1
  Gene Name: killer cell immunoglobulin-like receptor, three domains, long cytoplasmic tail, 1
  ENSP ID: ENSP00000479776
MSLMVVSMACVGFFLVQRAGPHVGGQDKPFLSAWPSAVVPRGGHVTLRCHYRHRFNNFMLYKEDRIHVPIFHGRLFQESFNMSPVTTAHAGNYTCRGSHPHSPTGWSAPSNPVVIMVTGNHRKPSLLAHPGPLVKSGERVILQCWSDIMFEHFFLHKEGISKDPSRLVGQIHDGVSKANFSIGPMMLALAGTYRCYGSVTHTPYQLSAPSDPLDIVVTGPYEKPSLSAQPGPKVQAGESVTLSCSSRSSYDMYHLSREGGAHERRLPAVRKVNRTFQADFPLGPATHGGTYRCFGSFRHSPYEWSDPSDPLLVSVTGNPSSSWPSPTEPSSKSGICRHLHVLIGTSVVIFLFILLLFFLLYRWCSNKKNAAVMDQEPAGDRTVNRQDSDEQDPQEVTYAQLDHCVFIQRKISRPSQRPKTPLTDTSVYTELPNAEPRSKVVSCPRAPQSGLEGVF

SEQ ID NO: 43646 - protein, 444 aa, Homo sapiens
  Payload ID: 8970
  Gene Symbol: KIR3DL1
  Gene Name: killer cell immunoglobulin-like receptor, three domains, long cytoplasmic tail, 1
  ENSP ID: ENSP00000480064
MSLMVVSMACVGFFLVQRAGPHMGGQDKPFLSAWPSAVVPRGGHVTLRCHYRHRFNNFMLYKEDRIHVPIFHGRLFQESFNMSPVTTAHAGNYTCRGSHPHSPTGWSAPSNPVVIMVTGNHRKPSLLAHPGPLVKSGERVILQCWSDIMFEHFFLHKEGISKDPSRLVGQIHDGVSKANFSIGPMMLALAGTYRCYGSVTHTPYQLSAPSDPLDIVVTGPYEKPSLSAQPGPKVQAGESVTLSCSSRSSYDMYHLSREGGAHERRLPAVRKVNRTFQADFPLGPATHGGTYRCFGSFRHSPYEWSDPSDPLLVSVTGNPSSSWPSPTEPSSKSGNPRHLHILIGTSVVIILFILLLFFLLHLWCSNKKNAAVMDQEPAGNRTANSEDSDEQDPEEVTYAQLDHCVFTQRKITRPSQRPKTPPTDTILYTELPNAKPRSKVVSCP

SEQ ID NO: 43647 - protein, 455 aa, Homo sapiens
  Payload ID: 8970
  Gene Symbol: KIR3DL1
  Gene Name: killer cell immunoglobulin-like receptor, three domains, long cytoplasmic tail, 1
  ENSP ID: ENSP00000480397
MSLMVVSMACVGLFLVQRAGPHMGGQDKPFLSAWPSAVVPRGGHVTLRCHYRHRFNNFMLYKEDRIHIPIFHGRIFQESFNMSPVTTAHAGNYTCRGSHPHSPTGWSAPSNPVVIMVTGNHRKPSLLAHPGPLVKSGERVILQCWSDIMFEHFFLHKEGISKDPSRLVGQIHDGVSKANFSIGPMMLALAGTYRCYGSVTHTSYQLSAPSDPLDIVVTGPYEKPSLSAQPGPKVQAGESVTLSCSSRSSYDMYHLSREGGAHERRLPAVRKVNRTFQADFPLGPATHGGTYRCFGSFRHSPYELSDPSDPLLVSVTGNPSSSWPSPTEPSSKSGICRHLHVLIGTSVVIFLFILLLFFLLYRWCSNKKNAAVMDQEPAGDRTVNRQDSDEQDPQEVTYAQLDHCVFIQRKISRPSQRPKTPLTDTSVYTELPNAEPRSKVVSCPRAPQSGLEGVF

SEQ ID NO: 43648 - protein, 444 aa, Homo sapiens
  Payload ID: 8970
  Gene Symbol: KIR3DL1
  Gene Name: killer cell immunoglobulin-like receptor, three domains, long cytoplasmic tail, 1
  ENSP ID: ENSP00000480456
MLLMVVSMACVGFFLVQRAGPHVGGQDKPFLSAWPSAVVPRGGHVTLRCHYHHRFNNFMLYKEDRIHVPIFHGRLFQESFNMSPVTTAHAGNYTCRGSHPHSPTGWSAPSNPVVIMVTGNHRKPSLLAHPGPLVKSGERVILQCWSDIMFEHFFLHKEGISKDPSRLVGQIHDGVSKANFSIGPMMLALAGTYRCYGSVTHTPYQLSAPSDPLDIVVTGPYEKPSLSAQPGPKVQAGESVTLSCSSRSSYDMYHLSREGGAHERRLPAVRKVNRTFQADFPLGPATHGGTYRCFGSFRHSPYEWSDPSDPLLVSVTGNPSSSWPSPTEPSSKSGNPRHLHILIGTSVVIILFILLLFFLLHLWCSNKKNAAVMDQEPAGNRTANSEDSDEQDPEEVTYAQLDHCVFTQRKITRPSQRPKTPPTDTILYTELPNAKPRSKVVSCP

SEQ ID NO: 43649 - protein, 427 aa, Homo sapiens
  Payload ID: 8970
  Gene Symbol: KIR3DL1
  Gene Name: killer cell immunoglobulin-like receptor, three domains, long cytoplasmic tail, 1
  ENSP ID: ENSP00000480639
MLLMVVSMACVGFFLVQRAGPHVGGQDKPFLSAWPSAVVPRGGHVTLRCHYRHRFNNFMLYKEDRIHVPIFHGRLFQESFNMSPVTTAHAGNYTCRGSHPHSPTGWSAPSNPVVIMVTGNHRKPSLLAHPGPLVKSGERVILQCWSDIMFEHFFLHKEGISKDPSRLVGQIHDGVSKANFSIGPMMLALAGTYRCYGSVTHTPYQLSAPSDPLDIVVTGPYEKPSLSAQPGPKVQAGESVTLSCSSRSSYDMYHLSREGGAHERRLPAVRKVNRTFQADFPLGPATHGGTYRCFGSFRHSPYEWSDPSDPLLVSVTGNPRHLHVLIGTSVVIILFILLLFFLLHLWCSNKKNAAVMDQEPAGNRTANSEDSDEQDPQEVTYAQLDHCVFTQRKITRPSQRPKTPPTDTILYTELPNAKPRSKVVSCP

SEQ ID NO: 43650 - protein, 455 aa, Homo sapiens
  Payload ID: 8970
  Gene Symbol: KIR3DL1
  Gene Name: killer cell immunoglobulin-like receptor, three domains, long cytoplasmic tail, 1
  ENSP ID: ENSP00000480651
MSLMVVSMACVGFFLLQGAWPHEGGQDKPFLSAWPSAVVPRGGHVTLRCHYHHRFNNFMLYKEDGIHIPIFHGRIFQESFNMSPVTTAHAGNYTCRGSHPHSPTGWSAPSNPVVIMVTGNHRKPSLLAHPGPLVKSGERVILQCWSDIMFEHFFLHKEGISKDPSRLVGQIHDGVSKANFSIGPMMLALAGTYRCYGSVTHTSYQLSAPSDPLDIVVTGPYEKPSLSAQPGPKVQAGESVTLSCSSRSSYDMYHLSREGGAHERRLPAVRKVNRTFQADFPLGPATHGGTYRCFGSFRHSPYELSDPSDPLLVSVTGNPSSSWPSPTEPSSKSGNPRHLHVLIGTSVVIILFILLLFFLLHLWYSNKKNAAVMDQEPAGNRTANSEDSDEQDPQEVTYAQLDHCVFTQRKITRPSQRPKTPPTDTILYTELPNAKPRSKVVSCPRAPQSGLEGIF

SEQ ID NO: 43651 - protein, 455 aa, Homo sapiens
  Payload ID: 8970
  Gene Symbol: KIR3DL1
  Gene Name: killer cell immunoglobulin-like receptor, three domains, long cytoplasmic tail, 1
  ENSP ID: ENSP00000480747
MSLMVVSMACVGLFLVQRAGPHMGGQDKPFLSAWPSAVVPRGGHVTLRCHYRHRFNNFMLYKEDRIHIPIFHGRIFQESFNMSPVTTAHAGNYTCRGSHPHSPTGWSAPSNPVVIMVTGNHRKPSLLAHPGPLVKSGERVILQCWSDIMFEHFFLHKEGISKDPSRLVGQIHDGVSKANFSIGPMMLALAGTYRCYGSVTHTSYQLSAPSDPLDIVVTGPYEKPSLSAQPGPKVQAGESVTLSCSSRSSYDMYHLSREGGAHERRLPAVRKVNRTFQADFPLGPATHGGTYRCFGSFRHSPYELSDPSDPLLVSVTGNPSSSWPSPTEPSSKSGICRHLHVLIGTSVVIFLFILLLFFLLYRWCSNKKNAAVMDQEPAGDRTVNRQDSDEQDPQEVMYAQLDHCVFIQRKISRPSQRPKTPLTDTSVYTELPNAEPRSKVVSCPRAPQSGLEGVF

SEQ ID NO: 43652 - protein, 444 aa, Homo sapiens; identical to SEQ ID NO: 43642
  Payload ID: 8970
  Gene Symbol: KIR3DL1
  Gene Name: killer cell immunoglobulin-like receptor, three domains, long cytoplasmic tail, 1
  ENSP ID: ENSP00000480934

SEQ ID NO: 43653 - protein, 427 aa, Homo sapiens; identical to SEQ ID NO: 43635
  Payload ID: 8970
  Gene Symbol: KIR3DL1
  Gene Name: killer cell immunoglobulin-like receptor, three domains, long cytoplasmic tail, 1
  ENSP ID: ENSP00000481188

SEQ ID NO: 43654 - protein, 455 aa, Homo sapiens
  Payload ID: 8970
  Gene Symbol: KIR3DL1
  Gene Name: killer cell immunoglobulin-like receptor, three domains, long cytoplasmic tail, 1
  ENSP ID: ENSP00000481222
MSLMVVSMACVGLFLVQRAGPHMGGQDKPFLSAWPSAVVPRGGHVTLRCHYHHRFNNFMLYKEDGIHIPIFHGRIFQESFNMSPVTTAHAGNYTCRGSHPHSPTGWLAPSNPVVIMVTGNHRKPSLLAHPGPLVKSGERVILQCWSDIMFEHFFLHKEGISKDPSRLVGQIHDGVSKANFSIGPMMLALAGTYRCYGSVTHTSYQLSAPSDPLDIVVTGPYEKPSLSAQPGPKVQAGESVTLSCSSRSSYDMYHLSREGGAHERRLPAVRKVNRTFQADFPLGPATHGGTYRCFGSFRHSPYELSDPSDPLLVSVTGNPSSSWPSPTEPSSKSGICRHLHVLIGTSVVIFLFILLLFFLLYRWCSNKKNAAVMDQEPAGDRTVNRQDSDEQDPQEVTYAQLDHCVFIQRKISRPSQRPKTPLTDTSVYTELPNAEPRSKVVSCPRAPQSGLEGVF

SEQ ID NO: 43655 - protein, 427 aa, Homo sapiens
  Payload ID: 8970
  Gene Symbol: KIR3DL1
  Gene Name: killer cell immunoglobulin-like receptor, three domains, long cytoplasmic tail, 1
  ENSP ID: ENSP00000481266
MLLMVVSMACVGFFLVQRAGPHVGGQDKPFLSAWPSAVVPRGGHVTLRCHYRHRFNNFMLYKEDRIHVPIFHGRLFQESFNMSPVTTAHAGNYTCRGSHPHSPTGWSAPSNPVVIMVTGNHRKPSLLAHPGPLVKSGERVILQCWSDIMFEHFFLHKEGISKDPSRLVGQIHDGVSKANFSIGPMMLALAGTYRCYGSVTHTPYQLSAPSDPLDIVVTGPYEKPSLSAQPGPKVQAGESVTLSCSSRSSYDMYHLSREGGAHERRLPAVRKVNRTFQADFPLGPATHGGTYRCFGSFRHSPYEWSDPSDPLLVSVTGNPRHLHILIGTSVVIILFILLLFFLLHLWCSNKKNAAVMDQEPAGNRTANSEDSDEQDPQEVTYAQLDHCVFTQRKITRPSQRPKTPPTDTILYTELPNAKPRSKVVSCP

SEQ ID NO: 43656 - protein, 444 aa, Homo sapiens
  Payload ID: 8970
  Gene Symbol: KIR3DL1
  Gene Name: killer cell immunoglobulin-like receptor, three domains, long cytoplasmic tail, 1
  ENSP ID: ENSP00000481282
MLLMVVSMACVGFFLVQRAGPHVGGQDKPFLSAWPSAVVPRGGHVTLRCHYRHRFNNFMLYKEDRIHVPIFHGRLFQESFNMSPVTTAHAGNYTCRGSHPHSPTGWSAPSNPVVIMVTGNHRKPSLLAHPGPLVKSGERVILQCWSDIMFEHFFLHKEGISKDPSRLVGQIHDGVSKANFSIGPMMLALAGTYRCYGSVTHTPYQLSAPSDPLDIVVTGPYEKPSLSAQPGPKVQAGESVTLSCSSRSSYDMYHLSREGGAHERRLPAVRKVNRTFKADFPLGPATHGGTYRCFGSFRHSPYEWSDPSDPLLVSVTGNPSSSWPSPTEPSSKSGNPRHLHILIGTSVVIILFILLLFFLLHLWCSNKKNAAVMDQEPAGNRTANSEDSDEQDPEEVTYAQLDHCVFTQRKITRPSQRPKTPPTDTILYTELPNAKPRSKVVSCP

SEQ ID NO: 43657 - protein, 444 aa, Homo sapiens; identical to SEQ ID NO: 43638
  Payload ID: 8970
  Gene Symbol: KIR3DL1
  Gene Name: killer cell immunoglobulin-like receptor, three domains, long cytoplasmic tail, 1
  ENSP ID: ENSP00000481501

SEQ ID NO: 43658 - protein, 444 aa, Homo sapiens; identical to SEQ ID NO: 43642
  Payload ID: 8970
  Gene Symbol: KIR3DL1
  Gene Name: killer cell immunoglobulin-like receptor, three domains, long cytoplasmic tail, 1
  ENSP ID: ENSP00000481576

SEQ ID NO: 43659 - protein, 427 aa, Homo sapiens
  Payload ID: 8970
  Gene Symbol: KIR3DL1
  Gene Name: killer cell immunoglobulin-like receptor, three domains, long cytoplasmic tail, 1
  ENSP ID: ENSP00000481631
MLLMVVSMACVGFFLVQRAGPHVGGQDKPFLSAWPSAVVPRGGHVTLRCHYRHRFNNFMLYKEDRIHVPIFHGRLFQESFNMSPVTTAHAGNYTCRGSHPHSPTGWSAPSNPVVIMVTGNHRKPSLLAHPGPLVKSGERVILQCWSDIMFEHFFLHKEGISKDPSRLVGQIHDGVSKANFSIGPMMLALAGTYRCYGSVTHTPYQLSAPSDPLDIVVTGPYEKPSLSAQPGPKVQAGESVTLSCSSRSSYDMYHLSREGGAHERRLPAVRKVNRTFKADFPLGPATHGGTYRCFGSFRHSPYEWSDPSDPLLVSVTGNPRHLHILIGTSVVIILFILLLFFLLHLWCSNKKNAAVMDQEPAGNRTANSEDSDEQDPEEVTYAQLDHCVFTQRKITRPSQRPKTPPTDTILYTELPNAKPRSKVVSCP

SEQ ID NO: 43660 - protein, 444 aa, Homo sapiens; identical to SEQ ID NO: 43656
  Payload ID: 8970
  Gene Symbol: KIR3DL1
  Gene Name: killer cell immunoglobulin-like receptor, three domains, long cytoplasmic tail, 1
  ENSP ID: ENSP00000481653

SEQ ID NO: 43661 - protein, 444 aa, Homo sapiens
  Payload ID: 8970
  Gene Symbol: KIR3DL1
  Gene Name: killer cell immunoglobulin-like receptor, three domains, long cytoplasmic tail, 1
  ENSP ID: ENSP00000481716
MSLMVVSMACVGLFLVQRAGPHMGGQDKPFLSAWPSAVVPRGGHVTLRCHYHHRFNNFMLYKEDGIHIPIFHGRIFQESFNMSPVTTAHAGNYTCRGSHPHSPTGWSAPSNPVVIMVTGNHRKPSLLAHPGPLVKSGERVILQCWSDIMFEHFFLHKEGISKDPSRLVGQIHDGVSKANFSIGPMMLALAGTYRCYGSVTHTSYQLSAPSDPLDIVVTGPYEKPSLSAQPGPKVQAGESVTLSCSSRSSYDMYHLSREGGAHERRLPAVRKVNRTFQADFPLGPATHGGTYRCFGSFRHSPYELSDPSDPLLVSVTGNPSSSWPSPTEPSSKSGNPRHLHVLIGTSVVIILFILLLFFLLHLWYSNKKNAAVMDQEPAGNRTANSEDSDEQDPQEVTYAQLDHCVFTQRKITRPSQRPKTPPTDTILYTELPNAKPRSKVVSCP

SEQ ID NO: 43662 - protein, 444 aa, Homo sapiens; identical to SEQ ID NO: 43638
  Payload ID: 8970
  Gene Symbol: KIR3DL1
  Gene Name: killer cell immunoglobulin-like receptor, three domains, long cytoplasmic tail, 1
  ENSP ID: ENSP00000481756

SEQ ID NO: 43663 - protein, 444 aa, Homo sapiens; identical to SEQ ID NO: 43625
  Payload ID: 8970
  Gene Symbol: KIR3DL1
  Gene Name: killer cell immunoglobulin-like receptor, three domains, long cytoplasmic tail, 1
  Uniprot ID: P43629
  ENSP ID: ENSP00000481802

SEQ ID NO: 43664 - protein, 427 aa, Homo sapiens; identical to SEQ ID NO: 43649
  Payload ID: 8970
  Gene Symbol: KIR3DL1
  Gene Name: killer cell immunoglobulin-like receptor, three domains, long cytoplasmic tail, 1
  ENSP ID: ENSP00000481960

SEQ ID NO: 43665 - protein, 427 aa, Homo sapiens; identical to SEQ ID NO: 43659
  Payload ID: 8970
  Gene Symbol: KIR3DL1
  Gene Name: killer cell immunoglobulin-like receptor, three domains, long cytoplasmic tail, 1
  ENSP ID: ENSP00000482105

SEQ ID NO: 43666 - protein, 444 aa, Homo sapiens
  Payload ID: 8970
  Gene Symbol: KIR3DL1
  Gene Name: killer cell immunoglobulin-like receptor, three domains, long cytoplasmic tail, 1
  ENSP ID: ENSP00000482160
MSLMVVSMACVGLFLVQRAGPHMGGQDKPFLSAWPSAVVPRGGHVTLRCHYHHRFNNFMLYKEDGIHIPIFHGRIFQESFNMSPVTTAHAGNYTCRGSHPHSPTGWLAPSNPVVIMVTGNHRKPSLLAHPGPLVKSGERVILQCWSDIMFEHFFLHKEGISKDPSRLVGQIHDGVSKANFSIGPMMLALAGTYRCYGSVTHTSYQLSAPSDPLDIVVTGPYEKPSLSAQPGPKVQAGESVTLSCSSRSSYDMYHLSREGGAHERRLPAVRKVNRTFQADFPLGPATHGGTYRCFGSFRHSPYELSDPSDPLLVSVTGNPSSSWPSPTEPSSKSGNPRHLHVLIGTSVVIILFILLLFFLLHLWYSNKKNAAVMDQEPAGNRTANSEDSDEQDPQEVTYAQLDHCVFTQRKITRPSQRPKTPPTDTILYTELPNAKPRSKVVSCP

SEQ ID NO: 43667 - protein, 455 aa, Homo sapiens; identical to SEQ ID NO: 43626
  Payload ID: 8970
  Gene Symbol: KIR3DL1
  Gene Name: killer cell immunoglobulin-like receptor, three domains, long cytoplasmic tail, 1
  ENSP ID: ENSP00000482675

SEQ ID NO: 43668 - protein, 444 aa, Homo sapiens
  Payload ID: 8970
  Gene Symbol: KIR3DL1
  Gene Name: killer cell immunoglobulin-like receptor, three domains, long cytoplasmic tail, 1
  ENSP ID: ENSP00000482930
MSLMVVSMACVGFFLVQRAGPHVGGQDKPFLSAWPSAVVPRGGHVTLRCHYRHRFNNFMLYKEDRIHVPIFHGRLFQESFNMSPVTTAHAGNYTCRGSHPHSPTGWSAPSNPVVIMVTGNHRKPSLLAHPGPLVKSGERVILQCWSDIMFEHFFLHKEGISKDPSRLVGQIHDGVSKANFSIGPMMLALAGTYRCYGSVTHTPYQLSAPSDPLDIVVTGPYEKPSLSAQPGPKVQAGESVTLSCSSRSSYDMYHLSREGGAHERRLPAVRKVNRTFQADFPLGPATHGGTYRCFGSFRHSPYEWSDPSDPLLVSVTGNPSSSWPSPTEPSSKSGNPRHLHVLIGTSVVIILFILLLFFLLHLWCSNKKNAAVMDQEPAGNRTANSEDSDEQDPQEVTYAQLDHCVFTQRKITRPSQRPKTPPTDTILYTELPNAKPRSKVVSCP

SEQ ID NO: 43669 - protein, 444 aa, Homo sapiens
  Payload ID: 8970
  Gene Symbol: KIR3DL1
  Gene Name: killer cell immunoglobulin-like receptor, three domains, long cytoplasmic tail, 1
  ENSP ID: ENSP00000483147
MSLMVVSMACVGFFLVQRAGPHVGGQDKPFLSAWPSAVVPRGGHVTLRCHYRHRFNNFMLYKEDRIHVPIFHGRLFQESFNMSPVTTAHAGNYTCRGSHPHSPTGWSAPSNPVVIMVTGNHRKPSLLAHPGPLVKSGERVILQCWSDIMFEHFFLHKEGISKDPSSLVGQIHDGVSKANFSIGPMMLALAGTYRCYGSVTHTPYQLSAPSDPLDIVVTGPYEKPSLSAQPGPKVQAGESVTLSCSSRSSYDMYHLSREGGAHERRLPAVRKVNRTFQADFPLGPATHGGTYRCFGSFRHSPYEWSDPSDPLLVSVTGNPSSSWPSPTEPSSKSGNPRHLHILIGTSVVIILFILLLFFLLHLWCSNKKNAAVMDQEPAGNRTANSEDSDEQDPQEVTYAQLDHCVFTQRKITRPSQRPKTPPTDTILYTELPNAKPRSKVVSCP

SEQ ID NO: 43670 - protein, 444 aa, Homo sapiens; identical to SEQ ID NO: 43642
  Payload ID: 8970
  Gene Symbol: KIR3DL1
  Gene Name: killer cell immunoglobulin-like receptor, three domains, long cytoplasmic tail, 1
  ENSP ID: ENSP00000483156

SEQ ID NO: 43671 - protein, 349 aa, Homo sapiens
  Payload ID: 8970
  Gene Symbol: KIR3DL1
  Gene Name: killer cell immunoglobulin-like receptor, three domains, long cytoplasmic tail, 1
  ENSP ID: ENSP00000483200
MLLMVVSMACVGFFLVQRAGPHVGNHRKPSLLAHPGPLVKSGERVILQCWSDIMFEHFFLHKEGISKDPSRLVGQIHDGVSKANFSIGPMMLALAGTYRCYGSVTHTPYQLSAPSDPLDIVVTGPYEKPSLSAQPGPKVQAGESVTLSCSSRSSYDMYHLSREGGAHERRLPAVRKVNRTFQADFPLGPATHGGTYRCFGSFRHSPYEWSDPSDPLLVSVTGNPSSSWPSPTEPSSKSGNPRHLHILIGTSVVIILFILLLFFLLHLWCSNKKNAAVMDQEPAGNRTANSEDSDEQDPQEVTYAQLDHCVFTQRKITRPSQRPKTPPTDTILYTELPNAKPRSKVVSCP

SEQ ID NO: 43672 - protein, 455 aa, Homo sapiens; identical to SEQ ID NO: 43626
  Payload ID: 8970
  Gene Symbol: KIR3DL1
  Gene Name: killer cell immunoglobulin-like receptor, three domains, long cytoplasmic tail, 1
  ENSP ID: ENSP00000483209

SEQ ID NO: 43673 - protein, 427 aa, Homo sapiens
  Payload ID: 8970
  Gene Symbol: KIR3DL1
  Gene Name: killer cell immunoglobulin-like receptor, three domains, long cytoplasmic tail, 1
  ENSP ID: ENSP00000483355
MSLMVVSMACVGLFLVQRAGPHMGGQDKPFLSAWPSAVVPRGGHVTLRCHYRHRFNNFMLYKEDRIHIPIFHGRIFQESFNMSPVTTAHAGNYTCRGSHPHSPTGWSAPSNPVVIMVTGNHRKPSLLAHPGPLVKSGERVILQCWSDIMFEHFFLHKEGISKDPSRLVGQIHDGVSKANFSIGPMMLALAGTYRCYGSVTHTSYQLSAPSDPLDIVVTGPYEKPSLSAQPGPKVQAGESVTLSCSSRSSYDMYHLSREGGAHERRLPAVRKVNRTFQADFPLGPATHGGTYRCFGSFRHSPYELSDPSDPLLVSVTGNPRHLHILIGTSVVIILFILLLFFLLHLWCSNKKNAAVMDQEPAGNRTANSEDSDEQDPEEVTYAQLDHCVFTQRKITRPSQRPKTPPTDTILYTELPNAKPRSKVVSCP

SEQ ID NO: 43674 - protein, 427 aa, Homo sapiens; identical to SEQ ID NO: 43673
  Payload ID: 8970
  Gene Symbol: KIR3DL1
  Gene Name: killer cell immunoglobulin-like receptor, three domains, long cytoplasmic tail, 1
  ENSP ID: ENSP00000483410

SEQ ID NO: 43675 - protein, 349 aa, Homo sapiens
  Payload ID: 8970
  Gene Symbol: KIR3DL1
  Gene Name: killer cell immunoglobulin-like receptor, three domains, long cytoplasmic tail, 1
  ENSP ID: ENSP00000483664
MLLMVVSMACVGFFLVQRAGPHVGNHRKPSLLAHPGPLVKSGERVILQCWSDIMFEHFFLHKEGISKDPSSLVGQIHDGVSKANFSIGPMMLALAGTYRCYGSVTHTPYQLSAPSDPLDIVVTGPYEKPSLSAQPGPKVQAGESVTLSCSSRSSYDMYHLSREGGAHERRLPAVRKVNRTFQADFPLGPATHGGTYRCFGSFRHSPYEWSDPSDPLLVSVTGNPSSSWPSPTEPSSKSGNPRHLHILIGTSVVIILFILLLFFLLHLWCSNKKNAAVMDQEPAGNRTANSEDSDEQDPQEVTYAQLDHCVFTQRKITRPSQRPKTPPTDTILYTELPNAKPRSKVVSCP

SEQ ID NO: 43676 - protein, 444 aa, Homo sapiens; identical to SEQ ID NO: 43631
  Payload ID: 8970
  Gene Symbol: KIR3DL1
  Gene Name: killer cell immunoglobulin-like receptor, three domains, long cytoplasmic tail, 1
  ENSP ID: ENSP00000483758

SEQ ID NO: 43677 - protein, 444 aa, Homo sapiens; identical to SEQ ID NO: 43666
  Payload ID: 8970
  Gene Symbol: KIR3DL1
  Gene Name: killer cell immunoglobulin-like receptor, three domains, long cytoplasmic tail, 1
  ENSP ID: ENSP00000483877

SEQ ID NO: 43678 - protein, 444 aa, Homo sapiens; identical to SEQ ID NO: 43639
  Payload ID: 8970
  Gene Symbol: KIR3DL1
  Gene Name: killer cell immunoglobulin-like receptor, three domains, long cytoplasmic tail, 1
  ENSP ID: ENSP00000483884

SEQ ID NO: 43679 - protein, 444 aa, Homo sapiens
  Payload ID: 8970
  Gene Symbol: KIR3DL1
  Gene Name: killer cell immunoglobulin-like receptor, three domains, long cytoplasmic tail, 1
  ENSP ID: ENSP00000483885
MLLMVVSMACVGFFLVQRAGPHVGGQDKPFLSAWPSAVVPRGGHVTLRCHYRHRFNNFMLYKEDRIHVPIFHGRLFQESFNMSPVTTAHAGNYTCRGSHPHSPTGWSAPSNPVVIMVTGNHRKPSLLAHPGPLVKSGERVILQCWSDIMFEHFFLHKEGISKDPSRLVGQIHDGVSKANFSIGPMMLALAGTYRCYGSVTHTPYQLSAPSDPLDIVVTGPYEKPSLSAQPGPKVQAGESVTLSCSSRSSYDMYHLSRERGAHERRLPAVRKVNRTFQADFPLGPATHGGTYRCFGSFRHSPYEWSDPSDPLLVSVTGNPSSSWPSPTEPSSKSGNPRHLHILIGTSVVIILFILLLFFLLHLWCSNKKNAAVMDQEPAGNRTANSEDSDEQDPEEVTYAQLDHCVFTQRKITRPSQRPKTPPTDTILYTELPNAKPRSKVVSCP

SEQ ID NO: 43680 - protein, 444 aa, Homo sapiens; identical to SEQ ID NO: 43625
  Payload ID: 8970
  Gene Symbol: KIR3DL1
  Gene Name: killer cell immunoglobulin-like receptor, three domains, long cytoplasmic tail, 1
  Uniprot ID: P43629
  ENSP ID: ENSP00000484036

SEQ ID NO: 43681 - protein, 455 aa, Homo sapiens; identical to SEQ ID NO: 43626
  Payload ID: 8970
  Gene Symbol: KIR3DL1
  Gene Name: killer cell immunoglobulin-like receptor, three domains, long cytoplasmic tail, 1
  ENSP ID: ENSP00000484124

SEQ ID NO: 43682 - protein, 455 aa, Homo sapiens
  Payload ID: 8970
  Gene Symbol: KIR3DL1
  Gene Name: killer cell immunoglobulin-like receptor, three domains, long cytoplasmic tail, 1
  ENSP ID: ENSP00000484233
MSLMVVSMACVGFFLLQGAWPHEGGQDKPFLSAWPSAVVPRGGHVTLRCHYRHRFNNFMLYKEDRIHVPIFHGRLFQESFNMSPVTTAHAGNYTCRGSHPHSPTGWSAPSNPVVIMVTGNHRKPSLLAHPGPLVKSGERVILQCWSDIMFEHFFLHKEGISKDPSRLVGQIHDGVSKANFSIGPMMLALAGTYRCYGSVTHTPYQLSAPSDPLDIVVTGPYEKPSLSAQPGPKVQAGESVTLSCSSRSSYDMYHLSREGGAHERRLPAVRKVNRTFQADFPLGPATHGGTYRCFGSFRHSPYEWSDPSDPLLVSVTGNPSSSWPSPTEPSSKSGNPRHLHVLIGTSVVIILFILLLFFLLHLWCSNKKNAAVMDQEPAGNRTANSEDSDEQDPQEVTYAQLDHCVFTQRKITRPSQRPKTPPTDTILYTELPNAKPRSKVVSCPRAPQSGLEGIF

SEQ ID NO: 43683 - protein, 427 aa, Homo sapiens; identical to SEQ ID NO: 43635
  Payload ID: 8970
  Gene Symbol: KIR3DL1
  Gene Name: killer cell immunoglobulin-like receptor, three domains, long cytoplasmic tail, 1
  ENSP ID: ENSP00000484234

SEQ ID NO: 43684 - protein, 444 aa, Homo sapiens; identical to SEQ ID NO: 43639
  Payload ID: 8970
  Gene Symbol: KIR3DL1
  Gene Name: killer cell immunoglobulin-like receptor, three domains, long cytoplasmic tail, 1
  ENSP ID: ENSP00000484292

SEQ ID NO: 43685 - protein, 427 aa, Homo sapiens; identical to SEQ ID NO: 43635
  Payload ID: 8970
  Gene Symbol: KIR3DL1
  Gene Name: killer cell immunoglobulin-like receptor, three domains, long cytoplasmic tail, 1
  ENSP ID: ENSP00000484314

SEQ ID NO: 43686 - protein, 427 aa, Homo sapiens
  Payload ID: 8970
  Gene Symbol: KIR3DL1
  Gene Name: killer cell immunoglobulin-like receptor, three domains, long cytoplasmic tail, 1
  ENSP ID: ENSP00000484350
MLLMVVSMACVGFFLVQRAGPHVGGQDKPFLSAWPSAVVPRGGHVTLRCHYHHRFNNFMLYKEDRIHVPIFHGRLFQESFNMSPVTTAHAGNYTCRGSHPHSPTGWSAPSNPVVIMVTGNHRKPSLLAHPGPLVKSGERVILQCWSDIMFEHFFLHKEGISKDPSRLVGQIHDGVSKANFSIGPMMLALAGTYRCYGSVTHTPYQLSAPSDPLDIVVTGPYEKPSLSAQPGPKVQAGESVTLSCSSRSSYDMYHLSREGGAHERRLPAVRKVNRTFQADFPLGPATHGGTYRCFGSFRHSPYEWSDPSDPLLVSVTGNPRHLHILIGTSVVIILFILLLFFLLHLWCSNKKNAAVMDQEPAGNRTANSEDSDEQDPEEVTYAQLDHCVFTQRKITRPSQRPKTPPTDTILYTELPNAKPRSKVVSCP

SEQ ID NO: 43687 - protein, 444 aa, Homo sapiens
  Payload ID: 8970
  Gene Symbol: KIR3DL1
  Gene Name: killer cell immunoglobulin-like receptor, three domains, long cytoplasmic tail, 1
  ENSP ID: ENSP00000484476
MSLMVVSMACVGFFLVQRAGPHVGGQDKPFLSAWPSAVVPRGGHVTLRCHYHHRFNNFMLYKEDRIHVPIFHGRLFQESFNMSPVTTAHAGNYTCRGSHPHSPTGWSAPSNPVVIMVTGNHRKPSLLAHPGPLVKSGERVILQCWSDIMFEHFFLHKEGISKDPSRLVGQIHDGVSKANFSIGPMMLALAGTYRCYGSVTHTPYQLSAPSDPLDIVVTGPYEKPSLSAQPGPKVQAGESVTLSCSSRSSYDMYHLSREGGAHERRLPAVRKVNRTFQADFPLGPATHGGTYRCFGSFRHSPYEWSDPSDPLLVSVTGNPSSSWPSPTEPSSKSGNPRHLHILIGTSVVIILFILLLFFLLHLWCSNKKNAAVMDQEPAGNRTANSEDSDEQDPEEVTYAQLDHCVFTQRKITRPSQRPKTPPTDTILYTELPNAKPRSKVVSCP

SEQ ID NO: 43688 - protein, 444 aa, Homo sapiens; identical to SEQ ID NO: 43625
  Payload ID: 8970
  Gene Symbol: KIR3DL1
  Gene Name: killer cell immunoglobulin-like receptor, three domains, long cytoplasmic tail, 1
  Uniprot ID: P43629
  ENSP ID: ENSP00000484488

SEQ ID NO: 43689 - protein, 444 aa, Homo sapiens
  Payload ID: 8970
  Gene Symbol: KIR3DL1
  Gene Name: killer cell immunoglobulin-like receptor, three domains, long cytoplasmic tail, 1
  ENSP ID: ENSP00000484661
MLLMVVSMACVGFFLVQRAGPHMGGQDKPFLSAWPSAVVPRGGHVTLRCHYRHRFNNFMLYKEDRIHVPIFHGRLFQESFNMSPVTTAHAGNYTCRGSHPHSPTGWSAPSNPVVIMVTGNHRKPSLLAHPGPLVKSGERVILQCWSDIMFEHFFLHKEGISKDPSRLVGQIHDGVSKANFSIGPMMLALAGTYRCYGSVTHTPYQLSAPSDPLDIVVTGPYEKPSLSAQPGPKVQAGESVTLSCSSRSSYDMYHLSREGGAHERRLPAVRKVNRTFQADFPLGPATHGGTYRCFGSFRHSPYEWSDPSDPLLVSVTGNPSSSWPSPTEPSSKSGNPRHLHILIGTSVVIILFILLLFFLLHLWCSNKKNAAVMDQEPAGNRTANSEDSDEQDPEEVTYAQLDHCVFTQRKITRPSQRPKTPPTDTILYTELPNAKPRSKVVSCP

SEQ ID NO: 43690 - protein, 455 aa, Homo sapiens; identical to SEQ ID NO: 43626
  Payload ID: 8970
  Gene Symbol: KIR3DL1
  Gene Name: killer cell immunoglobulin-like receptor, three domains, long cytoplasmic tail, 1
  ENSP ID: ENSP00000484957

SEQ ID NO: 43691 - protein, 444 aa, Homo sapiens; identical to SEQ ID NO: 43625
  Payload ID: 8970
  Gene Symbol: KIR3DL1
  Gene Name: killer cell immunoglobulin-like receptor, three domains, long cytoplasmic tail, 1
  Uniprot ID: P43629
  ENSP ID: ENSP00000484972

SEQ ID NO: 43692 - protein, 444 aa, Homo sapiens
  Payload ID: 8970
  Gene Symbol: KIR3DL1
  Gene Name: killer cell immunoglobulin-like receptor, three domains, long cytoplasmic tail, 1
  ENSP ID: ENSP00000484995
MSLMVVSMACVGFFLVQRAGPHVGGQDKPFLSAWPSAVVPRGGHVTLRCHYRHRFNNFMLYKEDRIHVPIFHGRLFQESFNMSPVTTAHAGNYTCRGSHPHSPTGWSAPSNPVVIMVTGNHRKPSLLAHPGPLVKSGERVILQCWSDIMFEHFFLHKEGISKDPSRLVGQIHDGVSKANFSIGPMMLALAGTYRCYGSVTHTPYQLSAPSDPLDIVVTGPYEKPSLSAQPGPKVQAGESVTLSCSSRSSYDMYHLSRERGAHERRLPAVRKVNRTFQADFPLGPATHGGTYRCFGSFRHSPYEWSDPSDPLLVSVTGNPSSSWPSPTEPSSKSGNPRHLHILIGTSVVIILFILLLFFLLHLWCSNKKNAAVMDQEPAGNRTANSEDSDEQDPEEVTYAQLDHCVFTQRKITRPSQRPKTPPTDTILYTELPNAKPRSKVVSCP

SEQ ID NO: 43693 - protein, 438 aa, Homo sapiens
  Payload ID: 8971
  Gene Symbol: KIR3DL2
  Gene Name: killer cell immunoglobulin-like receptor, three domains, long cytoplasmic tail, 2
  Uniprot ID: P43630
  ENSP ID: ENSP00000270442
MSLTVVSMACVGFFLLQGAWPLMGGQDKPFLSARPSTVVPRGGHVALQCHYRRGFNNFMLYKEDRSHVPIFHGRIFQESFIMGPVTPAHAGTYRCRGSRPHSLTGWSAPSNPLVIMVTGNHRKPSLLAHPGPLLKSGETVILQCWSDVMFEHFFLHREGISEDPSRLVGQIHDGVSKANFSIGPLMPVLAGTYRCYGSVPHSPYQLSAPSDPLDIVITGLYEKPSLSAQPGPTVQAGENVTLSCSSWSSYDIYHLSREGEAHERRLRAVPKVNRTFQADFPLGPATHGGTYRCFGSFRALPCVWSNSSDPLLVSVTGICRHLHVLIGTSVVIFLFILLLFFLLYRWCSNKKNAAVMDQEPAGDRTVNRQDSDEQDPQEVTYAQLDHCVFIQRKISRPSQRPKTPLTDTSVYTELPNAEPRSKVVSCPRAPQSGLEGVF

SEQ ID NO: 43694 - protein, 455 aa, Homo sapiens
  Payload ID: 8971
  Gene Symbol: KIR3DL2
  Gene Name: killer cell immunoglobulin-like receptor, three domains, long cytoplasmic tail, 2
  Uniprot ID: P43630
  ENSP ID: ENSP00000325525
MSLTVVSMACVGFFLLQGAWPLMGGQDKPFLSARPSTVVPRGGHVALQCHYRRGFNNFMLYKEDRSHVPIFHGRIFQESFIMGPVTPAHAGTYRCRGSRPHSLTGWSAPSNPLVIMVTGNHRKPSLLAHPGPLLKSGETVILQCWSDVMFEHFFLHREGISEDPSRLVGQIHDGVSKANFSIGPLMPVLAGTYRCYGSVPHSPYQLSAPSDPLDIVITGLYEKPSLSAQPGPTVQAGENVTLSCSSWSSYDIYHLSREGEAHERRLRAVPKVNRTFQADFPLGPATHGGTYRCFGSFRALPCVWSNSSDPLLVSVTGNPSSSWPSPTEPSSKSGICRHLHVLIGTSVVIFLFILLLFFLLYRWCSNKKNAAVMDQEPAGDRTVNRQDSDEQDPQEVTYAQLDHCVFIQRKISRPSQRPKTPLTDTSVYTELPNAEPRSKVVSCPRAPQSGLEGVF

SEQ ID NO: 43695 - protein, 455 aa, Homo sapiens; identical to SEQ ID NO: 43694
  Payload ID: 8971
  Gene Symbol: KIR3DL2
  Gene Name: killer cell immunoglobulin-like receptor, three domains, long cytoplasmic tail, 2
  Uniprot ID: P43630
  ENSP ID: ENSP00000477516

SEQ ID NO: 43696 - protein, 455 aa, Homo sapiens
  Payload ID: 8971
  Gene Symbol: KIR3DL2
  Gene Name: killer cell immunoglobulin-like receptor, three domains, long cytoplasmic tail, 2
  Uniprot ID: P43630
  ENSP ID: ENSP00000477519
MSLTVVSMACVGFFLLQGAWPLMGGQDKPFLSARPSTVVPRGGHVALQCHYRRGFNNFMLYKEDRSHVPIFHGRIFQESFIMGPVTPAHAGTYRCRGSRPHSLTGWSAPSNPLVIMVTGNHRKPSLLAHPGPLLKSGETVILQCWSDVMFEHFFLHRDGISEDPSRLVGQIHDGVSKANFSIGPLMPVLAGTYRCYGSVPHSPYQLSAPSDPLDIVITGLYEKPSLSAQPGPTVQAGENVTLSCSSWSSYDIYHLSREGEAHERRLRAVPKVNRTFQADFPLGPATHGGTYRCFGSFRALPCVWSNSSDPLLVSVTGNPSSSWPSPTEPSSKSGICRHLHVLIGTSVVIFLFILLLFFLLYRWCSNKKNAAVMDQEPAGDRTVNRQDSDEQDPQEVTYAQLDHCVFIQRKISRPSQRPKTPLTDTSVYTELPNAEPRSKVVSCPRAPQSGLEGVF

SEQ ID NO: 43697 - protein, 438 aa, Homo sapiens
  Payload ID: 8971
  Gene Symbol: KIR3DL2
  Gene Name: killer cell immunoglobulin-like receptor, three domains, long cytoplasmic tail, 2
  ENSP ID: ENSP00000477550
MSLTVVSMACVGFFLLQGAWPLMGGQDKPFLSAWPSTVVPRGGHVALQCHYRRGFNNFMLYKEDRSHVPIFHGRIFQESFIMGPVTPAHAGTYRCRGSRPHSLTGWSAPSNPLVIMVTGNHRKPSLLAHPGPLLKSGETVILQCWSDVMFEHFFLHREGISEDPSRLVGQIHDGVSKANFSIGPLMPVLAGTYRCYGSVPHSPYQLSAPSDPLDIVITGLYEKPSLSAQPGPTVQAGENVTLSCSSWSSYDIYHLSREGEAHERRLRAVPKVNRTFQADFPLGPATHGGTYRCFGSFRALPCVWSNSSDPLLVSVTGICRHLHVLIGTSVVIFLFILLLFFLLYRWCSNKKNAAVMDQEPAGDRTVNRQDSDEQDPQEVTYAQLDHCVFIQRKISRPSQRPKTPLTDTSVYTELPNAEPRSKVVSCPRAPQSGLEGVF

SEQ ID NO: 43698 - protein, 455 aa, Homo sapiens
  Payload ID: 8971
  Gene Symbol: KIR3DL2
  Gene Name: killer cell immunoglobulin-like receptor, three domains, long cytoplasmic tail, 2
  ENSP ID: ENSP00000477628
MSLTVVSMACVGFFLLQGAWPLMGGQDKPFLSARPSTVVPRGGHVALQCHYRRGFNNFMLYKEDRSHVPIFHGRIFQESFIMGPVTPAHAGTYRCRGSRPHSLTGWSTPSNPLVIMVTGNHRKPSLLAHPGPLLKSGETVILQCWSDVMFEHFFLHREGISEDPSRLVGQIHDGVSKANFSIGPLMPVLAGTYRCYGSVPHSPYQLSAPSDPLDIVITGLYEKPSLSAQPGPTVQAGENVTLSCSSWSSYDIYHLSREGEAHERRLRAVPKVNRTFQADFPLGPATHGGTYRCFGSFRALPCVWSNSSDPLLVSVTGNPSSSWPSPTEPSSKSGICRHLHVLIGTSVVIFLFILLLFFLLYRWCSNKKNAAVMDQEPAGDRTVNRQDSDEQDPQEVMYAQLDHCVFIQRKISRPSQRPKTPLTDTSVYTELPNAEPRSKVVSCPRAPQSGLEGVF

SEQ ID NO: 43699 - protein, 455 aa, Homo sapiens
  Payload ID: 8971
  Gene Symbol: KIR3DL2
  Gene Name: killer cell immunoglobulin-like receptor, three domains, long cytoplasmic tail, 2
  ENSP ID: ENSP00000477666
MSLTVVSMACVGFFLLQGAWPLMGGQDKPFLSARPSTVVPRGGHVALQCHYRRGFNNFMLYKEDRSHVPIFHGRIFQESFIMGPVTPAHAGTYRCRGSRPHSLTGWSTPSNPLVIMVTGNHRKPSLLAHPGPLLKSGETVILQCWSDVMFEHFFLHREGISEDPSRLVGQIHDGVSKANFSIGPLMPVLAGTYRCYGSVPHSPYQLSAPSDPLDIVITGLYEKPSLSAQPGPTVQAGENVTLSCSSWSSYDIYHLSRGGEAHERRLRAVPKVNRTFQADFPLGPATHGGTYRCFGSFRALPCVWSNSSDPLLVSVTGNPSSSWPSPTEPSSKSGICRHLHVLIGTSVVIFLFILLLFFLLYRWCSNKKNAAVMDQEPAGDRTVNRQDSDEQDPQEVMYAQLDHCVFIQRKISRPSQRPKTPLTDTSVYTELPNAEPRSKVVSCPRAPQSGLEGVF

SEQ ID NO: 43700 - protein, 455 aa, Homo sapiens; identical to SEQ ID NO: 43699
  Payload ID: 8971
  Gene Symbol: KIR3DL2
  Gene Name: killer cell immunoglobulin-like receptor, three domains, long cytoplasmic tail, 2
  ENSP ID: ENSP00000477702

SEQ ID NO: 43701 - protein, 438 aa, Homo sapiens
  Payload ID: 8971
  Gene Symbol: KIR3DL2
  Gene Name: killer cell immunoglobulin-like receptor, three domains, long cytoplasmic tail, 2
  ENSP ID: ENSP00000477889
MSLTVVSMACVGFFLLQGAWPLMGGQDKPFLSARPSTVVPRGGHVALQCHYRRGFNNFMLYKEDRSHVPIFHGRIFQESFIMGPVTPAHAGTYRCRGSRPHSLTGWSAPSNPLVIMVTGNHRKPSLLAHPGPLLKSGETVILQCWSDVMFEHFFLHRDGISEDPSRLVGQIHDGVSKANFSIGPLMPVLAGTYRCYGSVPHSPYQLSAPSDPLDIVITGLYEKPSLSAQPGPTVQAGENVTLSCSSWSSYDIYHLSREGEAHERRLRAVPKVNRTFQADFPLGPATHGGTYRCFGSFRALPCVWSNSSDPLLVSVTGICRHLHVLIGTSVVIFLFILLLFFLLYRWCSNKKNAAVMDQEPAGDRTVNRQDSDEQDPQEVTYAQLDHCVFIQRKISRPSQRPKTPLTDTSVYTELPNAEPRSKVVSCPRAPQSGLEGVF

SEQ ID NO: 43702 - protein, 438 aa, Homo sapiens; identical to SEQ ID NO: 43701
  Payload ID: 8971
  Gene Symbol: KIR3DL2
  Gene Name: killer cell immunoglobulin-like receptor, three domains, long cytoplasmic tail, 2
  ENSP ID: ENSP00000477965

SEQ ID NO: 43703 - protein, 455 aa, Homo sapiens
  Payload ID: 8971
  Gene Symbol: KIR3DL2
  Gene Name: killer cell immunoglobulin-like receptor, three domains, long cytoplasmic tail, 2
  ENSP ID: ENSP00000477978
MSLTVVSMACVGFFLLQGAWPLMGGQDKPFLSARPSTVVPRGGHVALQCHYRRGFNNFMLYKEDRSHVPIFHGRIFQESFIMGPVTPAHAGTYRCRGSRPHSLTGWSAPSNPLVIMVTGNHRKPSLLAHPGPLLKSGETVILQCWSDIMFEHFFLHREGISEDPSRLVGQIHDGVSKANFSIGPLMPVLAGTYRCYGSVPHSPYQLSAPSDPLDIVITGLYEKPSLSAQPGPTVQAGENVTLSCSSWSSYDIYHLSREGEAHERRLRAVPKVNRTFQADFPLGPATHGGTYRCFGSFRALPCVWSNSSDPLLVSVTGNPSSSWPSPTEPSSKSGICRHLHVLIGTSVVIFLFILLLFFLLYRWCSNKKNAAVMDQEPAGDRTVNRQDSDEQDPQEVTYAQLDHCVFIQRKISRPSQRPKTPLTDTSVYTELPNAEPRSKVVSCPRAPQSGLEGVF

SEQ ID NO: 43704 - protein, 438 aa, Homo sapiens
  Payload ID: 8971
  Gene Symbol: KIR3DL2
  Gene Name: killer cell immunoglobulin-like receptor, three domains, long cytoplasmic tail, 2
  ENSP ID: ENSP00000478100
MSLTVVSMACVGFFLLQGAWPLMGGQDKPFLSARPSTVVPRGGHVALQCHYRRGFNNFMLYKEDRSHVPIFHGRIFQESFIMGPVTPAHAGTYRCRGSRPHSLTGWSTPSNPLVIMVTGNHRKPSLLAHPGPLLKSGETVILQCWSDVMFEHFFLHREGISEDPSRLVGQIHDGVSKANFSIGPLMPVLAGTYRCYGSVPHSPYQLSAPSDPLDIVITGLYEKPSLSAQPGPTVQAGENVTLSCSSWSSYDIYHLSREGEAHERRLRAVPKVNRTFQADFPLGPATHGGTYRCFGSFRALPCVWSNSSDPLLVSVTGICRHLHVLIGTSVVIFLFILLLFFLLYRWCSNKKNAAVMDQEPAGDRTVNRQDSDEQDPQEVMYAQLDHCVFIQRKISRPSQRPKTPLTDTSVYTELPNAEPRSKVVSCPRAPQSGLEGVF

SEQ ID NO: 43705 - protein, 438 aa, Homo sapiens
  Payload ID: 8971
  Gene Symbol: KIR3DL2
  Gene Name: killer cell immunoglobulin-like receptor, three domains, long cytoplasmic tail, 2
  ENSP ID: ENSP00000478140
MSLTVVSMACVGFFLLQGAWPLMGGQDKPFLSARPSTVVPRGGHVALQCHYRRGFNNFMLYKEDRSHVPIFHGRIFQESFIMGPVTPAHAGTYRCRGSRPHSLTGWSAPSNPLVIMVTGNHRKPSLLAHPGPLLKSGETVILQCWSDVMFEHFFLHREGISEDPSRLVGQIHDGVSKANFSIGPLMPVLAGTYRCYGSVPHSPYQLSAPSDPLDIVITGLYEKPSLSAQPGPTVQAGENVTLSCSSWSSYDIYHLSREGEAHERRLRAVPKVNRTFQADFPLGPATHGGTYRCFGSFHALPCVWSNSSDPLLVSVTGICRHLHVLIGTSVVIFLFILLLFFLLYRWCSNKKNAAVMDQEPAGDRTVNRQDSDEQDPQEVTYAQLDHCVFIQRKISRPSQRPKTPLTDTSVYTELPNAEPRSKVVSCPRAPQSGLEGVF

SEQ ID NO: 43706 - protein, 455 aa, Homo sapiens; identical to SEQ ID NO: 43696
  Payload ID: 8971
  Gene Symbol: KIR3DL2
  Gene Name: killer cell immunoglobulin-like receptor, three domains, long cytoplasmic tail, 2
  Uniprot ID: P43630
  ENSP ID: ENSP00000478251

SEQ ID NO: 43707 - protein, 455 aa, Homo sapiens
  Payload ID: 8971
  Gene Symbol: KIR3DL2
  Gene Name: killer cell immunoglobulin-like receptor, three domains, long cytoplasmic tail, 2
  ENSP ID: ENSP00000478268
MSLTVVSMACVGFFLLQGAWPLMGGQDKPFLSARPSTVVPRGGHVALQCHYRRGFNNFMLYKEDRSHVPIFHGRIFQESFIMGPVTPAHAGTYRCRGSRPHSLTGWSAPSNPLVIMVTGNHRKPSLLAHPGPLLKSGETVILQCWSDVMFEHFFLHREGISEDPSHLVGQIHDGVSKANFSIGPLMPVLAGTYRCYGSVPHSPYQLSAPSDPLDIVITGLYEKPSLSAQPGPTVQAGENVTLSCSSWSSYDIYHLSREGEAHERRLRAVPKVNRTFQADFPLGPATHGGTYRCFGSFRALPCVWSNSSDPLLVSVTGNPSSSWPSPTEPSSKSGICRHLHVLIGTSVVIFLFILLLFFLLYRWCSNKKNAAVMDQEPAGDRTVNRQDSDEQDPQEVTYAQLDHCVFIQRKISRPSQRPKTPLTDTSVYTELPNAEPRSKVVSCPRAPQSGLEGVF

SEQ ID NO: 43708 - protein, 438 aa, Homo sapiens; identical to SEQ ID NO: 43704
  Payload ID: 8971
  Gene Symbol: KIR3DL2
  Gene Name: killer cell immunoglobulin-like receptor, three domains, long cytoplasmic tail, 2
  ENSP ID: ENSP00000478472

SEQ ID NO: 43709 - protein, 438 aa, Homo sapiens
  Payload ID: 8971
  Gene Symbol: KIR3DL2
  Gene Name: killer cell immunoglobulin-like receptor, three domains, long cytoplasmic tail, 2
  ENSP ID: ENSP00000478587
MSLTVVSMACVGFFLLQGAWPLMGGQDKPFLSARPSTVVPRGGHVALQCHYRRGFNNFMLYKEDRSHVPIFHGRIFQESFIMGPVTPAHAGTYRCRGSRPHSLTGWSAPSNPLVIMVTGNHRKPSLLAHPGPLLKSGETVILQCWSDVMFEHFFLHREGISEDPSRLVGQIHDGVSKANFSIGPLMPVLAGTYRCYGSVPHSPYQLSAPSDPLDIVITGLYEKPSLSAQPGPTVQAGENVTLSCSSWSSYDIYHLSREGEAHERRLRAVPKVNRTFQADFPLGPATHGGTYRCFGSFRALPCVWSNSSDPLLVSVTGICRHLHVLIGTSVVIFLFILLLFFLLYRWCSNKKNAAVMDQEPAGDRTVNRQDSDEQDPQEVMYAQLDHCVFIQRKISRPSQRPKTPLTDTSVYTELPNAEPRSKVVSCPRAPQSGLEGVF

SEQ ID NO: 43710 - protein, 455 aa, Homo sapiens
  Payload ID: 8971
  Gene Symbol: KIR3DL2
  Gene Name: killer cell immunoglobulin-like receptor, three domains, long cytoplasmic tail, 2
  ENSP ID: ENSP00000478836
MSLTVVSMACVGFFLLQGAWPLMGGQDKPFLSARPSTVVPRGGHVALQCHYRRGFNNFMLYKEDRSHVPIFHGRIFQESFIMGPVTPAHAGTYRCRGSRPHSLTGWSTPSNPLVIMVTGNHRKPSLLAHPGPLLKSGETVILQCWSDVMFEHFFLHREGISEDPSRLVGQIHDGVSKANFSIGPLMPVLAGTYRCYGSVPHSPYQLSAPSDPLDIVITGLYEKPSLSAQPGPTVQAGENVTLSCSSWSSYDIYHLSREGEAHERRLRAVPKVNRTFQADFPLGPATHGGTYRCFGSFRDLPCVWSNSSDPLLVSVTGNPSSSWPSPTEPSSKSGICRHLHVLIGTSVVIFLFILLLFFLLYRWCSNKKNAAVMDQEPAGDRTVNRQDSDEQDPQEVMYAQLDHCVFIQRKISRPSQRPKTPLTDTSVYTELPNAEPRSKVVSCPRAPQSGLEGVF

SEQ ID NO: 43711 - protein, 455 aa, Homo sapiens; identical to SEQ ID NO: 43696
  Payload ID: 8971
  Gene Symbol: KIR3DL2
  Gene Name: killer cell immunoglobulin-like receptor, three domains, long cytoplasmic tail, 2
  Uniprot ID: P43630
  ENSP ID: ENSP00000479299

SEQ ID NO: 43712 - protein, 438 aa, Homo sapiens
  Payload ID: 8971
  Gene Symbol: KIR3DL2
  Gene Name: killer cell immunoglobulin-like receptor, three domains, long cytoplasmic tail, 2
  ENSP ID: ENSP00000479302
MSLTVVSMACVGFFLLQGAWPLMGGQDKPFLSARPSTVVPRGGHVALQCHYRRGFNNFMLYKEDRSHVPIFHGRIFQESFIMGPVTPAHAGTYRCRGSRPHSLTGWSAPSNPVVIMVTGNHRKPSLLAHPGPLLKSGETVILQCWSDVMFEHFFLHREGISEDPSHLVGQIHDGVSKANFSIGPLMPVLAGTYRCYGSVPHSPYQLSAPSDPLDIVITGLYEKPSLSAQPGPTVQAGENVTLSCSSWSSYDIYHLSREGEAHERRLRAVPKVNRTFQADFPLGPATHGGTYRCFGSFRALPCVWSNSSDPLLVSVTGICRHLHVLIGTSVVIFLFILLLFFLLYRWCSNKKNAAVMDQEPAGDRTVNRQDSDEQDPQEVTYAQLDHCVFIQRKISRPSQRPKTPLTDTSVYTELPNAEPRSKVVSCPRAPQSGLEGVF

SEQ ID NO: 43713 - protein, 455 aa, Homo sapiens [sequence omitted]

SEQ ID NO: 43714 - protein, 438 aa, Homo sapiens; identical to SEQ ID NO: 43704
  Payload ID: 8971
  Gene Symbol: KIR3DL2
  Gene Name: killer cell immunoglobulin-like receptor, three domains, long cytoplasmic tail, 2
  ENSP ID: ENSP00000479475

SEQ ID NO: 43715 - protein, 438 aa, Homo sapiens; identical to SEQ ID NO: 43701
  Payload ID: 8971
  Gene Symbol: KIR3DL2
  Gene Name: killer cell immunoglobulin-like receptor, three domains, long cytoplasmic tail, 2
  ENSP ID: ENSP00000479519

SEQ ID NO: 43716 - protein, 455 aa, Homo sapiens
  Payload ID: 8971
  Gene Symbol: KIR3DL2
  Gene Name: killer cell immunoglobulin-like receptor, three domains, long cytoplasmic tail, 2
  ENSP ID: ENSP00000479746
MSLTVVSMACVGFFLLQGAWPLMGGQDKPFLSAWPSTVVPRGGHVALQCHYRRGFNNFMLYKEDRSHVPIFHGRIFQESFIMGPVTPAHAGTYRCRGSRPHSLTGWSAPSNPLVIMVTGNHRKPSLLAHPGPLLKSGETVILQCWSDVMFEHFFLHREGISEDPSRLVGQIHDGVSKANFSIGPLMPVLAGTYRCYGSVPHSPYQLSAPSDPLDIVITGLYEKPSLSAQPGPTVQAGENVTLSCSSWSSYDIYHLSREGEAHERRLRAVPKVNRTFQADFPLGPATHGGTYRCFGSFRALPCVWSNSSDPLLVSVTGNPSSSWPSPTEPSSKSGICRHLHVLIGTSVVIFLFILLLFFLLYRWCSNKKNAAVMDQEPAGDRTVNRQDSDEQDPQEVTYAQLDHCVFIQRKISRPSQRPKTPLTDTSVYTELPNAEPRSKVVSCPRAPQSGLEGVF

SEQ ID NO: 43717 - protein, 455 aa, Homo sapiens; identical to SEQ ID NO: 43694
  Payload ID: 8971
  Gene Symbol: KIR3DL2
  Gene Name: killer cell immunoglobulin-like receptor, three domains, long cytoplasmic tail, 2
  Uniprot ID: P43630
  ENSP ID: ENSP00000479772

SEQ ID NO: 43718 - protein, 438 aa, Homo sapiens; identical to SEQ ID NO: 43701
  Payload ID: 8971
  Gene Symbol: KIR3DL2
  Gene Name: killer cell immunoglobulin-like receptor, three domains, long cytoplasmic tail, 2
  ENSP ID: ENSP00000479868

SEQ ID NO: 43719 - protein, 455 aa, Homo sapiens; identical to SEQ ID NO: 43694
  Payload ID: 8971
  Gene Symbol: KIR3DL2
  Gene Name: killer cell immunoglobulin-like receptor, three domains, long cytoplasmic tail, 2
  Uniprot ID: P43630
  ENSP ID: ENSP00000479903

SEQ ID NO: 43720 - protein, 438 aa, Homo sapiens; identical to SEQ ID NO: 43701
  Payload ID: 8971
  Gene Symbol: KIR3DL2
  Gene Name: killer cell immunoglobulin-like receptor, three domains, long cytoplasmic tail, 2
  ENSP ID: ENSP00000480098

SEQ ID NO: 43721 - protein, 438 aa, Homo sapiens
  Payload ID: 8971
  Gene Symbol: KIR3DL2
  Gene Name: killer cell immunoglobulin-like receptor, three domains, long cytoplasmic tail, 2
  ENSP ID: ENSP00000480168
MSLTVVSMACVGFFLLQGAWPLMGGQDKPFLSARPSTVVPRGGHVALQCHYRRGFNNFMLYKEDRSHVPIFHGRIFQESFIMGPVTPAHAGTYRCRGSRPHSLTGWSTPSNPLVIMVTGNHRKPSLLAHPGPLLKSGETVILQCWSDVMFEHFFLHREGISEDPSRLVGQIHDGVSKANFSIGPLMPVLAGTYRCYGSVPHSPYQLSAPSDPLDIVITGLYEKPSLSAQPGPTVQAGENVTLSCSSWSSYDIYHLSRGGEAHERRLRAVPKVNRTFQADFPLGPATHGGTYRCFGSFRALPCVWSNSSDPLLVSVTGICRHLHVLIGTSVVIFLFILLLFFLLYRWCSNKKNAAVMDQEPAGDRTVNRQDSDEQDPQEVMYAQLDHCVFIQRKISRPSQRPKTPLTDTSVYTELPNAEPRSKVVSCPRAPQSGLEGVF

SEQ ID NO: 43722 - protein, 438 aa, Homo sapiens; identical to SEQ ID NO: 43693
  Payload ID: 8971
  Gene Symbol: KIR3DL2
  Gene Name: killer cell immunoglobulin-like receptor, three domains, long cytoplasmic tail, 2
  Uniprot ID: P43630
  ENSP ID: ENSP00000480578

SEQ ID NO: 43723 - protein, 438 aa, Homo sapiens; identical to SEQ ID NO: 43704
  Payload ID: 8971
  Gene Symbol: KIR3DL2
  Gene Name: killer cell immunoglobulin-like receptor, three domains, long cytoplasmic tail, 2
  ENSP ID: ENSP00000480595

SEQ ID NO: 43724 - protein, 438 aa, Homo sapiens
  Payload ID: 8971
  Gene Symbol: KIR3DL2
  Gene Name: killer cell immunoglobulin-like receptor, three domains, long cytoplasmic tail, 2
  ENSP ID: ENSP00000480628
MSLTVVSMACVGFFLLQGAWPLMGGQDKPFLSARPSTVVPRGGHVALQCHYRRGFNNFMLYKEDRSHVPIFHGRIFQESFIMGPVTPAHAGTYRCRGSRPHSLTGWSAPSNPLVIMVTGNHRKPSLLAHPGPLLKSGETVILQCWSDIMFEHFFLHREGISEDPSRLVGQIHDGVSKANFSIGPLMPVLAGTYRCYGSVPHSPYQLSAPSDPLDIVITGLYEKPSLSAQPGPTVQAGENVTLSCSSWSSYDIYHLSREGEAHERRLRAVPKVNRTFQADFPLGPATHGGTYRCFGSFRALPCVWSNSSDPLLVSVTGICRHLHVLIGTSVVIFLFILLLFFLLYRWCSNKKNAAVMDQEPAGDRTVNRQDSDEQDPQEVTYAQLDHCVFIQRKISRPSQRPKTPLTDTSVYTELPNAEPRSKVVSCPRAPQSGLEGVF

SEQ ID NO: 43725 - protein, 455 aa, Homo sapiens; identical to SEQ ID NO: 43698
  Payload ID: 8971
  Gene Symbol: KIR3DL2
  Gene Name: killer cell immunoglobulin-like receptor, three domains, long cytoplasmic tail, 2
  ENSP ID: ENSP00000480737

SEQ ID NO: 43726 - protein, 118 aa, Homo sapiens
  Payload ID: 8971
  Gene Symbol: KIR3DL2
  Gene Name: killer cell immunoglobulin-like receptor, three domains, long cytoplasmic tail, 2
  ENSP ID: ENSP00000480896
MSLTVVSMACVGFFLLQGAWPLMGGQDKPFLSARPSTVVPRGGHVALQCHYRRGFNNFMLYKEDRSHVPIFHGRIFQESFIMGPVTPAHAGTYRCRGSRPHSLTGWSTPSNPLVIMVT

SEQ ID NO: 43727 - protein, 222 aa, Homo sapiens
  Payload ID: 8971
  Gene Symbol: KIR3DL2
  Gene Name: killer cell immunoglobulin-like receptor, three domains, long cytoplasmic tail, 2
  ENSP ID: ENSP00000480951
MSLTVVSMACVGFFLLQGAWPLMGNHRKPSLLAHPGPLLKSGETVILQCWSDVMFEHFFLHREGISEDPSRLVGQIHDGVSKANFSIGPLMPVLAGTYRCYGSVPHSPYQLSAPSDPLDIVITGLYEKPSLSAQPGPTVQAGENVTLSCSSWSSYDIYHLSREGEAHERRLRAVPKVNRTFQADFPLGPATHGGTYRCFGSFRALPCVWSNSSDPLLVSVTG

SEQ ID NO: 43728 - protein, 455 aa, Homo sapiens; identical to SEQ ID NO: 43698
  Payload ID: 8971
  Gene Symbol: KIR3DL2
  Gene Name: killer cell immunoglobulin-like receptor, three domains, long cytoplasmic tail, 2
  ENSP ID: ENSP00000481193

SEQ ID NO: 43729 - protein, 455 aa, Homo sapiens; identical to SEQ ID NO: 43696
  Payload ID: 8971
  Gene Symbol: KIR3DL2
  Gene Name: killer cell immunoglobulin-like receptor, three domains, long cytoplasmic tail, 2
  Uniprot ID: P43630
  ENSP ID: ENSP00000481209

SEQ ID NO: 43730 - protein, 438 aa, Homo sapiens; identical to SEQ ID NO: 43693
  Payload ID: 8971
  Gene Symbol: KIR3DL2
  Gene Name: killer cell immunoglobulin-like receptor, three domains, long cytoplasmic tail, 2
  Uniprot ID: P43630
  ENSP ID: ENSP00000481306

SEQ ID NO: 43731 - protein, 438 aa, Homo sapiens; identical to SEQ ID NO: 43701
  Payload ID: 8971
  Gene Symbol: KIR3DL2
  Gene Name: killer cell immunoglobulin-like receptor, three domains, long cytoplasmic tail, 2
  ENSP ID: ENSP00000481311

SEQ ID NO: 43732 - protein, 455 aa, Homo sapiens; identical to SEQ ID NO: 43694
  Payload ID: 8971
  Gene Symbol: KIR3DL2
  Gene Name: killer cell immunoglobulin-like receptor, three domains, long cytoplasmic tail, 2
  Uniprot ID: P43630
  ENSP ID: ENSP00000481579

SEQ ID NO: 43733 - protein, 455 aa, Homo sapiens; identical to SEQ ID NO: 43696
  Payload ID: 8971
  Gene Symbol: KIR3DL2
  Gene Name: killer cell immunoglobulin-like receptor, three domains, long cytoplasmic tail, 2
  Uniprot ID: P43630
  ENSP ID: ENSP00000481662

SEQ ID NO: 43734 - protein, 438 aa, Homo sapiens
  Payload ID: 8971
  Gene Symbol: KIR3DL2
  Gene Name: killer cell immunoglobulin-like receptor, three domains, long cytoplasmic tail, 2
  ENSP ID: ENSP00000481788
MSLTVVSMACVGFFLLQGAWPLMGGQDKPFLSARPSTVVPRGGHVALQCHYRRGFNNFMLYKEDRSHVPIFHGRIFQESFIMGPVTPAHAGTYRCRGSRPHSLTGWSTPSNPLVIMVTGNHRKPSLLAHPGPLLKSGETVILQCWSDVMFEHFFLHREGISEDPSRLVGQIHDGVSKANFSIGPLMPVLAGTYRCYGSVPHSPYQLSAPSDPLDIVITGLYEKPSLSAQPGPTVQAGENVTLSCSSWSSYDIYHLSREGEAHERRLRAVPKVNRTFQADFPLGPATHGGTYRCFGSFRDLPCVWSNSSDPLLVSVTGICRHLHVLIGTSVVIFLFILLLFFLLYRWCSNKKNAAVMDQEPAGDRTVNRQDSDEQDPQEVMYAQLDHCVFIQRKISRPSQRPKTPLTDTSVYTELPNAEPRSKVVSCPRAPQSGLEGVF

SEQ ID NO: 43735 - protein, 438 aa, Homo sapiens; identical to SEQ ID NO: 43704
  Payload ID: 8971
  Gene Symbol: KIR3DL2
  Gene Name: killer cell immunoglobulin-like receptor, three domains, long cytoplasmic tail, 2
  ENSP ID: ENSP00000481845

SEQ ID NO: 43736 - protein, 438 aa, Homo sapiens; identical to SEQ ID NO: 43693
  Payload ID: 8971
  Gene Symbol: KIR3DL2
  Gene Name: killer cell immunoglobulin-like receptor, three domains, long cytoplasmic tail, 2
  Uniprot ID: P43630
  ENSP ID: ENSP00000481871

SEQ ID NO: 43737 - protein, 455 aa, Homo sapiens
  Payload ID: 8971
  Gene Symbol: KIR3DL2
  Gene Name: killer cell immunoglobulin-like receptor, three domains, long cytoplasmic tail, 2
  ENSP ID: ENSP00000481911
MSLTVVSMACVGFFLLQGAWPLMGGQDKPFLSARPSTVVPRGGHVALQCHYRRGFNNFMLYKEDRSHVPIFHGRIFQESFIMGPVTPAHAGTYRCRGSRPHSLTGWSAPSNPLVIMVTGNHRKPSLLAHPGPLLKSGETVILQCWSDVMFEHFFLHREGISEDPSRLVGQIHDGVSKANFSIGPLMPVLAGTYRCYGSVPHSPYQLSAPSDPLDIVITGLYEKPSLSAQPGPTVQAGENVTLSCSSWSSYDIYHLSREGEAHERRLRAVPKVNRTFQADFPLGPATHGGTYRCFGSFHALPCVWSNSSDPLLVSVTGNPSSSWPSPTEPSSKSGICRHLHVLIGTSVVIFLFILLLFFLLYRWCSNKKNAAVMDQEPAGDRTVNRQDSDEQDPQEVTYAQLDHCVFIQRKISRPSQRPKTPLTDTSVYTELPNAEPRSKVVSCPRAPQSGLEGVF

SEQ ID NO: 43738 - protein, 455 aa, Homo sapiens; identical to SEQ ID NO: 43694
  Payload ID: 8971
  Gene Symbol: KIR3DL2
  Gene Name: killer cell immunoglobulin-like receptor, three domains, long cytoplasmic tail, 2
  Uniprot ID: P43630
  ENSP ID: ENSP00000482110

SEQ ID NO: 43739 - protein, 455 aa, Homo sapiens; identical to SEQ ID NO: 43696
  Payload ID: 8971
  Gene Symbol: KIR3DL2
  Gene Name: killer cell immunoglobulin-like receptor, three domains, long cytoplasmic tail, 2
  Uniprot ID: P43630
  ENSP ID: ENSP00000482301

SEQ ID NO: 43740 - protein, 455 aa, Homo sapiens; identical to SEQ ID NO: 43696
  Payload ID: 8971
  Gene Symbol: KIR3DL2
  Gene Name: killer cell immunoglobulin-like receptor, three domains, long cytoplasmic tail, 2
  Uniprot ID: P43630
  ENSP ID: ENSP00000482565

SEQ ID NO: 43741 - protein, 438 aa, Homo sapiens; identical to SEQ ID NO: 43693
  Payload ID: 8971
  Gene Symbol: KIR3DL2
  Gene Name: killer cell immunoglobulin-like receptor, three domains, long cytoplasmic tail, 2
  Uniprot ID: P43630
  ENSP ID: ENSP00000482589

SEQ ID NO: 43742 - protein, 438 aa, Homo sapiens; identical to SEQ ID NO: 43693
  Payload ID: 8971
  Gene Symbol: KIR3DL2
  Gene Name: killer cell immunoglobulin-like receptor, three domains, long cytoplasmic tail, 2
  Uniprot ID: P43630
  ENSP ID: ENSP00000482655

SEQ ID NO: 43743 - protein, 333 aa, Homo sapiens
  Payload ID: 8971
  Gene Symbol: KIR3DL2
  Gene Name: killer cell immunoglobulin-like receptor, three domains, long cytoplasmic tail, 2
  ENSP ID: ENSP00000482956
MSLTVVSMACVGFFLLQGAWPLMGGQDKPFLSARPSTVVPRGGHVALQCHYRRGFNNFMLYKEDRSHVPIFHGRIFQESFIMGPVTPAHAGTYRCRGSRPHSLTGWSTPSNPLVIMVTGNHRKPSLLAHPGPLLKSGETVILQCWSDVMFEHFFLHREGISEDPSRLVGQIHDGVSKANFSIGPLMPVLAGTYRCYGSVPHSPYQLSAPSDPLDIVITGLYEKPSLSAQPGPTVQAGENVTLSCSSWSSYDIYHLSREGEAHERRLRAVPKVNRTFQADFPLGPATHGGTYRCFGSFRALPCVWSNSSDPLLVSVTGNPSSSWPSPTEPSSKS

SEQ ID NO: 43744 - protein, 438 aa, Homo sapiens
  Payload ID: 8971
  Gene Symbol: KIR3DL2
  Gene Name: killer cell immunoglobulin-like receptor, three domains, long cytoplasmic tail, 2
  ENSP ID: ENSP00000483009
MSLTVVSMACVGFFLLQGAWPLMGGQDKPFLSARPSTVVPRGGHVALQCHYRRGFNNFMLYKEDRSHVPIFHGRIFQESFIMGPVTPAHAGTYRCRGSRPHSLTGWSAPSNPLVIMVTGNHRKPSLLAHPGPLLKSGETVILQCWSDVMFEHFFLHREGISEDPSHLVGQIHDGVSKANFSIGPLMPVLAGTYRCYGSVPHSPYQLSAPSDPLDIVITGLYEKPSLSAQPGPTVQAGENVTLSCSSWSSYDIYHLSREGEAHERRLRAVPKVNRTFQADFPLGPATHGGTYRCFGSFRALPCVWSNSSDPLLVSVTGICRHLHVLIGTSVVIFLFILLLFFLLYRWCSNKKNAAVMDQEPAGDRTVNRQDSDEQDPQEVTYAQLDHCVFIQRKISRPSQRPKTPLTDTSVYTELPNAEPRSKVVSCPRAPQSGLEGVF

SEQ ID NO: 43745 - protein, 455 aa, Homo sapiens; identical to SEQ ID NO: 43698
  Payload ID: 8971
  Gene Symbol: KIR3DL2
  Gene Name: killer cell immunoglobulin-like receptor, three domains, long cytoplasmic tail, 2
  ENSP ID: ENSP00000483218

SEQ ID NO: 43746 - protein, 438 aa, Homo sapiens
  Payload ID: 8971
  Gene Symbol: KIR3DL2
  Gene Name: killer cell immunoglobulin-like receptor, three domains, long cytoplasmic tail, 2
  ENSP ID: ENSP00000483284
MSLTVVSMACVGFFLLQGAWPLMGGQDKPFLSARPSTVVPQGGHVALQCHYRRGFNNFMLYKEDRSHVPIFHGRIFQESFIMGPVTPAHAGTYRCRGSRPHSLTGWSAPSNPLVIMVTGNHRKPSLLAHPGTLLKSGETVILQCWSDVMFEHFFLHREGISEDPSRLVGQIHDGVSKANFSIGPLMPVLAGTYRCYGSVPHSPYQLSAPSDPLDIVITGLYEKPSLSAQPGPTVQAGENVTLSCSSWSSYDIYHLSREGEAHERRLRAVPKVNRTFQADFPLGPATHGGTYRCFGSFRALPCVWSNSSDPLLVSVTGICRHLHVLIGTSVVIFLFILLLFFLLYRWCSNKKNAAVMDQEPAGDRTVNRQDSDEQDPQEVTYAQLDHCVFIQRKISRPSQRPKTPPTDTSVYTELPNAEPRSKVVSCPRAPQSGLEGVF

SEQ ID NO: 43747 - protein, 455 aa, Homo sapiens; identical to SEQ ID NO: 43698
  Payload ID: 8971
  Gene Symbol: KIR3DL2
  Gene Name: killer cell immunoglobulin-like receptor, three domains, long cytoplasmic tail, 2
  ENSP ID: ENSP00000483422

SEQ ID NO: 43748 - protein, 455 aa, Homo sapiens
  Payload ID: 8971
  Gene Symbol: KIR3DL2
  Gene Name: killer cell immunoglobulin-like receptor, three domains, long cytoplasmic tail, 2
  ENSP ID: ENSP00000483790
MSLTVVSMACVGFFLLQGAWPLMGGQDKPFLSARPSTVVPQGGHVALQCHYRRGFNNFMLYKEDRSHVPIFHGRIFQESFIMGPVTPAHAGTYRCRGSRPHSLTGWSAPSNPLVIMVTGNHRKPSLLAHPGTLLKSGETVILQCWSDVMFEHFFLHREGISEDPSRLVGQIHDGVSKANFSIGPLMPVLAGTYRCYGSVPHSPYQLSAPSDPLDIVITGLYEKPSLSAQPGPTVQAGENVTLSCSSWSSYDIYHLSREGEAHERRLRAVPKVNRTFQADFPLGPATHGGTYRCFGSFRALPCVWSNSSDPLLVSVTGNPSSSWPSPTEPSSKSGICRHLHVLIGTSVVIFLFILLLFFLLYRWCSNKKNAAVMDQEPAGDRTVNRQDSDEQDPQEVTYAQLDHCVFIQRKISRPSQRPKTPPTDTSVYTELPNAEPRSKVVSCPRAPQSGLEGVF

SEQ ID NO: 43749 - protein, 333 aa, Homo sapiens
  Payload ID: 8971
  Gene Symbol: KIR3DL2
  Gene Name: killer cell immunoglobulin-like receptor, three domains, long cytoplasmic tail, 2
  ENSP ID: ENSP00000483850
MSLTVVSMACVGFFLLQGAWPLMGGQDKPFLSARPSTVVPRGGHVALQCHYRRGFNNFMLYKEDRSHVPIFHGRIFQESFIMGPVTPAHAGTYRCRGSRPHSLTGWSAPSNPLVIMVTGNHRKPSLLAHPGPLLKSGETVILQCWSDVMFEHFFLHREGISEDPSRLVGQIHDGVSKANFSIGPLMPVLAGTYRCYGSVPHSPYQLSAPSDPLDIVITGLYEKPSLSAQPGPTVQAGENVTLSCSSWSSYDIYHLSREGEAHERRLRAVPKVNRTFQADFPLGPATHGGTYRCFGSFRALPCVWSNSSDPLLVSVTGNPSSSWPSPTEPSSKS

SEQ ID NO: 43750 - protein, 438 aa, Homo sapiens; identical to SEQ ID NO: 43701
  Payload ID: 8971
  Gene Symbol: KIR3DL2
  Gene Name: killer cell immunoglobulin-like receptor, three domains, long cytoplasmic tail, 2
  ENSP ID: ENSP00000483917

SEQ ID NO: 43751 - protein, 438 aa, Homo sapiens; identical to SEQ ID NO: 43705
  Payload ID: 8971
  Gene Symbol: KIR3DL2
  Gene Name: killer cell immunoglobulin-like receptor, three domains, long cytoplasmic tail, 2
  ENSP ID: ENSP00000484059

SEQ ID NO: 43752 - protein, 455 aa, Homo sapiens
  Payload ID: 8971
  Gene Symbol: KIR3DL2
  Gene Name: killer cell immunoglobulin-like receptor, three domains, long cytoplasmic tail, 2
  ENSP ID: ENSP00000484092
MSLTVVSMACVGFFLLQGAWPLMGGQDKPFLSARPSTVVPRGGHVALQCHYRRGFNNFMLYKEDRSHVPIFHGRIFQESFIMGPVTPAHAGTYRCRGSRPHSLTGWSAPSNPLVIMVTGNHRKPSLLAHPGPLLKSGETVILQCWSDVMFEHFFLHREGISEDPSRLVGQIHDGVSKANFSIGPLMPVLAGTYRCYGSVPHSPYQLSAPSDPLDIVITGLYEKPSLSAQPGPTVQAGENVTLSCSSWSSYDIYHLSREGEAHERRLRAVPKVNRTFQADFPLGPATHGGTYRCFGSFRALPCVWSNSSDPLLVSVTGNPSSSWPSPTEPSSKSGICRHLHVLIGTSVVIFLFILLLFFLLYRWCSNKKNAAVMDQEPAGDRTVNRQDSDEQDPQEVMYAQLDHCVFIQRKISRPSQRPKTPLTDTSVYTELPNAEPRSKVVSCPRAPQSGLEGVF

SEQ ID NO: 43753 - protein, 455 aa, Homo sapiens; identical to SEQ ID NO: 43737
  Payload ID: 8971
  Gene Symbol: KIR3DL2
  Gene Name: killer cell immunoglobulin-like receptor, three domains, long cytoplasmic tail, 2
  ENSP ID: ENSP00000484518

SEQ ID NO: 43754 - protein, 410 aa, Homo sapiens
  Payload ID: 8972
  Gene Symbol: KIR3DL3
  Gene Name: killer cell immunoglobulin-like receptor, three domains, long cytoplasmic tail, 3
  ENSP ID: ENSP00000291860
MSLMVVSMACVGFFLLEGPWPHVGGQDKPFLSAWPGTVVSEGQHVTLQCRSRLGFNEFSLSKEDGMPVPELYNRIFRNSFLMGPVTPAHAGTYRCCSSHPHSPTGWSAPSNPVVIMVTGVHRKPSLLAHPGPLVKSGETVILQCWSDVRFERFLLHREGITEDPLRLVGQLHDAGSQVNYSMGPMTPALAGTYRCFGSVTHLPYELSAPSDPLDIVVVGLYGKPSLSAQPGPTVQAGENVTLSCSSRSLFDIYHLSREAEAGELRLTAVLRVNGTFQANFPLGPVTHGGNYRCFGSFRALPHAWSDPSDPLPVSVTGNSRNLHVLIGTSVVIIPFAILLFFLLHRWCANKKNAVVMDQEPAGNRTVNREDSDEQDPQEVTYAQLNHCVFTQRKITRPSQRPKTPPTDTSV

SEQ ID NO: 43755 - protein, 410 aa, Homo sapiens
  Payload ID: 8972
  Gene Symbol: KIR3DL3
  Gene Name: killer cell immunoglobulin-like receptor, three domains, long cytoplasmic tail, 3
  ENSP ID: ENSP00000477652
MSLMVVSMACVGFFLLEGPWPHVGGQDKPFLSAWPGTVVSEGQHVTLQCRSRLGFNEFSLSKEDGMPVPELYNRIFRNSFLMGPVTPAHAGTYRCCSSHPHSPTGWSAPSNPVVIMVTGVHRKPSLLAHPGPLVKSGETVILQCWSDVRFERFLLHREGITEDPLRLIGQLHDAGSQVNYSMGPMTPALAGTYRCFGSVTHLPYELSAPSDPLDIVVVGLYGKPSLSAQPGPTVQAGENVTLSCSSRSLFDIYHLSREAEAGELRLTAVLRVNGTFQANFPLGPVTHGGNYRCFGSFRALPHAWSDPSDPLPVSVTGNSRHLHVLIGTSVVIIPFAILLFFLLHRWCANKKNAVVMDQEPAGNRTVNREDSDEQDPQEVTYAQLNHCVFTQRKITRPSQRPKTPPTDTSV

SEQ ID NO: 43756 - protein, 410 aa, Homo sapiens
  Payload ID: 8972
  Gene Symbol: KIR3DL3
  Gene Name: killer cell immunoglobulin-like receptor, three domains, long cytoplasmic tail, 3
  ENSP ID: ENSP00000477728
MSLMVVSMACVGFFLLEGPWPHVGGQDKPFLSAWPGTVVSEGQHVTLQCRSRLGFNEFSLSKEDGMPVPELYNRIFRNSFLMGPVTPAHAGTYRCCSSHPHSPTGWSAPSNPVVIMVTGVHRKPSLLAHPGPLVKSGETVILQCWSDVRFERFLLHREGITEDPLRLIGQLHDAGSQVNYSMGPMTPALAGTYRCFGSVTHLPYELSAPSDPLDIVVVGLYGKPSLSAQPGPTVQAGENVTLSCSSRSLFDIYHLSREAEAGELRLTAVLRVNGTFQANFPLGPVTHGGNYRCFGSFRALPHAWSDPSDPLPVSVTGNSRYLHALIGTSVVIIPFAILLFFLLHRWCANKKNAVVMDQEPAGNRTVNREDSDEQDPQEVTYAQLNHCVFTQRKITRPSQRPKTPPTDTSV

SEQ ID NO: 43757 - protein, 410 aa, Homo sapiens; identical to SEQ ID NO: 43756
  Payload ID: 8972
  Gene Symbol: KIR3DL3
  Gene Name: killer cell immunoglobulin-like receptor, three domains, long cytoplasmic tail, 3
  ENSP ID: ENSP00000477820

SEQ ID NO: 43758 - protein, 410 aa, Homo sapiens
  Payload ID: 8972
  Gene Symbol: KIR3DL3
  Gene Name: killer cell immunoglobulin-like receptor, three domains, long cytoplasmic tail, 3
  Uniprot ID: Q8N743
  ENSP ID: ENSP00000478200
MSLMVVSMACVGFFLLEGPWPHVGGQDKPFLSAWPGTVVSEGQHVTLQCRSRLGFNEFSLSKEDGMPVPELYNRIFRNSFLMGPVTPAHAGTYRCCSSHPHSPTGWSAPSNPVVIMVTGVHRKPSLLAHPGPLVKSGETVILQCWSDVRFERFLLHREGITEDPLRLVGQLHDAGSQVNYSMGPMTPALAGTYRCFGSVTHLPYELSAPSDPLDIVVVGLYGKPSLSAQPGPTVQAGENVTLSCSSRSLFDIYHLSREAEAGELRLTAVLRVNGTFQANFPLGPVTHGGNYRCFGSFRALPHAWSDPSDPLPVSVTGNSRHLHVLIGTSVVIIPFAILLFFLLHRWCANKKNAVVMDQEPAGNRTVNREDSDEQDPQEVTYAQLNHCVFTQRKITRPSQRPKTPPTDTSV

SEQ ID NO: 43759 - protein, 410 aa, Homo sapiens
  Payload ID: 8972
  Gene Symbol: KIR3DL3
  Gene Name: killer cell immunoglobulin-like receptor, three domains, long cytoplasmic tail, 3
  ENSP ID: ENSP00000478247
MSLMVVSMACVGFFLLEGPWPHVGGQDKPFLSAWPGTVVSEGQHVTLQCRSRLGFNEFSLSKEDGMPVPELYNRIFRNSFLMGPVTPAHAGTYRCCSSHPHSPTGWSAPSNPVVIMVTGVHRKPSLLAHPGPLVKSGETVILQCWSDVRFEHFLLHREGITEDPLRLVGQLHDAGSQVNYSMGPMTPALAGTYRCFGSVTHLPYELSAPSDPLDIVVVGLYGKPSLSAQPGPTVQAGENVTLSCSSRSLFDIYHLSREAEAGELRLTAVLRVNGTFQANFPLGPVTHGGNYRCFGSFRALPHAWSDPSDPLPVSVTGNSRNLHVLIGTSVVIIPFAILLFFLLHRWCANKKNAVVMDQEPAGNRTVNREDSDEQDPQEVTYAQLNHCVFTQRKITRPSQRPKTPPTDTSV

SEQ ID NO: 43760 - protein, 410 aa, Homo sapiens
  Payload ID: 8972
  Gene Symbol: KIR3DL3
  Gene Name: killer cell immunoglobulin-like receptor, three domains, long cytoplasmic tail, 3
  ENSP ID: ENSP00000478304
MSLMVVSMACVGFFLLEGPWPHVGGQDKPFLSAWPGTVVSEGQHVTLQCRSRLGFNEFSLSKEDGMPVPELYNRIFRNSFLMGPVTPAHAGTYRCCSSHPHSPTGWSAPSNPVVIMVTGVHRKPSLLAHPGPLVKSGETVILQCWSDVRFERFLLHREGITEDPLRLIGQLHDAGSQVNYSMGPMTPALAGTYRCFGSVTHLPYELSAPSDPLDIVVVGLYGKPSLSAQPGPTVQAGENVTLSCSSRSLFDIYHLSREAEAGELRLTAVLRVNGTFQANFPLGPVTHGGNYRCFGSFRALPHAWSDPSDPLPVSVTGNSRNLHVLIGTSVVIIPFAILLFFLLHRWCANKKNAVVMDQEPAGNRTVNREDSDEQDPQEVTYAQLNHCVFTQRKITRPSQRPKTPPTDTSV

SEQ ID NO: 43761 - protein, 410 aa, Homo sapiens
  Payload ID: 8972
  Gene Symbol: KIR3DL3
  Gene Name: killer cell immunoglobulin-like receptor, three domains, long cytoplasmic tail, 3
  ENSP ID: ENSP00000478344
MSLMVVSMACVGFFLLEGPWPHVGGQDKPFLSAWPGTVVSEGQHVTLQCRSRLGFNEFSLSKEDGMPVPELYNRIFRNSFLMGPVTPAHAGTYRCCSSHPHSPTGWSAPSNPVVIMVTGVHRKPSLLAHPGPLVKSGETVILQCWSDVRFERFLLHREGITEDPLRLVGQLHDAGSQVNYSMGPMTPALAGTYRCFGSVTHLPYELSAPSDPLDIVVVGLYGKPSLSAQPGPTVQAGENVTLSCSSRSLFDIYHLSREAEAGELRLTAVLRVNGTFQANFPLGPVTHGGNYRCFGSFRALPHAWSDPSDPLPVSVTGNSRYLHALIGTSVVIIPFAILLFFLLHRWCANKKNAVVMDQEPAGNRTVNREDSDEQDPQEVTYAQLNHCVFTQRKITRPSQRPKTPPTDTSV

SEQ ID NO: 43762 - protein, 410 aa, Homo sapiens; identical to SEQ ID NO: 43755
  Payload ID: 8972
  Gene Symbol: KIR3DL3
  Gene Name: killer cell immunoglobulin-like receptor, three domains, long cytoplasmic tail, 3
  ENSP ID: ENSP00000478407

SEQ ID NO: 43763 - protein, 410 aa, Homo sapiens
  Payload ID: 8972
  Gene Symbol: KIR3DL3
  Gene Name: killer cell immunoglobulin-like receptor, three domains, long cytoplasmic tail, 3
  ENSP ID: ENSP00000478410
MSLMVVSMACVGFFLLEGPWPHVGGQDKPFLSAWPGTVVSEGQHVTLQCRSRLGFKEFSLSKEDGMPVPELYNRIFRNSFLMGPVTPAHAGTYRCCSSHPHSPTGWSAPSNPVVIMVTGVHRKPSLLAHPGPLVKSGETVILQCWSDVSFERFLLHREGITEDPLRLVGQLHDAGSQVNYSMGPMTPALAGTYRCFGSVTHLPYELSAPSDPLDIVVVGLYGKPSLSAQPGPTVQAGENVTLSCSSRSLFDIYHLSREAEAGELRLTAVLRVNGTFQANFPLGPVTHGGTYRCFGSFRALPHAWSDPSDPLPVSVTGNSRNLHVLIGTSVVIIPFAILLFFLLHRWCANKKNAVVMDQEPAGNRTVNREDSDEQDPQEVTYAQLNHCVFTQRKITRPSQRPKTPPTDTSV

SEQ ID NO: 43764 - protein, 410 aa, Homo sapiens
  Payload ID: 8972
  Gene Symbol: KIR3DL3
  Gene Name: killer cell immunoglobulin-like receptor, three domains, long cytoplasmic tail, 3
  ENSP ID: ENSP00000478741
MSLMVVSMACVGFFLLEGPWPHVGGQDKPFLSAWPGTVVSEGQHVTLQCRSHLGFNEFSLSKEDGMPVPELYNRIFRNSFLMGPVTPAHAGTYRCCSSHPHSPTGWSAPSNPVVIMVTGVHRKPSLLAHPGPLVKSGETVILQCWSDVRFERFLLHREGITEDPLRLVGQLHDAGSQVNYSMGPMTPALAGTYRCFGSVTHLPYELSAPSDPLDIVVVGLYGKPSLSAQPGPTVQAGENVTLSCSSRSLFDIYHLSREAEAGELRLTAVLRVNGTFQANFPLGPVTHGGNYRCFGSFRALPHAWSDPSDPLPVSVTGNSRYLHALIGTSVVIIPFAILLFFLLHRWCANKKNAVVMDQEPAGNRTVNREDSDEQDPQEVTYAQLNHCVFTQRKITRPSQRPKTPPTDTSV

SEQ ID NO: 43765 - protein, 410 aa, Homo sapiens; identical to SEQ ID NO: 43755
  Payload ID: 8972
  Gene Symbol: KIR3DL3
  Gene Name: killer cell immunoglobulin-like receptor, three domains, long cytoplasmic tail, 3
  ENSP ID: ENSP00000479596

SEQ ID NO: 43766 - protein, 410 aa, Homo sapiens
  Payload ID: 8972
  Gene Symbol: KIR3DL3
  Gene Name: killer cell immunoglobulin-like receptor, three domains, long cytoplasmic tail, 3
  ENSP ID: ENSP00000479747
MSLMVVSMACVGFFLLEGPWPHVGGQDKPFLSAWPGTVVSEGQHVTLQCRSRLGFNEFSLSKEDGMPVPELYNRIFWNSFLMGPVTPAHAGTYRCCSSHPHSPTGWSAPSNPVVIMVTGVHRKPSLLAHPGPLVKSGETVILQCWSDVRFERFLLHREGITEDPLRLIGQLHDAGSQVNYSMGPMTPALAGTYRCFGSVTHLPYELSAPSDPLDIVVVGLYGKPSLSAQPGPTVQAGENVTLSCSSRSLFDIYHLSREAEAGELRLTAVLRVNGTFQANFPLGPVTHGGNYRCFGSFRALPHAWSDPSDPLPVSVTGNSRHLHVLIGTSVVIIPFAILLFFLLHRWCANKKNAVVMDQEPAGNRTVNREDSDEQDPQEVTYAQLNHCVFTQRKITRPSQRPKTPPTDTSV

SEQ ID NO: 43767 - protein, 410 aa, Homo sapiens; identical to SEQ ID NO: 43756
  Payload ID: 8972
  Gene Symbol: KIR3DL3
  Gene Name: killer cell immunoglobulin-like receptor, three domains, long cytoplasmic tail, 3
  ENSP ID: ENSP00000479771

SEQ ID NO: 43768 - protein, 410 aa, Homo sapiens; identical to SEQ ID NO: 43755
  Payload ID: 8972
  Gene Symbol: KIR3DL3
  Gene Name: killer cell immunoglobulin-like receptor, three domains, long cytoplasmic tail, 3
  ENSP ID: ENSP00000479915

SEQ ID NO: 43769 - protein, 410 aa, Homo sapiens; identical to SEQ ID NO: 43756
  Payload ID: 8972
  Gene Symbol: KIR3DL3
  Gene Name: killer cell immunoglobulin-like receptor, three domains, long cytoplasmic tail, 3
  ENSP ID: ENSP00000480099

SEQ ID NO: 43770 - protein, 410 aa, Homo sapiens; identical to SEQ ID NO: 43763
  Payload ID: 8972
  Gene Symbol: KIR3DL3
  Gene Name: killer cell immunoglobulin-like receptor, three domains, long cytoplasmic tail, 3
  ENSP ID: ENSP00000480163

SEQ ID NO: 43771 - protein, 410 aa, Homo sapiens; identical to SEQ ID NO: 43764
  Payload ID: 8972
  Gene Symbol: KIR3DL3
  Gene Name: killer cell immunoglobulin-like receptor, three domains, long cytoplasmic tail, 3
  ENSP ID: ENSP00000480720

SEQ ID NO: 43772 - protein, 410 aa, Homo sapiens
  Payload ID: 8972
  Gene Symbol: KIR3DL3
  Gene Name: killer cell immunoglobulin-like receptor, three domains, long cytoplasmic tail, 3
  ENSP ID: ENSP00000481461
MSLMVVSMACVGFFLLEGPWPHVGGQDKPFLSAWPGTVVSEGQHVTLQCRSHLGFNEFSLSKEDGMPVPELYNRIFRNSFLMGPVTPAHAGTYRCCSSHPHSPTGWSAPSNPVVIMVTGVHRKPSLLAHPGPLVKSGETVILQCWSDVRFERFLLHREGITEDPLRLVGQLHDAGSQVNYSMGPMTPALAGTYRCFGSVTHLPYELSAPSDPLDIVVVGLYGKPSLSAQPGPTVQAGENVTLSCSSRSLFDIYHLSREAEAGELRLTAVLRVNGTFQANFPLGPVTHGGNYRCFGSFRALPHAWSDPSDPLPVSVTGNSRHLHVLIGTSVVIIPFAILLFFLLHRWCANKKNAVVMDQEPAGNRTVNREDSDEQDPQEVTYAQLNHCVFTQRKITRPSQRPKTPPTDTSV

SEQ ID NO: 43773 - protein, 410 aa, Homo sapiens
  Payload ID: 8972
  Gene Symbol: KIR3DL3
  Gene Name: killer cell immunoglobulin-like receptor, three domains, long cytoplasmic tail, 3
  ENSP ID: ENSP00000481489
MSLMVVSMACVGFFLLEGPWPHVGGQDKPFLSAWPGTVVSEGQHVTLQCRSRLGFNEFSLSKEDGMPVPELYNRIFRNSFLMGPVTPAHAGTYRCCSSHPHSPTGWSAPSNPVVIMVTGVHRKPSLLAHPGPLVKSGETVILQCWSDVSFERFLLHREGITEDPLRLVGQLHDAGSQVNYSMGPMTPALAGTYRCFGSVTHLPYELSAPSDPLDIVVVGLYGKPSLSAQPGPTVQAGENVTLSCSSRSLFDIYHLSREAEAGELRLTAVLRVNGTFQANFPLGPVTHGGTYRCFGSFRALPHAWSDPSDPLPVSVTGNSRYLHALIGTSVVIIPFAILLFFLLHRWCANKKNAVVMDQEPAGNRTVNREDSDEQDPQEVTYAQLNHCVFTQRKITRPSQRPKTPPTDTSV

SEQ ID NO: 43774 - protein, 410 aa, Homo sapiens; identical to SEQ ID NO: 43760
  Payload ID: 8972
  Gene Symbol: KIR3DL3
  Gene Name: killer cell immunoglobulin-like receptor, three domains, long cytoplasmic tail, 3
  ENSP ID: ENSP00000481535

SEQ ID NO: 43775 - protein, 410 aa, Homo sapiens; identical to SEQ ID NO: 43755
  Payload ID: 8972
  Gene Symbol: KIR3DL3
  Gene Name: killer cell immunoglobulin-like receptor, three domains, long cytoplasmic tail, 3
  ENSP ID: ENSP00000481664

SEQ ID NO: 43776 - protein, 410 aa, Homo sapiens; identical to SEQ ID NO: 43755
  Payload ID: 8972
  Gene Symbol: KIR3DL3
  Gene Name: killer cell immunoglobulin-like receptor, three domains, long cytoplasmic tail, 3
  ENSP ID: ENSP00000481803

SEQ ID NO: 43777 - protein, 425 aa, Homo sapiens
  Payload ID: 8972
  Gene Symbol: KIR3DL3
  Gene Name: killer cell immunoglobulin-like receptor, three domains, long cytoplasmic tail, 3
  ENSP ID: ENSP00000481968
MSLMVVSMACVGFFLLEGPWPHVGGQDKPFLSAWPGTVVSEGQHVTLQCRSRLGFKEFSLSKEDGMPVPELYNRIFRNSFLMGPVTPAHAGTYRCCSSHPHSPTGWSAPSNPVVIMVTGVHRKPSLLAHPGPLVKSGETVILQCWSDVRFERFLLHREGITEDPLRLVGQLHDAGSQVNYSMGPMTPALAGTYRCFGSVTHLPYELSAPSDPLDIVVVGLYGKPSLSAQPGPTVQAGENVTLSCSSRSLFDIYHLSREAEAGELRLTAVLRVNGTFQANFPLGPVTHGGTYRCFGSFRALPHAWSDPSDPLPVSVTGTAMISFLLVSCLPPGNSRHLHVLIGTSVVIIPFAILLFFLLHRWCANKKNAVVMDQEPAGNRTVNREDSDEQDPQEVTYAQLNHCVFTQRKITRPSQRPKTPPTDTSV

SEQ ID NO: 43778 - protein, 454 aa, Homo sapiens
  Payload ID: 8972
  Gene Symbol: KIR3DL3
  Gene Name: killer cell immunoglobulin-like receptor, three domains, long cytoplasmic tail, 3
  ENSP ID: ENSP00000481982
MSLMVVSMACVGFFLLEGPWPHVGGQDKPFLSAWPGTVVSEGQHVTLQCRSRLGFNEFSLSKEDGMPVPELYNRIFRNSFLMGPVTPAHAGTYRCCSSHPHSPTGWSAPSNPVVIMVTGVHRKPSLLAHPGPLVKSGETVILQCWSDVRFERFLLHREGITEDPLRLIGQLHDAGSQVNYSMGPMTPALAGTYRCFGSVTHLPYELSAPSDPLDIVVVGLYEKPSLSAQPGPTVLAGESVTLSCSSRSSYDMYHLSREGEAHERRFSAGPKVNGTFQADFPLGPATHGGTYRCFGSFRDSPYEWSNSSDPLLVSVTGNPSNSWPSPTEPSSKTGNPRHLHVLIGTSVVKIPFTILLFFLLHRWCSNKKNAAVMDQEPAGNRTVNSEDSDEQDPQEVTYTQLNHCVFTQRKITRPSQRPKTPPTDIIVYTELPNAESRSKVVSCPAPQSGLEGVF

SEQ ID NO: 43779 - protein, 410 aa, Homo sapiens; identical to SEQ ID NO: 43761
  Payload ID: 8972
  Gene Symbol: KIR3DL3
  Gene Name: killer cell immunoglobulin-like receptor, three domains, long cytoplasmic tail, 3
  ENSP ID: ENSP00000482181

SEQ ID NO: 43780 - protein, 410 aa, Homo sapiens; identical to SEQ ID NO: 43758
  Payload ID: 8972
  Gene Symbol: KIR3DL3
  Gene Name: killer cell immunoglobulin-like receptor, three domains, long cytoplasmic tail, 3
  Uniprot ID: Q8N743
  ENSP ID: ENSP00000482580

SEQ ID NO: 43781 - protein, 410 aa, Homo sapiens; identical to SEQ ID NO: 43761
  Payload ID: 8972
  Gene Symbol: KIR3DL3
  Gene Name: killer cell immunoglobulin-like receptor, three domains, long cytoplasmic tail, 3
  ENSP ID: ENSP00000483190

SEQ ID NO: 43782 - protein, 410 aa, Homo sapiens
  Payload ID: 8972
  Gene Symbol: KIR3DL3
  Gene Name: killer cell immunoglobulin-like receptor, three domains, long cytoplasmic tail, 3
  ENSP ID: ENSP00000483308
MSLMVVSMACVGFFLLEGPWPHVGGQDKPFLSAWPGTVVSEGQHVTLQCRSRLGFNEFSLSKEDGMPVPELYNRIFWNSFLMGPVTPAHAGTYRCCSSHPHSPTGWSAPSNPVVIMVTGVHRKPSLLAHPGPLVKSGETVILQCWSDVRFERFLLHREGITEDPLRLIGQLHDAGSQVNYSMGPMTPALAGTYRCFGSVTHLPYELSAPSDPLDIVVVGLYGKPSLSAQPGPTVQAGENVTLSCSSRSLFDIYHLSREAEAGELRLTAVLRVNGTFQANFPLGPVTHGGNYRCFGSFRALPHAWSDPSDPLPVSVTGNSRNLHVLIGTSVVIIPFAILLFFLLHRWCANKKNAVVMDQEPAGNRTVNREDSDEQDPQEVTYAQLNHCVFTQRKITRPSQRPKTPPTDTSV

SEQ ID NO: 43783 - protein, 410 aa, Homo sapiens; identical to SEQ ID NO: 43756
  Payload ID: 8972
  Gene Symbol: KIR3DL3
  Gene Name: killer cell immunoglobulin-like receptor, three domains, long cytoplasmic tail, 3
  ENSP ID: ENSP00000483578

SEQ ID NO: 43784 - protein, 410 aa, Homo sapiens
  Payload ID: 8972
  Gene Symbol: KIR3DL3
  Gene Name: killer cell immunoglobulin-like receptor, three domains, long cytoplasmic tail, 3
  ENSP ID: ENSP00000483714
MSLMVVSMACVGFFLLEGPWPHVGGQDKPFLSAWPGTVVSEGQHVTLQCRSRLGFKEFSLSKEDGMPVPELYNRIFRNSFLMGPVTPAHAGTYRCCSSHPHSPTGWSAPSNPVVIMVTGVHRKPSLLAHPGPLVKSGETVILQCWSDVRFERFLLHREGITEDPLRLVGQLHDAGSQVNYSMGPMTPALAGTYRCFGSVTHLPYELSAPSDPLDIVVVGLYGKPSLSAQPGPTVQAGENVTLSCSSRSLFDIYHLSREAEAGELRLTAVLRVNGTFQANFPLGPVTHGGTYRCFGSFRALPHAWSDPSDPLPVSVTGNSRHLHVLIGTSVVIIPFAILLFFLLHRWCANKKNAVVMDQEPAGNRTVNREDSDEQDPQEVTYAQLNHCVFTQRKITRPSQRPKTPPTDTSV

SEQ ID NO: 43785 - protein, 410 aa, Homo sapiens; identical to SEQ ID NO: 43772
  Payload ID: 8972
  Gene Symbol: KIR3DL3
  Gene Name: killer cell immunoglobulin-like receptor, three domains, long cytoplasmic tail, 3
  ENSP ID: ENSP00000484541

SEQ ID NO: 43786 - protein, 410 aa, Homo sapiens; identical to SEQ ID NO: 43754
  Payload ID: 8972
  Gene Symbol: KIR3DL3
  Gene Name: killer cell immunoglobulin-like receptor, three domains, long cytoplasmic tail, 3
  ENSP ID: ENSP00000484725

SEQ ID NO: 43787 - protein, 387 aa, Homo sapiens
  Payload ID: 8972
  Gene Symbol: KIR3DL3
  Gene Name: killer cell immunoglobulin-like receptor, three domains, long cytoplasmic tail, 3
  ENSP ID: ENSP00000484879
GGQDKPFLSAWPGTVVSEGQHVTLQCRSRLGFNEFSLSKEDGMPVPELYNRIFRNSFLMGPVTPAHAGTYRCCSSHPHSPTGWSAPSNPVVIMVTGVHRKPSLLAHPGPLVKSGETVILQCWSDVRFERFLLHREGITEDPLRLVGQLHDAGSQVNYSMGPMTPALAGTYRCFGSVTHLPYELSAPSDPLDIVVVGLYGKPSLSAQPDPTVQAGENVTLSCSSRSLFDIYHLSREAEAGELRLTAVLRVNGTFQANFPLGPVTHGGNYRCFGSFRALPHAWSDPSDPLPVSVTGNSRHLHVLIGTSVVIIPFAILLFFLLHRWCANKKNAVVMDQEPAGNRTVNREDSDEQDPQEVTYAQLNHCVFTQRKITRPSQRPKTPPTDTSV

SEQ ID NO: 43788 - protein, 328 aa, Homo sapiens
  Payload ID: 8973
  Gene Symbol: KIR3DP1
  Gene Name: killer cell immunoglobulin-like receptor, three domains, pseudogene 1
  ENSP ID: ENSP00000480312
MSLMVVSMACVGFFLLQGAWPHEGGQDKPFLSAWPSPVVSEGEHVALQCRSRLGFNEFSLSKEDGMPVPELYNRVFRNTVFIGPVTPAHAGTYRCRGSHPHFLTGWSAPSNPLVIMVTGVHRKPSLLAHPGPLVKSEETVILQCWSDVMFEHFLLHREGKFNDTLRLTGELHDGVSKANFSIGRMTQDLAGTYRCYGSVPHSPYQLSAPSDPLDIVITGLCGKPSLSAQPRPMVKAGESVTLSCSSRSSYDIYHLSRDGEAHELRFPAVPKVNGTFQANFPLGPATHGGTYRCFGSFRDSPYEWSDLSDPLLVSVTDSMKEKGKDVIL

SEQ ID NO: 43789 - protein, 328 aa, Homo sapiens; identical to SEQ ID NO: 36735
  Payload ID: 8973
  Gene Symbol: KIR3DP1
  Gene Name: killer cell immunoglobulin-like receptor, three domains, pseudogene 1
  ENSP ID: ENSP00000480363

SEQ ID NO: 43790 - protein, 275 aa, Homo sapiens
  Payload ID: 8974
  Gene Symbol: KIR3DS1
  Gene Name: killer cell immunoglobulin-like receptor, three domains, short cytoplasmic tail, 1
  ENSP ID: ENSP00000477663
MLLMVVSMACVGNHRKPSLLAHPGPLVKSGERVILQCWSDIMFEHFFLHKEWISKDPSRLVGQIHDGVSKANFSIGSMMRALAGTYRCYGSVTHTPYQLSAPSDPLDIVVTGLYEKPSLSAQPGPKVQAGESVTLSCSSRSSYDMYHLSREGGAHERRLPAVRKVNRTFQADFPLGPATHGGTYRCFGSFRHSPYEWSDPSDPLLVSVTGNPSSSWPSPTEPSSKSGNLRHLHILIGTSVVKIPFTILLFFLLHRWCSNKKKCCCNGPRACREQK

SEQ ID NO: 43791 - protein, 387 aa, Homo sapiens
  Payload ID: 8974
  Gene Symbol: KIR3DS1
  Gene Name: killer cell immunoglobulin-like receptor, three domains, short cytoplasmic tail, 1
  Uniprot ID: Q14943
  ENSP ID: ENSP00000477733
MSLMVVSMACVGLFLVQRAGPHMGGQDKPFLSAWPSAVVPRGGHVTLRCHYRHRFNNFMLYKEDRIHVPIFHGRIFQEGFNMSPVTTAHAGNYTCRGSHPHSPTGWSAPSNPMVIMVTGNHRKPSLLAHPGPLVKSGERVILQCWSDIMFEHFFLHKEWISKDPSRLVGQIHDGVSKANFSIGSMMRALAGTYRCYGSVTHTPYQLSAPSDPLDIVVTGLYEKPSLSAQPGPKVQAGESVTLSCSSRSSYDMYHLSREGGAHERRLPAVRKVNRTFQADFPLGPATHGGTYRCFGSFRHSPYEWSDPSDPLLVSVTGNPSSSWPSPTEPSSKSGNLRHLHILIGTSVVKIPFTILLFFLLHRWCSNKKNAAVMDQEPAGNRSEQRGF

SEQ ID NO: 43792 - protein, 455 aa, Homo sapiens
  Payload ID: 8974
  Gene Symbol: KIR3DS1
  Gene Name: killer cell immunoglobulin-like receptor, three domains, short cytoplasmic tail, 1
  ENSP ID: ENSP00000477797
MSLMVVSMACVGFFLDQSVWAHVGGQDKPFLSAWPSAVVPRGGHVTLRCHYRHRFNNFMLYKEDRIHVPIFHGRIFQEGFNMSPVTTAHAGNYTCRGSHPHSPTGWSAPSNPMVIMVTGNHRKPSLLAHPGPLVKSGERVILQCWSDIMFEHFFLHREWISKDPSRLVGQIHDGVSKANFSIGSMMRALAGTYRCYGSVTHTPYQLSAPSDPLDIVVTGLYEKPSLSAQPGPKVQAGESVTLSCSSRSSYDMYHLSREGGAHERRLPAVRKVNRTFQADFPLGPATHGGTYRCFGSFRHSPYEWSDPSDPLLVSVTGNPSSSWPSPTEPSSKSGIRRHLHILIGTSVAIILFIILFFFLLHCCCSNKKNAAVMDQEPAGDRTVNREDSDDQDPQEVTYAQLDHCVFTQRKITPPSQRPKTPPTDTSMYIELPNAESRSKAVFCPRAPQSGLEGIF

SEQ ID NO: 43793 - protein, 382 aa, Homo sapiens
  Payload ID: 8974
  Gene Symbol: KIR3DS1
  Gene Name: killer cell immunoglobulin-like receptor, three domains, short cytoplasmic tail, 1
  ENSP ID: ENSP00000477819
MLLMVVSMACVGLFLVQRAGPHMGGQDKPFLSAWPSAVVPRGGHVTLRCHYRHRFNNFMLYKEDRIHVPIFHGRIFQEGFNMSPVTTAHAGNYTCRGSHPHSPTGWSAPSNPMVIMVTGNHRKPSLLAHPGPLVKSGERVILQCWSDIMFEHFFLHKEWISKDPSRLVGQIHDGVSKANFSIGSMMRALAGTYRCYGSVTHTPYQLSAPSDPLDIVVTGLYEKPSLSAQPGPKVQAGESVTLSCSSRSSYDMYHLSREGGAHERRLPAVRKVNRTFQADFPLGPATHGGTYRCFGSFRHSPYEWSDPSDPLLVSVTGNPSSSWPSPTEPSSKSGNLRHLHILIGTSVVKIPFTILLFFLLHRWCSNKKKCCCNGPRACREQK

SEQ ID NO: 43794 - protein, 387 aa, Homo sapiens; identical to SEQ ID NO: 43791
  Payload ID: 8974
  Gene Symbol: KIR3DS1
  Gene Name: killer cell immunoglobulin-like receptor, three domains, short cytoplasmic tail, 1
  Uniprot ID: Q14943
  ENSP ID: ENSP00000477859

SEQ ID NO: 43795 - protein, 382 aa, Homo sapiens; identical to SEQ ID NO: 43793
  Payload ID: 8974
  Gene Symbol: KIR3DS1
  Gene Name: killer cell immunoglobulin-like receptor, three domains, short cytoplasmic tail, 1
  ENSP ID: ENSP00000478122

SEQ ID NO: 43796 - protein, 388 aa, Homo sapiens
  Payload ID: 8974
  Gene Symbol: KIR3DS1
  Gene Name: killer cell immunoglobulin-like receptor, three domains, short cytoplasmic tail, 1
  ENSP ID: ENSP00000479610
MLLMVVSMACVGLFLVQRAGPHMGGQDKPFLSAWPSAVVPRGGHVTLRCHYRHRFNNFMLYKEDRIHVPIFHGRIFQEGFNMSPVTTAHAGNYTCRGSHPHSPTGWSAPSNPMVIMVTGNHRKPSLLAHPGPLVKSGERVILQCWSDIMFEHFFLHKEWISKDPSRLVGQIHDGVSKANFSIGSMMRALAGTYRCYGSVTHTPYQLSAPSDPLDIVVTGLYEKPSLSAQPGPKVQAGESVTLSCSSRSSYDMYHLSREGGAHERRLPAVRKVNRTFQADFPLGPATHGGTYRCFGSFRHSPYEWSDPSDPLLVSVTGNPSSSWPSPTEPSSKSGNLRHLHILIGTSVVKIPFTILLFFLLHRWCSNKKKNAAVMDQEPAGNRSEQRGF

SEQ ID NO: 43797 - protein, 388 aa, Homo sapiens; identical to SEQ ID NO: 43796
  Payload ID: 8974
  Gene Symbol: KIR3DS1
  Gene Name: killer cell immunoglobulin-like receptor, three domains, short cytoplasmic tail, 1
  ENSP ID: ENSP00000480070

SEQ ID NO: 43798 - protein, 387 aa, Homo sapiens; identical to SEQ ID NO: 43791
  Payload ID: 8974
  Gene Symbol: KIR3DS1
  Gene Name: killer cell immunoglobulin-like receptor, three domains, short cytoplasmic tail, 1
  Uniprot ID: Q14943
  ENSP ID: ENSP00000480199

SEQ ID NO: 43799 - protein, 382 aa, Homo sapiens; identical to SEQ ID NO: 43793
  Payload ID: 8974
  Gene Symbol: KIR3DS1
  Gene Name: killer cell immunoglobulin-like receptor, three domains, short cytoplasmic tail, 1
  ENSP ID: ENSP00000480225

SEQ ID NO: 43800 - protein, 287 aa, Homo sapiens
  Payload ID: 8974
  Gene Symbol: KIR3DS1
  Gene Name: killer cell immunoglobulin-like receptor, three domains, short cytoplasmic tail, 1
  ENSP ID: ENSP00000480346
MLLMVVSMACVGLFLVQRAGPHMGNHRKPSLLAHPGPLVKSGERVILQCWSDIMFEHFFLHKEWISKDPSRLVGQIHDGVSKANFSIGSMMRALAGTYRCYGSVTHTPYQLSAPSDPLDIVVTGLYEKPSLSAQPGPKVQAGESVTLSCSSRSSYDMYHLSREGGAHERRLPAVRKVNRTFQADFPLGPATHGGTYRCFGSFRHSPYEWSDPSDPLLVSVTGNPSSSWPSPTEPSSKSGNLRHLHILIGTSVVKIPFTILLFFLLHRWCSNKKKCCCNGPRACREQK

SEQ ID NO: 43801 - protein, 388 aa, Homo sapiens; identical to SEQ ID NO: 43796
  Payload ID: 8974
  Gene Symbol: KIR3DS1
  Gene Name: killer cell immunoglobulin-like receptor, three domains, short cytoplasmic tail, 1
  ENSP ID: ENSP00000481739

SEQ ID NO: 43802 - protein, 382 aa, Homo sapiens
  Payload ID: 8974
  Gene Symbol: KIR3DS1
  Gene Name: killer cell immunoglobulin-like receptor, three domains, short cytoplasmic tail, 1
  ENSP ID: ENSP00000481772
MLLMVVSMACVGLFLVQRAGPHMGGQDKPFLSAWPSAVVPRGGHVTLRCHYRHRFNNFMLYKEDRIHVPIFHGRIFQEGFNMSPVTTAHAGNYTCRGSHPHSPTGWSAPSNPMVIMVTGNHRKPSLLAHPGPLVKSGERVILQCWSDIMFEHFFLHREWISKDPSRLVGQIHDGVSKANFSIGSMMRALAGTYRCYGSVTHTPYQLSAPSDPLDIVVTGLYEKPSLSAQPGPKVQAGESVTLSCSSRSSYDMYHLSREGGAHERRLPAVRKVNRTFQADFPLGPATHGGTYRCFGSFRHSPYEWSDPSDPLLVSVTGNPSSSWPSPTEPSSKSGNLRHLHILIGTSVVKIPFTILLFFLLHRWCSNKKKCCCNGPRACREQK

SEQ ID NO: 43803 - protein, 387 aa, Homo sapiens; identical to SEQ ID NO: 43791
  Payload ID: 8974
  Gene Symbol: KIR3DS1
  Gene Name: killer cell immunoglobulin-like receptor, three domains, short cytoplasmic tail, 1
  Uniprot ID: Q14943
  ENSP ID: ENSP00000481993

SEQ ID NO: 43804 - protein, 382 aa, Homo sapiens; identical to SEQ ID NO: 43793
  Payload ID: 8974
  Gene Symbol: KIR3DS1
  Gene Name: killer cell immunoglobulin-like receptor, three domains, short cytoplasmic tail, 1
  ENSP ID: ENSP00000482441

SEQ ID NO: 43805 - protein, 382 aa, Homo sapiens; identical to SEQ ID NO: 43793
  Payload ID: 8974
  Gene Symbol: KIR3DS1
  Gene Name: killer cell immunoglobulin-like receptor, three domains, short cytoplasmic tail, 1
  ENSP ID: ENSP00000482507

SEQ ID NO: 43806 - protein, 388 aa, Homo sapiens; identical to SEQ ID NO: 43796
  Payload ID: 8974
  Gene Symbol: KIR3DS1
  Gene Name: killer cell immunoglobulin-like receptor, three domains, short cytoplasmic tail, 1
  ENSP ID: ENSP00000483082

SEQ ID NO: 43807 - protein, 387 aa, Homo sapiens; identical to SEQ ID NO: 43791
  Payload ID: 8974
  Gene Symbol: KIR3DS1
  Gene Name: killer cell immunoglobulin-like receptor, three domains, short cytoplasmic tail, 1
  Uniprot ID: Q14943
  ENSP ID: ENSP00000483460

SEQ ID NO: 43808 - protein, 387 aa, Homo sapiens; identical to SEQ ID NO: 43791
  Payload ID: 8974
  Gene Symbol: KIR3DS1
  Gene Name: killer cell immunoglobulin-like receptor, three domains, short cytoplasmic tail, 1
  Uniprot ID: Q14943
  ENSP ID: ENSP00000484010

SEQ ID NO: 43809 - protein, 387 aa, Homo sapiens
  Payload ID: 8974
  Gene Symbol: KIR3DS1
  Gene Name: killer cell immunoglobulin-like receptor, three domains, short cytoplasmic tail, 1
  ENSP ID: ENSP00000484756
MSLMVVSMACVGLFLVQRAGPHMGGQDKPFLSAWPSAVVPRGGHVTLRCHYRHRFNNFMLYKEDRIHVPIFHGRIFQEGFNMSPVTTAHAGNYTCRGSHPHSPTGWSAPSNPMVIMVTGNHRKPSLLAHPGPLVKSGERVILQCWSDIMFEHFFLHREWISKDPSRLVGQIHDGVSKANFSIGSMMRALAGTYRCYGSVTHTPYQLSAPSDPLDIVVTGLYEKPSLSAQPGPKVQAGESVTLSCSSRSSYDMYHLSREGGAHERRLPAVRKVNRTFQADFPLGPATHGGTYRCFGSFRHSPYEWSDPSDPLLVSVTGNPSSSWPSPTEPSSKSGNLRHLHILIGTSVVKIPFTILLFFLLHRWCSNKKNAAVMDQEPAGNRSEQRGF

SEQ ID NO: 43810 - protein, 382 aa, Homo sapiens; identical to SEQ ID NO: 43793
  Payload ID: 8974
  Gene Symbol: KIR3DS1
  Gene Name: killer cell immunoglobulin-like receptor, three domains, short cytoplasmic tail, 1
  ENSP ID: ENSP00000484872

SEQ ID NO: 43811 - protein, 219 aa, Homo sapiens
  Payload ID: 8974
  Gene Symbol: KIR3DS1
  Gene Name: killer cell immunoglobulin-like receptor, three domains, short cytoplasmic tail, 1
  ENSP ID: ENSP00000484895
MLLMVVSMACVGFFLVQRAGPHMGGQDKPFLSAWPSAVVPRGGHVTLRCHYRHRFNNFMLYKEDRIHVPIFHGRIFQEGFNMSPVTTAHAGNYTCRGSHPHSPTGWSAPSNPMVIMVTGNHRKPSLLAHPGPLVKSGERVILQCWSDIMFEHFFLHKEGISKDPSRLVGQIHDGVSKANFSIGSMMRALAGTYRCYGSVTHTPYQLSAPSDPLDIVVTG

SEQ ID NO: 43812 - protein, 388 aa, Homo sapiens; identical to SEQ ID NO: 43796
  Payload ID: 8974
  Gene Symbol: KIR3DS1
  Gene Name: killer cell immunoglobulin-like receptor, three domains, short cytoplasmic tail, 1
  ENSP ID: ENSP00000485016

SEQ ID NO: 43813 - protein, 352 aa, Homo sapiens
  Payload ID: 8975
  Gene Symbol: KIR3DX1
  Gene Name: killer cell immunoglobulin-like receptor, three domains, X1
  Uniprot ID: Q9H7L2
  ENSP ID: ENSP00000221567
MAPKLITVLCLGFCLNQKICPHAGAQDKFSLSAWPSPVVPLGGRVTLSCHSHLRFVIWTIFQTTGTRSHELHTGLSNNITISPVTPEHAGTYRCVGIYKHASKWSAESNSLKIIVTGLFTKPSISAHPSSLVHAGARVSLRCHSELAFDEFILYKEGHIQHSQQLDQGMEAGIHYVEAVFSMGPVTPAHAGAYRCCGCFSHSRYEWSAPSDPLDIVITGKYKKPSLSTQVDPMMRLGEKLTLFCSSEISFDQYHLFRHGVAHGQWLSGGQRHREAFQANFSVGRATPVPGGTYRCYGSFNDSPYKPPVTRCNFTPQETLRVLLCHSQNPPLNLTHLALKDSPATCICSLDSQ

SEQ ID NO: 43814 - protein, 139 aa, Homo sapiens
  Payload ID: 8975
  Gene Symbol: KIR3DX1
  Gene Name: killer cell immunoglobulin-like receptor, three domains, X1
  ENSP ID: ENSP00000395115
MAPKLITVLCLGFCLNQKICPHAGAQDKFSLSAWPSPVVPLGGRVTLSCHSHLRFVIWTIFQTTGTRSHELHTGLSNNITISPVTPEHAGTYRCVGIYKHASKWSAESNSLKIIVTAFSLHPGGPHDEAGREVDPLLQL

SEQ ID NO: 43815 - protein, 133 aa, Homo sapiens
  Payload ID: 8975
  Gene Symbol: KIR3DX1
  Gene Name: killer cell immunoglobulin-like receptor, three domains, X1
  ENSP ID: ENSP00000396692
MAPKLITVLCLGFCLNQKICPHAGAQDKFSLSAWPSPVVPLGGRVTLSCHSHLRFVIWTIFQTTGTRSHELHTGLSNNITISPVTPEHAGTYRCVGIYKHASKWSAESNSLKIIVTGGPHDEAGREVDPLLQL

SEQ ID NO: 43816 - protein, 133 aa, Homo sapiens; identical to SEQ ID NO: 43815
  Payload ID: 8975
  Gene Symbol: KIR3DX1
  Gene Name: killer cell immunoglobulin-like receptor, three domains, X1
  ENSP ID: ENSP00000401224

SEQ ID NO: 43817 - protein, 139 aa, Homo sapiens; identical to SEQ ID NO: 43814
  Payload ID: 8975
  Gene Symbol: KIR3DX1
  Gene Name: killer cell immunoglobulin-like receptor, three domains, X1
  ENSP ID: ENSP00000477576

SEQ ID NO: 43818 - protein, 120 aa, Homo sapiens
  Payload ID: 8975
  Gene Symbol: KIR3DX1
  Gene Name: killer cell immunoglobulin-like receptor, three domains, X1
  ENSP ID: ENSP00000479045
  MOD_RES (1)..(1): Any amino acid
XEISFDQYHLFRHGVAHGQWLSGGQRHREAFQANFSVGRATPVPGGTYRCYGSFNDSPYKPPVTRCNFTPQETLRVLLCHSQNPPLNLTPPWQTQSPRKANGRMKRSLQQKRHRRSYMPS

SEQ ID NO: 43819 - protein, 352 aa, Homo sapiens; identical to SEQ ID NO: 43813
  Payload ID: 8975
  Gene Symbol: KIR3DX1
  Gene Name: killer cell immunoglobulin-like receptor, three domains, X1
  Uniprot ID: Q9H7L2
  ENSP ID: ENSP00000479122

SEQ ID NO: 43820 - protein, 365 aa, Homo sapiens
  Payload ID: 8975
  Gene Symbol: KIR3DX1
  Gene Name: killer cell immunoglobulin-like receptor, three domains, X1
  ENSP ID: ENSP00000479466
MAPKLITVLCLGFCLNQKICPHAGAQDKFSLSAWPSPVVPLGGRVTLSCHSHLRFVIWTIFQTTGTRSHELHTGLSNNITISPVTPEHAGTYRCVGIYKHASKWSAESNSLKIIVTGLFTKPSISAHPSSLVHAGARVSLRCHSELAFDEFILYKEGHIQHSQQLDQGMEAGIHYVEAVFSMGPVTPAHAGAYRCCGCFSHSRYEWSAPSDPLDIVITGKYKKPSLSTQVDPMMRLGEKLTLFCSSEISFDQYHLFRHGVAHGQWLSGGQRHREAFQANFSVGRATPVPGGTYRCYGSFNDSPYKPPVTRCNFTPQETLRVLLCHSQNPPLNLTPPWQTQSPRKANGRMKRSLQQKRHRRSYMPS

SEQ ID NO: 43821 - protein, 133 aa, Homo sapiens; identical to SEQ ID NO: 43815
  Payload ID: 8975
  Gene Symbol: KIR3DX1
  Gene Name: killer cell immunoglobulin-like receptor, three domains, X1
  ENSP ID: ENSP00000481832

SEQ ID NO: 43822 - protein, 352 aa, Homo sapiens; identical to SEQ ID NO: 43813
  Payload ID: 8975
  Gene Symbol: KIR3DX1
  Gene Name: killer cell immunoglobulin-like receptor, three domains, X1
  Uniprot ID: Q9H7L2
  ENSP ID: ENSP00000481872

SEQ ID NO: 43823 - protein, 365 aa, Homo sapiens; identical to SEQ ID NO: 43820
  Payload ID: 8975
  Gene Symbol: KIR3DX1
  Gene Name: killer cell immunoglobulin-like receptor, three domains, X1
  ENSP ID: ENSP00000482591

SEQ ID NO: 43824 - protein, 133 aa, Homo sapiens; identical to SEQ ID NO: 43815
  Payload ID: 8975
  Gene Symbol: KIR3DX1
  Gene Name: killer cell immunoglobulin-like receptor, three domains, X1
  ENSP ID: ENSP00000483894

SEQ ID NO: 43825 - protein, 352 aa, Homo sapiens; identical to SEQ ID NO: 43813
  Payload ID: 8975
  Gene Symbol: KIR3DX1
  Gene Name: killer cell immunoglobulin-like receptor, three domains, X1
  Uniprot ID: Q9H7L2
  ENSP ID: ENSP00000484242

SEQ ID NO: 43826 - protein, 120 aa, Homo sapiens; identical to SEQ ID NO: 43818
  Payload ID: 8975
  Gene Symbol: KIR3DX1
  Gene Name: killer cell immunoglobulin-like receptor, three domains, X1
  ENSP ID: ENSP00000484982
  MOD_RES (1)..(1): Any amino acid

SEQ ID NO: 43827 - protein, 374 aa, Homo sapiens
  Payload ID: 8976
  Gene Symbol: KIR2DL1
  Gene Name: killer cell immunoglobulin-like receptor, two domains, long cytoplasmic tail, 1
  Uniprot ID: P43626
  ENSP ID: ENSP00000291633
MSLLVVSMACVGFFLLQGAWPHEGVHRKPSLLAHPGRLVKSEETVILQCWSDVMFEHFLLHREGMFNDTLRLIGEHHDGVSKANFSISRMTQDLAGTYRCYGSVTHSPYQVSAPSDPLDIVIIGLYEKPSLSAQLGPTVLAGENVTLSCSSRSSYDMYHLSREGEAHERRLPAGPKVNGTFQADFPLGPATHGGTYRCFGSFHDSPYEWSKSSDPLLVSVTGNPSNSWPSPTEPSSKTERMFHHVGQACLKLPTSSDPTVSACQSNPRHLHILIGTSVVIILFILLFFLLHRWCSNKKNAAVMDQESAGNRTANSEDSDEQDPQEVTYTQLNHCVFTQRKITRPSQRPKTPPTDIIVYTELPNAESRSKVVSCP

SEQ ID NO: 43828 - protein, 348 aa, Homo sapiens
  Payload ID: 8976
  Gene Symbol: KIR2DL1
  Gene Name: killer cell immunoglobulin-like receptor, two domains, long cytoplasmic tail, 1
  ENSP ID: ENSP00000336769
MSLLVVSMACVGFFLLQGAWPHEGVHRKPSLLAHPGRLVKSEETVILQCWSDVMFEHFLLHREGMFNDTLRLIGEHHDGVSKANFSISRMTQDLAGTYRCYGSVTHSPYQVSAPSDPLDIVIIGLYEKPSLSAQLGPTVLAGENVTLSCSSRSSYDMYHLSREGEAHERRLPAGPKVNGTFQADFPLGPATHGGTYRCFGSFHDSPYEWSKSSDPLLVSVTGNPSNSWPSPTEPSSKTGNPRHLHILIGTSVVIILFILLFFLLHRWCSNKKNAAVMDQESAGNRTANSEDSDEQDPQEVTYTQLNHCVFTQRKITRPSQRPKTPPTDIIVYTELPNAESRSKVVSCP

SEQ ID NO: 43829 - protein, 348 aa, Homo sapiens; identical to SEQ ID NO: 43828
  Payload ID: 8976
  Gene Symbol: KIR2DL1
  Gene Name: killer cell immunoglobulin-like receptor, two domains, long cytoplasmic tail, 1
  ENSP ID: ENSP00000477690

SEQ ID NO: 43830 - protein, 348 aa, Homo sapiens; identical to SEQ ID NO: 43828
  Payload ID: 8976
  Gene Symbol: KIR2DL1
  Gene Name: killer cell immunoglobulin-like receptor, two domains, long cytoplasmic tail, 1
  ENSP ID: ENSP00000478054

SEQ ID NO: 43831 - protein, 348 aa, Homo sapiens; identical to SEQ ID NO: 43828
  Payload ID: 8976
  Gene Symbol: KIR2DL1
  Gene Name: killer cell immunoglobulin-like receptor, two domains, long cytoplasmic tail, 1
  ENSP ID: ENSP00000478202

SEQ ID NO: 43832 - protein, 348 aa, Homo sapiens
  Payload ID: 8976
  Gene Symbol: KIR2DL1
  Gene Name: killer cell immunoglobulin-like receptor, two domains, long cytoplasmic tail, 1
  Uniprot ID: P43626
  ENSP ID: ENSP00000478232
MSLLFVSMACVGFFLLQGAWPHEGVHRKPSLLAHPGPLVKSEETVILQCWSDVMFEHFLLHREGMFNDTLRLIGEHHDGVSKANFSISRMTQDLAGTYRCYGSVTHSPYQVSAPSDPLDIVIIGLYEKPSLSAQPGPTVLAGENVTLSCSSRSSYDMYHLSREGEAHERRLPAGPKVNGTFQADFPLGPATHGGTYRCFGSFHDSPYEWSKSSDPLLVSVTGNPSNSWPSPTEPSSKTGNPRHLHILIGTSVVIILFILLFFLLHRWCSNKKNAAVMDQESAGNRTANSEDSDEQDPQEVTYTQLNHCVFTQRKITRPSQRPKTPPTDIIVYTELPNAESRSKVVSCP

SEQ ID NO: 43833 - protein, 374 aa, Homo sapiens; identical to SEQ ID NO: 43827
  Payload ID: 8976
  Gene Symbol: KIR2DL1
  Gene Name: killer cell immunoglobulin-like receptor, two domains, long cytoplasmic tail, 1
  Uniprot ID: P43626
  ENSP ID: ENSP00000478263

SEQ ID NO: 43834 - protein, 348 aa, Homo sapiens; identical to SEQ ID NO: 43828
  Payload ID: 8976
  Gene Symbol: KIR2DL1
  Gene Name: killer cell immunoglobulin-like receptor, two domains, long cytoplasmic tail, 1
  ENSP ID: ENSP00000478567

SEQ ID NO: 43835 - protein, 348 aa, Homo sapiens; identical to SEQ ID NO: 43828
  Payload ID: 8976
  Gene Symbol: KIR2DL1
  Gene Name: killer cell immunoglobulin-like receptor, two domains, long cytoplasmic tail, 1
  ENSP ID: ENSP00000478604

SEQ ID NO: 43836 - protein, 348 aa, Homo sapiens; identical to SEQ ID NO: 43828
  Payload ID: 8976
  Gene Symbol: KIR2DL1
  Gene Name: killer cell immunoglobulin-like receptor, two domains, long cytoplasmic tail, 1
  ENSP ID: ENSP00000478633

SEQ ID NO: 43837 - protein, 348 aa, Homo sapiens
  Payload ID: 8976
  Gene Symbol: KIR2DL1
  Gene Name: killer cell immunoglobulin-like receptor, two domains, long cytoplasmic tail, 1
  ENSP ID: ENSP00000478895
MSLLVVSMACVGFFLLQGAWPHEGVHRKPSLLAHPGRLVKSEETVILQCWSDVMFEHFLLHREGMFNDTLRLIGEHHDGVSKANFSISRMTQDLAGTYRCYGSVTHSPYQVSAPSDPLDIVIIGLYEKPSLSAQPGPTVLAGENVTLSCSSRSSYDMYHLSREGEAHERRLPAGTKVNGTFQANFPLGPATHGGTYRCFGSFRDSPYEWSKSSDPLLVSVTGNPSNSWPSPTEPSSETGNPRHLHILIGTSVVIILFILLFFLLHCWCSNKKNAAVMDQESAGNRTANSEDSDEQDPQEVTYTQLNHCVFTQRKITRPSQRPKTPPTDIIVYTELPNAESRSKVVSCP

SEQ ID NO: 43838 - protein, 348 aa, Homo sapiens
  Payload ID: 8976
  Gene Symbol: KIR2DL1
  Gene Name: killer cell immunoglobulin-like receptor, two domains, long cytoplasmic tail, 1
  ENSP ID: ENSP00000478988
MSLMVVSMACVGFFLLQGAWPHEGVHRKPSLRAHPGPLVKSEETVILQCWSDVRFEHFLLHREGKFKDTLRLIGEHHDGVSKANFSIGPMMQDLAGTYRCYGSVTHSPYQLSAPSDPLDIVITGLYEKPSLSAQPGPTVLAGESVTLSCSSRSSYDMYHLSREGEAHERRFSAGPKVNGTFQADFPLGPATHGGTYRCFGSFRDSPYEWSNSSDPLLVSVTGNPSNSWPSPTEPSSKTGNPRHLHILIGTSVVIILFILLFFLLHRWCSNKKNAAVMDQESAGNRTANSEDSDEQDPQEVTYTQLNHCVFTQRKITRPSQRPKTPPTDIIVYTELPNAESRSKVVSCP

SEQ ID NO: 43839 - protein, 348 aa, Homo sapiens; identical to SEQ ID NO: 43832
  Payload ID: 8976
  Gene Symbol: KIR2DL1
  Gene Name: killer cell immunoglobulin-like receptor, two domains, long cytoplasmic tail, 1
  Uniprot ID: P43626
  ENSP ID: ENSP00000479363

SEQ ID NO: 43840 - protein, 348 aa, Homo sapiens
  Payload ID: 8976
  Gene Symbol: KIR2DL1
  Gene Name: killer cell immunoglobulin-like receptor, two domains, long cytoplasmic tail, 1
  ENSP ID: ENSP00000479574
MSLLVVSMACVGFFLLQGAWPHEGVHRKPSLLAHPGRLVKSEETVILQCWSDVMFEHFLLHREGMFNDTLRLIGEHHDGVSKANFSISRMTQDLAGTYRCYGSVTHSPYQVSAPSDPLDIVIIGLYEKPSLSAQPGPTVLAGENVTLSCSSRSSYDMYHLSREGEAHERRLPAGPKVNGTFQADFPLGPATHGGTYRCFGSFHDSPYEWSKSSDPLLVSVTGNPSNSWPSPTEPSSKTGNPRHLHILIGTSVVIILFILLFFLLHRWCSNKKNAAVMDQESAGNRTANSEDSDEQDPQEVTYTQLNHCVFTQRKITRPSQRPKTPPTDIIVYTELPNAESRSKVVSCP

SEQ ID NO: 43841 - protein, 348 aa, Homo sapiens; identical to SEQ ID NO: 43828
  Payload ID: 8976
  Gene Symbol: KIR2DL1
  Gene Name: killer cell immunoglobulin-like receptor, two domains, long cytoplasmic tail, 1
  ENSP ID: ENSP00000479644

SEQ ID NO: 43842 - protein, 374 aa, Homo sapiens
  Payload ID: 8976
  Gene Symbol: KIR2DL1
  Gene Name: killer cell immunoglobulin-like receptor, two domains, long cytoplasmic tail, 1
  ENSP ID: ENSP00000479941
MSLLFVSMACVGFFLLQGAWPHEGVHRKPSLLAHPGPLVKSEETVILQCWSDVMFEHFLLHREGMFNDTLRLIGEHHDGVSKANFSISRMTQDLAGTYRCYGSVTHSPYQVSAPSDPLDIVIIGLYEKPSLSAQPGPTVLAGENVTLSCSSRSSYDMYHLSREGEAHERRLPAGPKVNGTFQADFPLGPATHGGTYRCFGSFHDSPYEWSKSSDPLLVSVTGNPSNSWPSPTEPSSKTERMFHHVGQACLKLPTSSDPTVSACQSNPRHLHILIGTSVVIILFILLFFLLHRWCSNKKNAAVMDQESAGNRTANSEDSDEQDPQEVTYTQLNHCVFTQRKITRPSQRPKTPPTDIIVYTELPNAESRSKVVSCP

SEQ ID NO: 43843 - protein, 348 aa, Homo sapiens; identical to SEQ ID NO: 43828
  Payload ID: 8976
  Gene Symbol: KIR2DL1
  Gene Name: killer cell immunoglobulin-like receptor, two domains, long cytoplasmic tail, 1
  ENSP ID: ENSP00000480247

SEQ ID NO: 43844 - protein, 348 aa, Homo sapiens; identical to SEQ ID NO: 43828
  Payload ID: 8976
  Gene Symbol: KIR2DL1
  Gene Name: killer cell immunoglobulin-like receptor, two domains, long cytoplasmic tail, 1
  ENSP ID: ENSP00000480989

SEQ ID NO: 43845 - protein, 348 aa, Homo sapiens; identical to SEQ ID NO: 43837
  Payload ID: 8976
  Gene Symbol: KIR2DL1
  Gene Name: killer cell immunoglobulin-like receptor, two domains, long cytoplasmic tail, 1
  ENSP ID: ENSP00000481123

SEQ ID NO: 43846 - protein, 374 aa, Homo sapiens
  Payload ID: 8976
  Gene Symbol: KIR2DL1
  Gene Name: killer cell immunoglobulin-like receptor, two domains, long cytoplasmic tail, 1
  ENSP ID: ENSP00000481187
MSLLVVSMACVGFFLLQGAWPHEGVHRKPSLLAHPGRLVKSEETVILQCWSDVMFEHFLLHREGMFNDTLRLIGEHHDGVSKANFSISRMTQDLAGTYRCYGSVTHSPYQVSAPSDPLDIVIIGLYEKPSLSAQPGPTVLAGENVTLSCSSRSSYDMYHLSREGEAHERRLPAGTKVNGTFQANFPLGPATHGGTYRCFGSFRDSPYEWSKSSDPLLVSVTGNPSNSWPSPTEPSSETERMFHHVGQACLKLPTSSDPTVSACQSNPRHLHILIGTSVVIILFILLFFLLHCWCSNKKNAAVMDQESAGNRTANSEDSDEQDPQEVTYTQLNHCVFTQRKITRPSQRPKTPPTDIIVYTELPNAESRSKVVSCP

SEQ ID NO: 43847 - protein, 116 aa, Homo sapiens
  Payload ID: 8976
  Gene Symbol: KIR2DL1
  Gene Name: killer cell immunoglobulin-like receptor, two domains, long cytoplasmic tail, 1
  ENSP ID: ENSP00000481722
  MOD_RES (1)..(1): Any amino acid
XSHLLPGNPRHLHILIGTSVVIILFILLFFLLHRWCSNKKNAAVMDQESAGNRTANSEDSDEQDPQEVTYTQLNHCVFTQRKITRPSQRPKTPPTDIIVYTELPNAESRSKVVSCP

SEQ ID NO: 43848 - protein, 348 aa, Homo sapiens; identical to SEQ ID NO: 43832
  Payload ID: 8976
  Gene Symbol: KIR2DL1
  Gene Name: killer cell immunoglobulin-like receptor, two domains, long cytoplasmic tail, 1
  Uniprot ID: P43626
  ENSP ID: ENSP00000482120

SEQ ID NO: 43849 - protein, 348 aa, Homo sapiens; identical to SEQ ID NO: 43828
  Payload ID: 8976
  Gene Symbol: KIR2DL1
  Gene Name: killer cell immunoglobulin-like receptor, two domains, long cytoplasmic tail, 1
  ENSP ID: ENSP00000482449

SEQ ID NO: 43850 - protein, 348 aa, Homo sapiens; identical to SEQ ID NO: 43837
  Payload ID: 8976
  Gene Symbol: KIR2DL1
  Gene Name: killer cell immunoglobulin-like receptor, two domains, long cytoplasmic tail, 1
  ENSP ID: ENSP00000482456

SEQ ID NO: 43851 - protein, 348 aa, Homo sapiens; identical to SEQ ID NO: 43828
  Payload ID: 8976
  Gene Symbol: KIR2DL1
  Gene Name: killer cell immunoglobulin-like receptor, two domains, long cytoplasmic tail, 1
  ENSP ID: ENSP00000482501

SEQ ID NO: 43852 - protein, 348 aa, Homo sapiens; identical to SEQ ID NO: 43828
  Payload ID: 8976
  Gene Symbol: KIR2DL1
  Gene Name: killer cell immunoglobulin-like receptor, two domains, long cytoplasmic tail, 1
  ENSP ID: ENSP00000482506

SEQ ID NO: 43853 - protein, 348 aa, Homo sapiens
  Payload ID: 8976
  Gene Symbol: KIR2DL1
  Gene Name: killer cell immunoglobulin-like receptor, two domains, long cytoplasmic tail, 1
  ENSP ID: ENSP00000483378
MSLMVVSMVCVGFFLLQGAWPHEGVHRKPSLLAHPGPLVKSEETVILQCWSDVRFQHFLLHREGKFKDTLHLIGEHHDGVSKANFSIGPMMQDLAGTYRCYGSVTHSPYQLSAPSDPLDIVITGLYEKPSLSAQPGPTVLAGESVTLSCSSRSSYDMYHLSREGEAHERRFSAGPKVNGTFQADFPLGPATHGGTYRCFGSFRDSPYEWSNSSDPLLVSVTGNPSNSWPSPTEPSSKTGNPRHLHILIGTSVVIILFILLFFLLHRWCSNKKNAAVMDQESAGNRTANSEDSDEQDPQEVTYTQLNHCVFTQRKITRPSQRPKTPPTDIIVYTELPNAESRSKVVSCP

SEQ ID NO: 43854 - protein, 348 aa, Homo sapiens; identical to SEQ ID NO: 43828
  Payload ID: 8976
  Gene Symbol: KIR2DL1
  Gene Name: killer cell immunoglobulin-like receptor, two domains, long cytoplasmic tail, 1
  ENSP ID: ENSP00000483525

SEQ ID NO: 43855 - protein, 374 aa, Homo sapiens; identical to SEQ ID NO: 43827
  Payload ID: 8976
  Gene Symbol: KIR2DL1
  Gene Name: killer cell immunoglobulin-like receptor, two domains, long cytoplasmic tail, 1
  Uniprot ID: P43626
  ENSP ID: ENSP00000484361

SEQ ID NO: 43856 - protein, 374 aa, Homo sapiens; identical to SEQ ID NO: 43827
  Payload ID: 8976
  Gene Symbol: KIR2DL1
  Gene Name: killer cell immunoglobulin-like receptor, two domains, long cytoplasmic tail, 1
  Uniprot ID: P43626
  ENSP ID: ENSP00000484559

SEQ ID NO: 43857 - protein, 348 aa, Homo sapiens
  Payload ID: 8976
  Gene Symbol: KIR2DL1
  Gene Name: killer cell immunoglobulin-like receptor, two domains, long cytoplasmic tail, 1
  ENSP ID: ENSP00000484582
MSLLVVSMACVGFFLLQGAWPHEGVHRKPSLLAHPGRLVKSEETVILQCWSDVMFEHFLLHREGMFNDTLRLIGEHHDGVSKANFSISRMTQDLAGTYRCYGSVTHSPYQVSAPSDPLDIVIIGLYEKPSLSAQPGPTVLAGENVTLSCSSRSSYDMYHLSREGEAHERRLPAGTKVNGTFQANFPLGPATHGGTYRCFGSFRDSPYEWSKSSDPLLVSVTGNPSNSWPSPTEPSSETGNPRHLHILIGTSVVIILFILLFFLLHRWCSNKKNAAVMDQESAGNRTANSEDSDEQDPQEVTYTQLNHCVFTQRKITRPSQRPKTPPTDIIVYTELPNAESRSKVVSCP

SEQ ID NO: 43858 - protein, 374 aa, Homo sapiens; identical to SEQ ID NO: 43842
  Payload ID: 8976
  Gene Symbol: KIR2DL1
  Gene Name: killer cell immunoglobulin-like receptor, two domains, long cytoplasmic tail, 1
  ENSP ID: ENSP00000484700

SEQ ID NO: 43859 - protein, 348 aa, Homo sapiens
  Payload ID: 8976
  Gene Symbol: KIR2DL1
  Gene Name: killer cell immunoglobulin-like receptor, two domains, long cytoplasmic tail, 1
  ENSP ID: ENSP00000484701
MSLLVVSMACVGFFLLQGAWPHEGVHRKPSLLAHPGRLVKSEETVILQCWSDVMFEHFLLHREGMFNDTLRLIGEHHDGVSKANFSISRMTQDLAGTYRCYGSVTHSPYQVSAPSDPLDIVIIGLYEKPSLSAQLGPTVLAGENVTLSCSSWSSYDMYHLSREGEAHERRLPAGPKVNGTFQADFPLGPATHGGTYRCFGSFHDSPYEWSKSSDPLLVSVTGNPSNSWPSPTEPSSKTGNPRHLHILIGTSVVIILFILLFFLLHRWCSNKKNAAVMDQESAGNRTANSEDSDEQDPQEVTYTQLNHCVFTQRKITRPSQRPKTPPTDIIVYTELPNAESRSKVVSCP

SEQ ID NO: 43860 - protein, 348 aa, Homo sapiens
  Payload ID: 8976
  Gene Symbol: KIR2DL1
  Gene Name: killer cell immunoglobulin-like receptor, two domains, long cytoplasmic tail, 1
  ENSP ID: ENSP00000484871
MSLLVVSMACVGFFLLQGAWPHEGVHRKPSLLAHPGRLVKSEETVILQCWSDVMFEHFLLHREGMFNDTLRLIGEHHDGVSKANFSISRMTQDLAGTYRCYGSVTHSPYQVSAPSDPLDVVIIGLYEKPSLSAQPGPTVLAGENVTLSCSSRSSYDMYHLSREGEAHERRLPAGTKVNGTFQANFPLGPATHGGTYRCFGSFRDSPYEWSKSSDPLLVSVTGNPSNSWPSPTEPSSETGNPRHLHILIGTSVVIILFILLFFLLHCWCSNKKNAAVMDQESAGNRTANSEDSDEQDPQEVTYTQLNHCVFTQRKITRPSQRPKTPPTDIIVYTELPNAESRSKVVSCP

SEQ ID NO: 43861 - protein, 348 aa, Homo sapiens
  Payload ID: 8977
  Gene Symbol: KIR2DL2
  Gene Name: killer cell immunoglobulin-like receptor, two domains, long cytoplasmic tail, 2
  ENSP ID: ENSP00000478169
MSLMVVSMACVGFFLLQGAWPHEGVHRKPSLLAHPGRLVKSEETVILQCWSDVRFEHFLLHREGKFKDTLHLIGEHHDGVSKANFSIGPMMQDLAGTYRCYGSVTHSPYQLSAPSDPLDIVITGLYEKPSLSAQPGPTVLAGESVTLSCSSRSSYDMYHLSREGEAHECRFSAGPKVNGTFQADFPLGPATHGGTYRCFGSFRDSPYEWSNSSDPLLVSVTGNPSNSWPSPTEPSSKTGNPRHLHILIGTSVVIILFILLFFLLHRWCSNKKNAAVMDQESAGNRTANSEDSDEQDPQEVTYTQLNHCVFTQRKITRPSQRPKTPPTDIIVYTELPNAESRSKVVSCP

SEQ ID NO: 43862 - protein, 348 aa, Homo sapiens
  Payload ID: 8977
  Gene Symbol: KIR2DL2
  Gene Name: killer cell immunoglobulin-like receptor, two domains, long cytoplasmic tail, 2
  ENSP ID: ENSP00000478464
MSLMVVSMACVGFFLLQGAWPHEGVHRKPSLLAHPGPLVKSEETVILQCWSDVRFEHFLLHREGKYKDTLHLIGEHHDGVSKANFSIGPMMQDLAGTYRCYGSVTHSPYQLSAPSDPLDIVITGLYEKPSLSAQPGPTVLAGESVTLSCSSRSSYDMYHLSREGEAHERRFSAGPKVNGTFQADFPLGPATHGGTYRCFGSFRDSPYEWSNSSDPLLVSVTGNPSNSWPSPTEPSSKTGNPRHLHILIGTSVVIILFILLFFLLHRWCSNKKNAAVMDQESAGNRTANSEDSDEQDPQEVTYTQLNHCVFTQRKITRPSQRPKTPPTDIIVYAELPNAESRSKVVSCP

SEQ ID NO: 43863 - protein, 331 aa, Homo sapiens
  Payload ID: 8977
  Gene Symbol: KIR2DL2
  Gene Name: killer cell immunoglobulin-like receptor, two domains, long cytoplasmic tail, 2
  ENSP ID: ENSP00000479514
MSLMVVSMACVGFFLLQGAWPHEGVHRKPSLLAHPGRLVKSEETVILQCWSDVRFEHFLLHREGKFKDTLHLIGEHHDGVSKANFSIGPMMQDLAGTYRCYGSVTHSPYQLSAPSDPLDIVITGLYEKPSLSAQPGPTVLAGESVTLSCSSRSSYDMYHLSREGEAHECRFSAGPKVNGTFQADFPLGPATHGGTYRCFGSFRDSPYEWSNSSDPLLVSVTGNPRHLHILIGTSVVIILFILLFFLLHRWCSNKKNAAVMDQESAGNRTANSEDSDEQDPQEVTYTQLNHCVFTQRKITRPSQRPKTPPTDIIVYTELPNAESRSKVVSCP

SEQ ID NO: 43864 - protein, 348 aa, Homo sapiens
  Payload ID: 8977
  Gene Symbol: KIR2DL2
  Gene Name: killer cell immunoglobulin-like receptor, two domains, long cytoplasmic tail, 2
  Uniprot ID: P43627
  ENSP ID: ENSP00000480161
MSLMVVSMACVGFFLLQGAWPHEGVHRKPSLLAHPGRLVKSEETVILQCWSDVRFEHFLLHREGKFKDTLHLIGEHHDGVSKANFSIGPMMQDLAGTYRCYGSVTHSPYQLSAPSDPLDIVITGLYEKPSLSAQPGPTVLAGESVTLSCSSRSSYDMYHLSREGEAHECRFSAGPKVNGTFQADFPLGPATHGGTYRCFGSFRDSPYEWSNSSDPLLVSVIGNPSNSWPSPTEPSSKTGNPRHLHILIGTSVVIILFILLFFLLHRWCSNKKNAAVMDQESAGNRTANSEDSDEQDPQEVTYTQLNHCVFTQRKITRPSQRPKTPPTDIIVYAELPNAESRSKVVSCP

SEQ ID NO: 43865 - protein, 348 aa, Homo sapiens; identical to SEQ ID NO: 43861
  Payload ID: 8977
  Gene Symbol: KIR2DL2
  Gene Name: killer cell immunoglobulin-like receptor, two domains, long cytoplasmic tail, 2
  ENSP ID: ENSP00000480495

SEQ ID NO: 43866 - protein, 348 aa, Homo sapiens; identical to SEQ ID NO: 43862
  Payload ID: 8977
  Gene Symbol: KIR2DL2
  Gene Name: killer cell immunoglobulin-like receptor, two domains, long cytoplasmic tail, 2
  ENSP ID: ENSP00000480924

SEQ ID NO: 43867 - protein, 348 aa, Homo sapiens; identical to SEQ ID NO: 43861
  Payload ID: 8977
  Gene Symbol: KIR2DL2
  Gene Name: killer cell immunoglobulin-like receptor, two domains, long cytoplasmic tail, 2
  ENSP ID: ENSP00000481124

SEQ ID NO: 43868 - protein, 348 aa, Homo sapiens; identical to SEQ ID NO: 43861
  Payload ID: 8977
  Gene Symbol: KIR2DL2
  Gene Name: killer cell immunoglobulin-like receptor, two domains, long cytoplasmic tail, 2
  ENSP ID: ENSP00000481696

SEQ ID NO: 43869 - protein, 304 aa, Homo sapiens
  Payload ID: 8977
  Gene Symbol: KIR2DL2
  Gene Name: killer cell immunoglobulin-like receptor, two domains, long cytoplasmic tail, 2
  ENSP ID: ENSP00000481757
MSLMVVSMACVGFFLLQGAWPHEGVHRKPSLLAHPGRLVKSEETVILQCWSDVRFEHFLLHREGKFKDTLHLIGEHHDGVSKANFSIGPMMQDLAGTYRCYGSVTHSPYQLSAPSDPLDIVITGLYEKPSLSAQPGPTVLAGESVTLSCSSRSSYDMYHLSREGEAHECRFSAGPKVNGTFQADFPLGPATHGGTYRCFGSFRDSPYEWSNSSDPLLVSVTGNPSNSWPSPTEPSSKTGNPRHLHVLIGTSVVKIPFTILLFFLLHRWCSDKKNAAVMDQEPAGNRTVNSEDSDEQDHQEVSYA

SEQ ID NO: 43870 - protein, 348 aa, Homo sapiens; identical to SEQ ID NO: 43864
  Payload ID: 8977
  Gene Symbol: KIR2DL2
  Gene Name: killer cell immunoglobulin-like receptor, two domains, long cytoplasmic tail, 2
  Uniprot ID: P43627
  ENSP ID: ENSP00000481907

SEQ ID NO: 43871 - protein, 348 aa, Homo sapiens; identical to SEQ ID NO: 43864
  Payload ID: 8977
  Gene Symbol: KIR2DL2
  Gene Name: killer cell immunoglobulin-like receptor, two domains, long cytoplasmic tail, 2
  Uniprot ID: P43627
  ENSP ID: ENSP00000482201

SEQ ID NO: 43872 - protein, 348 aa, Homo sapiens; identical to SEQ ID NO: 43861
  Payload ID: 8977
  Gene Symbol: KIR2DL2
  Gene Name: killer cell immunoglobulin-like receptor, two domains, long cytoplasmic tail, 2
  ENSP ID: ENSP00000482387

SEQ ID NO: 43873 - protein, 348 aa, Homo sapiens; identical to SEQ ID NO: 43864
  Payload ID: 8977
  Gene Symbol: KIR2DL2
  Gene Name: killer cell immunoglobulin-like receptor, two domains, long cytoplasmic tail, 2
  Uniprot ID: P43627
  ENSP ID: ENSP00000482519

SEQ ID NO: 43874 - protein, 348 aa, Homo sapiens; identical to SEQ ID NO: 43861
  Payload ID: 8977
  Gene Symbol: KIR2DL2
  Gene Name: killer cell immunoglobulin-like receptor, two domains, long cytoplasmic tail, 2
  ENSP ID: ENSP00000482672

SEQ ID NO: 43875 - protein, 348 aa, Homo sapiens; identical to SEQ ID NO: 43864
  Payload ID: 8977
  Gene Symbol: KIR2DL2
  Gene Name: killer cell immunoglobulin-like receptor, two domains, long cytoplasmic tail, 2
  Uniprot ID: P43627
  ENSP ID: ENSP00000483052

SEQ ID NO: 43876 - protein, 348 aa, Homo sapiens; identical to SEQ ID NO: 43861
  Payload ID: 8977
  Gene Symbol: KIR2DL2
  Gene Name: killer cell immunoglobulin-like receptor, two domains, long cytoplasmic tail, 2
  ENSP ID: ENSP00000483233

SEQ ID NO: 43877 - protein, 348 aa, Homo sapiens; identical to SEQ ID NO: 43864
  Payload ID: 8977
  Gene Symbol: KIR2DL2
  Gene Name: killer cell immunoglobulin-like receptor, two domains, long cytoplasmic tail, 2
  Uniprot ID: P43627
  ENSP ID: ENSP00000483373

SEQ ID NO: 43878 - protein, 248 aa, Homo sapiens
  Payload ID: 8977
  Gene Symbol: KIR2DL2
  Gene Name: killer cell immunoglobulin-like receptor, two domains, long cytoplasmic tail, 2
  ENSP ID: ENSP00000483572
MSLMVVSMACVGFFLLQGAWPHEGLYEKPSLSAQPGPTVLAGESVTLSCSSRSSYDMYHLSREGEAHECRFSAGPKVNGTFQADFPLGPATHGGTYRCFGSFRDSPYEWSNSSDPLLVSVTGNPSNSWPSPTEPSSKTGNPRHLHILIGTSVVIILFILLFFLLHRWCSNKKNAAVMDQESAGNRTANSEDSDEQDPQEVTYTQLNHCVFTQRKITRPSQRPKTPPTDIIVYTELPNAESRSKVVSCP

SEQ ID NO: 43879 - protein, 348 aa, Homo sapiens; identical to SEQ ID NO: 43861
  Payload ID: 8977
  Gene Symbol: KIR2DL2
  Gene Name: killer cell immunoglobulin-like receptor, two domains, long cytoplasmic tail, 2
  ENSP ID: ENSP00000483945

SEQ ID NO: 43880 - protein, 348 aa, Homo sapiens; identical to SEQ ID NO: 43861
  Payload ID: 8977
  Gene Symbol: KIR2DL2
  Gene Name: killer cell immunoglobulin-like receptor, two domains, long cytoplasmic tail, 2
  ENSP ID: ENSP00000484145

SEQ ID NO: 43881 - protein, 348 aa, Homo sapiens; identical to SEQ ID NO: 43861
  Payload ID: 8977
  Gene Symbol: KIR2DL2
  Gene Name: killer cell immunoglobulin-like receptor, two domains, long cytoplasmic tail, 2
  ENSP ID: ENSP00000484319

SEQ ID NO: 43882 - protein, 348 aa, Homo sapiens; identical to SEQ ID NO: 43861
  Payload ID: 8977
  Gene Symbol: KIR2DL2
  Gene Name: killer cell immunoglobulin-like receptor, two domains, long cytoplasmic tail, 2
  ENSP ID: ENSP00000484349

SEQ ID NO: 43883 - protein, 348 aa, Homo sapiens; identical to SEQ ID NO: 43862
  Payload ID: 8977
  Gene Symbol: KIR2DL2
  Gene Name: killer cell immunoglobulin-like receptor, two domains, long cytoplasmic tail, 2
  ENSP ID: ENSP00000484563

SEQ ID NO: 43884 - protein, 348 aa, Homo sapiens; identical to SEQ ID NO: 43861
  Payload ID: 8977
  Gene Symbol: KIR2DL2
  Gene Name: killer cell immunoglobulin-like receptor, two domains, long cytoplasmic tail, 2
  ENSP ID: ENSP00000484717

SEQ ID NO: 43885 - protein, 341 aa, Homo sapiens
  Payload ID: 8978
  Gene Symbol: KIR2DL3
  Gene Name: killer cell immunoglobulin-like receptor, two domains, long cytoplasmic tail, 3
  Uniprot ID: P43628
  ENSP ID: ENSP00000342215
MSLMVVSMVCVGFFLLQGAWPHEGVHRKPSLLAHPGPLVKSEETVILQCWSDVRFQHFLLHREGKFKDTLHLIGEHHDGVSKANFSIGPMMQDLAGTYRCYGSVTHSPYQLSAPSDPLDIVITGLYEKPSLSAQPGPTVLAGESVTLSCSSRSSYDMYHLSREGEAHERRFSAGPKVNGTFQADFPLGPATHGGTYRCFGSFRDSPYEWSNSSDPLLVSVTGNPSNSWPSPTEPSSETGNPRHLHVLIGTSVVIILFILLLFFLLHRWCCNKKNAVVMDQEPAGNRTVNREDSDEQDPQEVTYAQLNHCVFTQRKITRPSQRPKTPPTDIIVYTELPNAEP

SEQ ID NO: 43886 - protein, 349 aa, Homo sapiens
  Payload ID: 8978
  Gene Symbol: KIR2DL3
  Gene Name: killer cell immunoglobulin-like receptor, two domains, long cytoplasmic tail, 3
  ENSP ID: ENSP00000477890
MSLMVVSMACVGFFLLQGAWPHEGVHRKPSLLAHPGPLVKSEETVILQCWSDVRFQHFLLHREGKFKDTLHLIGEHHDGVSKANFSIGPMMQDLAGTYRCYGSVTHSPYQLSAPSDPLDIVITGLYEKPSLSAQPGPTVLAGESVTLSCSSRSSYDMYHLSREGEAHERRFSAGPKVNGTFQADFPLGPATHGGTYRCFGSFRDSPYEWSNSSDPLLVSVTGNPSNSWPSPTEPSSKTGNPRHLHVLIGTSVVIILFILLLFFLLHRWCSNKKNAAVMDQEPAGNRTANSEDSDEQDPQEVTYVQLDHCVFTQRKITRPSQRPKTPPTDTRVYTELPNAESRSKVVSCP

SEQ ID NO: 43887 - protein, 349 aa, Homo sapiens
  Payload ID: 8978
  Gene Symbol: KIR2DL3
  Gene Name: killer cell immunoglobulin-like receptor, two domains, long cytoplasmic tail, 3
  ENSP ID: ENSP00000477942
MSLMVVSMACVGFFLLQGAWPHEGVHRKPSLLAHPGPLVKSEETVILQCWSDVRFQHFLLHREGKFKDTLHLIGEHHDGVSKANFSIGPMMQDLAGTYRCYGSVTHSPYQLSAPSDPLDIVITGLYEKPSLSAQPGPTVLAGESVTLSCSSRSSYDMYHLSREGEAHERRFSAGPKVNGTFQADFPLGPATHGGTYRCFGSFRDSPYEWSNSSDPLLVSVTGNPSNSWPSPTEPSSETGNPRHLHVLIGTSVVIILFILLLFFLLHRWCSNKKNAAVMDQEPAGNRTANSEDSDEQDPQEVTYVQLDHCVFTQRKITRPSQRPKTPPTDTRVYTELPNAESRSKVVSCP

SEQ ID NO: 43888 - protein, 341 aa, Homo sapiens
  Payload ID: 8978
  Gene Symbol: KIR2DL3
  Gene Name: killer cell immunoglobulin-like receptor, two domains, long cytoplasmic tail, 3
  Uniprot ID: P43628
  ENSP ID: ENSP00000478136
MSLMVVSMVCVGFFLLQGAWPHEGVHRKPSLLAHPGPLVKSEETVILQCWSDVRFQHFLLHREGKFKDTLHLIGEHHDGVSKANFSIGPMMQDLAGTYRCYGSVTHSPYQLSAPSDPLDIVITGLYEKPSLSAQPGPTVLAGESVTLSCSSRSSYDMYHLSREGEAHERRFSAGPKVNGTFQADFPLGPATHGGTYRCFGSFRDSPYEWSNSSDPLLVSVTGNPSNSWLSPTEPSSETGNPRHLHVLIGTSVVIILFILLLFFLLHRWCCNKKNAVVMDQEPAGNRTVNREDSDEQDPQEVTYAQLNHCVFTQRKITHPSQRPKTPPTDIIVYTELPNAEP

SEQ ID NO: 43889 - protein, 349 aa, Homo sapiens; identical to SEQ ID NO: 43886
  Payload ID: 8978
  Gene Symbol: KIR2DL3
  Gene Name: killer cell immunoglobulin-like receptor, two domains, long cytoplasmic tail, 3
  ENSP ID: ENSP00000478312

SEQ ID NO: 43890 - protein, 341 aa, Homo sapiens; identical to SEQ ID NO: 43885
  Payload ID: 8978
  Gene Symbol: KIR2DL3
  Gene Name: killer cell immunoglobulin-like receptor, two domains, long cytoplasmic tail, 3
  Uniprot ID: P43628
  ENSP ID: ENSP00000478657

SEQ ID NO: 43891 - protein, 341 aa, Homo sapiens; identical to SEQ ID NO: 43888
  Payload ID: 8978
  Gene Symbol: KIR2DL3
  Gene Name: killer cell immunoglobulin-like receptor, two domains, long cytoplasmic tail, 3
  Uniprot ID: P43628
  ENSP ID: ENSP00000478848

SEQ ID NO: 43892 - protein, 349 aa, Homo sapiens
  Payload ID: 8978
  Gene Symbol: KIR2DL3
  Gene Name: killer cell immunoglobulin-like receptor, two domains, long cytoplasmic tail, 3
  ENSP ID: ENSP00000479070
MSLMVVSMACVGFFLLQGAWPHEGVHRKPSLLAHPGPLVKSEETVILQCWSDVRFQHFLLHREGKFKDTLHLIGEHHDGVSKANFSIGPMMQDLAGTYRCYGSVTHSPYQLSAPSDPLDIVITGLYEKPSLSAQPGPTVLAGESVTLSCSSRSSYDMYHLSREGEAHERRFSAGPKVNGTFQADFPLGPATHGGTYRCFGSFRDSPYEWSNSSDPLLVSVTGNPSNSWLSPTEPSSETGNPRHLHVLIGTSVVIILFILLLFFLLHRWCSNKKNAAVMDQEPAGNRTANSEDSDEQDPQEVTYVQLDHCVFTQRKITRPSQRPKTPPTDTRVYTELPNAESRSKVVSCP

SEQ ID NO: 43893 - protein, 341 aa, Homo sapiens; identical to SEQ ID NO: 43885
  Payload ID: 8978
  Gene Symbol: KIR2DL3
  Gene Name: killer cell immunoglobulin-like receptor, two domains, long cytoplasmic tail, 3
  Uniprot ID: P43628
  ENSP ID: ENSP00000479121

SEQ ID NO: 43894 - protein, 349 aa, Homo sapiens; identical to SEQ ID NO: 43886
  Payload ID: 8978
  Gene Symbol: KIR2DL3
  Gene Name: killer cell immunoglobulin-like receptor, two domains, long cytoplasmic tail, 3
  ENSP ID: ENSP00000479952

SEQ ID NO: 43895 - protein, 349 aa, Homo sapiens; identical to SEQ ID NO: 43886
  Payload ID: 8978
  Gene Symbol: KIR2DL3
  Gene Name: killer cell immunoglobulin-like receptor, two domains, long cytoplasmic tail, 3
  ENSP ID: ENSP00000479967

SEQ ID NO: 43896 - protein, 341 aa, Homo sapiens; identical to SEQ ID NO: 43885
  Payload ID: 8978
  Gene Symbol: KIR2DL3
  Gene Name: killer cell immunoglobulin-like receptor, two domains, long cytoplasmic tail, 3
  Uniprot ID: P43628
  ENSP ID: ENSP00000480087

SEQ ID NO: 43897 - protein, 349 aa, Homo sapiens; identical to SEQ ID NO: 43886
  Payload ID: 8978
  Gene Symbol: KIR2DL3
  Gene Name: killer cell immunoglobulin-like receptor, two domains, long cytoplasmic tail, 3
  ENSP ID: ENSP00000480400

SEQ ID NO: 43898 - protein, 341 aa, Homo sapiens; identical to SEQ ID NO: 43885
  Payload ID: 8978
  Gene Symbol: KIR2DL3
  Gene Name: killer cell immunoglobulin-like receptor, two domains, long cytoplasmic tail, 3
  Uniprot ID: P43628
  ENSP ID: ENSP00000480464

SEQ ID NO: 43899 - protein, 349 aa, Homo sapiens; identical to SEQ ID NO: 43886
  Payload ID: 8978
  Gene Symbol: KIR2DL3
  Gene Name: killer cell immunoglobulin-like receptor, two domains, long cytoplasmic tail, 3
  ENSP ID: ENSP00000480911

SEQ ID NO: 43900 - protein, 341 aa, Homo sapiens; identical to SEQ ID NO: 43888
  Payload ID: 8978
  Gene Symbol: KIR2DL3
  Gene Name: killer cell immunoglobulin-like receptor, two domains, long cytoplasmic tail, 3
  Uniprot ID: P43628
  ENSP ID: ENSP00000481159

SEQ ID NO: 43901 - protein, 341 aa, Homo sapiens; identical to SEQ ID NO: 43885
  Payload ID: 8978
  Gene Symbol: KIR2DL3
  Gene Name: killer cell immunoglobulin-like receptor, two domains, long cytoplasmic tail, 3
  Uniprot ID: P43628
  ENSP ID: ENSP00000481237

SEQ ID NO: 43902 - protein, 349 aa, Homo sapiens
  Payload ID: 8978
  Gene Symbol: KIR2DL3
  Gene Name: killer cell immunoglobulin-like receptor, two domains, long cytoplasmic tail, 3
  ENSP ID: ENSP00000481267
MSLMVVSMVCVGFFLLQGAWPHEGVHRKPSLLAHPGPLVKSEETVILQCWSDVRFQHFLLHREGKFKDTLHLIGEHHDGVSKANFSIGPMMQDLAGTYRCYGSVTHSPYQLSAPSDPLDIVITGLYEKPSLSAQPGPTVLAGESVTLSCSSRSSYDMYHLSREGEAHERRFSAGPKVNGTFQADFPLGPATHGGTYRCFGSFRDSPYEWSNSSDPLLVSVTGNPSNSWPSPTEPSSKTGNPRHLHVLIGTSVVIILFILLLFFLLHRWCSNKKNAAVMDQEPAGNRTANSEDSDEQDPQEVTYVQLDHCVFTQRKITRPSQRPKTPPTDTRVYTELPNAESRSKVVSCP

SEQ ID NO: 43903 - protein, 341 aa, Homo sapiens; identical to SEQ ID NO: 43885
  Payload ID: 8978
  Gene Symbol: KIR2DL3
  Gene Name: killer cell immunoglobulin-like receptor, two domains, long cytoplasmic tail, 3
  Uniprot ID: P43628
  ENSP ID: ENSP00000481355

SEQ ID NO: 43904 - protein, 349 aa, Homo sapiens; identical to SEQ ID NO: 43886
  Payload ID: 8978
  Gene Symbol: KIR2DL3
  Gene Name: killer cell immunoglobulin-like receptor, two domains, long cytoplasmic tail, 3
  ENSP ID: ENSP00000481437

SEQ ID NO: 43905 - protein, 341 aa, Homo sapiens; identical to SEQ ID NO: 43885
  Payload ID: 8978
  Gene Symbol: KIR2DL3
  Gene Name: killer cell immunoglobulin-like receptor, two domains, long cytoplasmic tail, 3
  Uniprot ID: P43628
  ENSP ID: ENSP00000481478

SEQ ID NO: 43906 - protein, 341 aa, Homo sapiens
  Payload ID: 8978
  Gene Symbol: KIR2DL3
  Gene Name: killer cell immunoglobulin-like receptor, two domains, long cytoplasmic tail, 3
  ENSP ID: ENSP00000482248
MSLMVVSMVCVGFFLLQGAWPHEGVHRKPSLLAHPGPLVKSEETVILQCWSDVRFQHFLLHREGKFKDTLHLIGEHHDGVSKANFSIGPMMQDLAGTYRCYGSVTHSPYQLSAPSDPLDIVITGLYEKPSLSAQPGPTVLAGESVTLSCSSRSSYDMYHLSREGEAHERRFSAGPKVNGTFQADFPLGPATHGGTYRCFGSFRDSPYEWSNSSDPLLVSVTGNPSNSWPSPTEPSSETGNPRHLHVLIGTSVVIILFILLLFFLLHRWCCNKKNAVVMDQEPAGNRTVNREDSDEQDPQEVTYAQLNHCVFTQRKITHPSQRPKTPPTDIIVYTELPNAEP

SEQ ID NO: 43907 - protein, 349 aa, Homo sapiens; identical to SEQ ID NO: 43886
  Payload ID: 8978
  Gene Symbol: KIR2DL3
  Gene Name: killer cell immunoglobulin-like receptor, two domains, long cytoplasmic tail, 3
  ENSP ID: ENSP00000482509

SEQ ID NO: 43908 - protein, 349 aa, Homo sapiens; identical to SEQ ID NO: 43886
  Payload ID: 8978
  Gene Symbol: KIR2DL3
  Gene Name: killer cell immunoglobulin-like receptor, two domains, long cytoplasmic tail, 3
  ENSP ID: ENSP00000482813

SEQ ID NO: 43909 - protein, 341 aa, Homo sapiens; identical to SEQ ID NO: 43885
  Payload ID: 8978
  Gene Symbol: KIR2DL3
  Gene Name: killer cell immunoglobulin-like receptor, two domains, long cytoplasmic tail, 3
  Uniprot ID: P43628
  ENSP ID: ENSP00000482830

SEQ ID NO: 43910 - protein, 348 aa, Homo sapiens; identical to SEQ ID NO: 43853
  Payload ID: 8978
  Gene Symbol: KIR2DL3
  Gene Name: killer cell immunoglobulin-like receptor, two domains, long cytoplasmic tail, 3
  ENSP ID: ENSP00000482936

SEQ ID NO: 43911 - protein, 341 aa, Homo sapiens; identical to SEQ ID NO: 43885
  Payload ID: 8978
  Gene Symbol: KIR2DL3
  Gene Name: killer cell immunoglobulin-like receptor, two domains, long cytoplasmic tail, 3
  Uniprot ID: P43628
  ENSP ID: ENSP00000483192

SEQ ID NO: 43912 - protein, 349 aa, Homo sapiens; identical to SEQ ID NO: 43886
  Payload ID: 8978
  Gene Symbol: KIR2DL3
  Gene Name: killer cell immunoglobulin-like receptor, two domains, long cytoplasmic tail, 3
  ENSP ID: ENSP00000483242

SEQ ID NO: 43913 - protein, 341 aa, Homo sapiens; identical to SEQ ID NO: 43885
  Payload ID: 8978
  Gene Symbol: KIR2DL3
  Gene Name: killer cell immunoglobulin-like receptor, two domains, long cytoplasmic tail, 3
  Uniprot ID: P43628
  ENSP ID: ENSP00000483419

SEQ ID NO: 43914 - protein, 349 aa, Homo sapiens; identical to SEQ ID NO: 43886
  Payload ID: 8978
  Gene Symbol: KIR2DL3
  Gene Name: killer cell immunoglobulin-like receptor, two domains, long cytoplasmic tail, 3
  ENSP ID: ENSP00000483442

SEQ ID NO: 43915 - protein, 349 aa, Homo sapiens; identical to SEQ ID NO: 43886
  Payload ID: 8978
  Gene Symbol: KIR2DL3
  Gene Name: killer cell immunoglobulin-like receptor, two domains, long cytoplasmic tail, 3
  ENSP ID: ENSP00000483447

SEQ ID NO: 43916 - protein, 349 aa, Homo sapiens; identical to SEQ ID NO: 43886
  Payload ID: 8978
  Gene Symbol: KIR2DL3
  Gene Name: killer cell immunoglobulin-like receptor, two domains, long cytoplasmic tail, 3
  ENSP ID: ENSP00000483475

SEQ ID NO: 43917 - protein, 341 aa, Homo sapiens; identical to SEQ ID NO: 43885
  Payload ID: 8978
  Gene Symbol: KIR2DL3
  Gene Name: killer cell immunoglobulin-like receptor, two domains, long cytoplasmic tail, 3
  Uniprot ID: P43628
  ENSP ID: ENSP00000483551

SEQ ID NO: 43918 - protein, 349 aa, Homo sapiens; identical to SEQ ID NO: 43886
  Payload ID: 8978
  Gene Symbol: KIR2DL3
  Gene Name: killer cell immunoglobulin-like receptor, two domains, long cytoplasmic tail, 3
  ENSP ID: ENSP00000483582

SEQ ID NO: 43919 - protein, 341 aa, Homo sapiens; identical to SEQ ID NO: 43885
  Payload ID: 8978
  Gene Symbol: KIR2DL3
  Gene Name: killer cell immunoglobulin-like receptor, two domains, long cytoplasmic tail, 3
  Uniprot ID: P43628
  ENSP ID: ENSP00000483883

SEQ ID NO: 43920 - protein, 341 aa, Homo sapiens; identical to SEQ ID NO: 43885
  Payload ID: 8978
  Gene Symbol: KIR2DL3
  Gene Name: killer cell immunoglobulin-like receptor, two domains, long cytoplasmic tail, 3
  Uniprot ID: P43628
  ENSP ID: ENSP00000483975

SEQ ID NO: 43921 - protein, 349 aa, Homo sapiens
  Payload ID: 8978
  Gene Symbol: KIR2DL3
  Gene Name: killer cell immunoglobulin-like receptor, two domains, long cytoplasmic tail, 3
  ENSP ID: ENSP00000484051
MSLMVVSMACVGFFLLQGAWPHEGVHRKPSLRAHPGPLVKSEETVILQCWSDVRFEHFLLHREGKFKDTLRLIGEHHDGVSKANFSIGPMMQDLAGTYRCYGSVTHSPYQLSAPSDPLDIVITGLYEKPSLSAQPGPTVLAGESVTLSCSSRSSYDMYHLSREGEAHERRFSAGPKVNGTFQADFPLGPATHGGTYRCFGSFRDSPYEWSNSSDPLLVSVTGNPSNSWPSPTEPSSKTGNPRHLHVLIGTSVVIILFVLLLFFLLHRWCSNKKNAVVMDQEPAGNRTVNREDSDEQDPQEVTYAQLNHCVFTQRKITRPSQRPKTPPTDIIVYTELPNAEPRSKVVSCP

SEQ ID NO: 43922 - protein, 349 aa, Homo sapiens; identical to SEQ ID NO: 43887
  Payload ID: 8978
  Gene Symbol: KIR2DL3
  Gene Name: killer cell immunoglobulin-like receptor, two domains, long cytoplasmic tail, 3
  ENSP ID: ENSP00000484126

SEQ ID NO: 43923 - protein, 341 aa, Homo sapiens; identical to SEQ ID NO: 43885
  Payload ID: 8978
  Gene Symbol: KIR2DL3
  Gene Name: killer cell immunoglobulin-like receptor, two domains, long cytoplasmic tail, 3
  Uniprot ID: P43628
  ENSP ID: ENSP00000484459

SEQ ID NO: 43924 - protein, 349 aa, Homo sapiens
  Payload ID: 8978
  Gene Symbol: KIR2DL3
  Gene Name: killer cell immunoglobulin-like receptor, two domains, long cytoplasmic tail, 3
  ENSP ID: ENSP00000484947
MSLMVVSMVCVGFFLLQGAWPHEGVHRKPSLLAHPGPLVKSEETVILQCWSDVRFQHFLLHREGKFKDTLHLIGEHHDGVSKANFSIGPMMQDLAGTYRCYGSVTHSPYQLSAPSDPLDIVITGLYEKPSLSAQPGPTVLAGESVTLSCSSRSSYDMYHLSREGEAHERRFSAGPKVNGTFQADFPLGPATHGGTYRCFGSFRDSPYEWSNSSDPLLVSVTGNPSNSWPSPTEPSSKTGSPRHLHVLIGTSVVIILFILLLFFLLHRWCSNKKNAAVMDQEPAGNRTANSEDSDEQDPQEVTYVQLDHCVFTQRKITRPSQRPKTPPTDTRVYTELPNAESRSKVVSCP

SEQ ID NO: 43925 - protein, 342 aa, Homo sapiens
  Payload ID: 8979
  Gene Symbol: KIR2DL4
  Gene Name: killer cell immunoglobulin-like receptor, two domains, long cytoplasmic tail, 4
  Uniprot ID: Q99706
  ENSP ID: ENSP00000339634
MSMSPTVIILACLGFFLDQSVWAHVGGQDKPFCSAWPSAVVPQGGHVTLRCHYRRGFNIFTLYKKDGVPVPELYNRIFWNSFLISPVTPAHAGTYRCRGFHPHSPTEWSAPSNPLVIMVTGLYEKPSLTARPGPTVRAGENVTLSCSSQSSFDIYHLSREGEAHELRLPAVPSINGTFQADFPLGPATHGETYRCFGSFHGSPYEWSDPSDPLPVSVTGNPSSSWPSPTEPSFKTDAAVMNQEPAGHRTVNREDSDEQDPQEVTYAQLDHCIFTQRKITGPSQRSKRPSTDTSVCIELPNAEPRALSPAHEHHSQALMGSSRETTALSQTQLASSNVPAAGI

SEQ ID NO: 43926 - protein, 247 aa, Homo sapiens
  Payload ID: 8979
  Gene Symbol: KIR2DL4
  Gene Name: killer cell immunoglobulin-like receptor, two domains, long cytoplasmic tail, 4
  ENSP ID: ENSP00000345331
MSMSPTVIILACLGFFLDQSVWAHVGLYEKPSLTARPGPTVRAGENVTLSCSSQSSFDIYHLSREGEAHELRLPAVPSINGTFQADFPLGPATHGETYRCFGSFHGSPYEWSDPSDPLPVSVTGNPSSSWPSPTEPSFKTDAAVMNQEPAGHRTVNREDSDEQDPQEVTYAQLDHCIFTQRKITGPSQRSKRPSTDTSVCIELPNAEPRALSPAHEHHSQALMGSSRETTALSQTQLASSNVPAAGI

SEQ ID NO: 43927 - protein, 325 aa, Homo sapiens
  Payload ID: 8979
  Gene Symbol: KIR2DL4
  Gene Name: killer cell immunoglobulin-like receptor, two domains, long cytoplasmic tail, 4
  Uniprot ID: Q99706
  ENSP ID: ENSP00000350088
MSMSPTVIILACLGFFLDQSVWAHVGGQDKPFCSAWPSAVVPQGGHVTLRCHYRRGFNIFTLYKKDGVPVPELYNRIFWNSFLISPVTPAHAGTYRCRGFHPHSPTEWSAPSNPLVIMVTGLYEKPSLTARPGPTVRAGENVTLSCSSQSSFDIYHLSREGEAHELRLPAVPSINGTFQADFPLGPATHGETYRCFGSFHGSPYEWSDPSDPLPVSVTDAAVMNQEPAGHRTVNREDSDEQDPQEVTYAQLDHCIFTQRKITGPSQRSKRPSTDTSVCIELPNAEPRALSPAHEHHSQALMGSSRETTALSQTQLASSNVPAAGI

SEQ ID NO: 43928 - protein, 273 aa, Homo sapiens
  Payload ID: 8979
  Gene Symbol: KIR2DL4
  Gene Name: killer cell immunoglobulin-like receptor, two domains, long cytoplasmic tail, 4
  ENSP ID: ENSP00000351988
MSMSPTVIILACLGFFLDQSVWAHVGGQDKPFCSAWPSAVVPQGGHVTLRCHYRRGFNIFTLYKKDGVPVPELYNRIFWNSFLISPVTPAHAGTYRCRGFHPHSPTEWSAPSNPLVIMVTGLYEKPSLTARPGPTVRAGENVTLSCSSQSSFDIYHLSREGEAHELRLPAVPSINGTFQADFPLGPATHGETYRCFGSFHGSPYEWSDPSDPLPVSVTGNPSSSWPSPTEPSFKTGIARHLHAVIRYSVAIILFTILPFFLLHRWCSKKKMLL

SEQ ID NO: 43929 - protein, 416 aa, Homo sapiens
  Payload ID: 8979
  Gene Symbol: KIR2DL4
  Gene Name: killer cell immunoglobulin-like receptor, two domains, long cytoplasmic tail, 4
  ENSP ID: ENSP00000379580
MSPSHVVVNVSTARSGPLTTSSAPVSRAESLRPGSRSCTMSMSPTVIILACLGFFLDQSVWAHVGGQDKPFCSAWPSAVVPQGGHVTLRCHYRRGFNIFTLYKKDGVPVPELYNRIFWNSFLISPVTPAHAGTYRCRGFHPHSPTEWSAPSNPLVIMVTGLYEKPSLTARPGPTVRAGENVTLSCSSQSSFDIYHLSREGEAHELRLPAVPSINGTFQADFPLGPATHGETYRCFGSFHGSPYEWSDPSDPLPVSVTGNPSSSWPSPTEPSFKTGIARHLHAVIRYSVAIILFTILPFFLLHRWCSKKKDAAVMNQEPAGHRTVNREDSDEQDPQEVTYAQLDHCIFTQRKITGPSQRSKRPSTDTSVCIELPNAEPRALSPAHEHHSQALMGSSRETTALSQTQLASSNVPAAGI

SEQ ID NO: 43930 - protein, 398 aa, Homo sapiens
  Payload ID: 8979
  Gene Symbol: KIR2DL4
  Gene Name: killer cell immunoglobulin-like receptor, two domains, long cytoplasmic tail, 4
  ENSP ID: ENSP00000379584
  MOD_RES (1)..(1): Any amino acid
XMSPTVIILACLGFFLDQSVWAHVGGQDKPFCSAWPSAVVPQGGHVTLRCHYRRGFNIFTLYKKDGVPVPELYNRIFWNSFLISPVTPAHAGTYRCRGFHPHSPTEWSAPSNPLVIMVTGLYEKPSLTARPGPTVRAGENVTLSCSSQSSFDIYHLSREGEAHELRLPAVPSINGTFQADFPLGPATHGETYRCFGSFHGSPYEWSDPSDPLPVSVTGNPSSSWPSPTEPSFKTGIARHLHAVIRYSVAIILFTILPFFLLHRWCSKKKVSLTKQRPENSGPCAEAGWEHADAAVMNQEPAGHRTVNREDSDEQDPQEVTYAQLDHCIFTQRKITGPSQRSKRPSTDTSVCIELPNAEPRALSPAHEHHSQALMGSSRETTALSQTQLASSNVPAAGI

SEQ ID NO: 43931 - protein, 230 aa, Homo sapiens
  Payload ID: 8979
  Gene Symbol: KIR2DL4
  Gene Name: killer cell immunoglobulin-like receptor, two domains, long cytoplasmic tail, 4
  Uniprot ID: Q99706
  ENSP ID: ENSP00000379588
MSMSPTVIILACLGFFLDQSVWAHVGLYEKPSLTARPGPTVRAGENVTLSCSSQSSFDIYHLSREGEAHELRLPAVPSINGTFQADFPLGPATHGETYRCFGSFHGSPYEWSDPSDPLPVSVTDAAVMNQEPAGHRTVNREDSDEQDPQEVTYAQLDHCIFTQRKITGPSQRSKRPSTDTSVCIELPNAEPRALSPAHEHHSQALMGSSRETTALSQTQLASSNVPAAGI

SEQ ID NO: 43932 - protein, 312 aa, Homo sapiens
  Payload ID: 8979
  Gene Symbol: KIR2DL4
  Gene Name: killer cell immunoglobulin-like receptor, two domains, long cytoplasmic tail, 4
  ENSP ID: ENSP00000477505
MSMSPTVIILACLGFFLDQSVWAHVGGQDKPFCSAWPSAVVPQGGHVTLRCHYRRGFNIFTLYKKDGVPVPELYNRIFWNSFLISPVTPAHAGTYRCRGFHPHSPTEWSAPSNPLVIMVTGLYEKPSLTARPGPTVRTGENVTLSCSSQSSFDIYHLSREGEAHELRLPAVPSINGTFQADFPLGPATHGETYRCFGSFHGSPYEWSDASDPLPVSVTGNPSSSWPSPTEPSFKTGIARHLHAVIRYSVAIILFTILPFFLLHRWCSKKKSKPHEAEARELRALCGSRMGARRCCCNEPRACGTQNSEQGGL

SEQ ID NO: 43933 - protein, 245 aa, Homo sapiens
  Payload ID: 8979
  Gene Symbol: KIR2DL4
  Gene Name: killer cell immunoglobulin-like receptor, two domains, long cytoplasmic tail, 4
  ENSP ID: ENSP00000477525
MSPTVIILACLGFFLDQSVWAHVGLYEKPSLTARPGPTVRTGENVTLSCSSQSSFDIYHLSREGEAHELRLPAVPSINGTFQADFPLGPATHGETYRCFGSFHGSPYEWSDASDPLPVSVTGNPSSSWPSPTEPSFKTDAAVMNQEPAGHRTVNREDSDEQDPQEVTYAQLDHCIFTQRKITGPSQRSKRPSTDTSVCIELPNAEPRALSPAHEHHSQALMGSSRETTALSQTQLASSNVPAAGI

SEQ ID NO: 43934 - protein, 230 aa, Homo sapiens
  Payload ID: 8979
  Gene Symbol: KIR2DL4
  Gene Name: killer cell immunoglobulin-like receptor, two domains, long cytoplasmic tail, 4
  ENSP ID: ENSP00000477552
MSMSPTVIILACLGFFLDQSVWAHVGLYEKPSLTARPGPTVRTGENVTLSCSSQSSFDIYHLSREGEAHELRLPAVPSINGTFQADFPLGPATHGETYRCFGSFHGSPYEWSDASDPLPVSVTDAAVMNQEPAGHRTVNREDSDEQDPQEVTYAQLDHCIFTQRKITGPSQRSKRPSTDTSVCIELPNAEPRALSPAHEHHSQALMGSSRETTALSQTQLASSNVPAAGI

SEQ ID NO: 43935 - protein, 245 aa, Homo sapiens
  Payload ID: 8979
  Gene Symbol: KIR2DL4
  Gene Name: killer cell immunoglobulin-like receptor, two domains, long cytoplasmic tail, 4
  ENSP ID: ENSP00000477560
MSPTVIILACLGFFLDQSVWAHVGLYEKPSLTARPGPTVRAGENVTLSCSSQSSFDIYHLSREGEAHELRLPAVPSINGTFQADFPLGPATHGETYRCFGSFHGSPYEWSDPSDPLPVSVTGNPSSSWPSPTEPSFKTDAAVMNQEPAGHRTVNREDSDEQDPQEVTYAQLDHCIFTQRKITGPSQRSKRPSTDTSVCIELPNAEPRALSPAHEHHSQALMGSSRETTALSQTQLASSNVPAAGI

SEQ ID NO: 43936 - protein, 377 aa, Homo sapiens
  Payload ID: 8979
  Gene Symbol: KIR2DL4
  Gene Name: killer cell immunoglobulin-like receptor, two domains, long cytoplasmic tail, 4
  Uniprot ID: Q99706
  ENSP ID: ENSP00000477601
MSMSPTVIILACLGFFLDQSVWAHVGGQDKPFCSAWPSAVVPQGGHVTLRCHYRRGFNIFTLYKKDGVPVPELYNRIFWNSFLISPVTPAHAGTYRCRGFHPHSPTEWSAPSNPLVIMVTGLYEKPSLTARPGPTVRTGENVTLSCSSQSSFDIYHLSREGEAHELRLPAVPSINGTFQADFPLGPATHGETYRCFGSFHGSPYEWSDASDPLPVSVTGNPSSSWPSPTEPSFKTGIARHLHAVIRYSVAIILFTILPFFLLHRWCSKKKNAAVMNQEPAGHRTVNREDSDEQDPQEVTYAQLDHCIFTQRKITGPSQRSKRPSTDTSVCIELPNAEPRALSPAHEHHSQALMGSSRETTALSQTQLASSNVPAAGI

SEQ ID NO: 43937 - protein, 397 aa, Homo sapiens
  Payload ID: 8979
  Gene Symbol: KIR2DL4
  Gene Name: killer cell immunoglobulin-like receptor, two domains, long cytoplasmic tail, 4
  ENSP ID: ENSP00000477790
MSLMVVSMACVGFFLDQSVWAHVGGQDKPFCSAWPSAVVPQGGHVTLRCHCRRGFNIFTLYKKDGVPVPELYNRIFWNSFLISPVTPAHAGTYRCRGFHPHSPTEWSAPSNPLVIMVTGLYEKPSLTARPGPTVRAGENVTLSCSSQSSFDIYHLSREGEAHELRLPAVPSINGTFQADFPLGPATHGETYRCFGSFHGSPYEWSDPSDPLPVSVTGNPSSSWPSPTEPSFKTGIARHLHAVIRYSVAIILFTILPFFLLHRWCSKKKVSLTKQRPENSGPCAEAGWEHADAAVMNQEPAGHRTVNREDSDEQDPQEVTYAQLDHCIFTQRKITGPSQRSKRPSTDTSVCIELPNAEPRALSPAHEHHSQALMGSSRETTALSQTQLASSNVPAAGI

SEQ ID NO: 43938 - protein, 416 aa, Homo sapiens; identical to SEQ ID NO: 43929
  Payload ID: 8979
  Gene Symbol: KIR2DL4
  Gene Name: killer cell immunoglobulin-like receptor, two domains, long cytoplasmic tail, 4
  ENSP ID: ENSP00000477834

SEQ ID NO: 43939 - protein, 377 aa, Homo sapiens; identical to SEQ ID NO: 43936
  Payload ID: 8979
  Gene Symbol: KIR2DL4
  Gene Name: killer cell immunoglobulin-like receptor, two domains, long cytoplasmic tail, 4
  Uniprot ID: Q99706
  ENSP ID: ENSP00000477886

SEQ ID NO: 43940 - protein, 377 aa, Homo sapiens; identical to SEQ ID NO: 43936
  Payload ID: 8979
  Gene Symbol: KIR2DL4
  Gene Name: killer cell immunoglobulin-like receptor, two domains, long cytoplasmic tail, 4
  Uniprot ID: Q99706
  ENSP ID: ENSP00000477887

SEQ ID NO: 43941 - protein, 342 aa, Homo sapiens; identical to SEQ ID NO: 43925
  Payload ID: 8979
  Gene Symbol: KIR2DL4
  Gene Name: killer cell immunoglobulin-like receptor, two domains, long cytoplasmic tail, 4
  Uniprot ID: Q99706
  ENSP ID: ENSP00000477984

SEQ ID NO: 43942 - protein, 342 aa, Homo sapiens
  Payload ID: 8979
  Gene Symbol: KIR2DL4
  Gene Name: killer cell immunoglobulin-like receptor, two domains, long cytoplasmic tail, 4
  ENSP ID: ENSP00000478048
MSMSPTVIILACLGFFLDQSVWAHVGGQDKPFCSAWPSAVVPQGGHVTLRCHYRRGFNIFTLYKKDGVPVPELYNRIFWNSFLISPVTPAHAGTYRCRGFHPHSPTEWSAPSNPLVIMVTGLYEKPSLTARPGPTVRTGENVTLSCSSQSSFDIYHLSREGEAHELRLPAVPSINGTFQADFPLGPATHGETYRCFGSFHGSPYEWSDASDPLPVSVTGNPSSSWPSPTEPSFKTDAAVMNQEPAGHRTVNREDSDEQDPQEVTYAQLDHCIFTQRKITGPSQRSKRPSTDTSVCIELPNAEPRALSPAHEHHSQALMGSSRETTALSQTQLASSNVPAAGI

SEQ ID NO: 43943 - protein, 273 aa, Homo sapiens
  Payload ID: 8979
  Gene Symbol: KIR2DL4
  Gene Name: killer cell immunoglobulin-like receptor, two domains, long cytoplasmic tail, 4
  ENSP ID: ENSP00000478144
MSMSPTVIILACLGFFLDQSVWAHVGGQDKPFCSAWPSAVVPQGGHVTLRCHCRRGFNIFTLYKKDGVPVPELYNRIFWNSFLISPVTPAHAGTYRCRGFHPHSPTEWSAPSNPLVIMVTGLYEKPSLTARPGPTVRAGENVTLSCSSQSSFDIYHLSREGEAHELRLPAVPSINGTFQADFPLGPATHGETYRCFGSFHGSPYEWSDPSDPLPVSVTGNPSSSWPSPTEPSFKTGIARHLHAVIRYSVAIILFTILPFFLLHRWCSKKKMLL

SEQ ID NO: 43944 - protein, 246 aa, Homo sapiens
  Payload ID: 8979
  Gene Symbol: KIR2DL4
  Gene Name: killer cell immunoglobulin-like receptor, two domains, long cytoplasmic tail, 4
  ENSP ID: ENSP00000478275
  MOD_RES (1)..(1): Any amino acid
XMSPTVIILACLGFFLDQSVWAHVGLYEKPSLTARPGPTVRTGENVTLSCSSQSSFDIYHLSREGEAHELRLPAVPSINGTFQADFPLGPATHGETYRCFGSFHGSPYEWSDASDPLPVSVTGNPSSSWPSPTEPSFKTDAAVMNQEPAGHRTVNREDSDEQDPQEVTYAQLDHCIFTQRKITGPSQRSKRPSTDTSVCIELPNAEPRALSPAHEHHSQALMGSSRETTALSQTQLASSNVPAAGI

SEQ ID NO: 43945 - protein, 377 aa, Homo sapiens; identical to SEQ ID NO: 43936
  Payload ID: 8979
  Gene Symbol: KIR2DL4
  Gene Name: killer cell immunoglobulin-like receptor, two domains, long cytoplasmic tail, 4
  Uniprot ID: Q99706
  ENSP ID: ENSP00000478362

SEQ ID NO: 43946 - protein, 377 aa, Homo sapiens; identical to SEQ ID NO: 43936
  Payload ID: 8979
  Gene Symbol: KIR2DL4
  Gene Name: killer cell immunoglobulin-like receptor, two domains, long cytoplasmic tail, 4
  Uniprot ID: Q99706
  ENSP ID: ENSP00000478491

SEQ ID NO: 43947 - protein, 377 aa, Homo sapiens
  Payload ID: 8979
  Gene Symbol: KIR2DL4
  Gene Name: killer cell immunoglobulin-like receptor, two domains, long cytoplasmic tail, 4
  ENSP ID: ENSP00000478497
MSMSPTVIILACLGFFLDQSVWAHVGGQDKPFCSAWPSAVVPQGGHVTLRCHCRRGFNIFTLYKKDGVPVPELYNRIFWNSFLISPVTPAHAGTYRCRGFHPHSPTEWSAPSNPLVIMVTGLYEKPSLTARPGPTVRAGENVTLSCSSQSSFDIYHLSREGEAHELRLPAVPSINGTFQADFPLGPATHGETYRCFGSFHGSPYEWSDPSDPLPVSVTGNPSSSWPSPTEPSFKTGIARHLHAVIRYSVAIILFTILPFFLLHRWCSKKKNAAVMNQEPAGHRTVNREDSDEQDPQEVTYAQLDHCIFTQRKITGPSQRSKRPSTDTSVCIELPNAEPRALSPAHEHHSQALMGSSRETTALSQTQLASSNVPAAGI

SEQ ID NO: 43948 - protein, 377 aa, Homo sapiens; identical to SEQ ID NO: 43947
  Payload ID: 8979
  Gene Symbol: KIR2DL4
  Gene Name: killer cell immunoglobulin-like receptor, two domains, long cytoplasmic tail, 4
  ENSP ID: ENSP00000478694

SEQ ID NO: 43949 - protein, 342 aa, Homo sapiens
  Payload ID: 8979
  Gene Symbol: KIR2DL4
  Gene Name: killer cell immunoglobulin-like receptor, two domains, long cytoplasmic tail, 4
  ENSP ID: ENSP00000478881
MSMSPTVIILACLGFFLDQSVWAHVGGQDKPFCSAWPSAVVPQGGHVTLRCHCRRGFNIFTLYKKDGVPVPELYNRIFWNSFLISPVTPAHAGTYRCRGFHPHSPTEWSAPSNPLVIMVTGLYEKPSLTARPGPTVRAGENVTLSCSSQSSFDIYHLSREGEAHELRLPAVPSINGTFQADFPLGPATHGETYRCFGSFHGSPYEWSDPSDPLPVSVTGNPSSSWPSPTEPSFKTDAAVMNQEPAGHRTVNREDSDEQDPQEVTYAQLDHCIFTQRKITGPSQRSKRPSTDTSVCIELPNAEPRALSPAHEHHSQALMGSSRETTALSQTQLASSNVPAAGI

SEQ ID NO: 43950 - protein, 399 aa, Homo sapiens
  Payload ID: 8979
  Gene Symbol: KIR2DL4
  Gene Name: killer cell immunoglobulin-like receptor, two domains, long cytoplasmic tail, 4
  ENSP ID: ENSP00000479000
MSMSPTVIILACLGFFLDQSVWAHVGGQDKPFCSAWPSAVVPQGGHVTLRCHYRRGFNIFTLYKKDGVPVPELYNRIFWNSFLISPVTPAHAGTYRCRGFHPHSPTEWSAPSNPLVIMVTGLYEKPSLTARPGPTVRAGENVTLSCSSQSSFDIYHLSREGEAHELRLPAVPSINGTFQADFPLGPATHGETYRCFGSFHGSPYEWSDPSDPLPVSVTGNPSSSWPSPTEPSFKTGIARHLHAVIRYSVAIILFTILPFFLLHRWCSKKKVSLTKQRPENSGPCAEAGWEHADAAVMNQEPAGHRTVNREDSDEQDPQEVTYAQLDHCIFTQRKITGPSQRSKRPSTDTSVCIELPNAEPRALSPAHEHHSQALMGSSRETTALSQTQLASSNVPAAGI

SEQ ID NO: 43951 - protein, 273 aa, Homo sapiens; identical to SEQ ID NO: 43928
  Payload ID: 8979
  Gene Symbol: KIR2DL4
  Gene Name: killer cell immunoglobulin-like receptor, two domains, long cytoplasmic tail, 4
  ENSP ID: ENSP00000479014

SEQ ID NO: 43952 - protein, 312 aa, Homo sapiens
  Payload ID: 8979
  Gene Symbol: KIR2DL4
  Gene Name: killer cell immunoglobulin-like receptor, two domains, long cytoplasmic tail, 4
  ENSP ID: ENSP00000479131
MSMSPTVIILACLGFFLDQSVWAHVGGQDKPFCSAWPSAVVPQGGHVTLRCHYRRGFNIFTLYKKDGVPVPELYNRIFWNSFLISPVTPAHAGTYRCRGFHPHSPTEWSAPSNPLVIMVTGLYEKPSLTARLGPTVRAGENVTLSCSSQSSFDIYHLSREGEAHELRLPAVPSINGTFQADFPLGPATHGETYRCFGSFHGSPYEWSDPSDPLPVSVTGNPSSSWPSPTEPSFKTGIARHLHAVIRYSVAIILFTILPFFLLHRWCSKKKSKPHEAEARELRALCGSRMGARRCCCNEPRACGTQNSEQGGL

SEQ ID NO: 43953 - protein, 342 aa, Homo sapiens; identical to SEQ ID NO: 43925
  Payload ID: 8979
  Gene Symbol: KIR2DL4
  Gene Name: killer cell immunoglobulin-like receptor, two domains, long cytoplasmic tail, 4
  Uniprot ID: Q99706
  ENSP ID: ENSP00000479175

SEQ ID NO: 43954 - protein, 360 aa, Homo sapiens
  Payload ID: 8979
  Gene Symbol: KIR2DL4
  Gene Name: killer cell immunoglobulin-like receptor, two domains, long cytoplasmic tail, 4
  Uniprot ID: Q99706
  ENSP ID: ENSP00000479179
MSMSPTVIILACLGFFLDQSVWAHVGGQDKPFCSAWPSAVVPQGGHVTLRCHYRRGFNIFTLYKKDGVPVPELYNRIFWNSFLISPVTPAHAGTYRCRGFHPHSPTEWSAPSNPLVIMVTGLYEKPSLTARPGPTVRTGENVTLSCSSQSSFDIYHLSREGEAHELRLPAVPSINGTFQADFPLGPATHGETYRCFGSFHGSPYEWSDASDPLPVSVTGIARHLHAVIRYSVAIILFTILPFFLLHRWCSKKKNAAVMNQEPAGHRTVNREDSDEQDPQEVTYAQLDHCIFTQRKITGPSQRSKRPSTDTSVCIELPNAEPRALSPAHEHHSQALMGSSRETTALSQTQLASSNVPAAGI

SEQ ID NO: 43955 - protein, 377 aa, Homo sapiens; identical to SEQ ID NO: 43947
  Payload ID: 8979
  Gene Symbol: KIR2DL4
  Gene Name: killer cell immunoglobulin-like receptor, two domains, long cytoplasmic tail, 4
  ENSP ID: ENSP00000479278

SEQ ID NO: 43956 - protein, 342 aa, Homo sapiens; identical to SEQ ID NO: 43949
  Payload ID: 8979
  Gene Symbol: KIR2DL4
  Gene Name: killer cell immunoglobulin-like receptor, two domains, long cytoplasmic tail, 4
  ENSP ID: ENSP00000479331

SEQ ID NO: 43957 - protein, 342 aa, Homo sapiens; identical to SEQ ID NO: 43925
  Payload ID: 8979
  Gene Symbol: KIR2DL4
  Gene Name: killer cell immunoglobulin-like receptor, two domains, long cytoplasmic tail, 4
  Uniprot ID: Q99706
  ENSP ID: ENSP00000479347

SEQ ID NO: 43958 - protein, 325 aa, Homo sapiens
  Payload ID: 8979
  Gene Symbol: KIR2DL4
  Gene Name: killer cell immunoglobulin-like receptor, two domains, long cytoplasmic tail, 4
  ENSP ID: ENSP00000479780
MSMSPTVIILACLGFFLDQSVWAHVGGQDKPFCSAWPSAVVPQGGHVTLRCHCRRGFNIFTLYKKDGVPVPELYNRIFWNSFLISPVTPAHAGTYRCRGFHPHSPTEWSAPSNPLVIMVTGLYEKPSLTARPGPTVRAGENVTLSCSSQSSFDIYHLSREGEAHELRLPAVPSINGTFQADFPLGPATHGETYRCFGSFHGSPYEWSDPSDPLPVSVTDAAVMNQEPAGHRTVNREDSDEQDPQEVTYAQLDHCIFTQRKITGPSQRSKRPSTDTSVCIELPNAEPRALSPAHEHHSQALMGSSRETTALSQTQLASSNVPAAGI

SEQ ID NO: 43959 - protein, 230 aa, Homo sapiens; identical to SEQ ID NO: 43931
  Payload ID: 8979
  Gene Symbol: KIR2DL4
  Gene Name: killer cell immunoglobulin-like receptor, two domains, long cytoplasmic tail, 4
  Uniprot ID: Q99706
  ENSP ID: ENSP00000479874

SEQ ID NO: 43960 - protein, 342 aa, Homo sapiens; identical to SEQ ID NO: 43949
  Payload ID: 8979
  Gene Symbol: KIR2DL4
  Gene Name: killer cell immunoglobulin-like receptor, two domains, long cytoplasmic tail, 4
  ENSP ID: ENSP00000479925

SEQ ID NO: 43961 - protein, 273 aa, Homo sapiens; identical to SEQ ID NO: 43928
  Payload ID: 8979
  Gene Symbol: KIR2DL4
  Gene Name: killer cell immunoglobulin-like receptor, two domains, long cytoplasmic tail, 4
  ENSP ID: ENSP00000479993

SEQ ID NO: 43962 - protein, 360 aa, Homo sapiens
  Payload ID: 8979
  Gene Symbol: KIR2DL4
  Gene Name: killer cell immunoglobulin-like receptor, two domains, long cytoplasmic tail, 4
  ENSP ID: ENSP00000480075
MSMSPTVIILACLGFFLDQSVWAHVGGQDKPFCSAWPSAVVPQGGHVTLRCHYRRGFNIFTLYKKDGVPVPELYNRIFWNSFLISPVTPAHAGTYRCRGFHPHSPTEWSAPSNPLVIMVTGLYEKPSLTARLGPTVRAGENVTLSCSSQSSFDIYHLSREGEAHELRLPAVPSINGTFQADFPLGPATHGETYRCFGSFHGSPYEWSDPSDPLPVSVTGIARHLHAVIRYSVAIILFTILPFFLLHRWCSKKKNAAVMNQEPAGHRTVNREDSDEQDPQEVTYAQLDHCIFTQRKITGPSQRSKRPSTDTSVCIELPNAEPRALSPAHEHHSQALMGSSRETTALSQTQLASSNVPAAGI

SEQ ID NO: 43963 - protein, 416 aa, Homo sapiens; identical to SEQ ID NO: 43929
  Payload ID: 8979
  Gene Symbol: KIR2DL4
  Gene Name: killer cell immunoglobulin-like receptor, two domains, long cytoplasmic tail, 4
  ENSP ID: ENSP00000480197

SEQ ID NO: 43964 - protein, 342 aa, Homo sapiens; identical to SEQ ID NO: 43949
  Payload ID: 8979
  Gene Symbol: KIR2DL4
  Gene Name: killer cell immunoglobulin-like receptor, two domains, long cytoplasmic tail, 4
  ENSP ID: ENSP00000480253

SEQ ID NO: 43965 - protein, 416 aa, Homo sapiens
  Payload ID: 8979
  Gene Symbol: KIR2DL4
  Gene Name: killer cell immunoglobulin-like receptor, two domains, long cytoplasmic tail, 4
  ENSP ID: ENSP00000480775
MSPSHVVVNVSTARSGPLTTSSAPVSRAESLRPGSRSCTMSMSPTVIILACLGFFLDQSVWAHVGGQDKPFCSAWPSAVVPQGGHVTLRCHCRRGFNIFTLYKKDGVPVPELYNRIFWNSFLISPVTPAHAGTYRCRGFHPHSPTEWSAPSNPLVIMVTGLYEKPSLTARPGPTVRAGENVTLSCSSQSSFDIYHLSREGEAHELRLPAVPSINGTFQADFPLGPATHGETYRCFGSFHGSPYEWSDPSDPLPVSVTGNPSSSWPSPTEPSFKTGIARHLHAVIRYSVAIILFTILPFFLLHRWCSKKKDAAVMNQEPAGHRTVNREDSDEQDPQEVTYAQLDHCIFTQRKITGPSQRSKRPSTDTSVCIELPNAEPRALSPAHEHHSQALMGSSRETTALSQTQLASSNVPAAGI

SEQ ID NO: 43966 - protein, 377 aa, Homo sapiens; identical to SEQ ID NO: 43936
  Payload ID: 8979
  Gene Symbol: KIR2DL4
  Gene Name: killer cell immunoglobulin-like receptor, two domains, long cytoplasmic tail, 4
  Uniprot ID: Q99706
  ENSP ID: ENSP00000480801

SEQ ID NO: 43967 - protein, 377 aa, Homo sapiens
  Payload ID: 8979
  Gene Symbol: KIR2DL4
  Gene Name: killer cell immunoglobulin-like receptor, two domains, long cytoplasmic tail, 4
  ENSP ID: ENSP00000480838
MSMSPTVIILACLGFFLDQSVWAHVGGQDKPFCSAWPSAVVPQGGHVTLRCHYRRGFNIFTLYKKDGVPVPELYNRIFWNSFLISPVTPAHAGTYRCRGFHPHSPTEWSAPSNPLVIMVTGLYEKPSLTARLGPTVRAGENVTLSCSSQSSFDIYHLSREGEAHELRLPAVPSINGTFQADFPLGPATHGETYRCFGSFHGSPYEWSDPSDPLPVSVTGNPSSSWPSPTEPSFKTGIARHLHAVIRYSVAIILFTILPFFLLHRWCSKKKNAAVMNQEPAGHRTVNREDSDEQDPQEVTYAQLDHCIFTQRKITGPSQRSKRPSTDTSVCIELPNAEPRALSPAHEHHSQALMGSSRETTALSQTQLASSNVPAAGI

SEQ ID NO: 43968 - protein, 273 aa, Homo sapiens; identical to SEQ ID NO: 43943
  Payload ID: 8979
  Gene Symbol: KIR2DL4
  Gene Name: killer cell immunoglobulin-like receptor, two domains, long cytoplasmic tail, 4
  ENSP ID: ENSP00000480840

SEQ ID NO: 43969 - protein, 342 aa, Homo sapiens; identical to SEQ ID NO: 43942
  Payload ID: 8979
  Gene Symbol: KIR2DL4
  Gene Name: killer cell immunoglobulin-like receptor, two domains, long cytoplasmic tail, 4
  ENSP ID: ENSP00000481043

SEQ ID NO: 43970 - protein, 377 aa, Homo sapiens; identical to SEQ ID NO: 43936
  Payload ID: 8979
  Gene Symbol: KIR2DL4
  Gene Name: killer cell immunoglobulin-like receptor, two domains, long cytoplasmic tail, 4
  ENSP ID: ENSP00000481210

SEQ ID NO: 43971 - protein, 342 aa, Homo sapiens; identical to SEQ ID NO: 43949
  Payload ID: 8979
  Gene Symbol: KIR2DL4
  Gene Name: killer cell immunoglobulin-like receptor, two domains, long cytoplasmic tail, 4
  ENSP ID: ENSP00000481229

SEQ ID NO: 43972 - protein, 310 aa, Homo sapiens
  Payload ID: 8979
  Gene Symbol: KIR2DL4
  Gene Name: killer cell immunoglobulin-like receptor, two domains, long cytoplasmic tail, 4
  ENSP ID: ENSP00000481333
MSPTVIILACLGFFLDQSVWAHVGGQDKPFCSAWPSAVVPQGGHVTLRCHYRRGFNIFTLYKKDGVPVPELYNRIFWNSFLISPVTPAHAGTYRCRGFHPHSPTEWSAPSNPLVIMVTGLYEKPSLTARPGPTVRTGENVTLSCSSQSSFDIYHLSREGEAHELRLPAVPSINGTFQADFPLGPATHGETYRCFGSFHGSPYEWSDASDPLPVSVTGNPSSSWPSPTEPSFKTGIARHLHAVIRYSVAIILFTILPFFLLHRWCSKKKSKPHEAEARELRALCGSRMGARRCCCNEPRACGTQNSEQGGL

SEQ ID NO: 43973 - protein, 399 aa, Homo sapiens
  Payload ID: 8979
  Gene Symbol: KIR2DL4
  Gene Name: killer cell immunoglobulin-like receptor, two domains, long cytoplasmic tail, 4
  ENSP ID: ENSP00000481431
MSMSPTVIILACLGFFLDQSVWAHVGGQDKPFCSAWPSAVVPQGGHVTLRCHCRRGFNIFTLYKKDGVPVPELYNRIFWNSFLISPVTPAHAGTYRCRGFHPHSPTEWSAPSNPLVIMVTGLYEKPSLTARPGPTVRAGENVTLSCSSQSSFDIYHLSREGEAHELRLPAVPSINGTFQADFPLGPATHGETYRCFGSFHGSPYEWSDPSDPLPVSVTGNPSSSWPSPTEPSFKTGIARHLHAVIRYSVAIILFTILPFFLLHRWCSKKKVSLTKQRPENSGPCAEAGWEHADAAVMNQEPAGHRTVNREDSDEQDPQEVTYAQLDHCIFTQRKITGPSQRSKRPSTDTSVCIELPNAEPRALSPAHEHHSQALMGSSRETTALSQTQLASSNVPAAGI

SEQ ID NO: 43974 - protein, 312 aa, Homo sapiens
  Payload ID: 8979
  Gene Symbol: KIR2DL4
  Gene Name: killer cell immunoglobulin-like receptor, two domains, long cytoplasmic tail, 4
  ENSP ID: ENSP00000481574
MSMSPTVIILACLGFFLDQSVWAHVGGQDKPFCSAWPSAVVPQGGHVTLRCHCRRGFNIFTLYKKDGVPVPELYNRIFWNSFLISPVTPAHAGTYRCRGFHPHSPTEWSAPSNPLVIMVTGLYEKPSLTARPGPTVRAGENVTLSCSSQSSFDIYHLSREGEAHELRLPAVPSINGTFQADFPLGPATHGETYRCFGSFHGSPYEWSDPSDPLPVSVTGNPSSSWPSPTEPSFKTGIARHLHAVIRYSVAIILFTILPFFLLHRWCSKKKSKPHEAEARELRALCGSRMGARRCCCNEPRACGTQNSEQGGL

SEQ ID NO: 43975 - protein, 416 aa, Homo sapiens; identical to SEQ ID NO: 43965
  Payload ID: 8979
  Gene Symbol: KIR2DL4
  Gene Name: killer cell immunoglobulin-like receptor, two domains, long cytoplasmic tail, 4
  ENSP ID: ENSP00000481866

SEQ ID NO: 43976 - protein, 416 aa, Homo sapiens; identical to SEQ ID NO: 43965
  Payload ID: 8979
  Gene Symbol: KIR2DL4
  Gene Name: killer cell immunoglobulin-like receptor, two domains, long cytoplasmic tail, 4
  ENSP ID: ENSP00000481870

SEQ ID NO: 43977 - protein, 245 aa, Homo sapiens; identical to SEQ ID NO: 43935
  Payload ID: 8979
  Gene Symbol: KIR2DL4
  Gene Name: killer cell immunoglobulin-like receptor, two domains, long cytoplasmic tail, 4
  ENSP ID: ENSP00000481942

SEQ ID NO: 43978 - protein, 342 aa, Homo sapiens; identical to SEQ ID NO: 43949
  Payload ID: 8979
  Gene Symbol: KIR2DL4
  Gene Name: killer cell immunoglobulin-like receptor, two domains, long cytoplasmic tail, 4
  ENSP ID: ENSP00000482186

SEQ ID NO: 43979 - protein, 377 aa, Homo sapiens; identical to SEQ ID NO: 43936
  Payload ID: 8979
  Gene Symbol: KIR2DL4
  Gene Name: killer cell immunoglobulin-like receptor, two domains, long cytoplasmic tail, 4
  Uniprot ID: Q99706
  ENSP ID: ENSP00000482206

SEQ ID NO: 43980 - protein, 342 aa, Homo sapiens; identical to SEQ ID NO: 43949
  Payload ID: 8979
  Gene Symbol: KIR2DL4
  Gene Name: killer cell immunoglobulin-like receptor, two domains, long cytoplasmic tail, 4
  ENSP ID: ENSP00000482217

SEQ ID NO: 43981 - protein, 377 aa, Homo sapiens; identical to SEQ ID NO: 43936
  Payload ID: 8979
  Gene Symbol: KIR2DL4
  Gene Name: killer cell immunoglobulin-like receptor, two domains, long cytoplasmic tail, 4
  Uniprot ID: Q99706
  ENSP ID: ENSP00000482383

SEQ ID NO: 43982 - protein, 325 aa, Homo sapiens
  Payload ID: 8979
  Gene Symbol: KIR2DL4
  Gene Name: killer cell immunoglobulin-like receptor, two domains, long cytoplasmic tail, 4
  ENSP ID: ENSP00000482420
MSMSPTVIILACLGFFLDQSVWAHVGGQDKPFCSAWPSAVVPQGGHVTLRCHYRRGFNIFTLYKKDGVPVPELYNRIFWNSFLISPVTPAHAGTYRCRGFHPHSPTEWSAPSNPLVIMVTGLYEKPSLTARPGPTVRTGENVTLSCSSQSSFDIYHLSREGEAHELRLPAVPSINGTFQADFPLGPATHGETYRCFGSFHGSPYEWSDASDPLPVSVTDAAVMNQEPAGHRTVNREDSDEQDPQEVTYAQLDHCIFTQRKITGPSQRSKRPSTDTSVCIELPNAEPRALSPAHEHHSQALMGSSRETTALSQTQLASSNVPAAGI

SEQ ID NO: 43983 - protein, 360 aa, Homo sapiens; identical to SEQ ID NO: 43954
  Payload ID: 8979
  Gene Symbol: KIR2DL4
  Gene Name: killer cell immunoglobulin-like receptor, two domains, long cytoplasmic tail, 4
  Uniprot ID: Q99706
  ENSP ID: ENSP00000482452

SEQ ID NO: 43984 - protein, 325 aa, Homo sapiens; identical to SEQ ID NO: 43927
  Payload ID: 8979
  Gene Symbol: KIR2DL4
  Gene Name: killer cell immunoglobulin-like receptor, two domains, long cytoplasmic tail, 4
  Uniprot ID: Q99706
  ENSP ID: ENSP00000482454

SEQ ID NO: 43985 - protein, 273 aa, Homo sapiens
  Payload ID: 8979
  Gene Symbol: KIR2DL4
  Gene Name: killer cell immunoglobulin-like receptor, two domains, long cytoplasmic tail, 4
  ENSP ID: ENSP00000482730
MSMSPTVIILACLGFFLDQSVWAHVGGQDKPFCSAWPSAVVPQGGHVTLRCHYRRGFNIFTLYKKDGVPVPELYNRIFWNSFLISPVTPAHAGTYRCRGFHPHSPTEWSAPSNPLVIMVTGLYEKPSLTARPGPTVRTGENVTLSCSSQSSFDIYHLSREGEAHELRLPAVPSINGTFQADFPLGPATHGETYRCFGSFHGSPYEWSDASDPLPVSVTGNPSSSWPSPTEPSFKTGIARHLHAVIRYSVAIILFTILPFFLLHRWCSKKKMLL

SEQ ID NO: 43986 - protein, 377 aa, Homo sapiens; identical to SEQ ID NO: 43947
  Payload ID: 8979
  Gene Symbol: KIR2DL4
  Gene Name: killer cell immunoglobulin-like receptor, two domains, long cytoplasmic tail, 4
  ENSP ID: ENSP00000482918

SEQ ID NO: 43987 - protein, 325 aa, Homo sapiens; identical to SEQ ID NO: 43958
  Payload ID: 8979
  Gene Symbol: KIR2DL4
  Gene Name: killer cell immunoglobulin-like receptor, two domains, long cytoplasmic tail, 4
  ENSP ID: ENSP00000482972

SEQ ID NO: 43988 - protein, 377 aa, Homo sapiens; identical to SEQ ID NO: 43936
  Payload ID: 8979
  Gene Symbol: KIR2DL4
  Gene Name: killer cell immunoglobulin-like receptor, two domains, long cytoplasmic tail, 4
  Uniprot ID: Q99706
  ENSP ID: ENSP00000483101

SEQ ID NO: 43989 - protein, 377 aa, Homo sapiens; identical to SEQ ID NO: 43947
  Payload ID: 8979
  Gene Symbol: KIR2DL4
  Gene Name: killer cell immunoglobulin-like receptor, two domains, long cytoplasmic tail, 4
  ENSP ID: ENSP00000483336

SEQ ID NO: 43990 - protein, 342 aa, Homo sapiens
  Payload ID: 8979
  Gene Symbol: KIR2DL4
  Gene Name: killer cell immunoglobulin-like receptor, two domains, long cytoplasmic tail, 4
  ENSP ID: ENSP00000483440
MSMSPTVIILACLGFFLDQSVWAHVGGQDKPFCSAWPSAVVPQGGHVTLRCHYRRGFNIFTLYKKDGVPVPELYNRIFWNSFLISPVTPAHAGTYRCRGFHPHSPTEWSAPSNPLVIMVTGLYEKPSLTARLGPTVRAGENVTLSCSSQSSFDIYHLSREGEAHELRLPAVPSINGTFQADFPLGPATHGETYRCFGSFHGSPYEWSDPSDPLPVSVTGNPSSSWPSPTEPSFKTDAAVMNQEPAGHRTVNREDSDEQDPQEVTYAQLDHCIFTQRKITGPSQRSKRPSTDTSVCIELPNAEPRALSPAHEHHSQALMGSSRETTALSQTQLASSNVPAAGI

SEQ ID NO: 43991 - protein, 416 aa, Homo sapiens
  Payload ID: 8979
  Gene Symbol: KIR2DL4
  Gene Name: killer cell immunoglobulin-like receptor, two domains, long cytoplasmic tail, 4
  ENSP ID: ENSP00000483583
MSPSHVVVNVSTARSGPLTTSSAPVSRAESLRPGSRSCTMSMSPTVIILACLGFFLDQSVWAHVGGQDKPFCSAWPSAVVPQGGHVTLRCHCRRGFNIFTLYKKDGVPVPELYNRIFWNSFLISPVTPAHAGTYRCRGFHPHSPTEWSAPSNPLVIMVTGLYEKPSLTARPGPTVRAGENVTLSCSSQSSFDIYHLSREGEAHELRLPAVPSINGTFQADFPLGPATHGETYRCFGSFHGSPYEWSDPSDPLPVSVTGNPSSSWPSPTEPSFKTGIARHLHAVIRYSVAIILFTILPFFLLHRWCSKKKNAAVMNQEPAGHRTVNREDSDEQDPQEVTYAQLDHCIFTQRKITGPSQRSKRPSTDTSVCIELPNAEPRALSPAHEHHSQALMGSSRETTALSQTQLASSNVPAAGI

SEQ ID NO: 43992 - protein, 377 aa, Homo sapiens; identical to SEQ ID NO: 43936
  Payload ID: 8979
  Gene Symbol: KIR2DL4
  Gene Name: killer cell immunoglobulin-like receptor, two domains, long cytoplasmic tail, 4
  Uniprot ID: Q99706
  ENSP ID: ENSP00000483782

SEQ ID NO: 43993 - protein, 342 aa, Homo sapiens; identical to SEQ ID NO: 43949
  Payload ID: 8979
  Gene Symbol: KIR2DL4
  Gene Name: killer cell immunoglobulin-like receptor, two domains, long cytoplasmic tail, 4
  ENSP ID: ENSP00000483788

SEQ ID NO: 43994 - protein, 416 aa, Homo sapiens; identical to SEQ ID NO: 43929
  Payload ID: 8979
  Gene Symbol: KIR2DL4
  Gene Name: killer cell immunoglobulin-like receptor, two domains, long cytoplasmic tail, 4
  ENSP ID: ENSP00000483924

SEQ ID NO: 43995 - protein, 273 aa, Homo sapiens; identical to SEQ ID NO: 43943
  Payload ID: 8979
  Gene Symbol: KIR2DL4
  Gene Name: killer cell immunoglobulin-like receptor, two domains, long cytoplasmic tail, 4
  ENSP ID: ENSP00000483940

SEQ ID NO: 43996 - protein, 325 aa, Homo sapiens
  Payload ID: 8979
  Gene Symbol: KIR2DL4
  Gene Name: killer cell immunoglobulin-like receptor, two domains, long cytoplasmic tail, 4
  ENSP ID: ENSP00000484002
MSMSPTVIILACLGFFLDQSVWAHVGGQDKPFCSAWPSAVVPQGGHVTLRCHYRRGFNIFTLYKKDGVPVPELYNRIFWNSFLISPVTPAHAGTYRCRGFHPHSPTEWSAPSNPLVIMVTGLYEKPSLTARLGPTVRAGENVTLSCSSQSSFDIYHLSREGEAHELRLPAVPSINGTFQADFPLGPATHGETYRCFGSFHGSPYEWSDPSDPLPVSVTDAAVMNQEPAGHRTVNREDSDEQDPQEVTYAQLDHCIFTQRKITGPSQRSKRPSTDTSVCIELPNAEPRALSPAHEHHSQALMGSSRETTALSQTQLASSNVPAAGI

SEQ ID NO: 43997 - protein, 273 aa, Homo sapiens; identical to SEQ ID NO: 43928
  Payload ID: 8979
  Gene Symbol: KIR2DL4
  Gene Name: killer cell immunoglobulin-like receptor, two domains, long cytoplasmic tail, 4
  ENSP ID: ENSP00000484019

SEQ ID NO: 43998 - protein, 416 aa, Homo sapiens; identical to SEQ ID NO: 43929
  Payload ID: 8979
  Gene Symbol: KIR2DL4
  Gene Name: killer cell immunoglobulin-like receptor, two domains, long cytoplasmic tail, 4
  ENSP ID: ENSP00000484114

SEQ ID NO: 43999 - protein, 377 aa, Homo sapiens; identical to SEQ ID NO: 43967
  Payload ID: 8979
  Gene Symbol: KIR2DL4
  Gene Name: killer cell immunoglobulin-like receptor, two domains, long cytoplasmic tail, 4
  ENSP ID: ENSP00000484152

SEQ ID NO: 44000 - protein, 377 aa, Homo sapiens; identical to SEQ ID NO: 43947
  Payload ID: 8979
  Gene Symbol: KIR2DL4
  Gene Name: killer cell immunoglobulin-like receptor, two domains, long cytoplasmic tail, 4
  ENSP ID: ENSP00000484171

SEQ ID NO: 44001 - protein, 342 aa, Homo sapiens; identical to SEQ ID NO: 43942
  Payload ID: 8979
  Gene Symbol: KIR2DL4
  Gene Name: killer cell immunoglobulin-like receptor, two domains, long cytoplasmic tail, 4
  ENSP ID: ENSP00000484194

SEQ ID NO: 44002 - protein, 273 aa, Homo sapiens; identical to SEQ ID NO: 43928
  Payload ID: 8979
  Gene Symbol: KIR2DL4
  Gene Name: killer cell immunoglobulin-like receptor, two domains, long cytoplasmic tail, 4
  ENSP ID: ENSP00000484307

SEQ ID NO: 44003 - protein, 399 aa, Homo sapiens; identical to SEQ ID NO: 43973
  Payload ID: 8979
  Gene Symbol: KIR2DL4
  Gene Name: killer cell immunoglobulin-like receptor, two domains, long cytoplasmic tail, 4
  ENSP ID: ENSP00000484328

SEQ ID NO: 44004 - protein, 273 aa, Homo sapiens; identical to SEQ ID NO: 43928
  Payload ID: 8979
  Gene Symbol: KIR2DL4
  Gene Name: killer cell immunoglobulin-like receptor, two domains, long cytoplasmic tail, 4
  ENSP ID: ENSP00000484336

SEQ ID NO: 44005 - protein, 377 aa, Homo sapiens; identical to SEQ ID NO: 43936
  Payload ID: 8979
  Gene Symbol: KIR2DL4
  Gene Name: killer cell immunoglobulin-like receptor, two domains, long cytoplasmic tail, 4
  Uniprot ID: Q99706
  ENSP ID: ENSP00000484389

SEQ ID NO: 44006 - protein, 342 aa, Homo sapiens; identical to SEQ ID NO: 43925
  Payload ID: 8979
  Gene Symbol: KIR2DL4
  Gene Name: killer cell immunoglobulin-like receptor, two domains, long cytoplasmic tail, 4
  Uniprot ID: Q99706
  ENSP ID: ENSP00000484469

SEQ ID NO: 44007 - protein, 230 aa, Homo sapiens; identical to SEQ ID NO: 43934
  Payload ID: 8979
  Gene Symbol: KIR2DL4
  Gene Name: killer cell immunoglobulin-like receptor, two domains, long cytoplasmic tail, 4
  ENSP ID: ENSP00000484737

SEQ ID NO: 44008 - protein, 416 aa, Homo sapiens; identical to SEQ ID NO: 43929
  Payload ID: 8979
  Gene Symbol: KIR2DL4
  Gene Name: killer cell immunoglobulin-like receptor, two domains, long cytoplasmic tail, 4
  ENSP ID: ENSP00000484815

SEQ ID NO: 44009 - protein, 256 aa, Homo sapiens
  Payload ID: 8979
  Gene Symbol: KIR2DL4
  Gene Name: killer cell immunoglobulin-like receptor, two domains, long cytoplasmic tail, 4
  ENSP ID: ENSP00000484890
MSMSPTVIILACLGFFLDQSVWAHVGGQDKPFCSAWPSAVVPQGGHVTLRCHYRRGFNIFTLYKKDGVPVPELYNRIFWNSFLISPVTPAHAGTYRCRGFHPHSPTEWSAPSNPLVIMVTGLYEKPSLTARPGPTVRAGENVTLSCSSQSSFDIYHLSREGEAHELRLPAVPSINGTFQADFPLGPATHGETYRCFGSFHGSPYEWSDPSDPLPVSVTGIARHLHAVIRYSVAIILFTILPFFLLHRWCSKKKMLL

SEQ ID NO: 44010 - protein, 375 aa, Homo sapiens
  Payload ID: 8980
  Gene Symbol: KIR2DL5A
  Gene Name: killer cell immunoglobulin-like receptor, two domains, long cytoplasmic tail, 5A
  ENSP ID: ENSP00000478053
MSLMVVSMACVGFFLLQGAWTHEGGQDKPLLSAWPSAVVPRGGHVTLLCRSRLGFTIFSLYKEDGVPVPELYNKIFWKSILMGPVTPAHAGTYRCRGSHPRSPIEWSAPSNPLVIVVTGLFGKPSLSAQPGPTVRTGENVTLSCSSRSSFDMYHLSREGRAHEPRLPAVPSVDGTFQADFPLGPATHGGTYTCFSSLHDSPYEWSDPSDPLLVSVTGNSSSSSSSPTEPSSKTGIRRHLHILIGTSVAIILFIILFFFLLHCCCSNKKNAAVMDQEPAGDRTVNREDSDDQDPQEVTYAQLDHCVFTQTKITSPSQRPKTPPTDTTMYMELPNAKPRSLSPAHKHHSQALRGSSRETTALSQNRVASSHVPAAGI

SEQ ID NO: 44011 - protein, 375 aa, Homo sapiens
  Payload ID: 8980
  Gene Symbol: KIR2DL5A
  Gene Name: killer cell immunoglobulin-like receptor, two domains, long cytoplasmic tail, 5A
  Uniprot ID: Q8N109
  ENSP ID: ENSP00000479384
MSLMVISMACVGFFLLQGAWTHEGGQDKPLLSAWPSAVVPRGGHVTLLCRSRLGFTIFSLYKEDGVPVPELYNKIFWKSILMGPVTPAHAGTYRCRGSHPRSPIEWSAPSNPLVIVVTGLFGKPSLSAQPGPTVRTGENVTLSCSSRSSFDMYHLSREGRAHEPRLPAVPSVNGTFQADFPLGPATHGGTYTCFGSLHDSPYEWSDPSDPLLVSVTGNSSSSSSSPTEPSSKTGIRRHLHILIGTSVAIILFIILFFFLLHCCCSNKKNAAVMDQEPAGDRTVNREDSDDQDPQEVTYAQLDHCVFTQTKITSPSQRPKTPPTDTTMYMELPNAKPRSLSPAHKHHSQALRGSSRETTALSQNRVASSHVPAAGI

SEQ ID NO: 44012 - protein, 375 aa, Homo sapiens
  Payload ID: 8980
  Gene Symbol: KIR2DL5A
  Gene Name: killer cell immunoglobulin-like receptor, two domains, long cytoplasmic tail, 5A
  ENSP ID: ENSP00000480340
MSLMVISMACVGFFLLQGAWTHEGGQDKPLLSAWPSAVVPRGGHVTLLCRSRLGFTIFSLYKEDGVPVPELYNKIFWKSILMGPVTPAHAGTYRCRGSHPRSPIEWSAPSNPLVIVVTGLFGKPSLSAQPGPTVRTGENVTLSCSSRSSFDMYHLSREGRAHEPRLPAVPSVDGTFQADFPLGPATHGGTYTCFSSLHDSPYEWSDPSDPLLVSVTGNSSSSSSSPTEPSSKTGIRRHLHILIGTSVAIILFIILFFFLLHCCCSNKKNAAVMDQEPAGDRTVNREDSDDQDPQEVTYAQLDHCVFTQTKITSPSQRPKTPPTDTTMYMELPNAKPRSLSPAHKHHSQALRGSSRETTALSQNRVASSHVPAAGI

SEQ ID NO: 44013 - protein, 375 aa, Homo sapiens; identical to SEQ ID NO: 44011
  Payload ID: 8980
  Gene Symbol: KIR2DL5A
  Gene Name: killer cell immunoglobulin-like receptor, two domains, long cytoplasmic tail, 5A
  Uniprot ID: Q8N109
  ENSP ID: ENSP00000483324

SEQ ID NO: 44014 - protein, 375 aa, Homo sapiens; identical to SEQ ID NO: 44012
  Payload ID: 8980
  Gene Symbol: KIR2DL5A
  Gene Name: killer cell immunoglobulin-like receptor, two domains, long cytoplasmic tail, 5A
  ENSP ID: ENSP00000483518

SEQ ID NO: 44015 - protein, 375 aa, Homo sapiens; identical to SEQ ID NO: 44012
  Payload ID: 8980
  Gene Symbol: KIR2DL5A
  Gene Name: killer cell immunoglobulin-like receptor, two domains, long cytoplasmic tail, 5A
  ENSP ID: ENSP00000484057

SEQ ID NO: 44016 - protein, 375 aa, Homo sapiens; identical to SEQ ID NO: 44010
  Payload ID: 8980
  Gene Symbol: KIR2DL5A
  Gene Name: killer cell immunoglobulin-like receptor, two domains, long cytoplasmic tail, 5A
  ENSP ID: ENSP00000484203

SEQ ID NO: 44017 - protein, 375 aa, Homo sapiens; identical to SEQ ID NO: 44011
  Payload ID: 8980
  Gene Symbol: KIR2DL5A
  Gene Name: killer cell immunoglobulin-like receptor, two domains, long cytoplasmic tail, 5A
  Uniprot ID: Q8N109
  ENSP ID: ENSP00000484296

SEQ ID NO: 44018 - protein, 375 aa, Homo sapiens; identical to SEQ ID NO: 44012
  Payload ID: 8980
  Gene Symbol: KIR2DL5A
  Gene Name: killer cell immunoglobulin-like receptor, two domains, long cytoplasmic tail, 5A
  ENSP ID: ENSP00000484937

SEQ ID NO: 44019 - protein, 375 aa, Homo sapiens
  Payload ID: 8981
  Gene Symbol: KIR2DL5B
  Gene Name: killer cell immunoglobulin-like receptor, two domains, long cytoplasmic tail, 5B
  ENSP ID: ENSP00000478635
MSLMVVSMACVGFFLLQGAWPHEGGQDKPLLSAWPSAVVPRGGHVTLLCRSRLGFTIFSLYKEDGVPVPELYNKIFWKSILMGPVTPAHAGTYRCRGSHPRSPIEWSAPSNPLVIVVTGLFGKPSLSAQPGPTVRTGENVTLSCSSRSSFDMYHLSREGRAHEPRLPAVPSVNGTFQADFPLGPATHGGTYTCFGSLHDSPYEWSDPSDPLLVSVTGNSSSSSSSPTEPSSKTGIRRHLHILIGTSVAIILFIILFFFLLHCCCSNKKNAAVMDQEPAGDRTVNREDSDDQDPQEVTYAQLDHCVFTQTKITSPSQRPKTPPTDTTMYMELPNAKPRSLSPAHKHHSQALRGSSRETTALSQNRVASSHVPAAGI

SEQ ID NO: 44020 - protein, 375 aa, Homo sapiens; identical to SEQ ID NO: 44010
  Payload ID: 8981
  Gene Symbol: KIR2DL5B
  Gene Name: killer cell immunoglobulin-like receptor, two domains, long cytoplasmic tail, 5B
  ENSP ID: ENSP00000479965

SEQ ID NO: 44021 - protein, 375 aa, Homo sapiens
  Payload ID: 8981
  Gene Symbol: KIR2DL5B
  Gene Name: killer cell immunoglobulin-like receptor, two domains, long cytoplasmic tail, 5B
  ENSP ID: ENSP00000480770
MSLMVVSMACVGFFLLQGAWTHEGGQDKPLLSAWPSTVVPRGGHVTLLCRSRLGFTIFSLYKEDGVPVPELYNKIFWKSILMGPVTPAHAGTYRCRGSHPRSPIEWSAPSNPLVIVVTGLFGKPSLSAQPGPTVRTGENVTLSCSSRSSFDMYHLSREGRAHEPRLPAVPSVNGTFQADFPLGPATHGGTYTCFGSLHDSPYEWSDPSDPLLVSVTGNSSSSSSSPTEPSSKTGIRRHLHILIGTSVAIILFIILFFFLLHCCCSNKKNAAVMDQEPAGDRTVNREDSDDQDPQEVTYAQLDHCVFTQTKITSPSQRPKTPPTDTTMYMELPNAKPRSLSPAHKHHSQALRGSSRETTALSQNRVASSHVPAAGI

SEQ ID NO: 44022 - protein, 375 aa, Homo sapiens; identical to SEQ ID NO: 44010
  Payload ID: 8981
  Gene Symbol: KIR2DL5B
  Gene Name: killer cell immunoglobulin-like receptor, two domains, long cytoplasmic tail, 5B
  ENSP ID: ENSP00000480935

SEQ ID NO: 44023 - protein, 375 aa, Homo sapiens
  Payload ID: 8981
  Gene Symbol: KIR2DL5B
  Gene Name: killer cell immunoglobulin-like receptor, two domains, long cytoplasmic tail, 5B
  ENSP ID: ENSP00000482904
MSLMVVSMACVGFFLLQGAWTHEGGQDKPLLSAWPSAVVPRGGHVTLLCRSRLGFTIFSLYKEDGVPVPELYNKIFWKSILMGPVTPAHAGTYRCRGSHPRSPIEWSAPSNPLVIVVTGLFGKPSLSAQPGPTVRTGENVTLSCSSRSSFDMYHLSREGRAHEPRLPAVPSVNGTFQADFPLGPATHGGTYTCFGSLHDSPYEWSDPSDPLLVSVTGNSSSSSSSPTEPSSKTGIRRHLHILIGTSVAIILFIILFFFLLHCCCSNKKNAAVMDQEPAGDRTVNREDSDDQDPQEVTYAQLDHCVFTQTKITSPSQRPKTPPTDTTMYMELPNAKPRSLSPAHKHHSQALRGSSRETTALSQNRVASSHVPAAGI

SEQ ID NO: 44024 - protein, 375 aa, Homo sapiens; identical to SEQ ID NO: 44019
  Payload ID: 8981
  Gene Symbol: KIR2DL5B
  Gene Name: killer cell immunoglobulin-like receptor, two domains, long cytoplasmic tail, 5B
  ENSP ID: ENSP00000483362

SEQ ID NO: 44025 - protein, 375 aa, Homo sapiens; identical to SEQ ID NO: 44021
  Payload ID: 8981
  Gene Symbol: KIR2DL5B
  Gene Name: killer cell immunoglobulin-like receptor, two domains, long cytoplasmic tail, 5B
  ENSP ID: ENSP00000483776

SEQ ID NO: 44026 - protein, 375 aa, Homo sapiens; identical to SEQ ID NO: 44023
  Payload ID: 8981
  Gene Symbol: KIR2DL5B
  Gene Name: killer cell immunoglobulin-like receptor, two domains, long cytoplasmic tail, 5B
  ENSP ID: ENSP00000484782

SEQ ID NO: 44027 - protein, 304 aa, Homo sapiens
  Payload ID: 8982
  Gene Symbol: KIR2DP1
  Gene Name: killer cell immunoglobulin-like receptor, two domains, pseudogene 1
  ENSP ID: ENSP00000477761
MSLMVVSMACVGFFLLQGAWPHEGVHRKPSLLAHPGPLVKSEETVILQCWSDVRFQHFLLHREGKFKDTLHLIGEHHDGVSKANFSIGPMMQDLAGTYRCYGSVTHSPYQLSAPSDPLDIVITGLYEKPSLSAQPGPTVLAGESVTLSCSSRSSYDMYHLSREGEAHERRFSAGPKVNGTFQADFPLGPATHGGTYRCFGSFRDSPYEWSNSSDPLLVSVTGNPSNSWPSPTEPSSKTGNPRHLHVLIGTSVVIILFILLLFFLLHRWCSNKKNAAVMDQEPAGNRTVNSEDSDEQDHQEVSYA

SEQ ID NO: 44028 - protein, 454 aa, Homo sapiens
  Payload ID: 8982
  Gene Symbol: KIR2DP1
  Gene Name: killer cell immunoglobulin-like receptor, two domains, pseudogene 1
  ENSP ID: ENSP00000478427
MSLMVVSMACVGFFLLEGPWPHVGGQDKPFLSAWPGTVVSEGQHVTLQCRSRLGFKEFSLSKEDGMPVPELYNRIFRNSFLMGPVTPAHAGTYRCCSSHPHSPTGWSAPSNPVVIMVTGVHRKPSLLAHPGPLVKSGETVILQCWSDVSFERFLLHREGITEDPLRLVGQLHDAGSQVNYSMGPMTPALAGTYRCFGSVTHLPYELSAPSDPLDIVVVGLYEKPSLSAQPGPTVLAGESVTLSCSSRSSYDMYHLSREGEAHERRFSAGPKVNGTFQADFPLGPATHGGTYRCFGSFRDSPYEWSNSSDPLLVSVTGNPSNSWPSPTEPSSKTGNPRHLHVLIGTSVVIILFILLLFFLLHRWCSNKKNAAVMDQEPAGNRTANSEDSDEQDPQEVTYVQLDHCVFTQRKITRPSQRPKTPPTDTRVYTELPNAESRSKVVSCPAPQSGLEGIF

SEQ ID NO: 44029 - protein, 304 aa, Homo sapiens
  Payload ID: 8982
  Gene Symbol: KIR2DP1
  Gene Name: killer cell immunoglobulin-like receptor, two domains, pseudogene 1
  ENSP ID: ENSP00000481463
MSLMVVSMACVGFFLLQGAWPHEGVHRKPSLLAHPGPLVKSEETVILQCWSDVRFQHFLLHREGKFKDTLHLIGEHHDGVSKANFSIGPMMQDLAGTYRCYGSVTHSPYQLSAPSDPLDIVITGLYEKPSLSAQPGPTVLAGESVTLSCSSRSSYDMYHLSREGEAHERRFSAGPKVNGTFQADFPLGPATHGGTYRCFGSFRDSPYEWSNSSDPLLVSVTGNPSNSWPSPTEPSSKTGNPRHLHVLIGTSVVKIPFTILLFFLLHRWCSDKKNAAVMDQEPAGNRTVNSEDSDEQDHQEVSYA

SEQ ID NO: 44030 - protein, 349 aa, Homo sapiens; identical to SEQ ID NO: 43886
  Payload ID: 8982
  Gene Symbol: KIR2DP1
  Gene Name: killer cell immunoglobulin-like receptor, two domains, pseudogene 1
  ENSP ID: ENSP00000482055

SEQ ID NO: 44031 - protein, 455 aa, Homo sapiens
  Payload ID: 8982
  Gene Symbol: KIR2DP1
  Gene Name: killer cell immunoglobulin-like receptor, two domains, pseudogene 1
  ENSP ID: ENSP00000482505
MSLMVVSMACVGFFLLEGPWPHVGGQDKPFLSAWPGTVVSEGQHVTLQCRSRLGFKEFSLSKEDGMPVPELYNRIFRNSFLMGPVTPAHAGTYRCCSSHPHSPTGWSAPSNPVVIMVTGVHRKPSLLAHPGPLVKSGETVILQCWSDVSFERFLLHREGITEDPLRLVGQLHDAGSQVNYSMGPMTPALAGTYRCFGSVTHLPYELSAPSDPLDIVVVGLYEKPSLSAQPGPTVLAGESVTLSCSSRSSYDMYHLSREGEAHERRFSAGPKVNGTFQADFPLGPATHGGTYRCFGSFRDSPYEWSNSSDPLLVSVTGNPSNSWPSPTEPSSKTGNPRHLHVLIGTSVVIILFILLLFFLLHRWCSNKKNAAVMDQEPAGNRTANSEDSDEQDPQEVTYVQLDHCVFTQRKITRPSQRPKTPPTDTRVYTELPNAESRSKVVSCPRAPQSGLEGIF

SEQ ID NO: 44032 - protein, 349 aa, Homo sapiens; identical to SEQ ID NO: 43902
  Payload ID: 8982
  Gene Symbol: KIR2DP1
  Gene Name: killer cell immunoglobulin-like receptor, two domains, pseudogene 1
  ENSP ID: ENSP00000484356

SEQ ID NO: 44033 - protein, 338 aa, Homo sapiens
  Payload ID: 8982
  Gene Symbol: KIR2DP1
  Gene Name: killer cell immunoglobulin-like receptor, two domains, pseudogene 1
  ENSP ID: ENSP00000484374
MSLMVVSMACVGFFLLQGAWPHEGVHRKPSLLAHPGPLVKSEETVILQCWSDVRFQHFLLHREGKFKDTLHLIGEHHDGVSKANFSIGPMMQDLAGTYRCYGSVTHSPYQLSAPSDPLDIVITGLYEKPSLSAQPGPTVLAGESVTLSCSSRSSYDMYHLSREGEAHERRFSAGPKVNGTFQADFPLGPATHGGTYRCFGSFRDSPYEWSNSSDPLLVSVTGNPSNSWPSPTEPSSKTGNPRHLHVLIGTSVVKIPFTILLFFLLHRWCSDKKNAAVMDQEPAGNRTVNSERKITRPSERPKTPPTDTSMYIELPNAEPRSKVVFCPRAPQSGLEGIF

SEQ ID NO: 44034 - protein, 304 aa, Homo sapiens
  Payload ID: 8983
  Gene Symbol: KIR2DS1
  Gene Name: killer cell immunoglobulin-like receptor, two domains, short cytoplasmic tail, 1
  ENSP ID: ENSP00000478711
MSLTVVSMACVGFFLLQGAWPHEGVHRKPSLLAHPGRLVKSEETVILQCWSDVMFEHFLLHREGMFNDTLRLIGEHHDGVSKANFSISRMKQDLAGTYRCYGSVTHSPYQLSAPSDPLDIVIIGLYEKPSLSAQPGPTVLAGENVTLSCSSRSSYDMYHLSREGEAHERRLPAGTKVNGTFQANFPLGPATHGGTYRCFGSFRDSPYEWSKSSDPLLVSVTGNPSNSWPSPTEPSSETGNPRHLHVLIGTSVVKIPFTILLFFLLHRWCSDKKNAAVMDQEPAGNRTVNSEDSDEQDHQEVSYA

SEQ ID NO: 44035 - protein, 304 aa, Homo sapiens [sequence omitted]

SEQ ID NO: 44036 - protein, 304 aa, Homo sapiens
  Payload ID: 8983
  Gene Symbol: KIR2DS1
  Gene Name: killer cell immunoglobulin-like receptor, two domains, short cytoplasmic tail, 1
  ENSP ID: ENSP00000479102
MSLLVVSMACVGFFLLQGAWPHEGVHRKPSLLAHPGRLVKSEETVILQCWSDVMFEHFLLHREGMFNDTLRLIGEHHDGVSKANFSISRMKQDLAGTYRCYGSVTHSPYQLSAPSDPLDIVIIGLYEKPSLSAQPGPTVLAGENVTLSCSSRSSYDMYHLSREGEAHERRLPAGTKVNGTFQANFPLGPATHGGTYRCFGSFRDSPYEWSKSSDPLLVSVTGNPSNSWPSPTEPSSETGNPRHLHVLIGTSVVKIPFTILLFFLLHRWCSDKKNAAVMDQEPAGNRTVNSEDSDEQDHQEVSYA

SEQ ID NO: 44037 - protein, 304 aa, Homo sapiens; identical to SEQ ID NO: 44036
  Payload ID: 8983
  Gene Symbol: KIR2DS1
  Gene Name: killer cell immunoglobulin-like receptor, two domains, short cytoplasmic tail, 1
  ENSP ID: ENSP00000480228

SEQ ID NO: 44038 - protein, 349 aa, Homo sapiens
  Payload ID: 8983
  Gene Symbol: KIR2DS1
  Gene Name: killer cell immunoglobulin-like receptor, two domains, short cytoplasmic tail, 1
  ENSP ID: ENSP00000481519
MSLLVVSMACVGFFLLQGAWPHEGVHRKPSLLAHPGRLVKSEETVILQCWSDVMFEHFLLHREGMFNDTLRLIGEHHDGVSKANFSISRMKQDLAGTYRCYGSVTHSPYQLSAPSDPLDIVIIGLYEKPSLSAQPGPTVLAGENVTLSCSSRSSYDMYHLSREGEAHERRLPAGTKVNGTFQANFPLGPATHGGTYRCFGSFRDSPYEWSKSSDPLLVSVTGNPSNSWPSPTEPSSETGNPRHLHVLIGTSVVKIPFTILLFFLLHRWCSDKKNAAVMDQEPAGNRTVNSEDSDEQDHQEVSYALDHCVFTQRKITRPSERPKTPPTDTSMYIELPNAEPRSKVVFCPR

SEQ ID NO: 44039 - protein, 304 aa, Homo sapiens; identical to SEQ ID NO: 44034
  Payload ID: 8983
  Gene Symbol: KIR2DS1
  Gene Name: killer cell immunoglobulin-like receptor, two domains, short cytoplasmic tail, 1
  ENSP ID: ENSP00000481628

SEQ ID NO: 44040 - protein, 304 aa, Homo sapiens; identical to SEQ ID NO: 44034
  Payload ID: 8983
  Gene Symbol: KIR2DS1
  Gene Name: killer cell immunoglobulin-like receptor, two domains, short cytoplasmic tail, 1
  ENSP ID: ENSP00000482060

SEQ ID NO: 44041 - protein, 304 aa, Homo sapiens; identical to SEQ ID NO: 44034
  Payload ID: 8983
  Gene Symbol: KIR2DS1
  Gene Name: killer cell immunoglobulin-like receptor, two domains, short cytoplasmic tail, 1
  ENSP ID: ENSP00000482170

SEQ ID NO: 44042 - protein, 304 aa, Homo sapiens; identical to SEQ ID NO: 44034
  Payload ID: 8983
  Gene Symbol: KIR2DS1
  Gene Name: killer cell immunoglobulin-like receptor, two domains, short cytoplasmic tail, 1
  ENSP ID: ENSP00000482900

SEQ ID NO: 44043 - protein, 304 aa, Homo sapiens; identical to SEQ ID NO: 44034
  Payload ID: 8983
  Gene Symbol: KIR2DS1
  Gene Name: killer cell immunoglobulin-like receptor, two domains, short cytoplasmic tail, 1
  ENSP ID: ENSP00000483434

SEQ ID NO: 44044 - protein, 297 aa, Homo sapiens
  Payload ID: 8983
  Gene Symbol: KIR2DS1
  Gene Name: killer cell immunoglobulin-like receptor, two domains, short cytoplasmic tail, 1
  ENSP ID: ENSP00000484939
MACVGFFLLQGAWPHEGVHRKPSLLAHPGRLVKSEETVILQCWSDVMFEHFLLHREGMFNDTLRLIGEHHDGVSKANFSISRMKQDLAGTYRCYGSVTHSPYQLSAPSDPLDIVIIGLYEKPSLSAQPGPTVLAGENVTLSCSSRSSYDMYHLSREGEAHERRLPAGTKVNGTFQANFPLGPATHGGTYRCFGSFRDSPYEWSKSSDPLLVSVTGNPSNSWPSPTEPSSETGNPRHLHVLIGTSVVKIPFTILLFFLLHRWCSDKKNAAVMDQEPAGNRTVNSEDSDEQDHQEVSYA

SEQ ID NO: 44045 - protein, 287 aa, Homo sapiens
  Payload ID: 8984
  Gene Symbol: KIR2DS2
  Gene Name: killer cell immunoglobulin-like receptor, two domains, short cytoplasmic tail, 2
  ENSP ID: ENSP00000477585
MSLMVVSMACVGFFLLQGAWPHEGVHRKPSLLAHPGPLVKSEETVILQCWSDVRFEHFLLHREGKYKDTLHLIGEHHDGVSKANFSIGPMMQDLAGTYRCYGSVTHSPYQLSAPSDPLDIVITGLYEKPSLSAQPGPTVLAGESVTLSCSSRSSYDMYHLSREGEAHERRFSAGPKVNGTFQADFPLGPATHGGTYRCFGSFRDSPYEWSNSSDPLLVSVTGNPRHLHVLIGTSVVKIPFTILLFFLLHRWCSNKKNAAVMDQEPAGNRTVNSEDSDEQDHQEVSYA
